United States Patent Application Publication US 2019/0348154 A1 - sequence listing, part 84

SEQ ID NO: 319855 - DNA, 1332 bp, Pseudomonas aeruginosa
atgaacgtgcacaagatcgtctggcaggaaggcatgctgctgcgcccgcagcacctgcaacacaacgaccgctactacgacaaccagatgaaggcccggacccagttgctgggcagctacaactggggcttcctcgccctggagctggaccgccagttcctcaacatgggcaagctggtgatcagccaggcctccggcgtattgcccgacggcagcctgttcgaactcggtggcaacaccgagccgctcgccctcgacgtgccgcccaatacctcgaacgtgccgatctacctggccctgccgctggtcaccggtaaccacatcgaggcgcgccggccggagcaggccgaggtcctggcgcgctataccgcctacgatctggaggtggcggactccaacgccggcgaggattccatggtgcaggtcagctgcgcgcggccggattttcgcctgctgctcggcgagcagcagagcgaccaggcctacgtcaaactgaaggtggcggtggtgctggataccacgccggacggggtgatcagcctcgaccccgacttcgtgccgagctacctccatgcccacgcatccgcctacctgctgtcctgcctgaaggaggtgattagcatgctcggccatcgcggcgacaccatcgccgagcgtatccggtccaatggcaaggtcggtggcgcggaggtcggcgatttcatgatgctgcaactgatcaatcgcaccgagttgctgctgcgccactacctgggattggagcaggtgcatccggagcagttgtaccgggtgctgctgaccatgctcggcgacctcgccaccttcggcagcgagagcaagcgtccgcgcctggacagccgttaccagcacagcgaccagggcgccagcttccgcaggctgatggaggcgattcgccaggtcctgtcgatggtgctcgagcagcatgccatcgaactgcctctccaggcccgccagtacggcatcctggtctcgcccctgcacgaccacaagctgctcggcagcgcctcgttcgtgctcgccgccagtgccaattgcgagtcggaggaactgcgccagcgcctgcccgcgcatctcaaggtgggtgcggtcgagcacattcgccaactggtcaacctgcacctgccggggatccgggtcaagccgctgccggtggcgccgcggcagatcccgttccactccaacaagacctatttcattctcgaacccaacgccgaggacatgacccagctggagcgctccggcggtttcgcgttccacgtatccggcgagttctccgagcttgaactgaaattctgggccatcaggaactga

SEQ ID NO: 319856 - DNA, 870 bp, Pseudomonas aeruginosa
atgatcaaggaaagggaataccacgaggacgagaagaccgtcctcctcgatcaccagggacaggtaccggcccaggggccgctgactgatttcgccgaaccgccgcgcttcgagcagctcgaggagcggatgatctacgcggcgcgcctgcgtccgggcgaggccttcaacgtcagcctgaacccgctggtggcggcggcttccgaactgctttcggaagtggtccggctcaagcacagcaccgtgctggagaaccttgcggcgctcaaggagcggttgacctccgccatgaagctcttcgaattccgcgccgtgcaggatggcgtggaaaacagccaggtcatggcggcgcgctacgtgctgtgcacggtggtcgacgaggcggtggtgaccaccccgtggggcaacgaaagcgaatggtcgaagatcagcctgctgagcagcttccataacgagaccttcggcggcgagaagttcttccagttgctcgaccggctgtcgaagaacccggtcaagcacctgccgatgctggagctgatgtacctctgcctggccctcggcttcgagggcaagtaccgggtgatggctcgcggcgtgctcgacctggacggtatttccgacgcgctctaccggcagatccgccagttgcgcggcgacgtgccgcgcgaactgtcgccgcactggcaggggctcagcgaccagcgtcgcggcctggtgcggatcgtgccctggtggatggtggcgctgttcaccctggtctgcctggtggtgatgtattcgggattcgcctgggttctcggcgaacaacgcgacacggtgctgcagccttaccagtcgctcgatgcggcggcaggacagcccggttcgtaa

SEQ ID NO: 319857 - DNA, 3528 bp, Pseudomonas aeruginosa
atgaaaaacttcttcaagaaagtcggcgccttcctgcgcaagacgtgggtctggacgctgttgctggtactcctggcggcattgctggtgtggttcgtcgggccgctgctggcggtcgccgactacaagttctgggaaagcccgacctcgcggttgctgagcatcagcctgatgttcctggtctgggggctggcgatggtcttcgtcagctggcgcgccggagtgcggcgcaaggccgtcgaggacagcgacgagggccaggagcgcctgcgccgcgacggtctgatcgaagacgaacagaaggaattgcgcagccgcttcaaggacgccttgcgcaccctgaagacctccagcctgtaccgcggtcgcagcgagcgctggcgcaacgagctgccctggtacctgctgatcggcccgcagggaagcggcaagaccagcctgctggacttttccggactggaattcccgatcaaccggatcgaccgcaagctgacccgcgacaccgccggcacgcgctactgcgactggtacttcgccgaccacggcgtcctgatcgacaccgccgggcgctacctgacccaagccgacggcgaggtcgacgggggcgcctgggcgaccctgctcggcctgttgcgcaagcgccgccgcgcacggccgctgaatggcgtgatggtgtcgattccggtagaaacgttgctcagtgacgacgagatggcgctggatacgctggctcgccaggtgcgtgcgcgcctgcaggaaatccagcagaccctgcacctcgatctgccggtctacctggtgctgagcaaggccgaccagttgctcggcttcgacgagttcttcgaccagttgagccgcgaggagagcgaccaggttctgggcaccagcttcggcaaggagcagaacggcaccgatgtgacggtcctgcgccaggcgttcgaggaccttctgcgacgcctgaacagccaggtgatcatgcgcatccaccaggagcgcgataccctgcgtcgcggtcgcatcctggacttcccgcaccagcttggccagatcggcgagcggttgtgcctgttcgtcgaactcgccttcaccggcaaccgctaccagcgcgccagccgcctgcgcggcttctacctgaccagcgcgccgcacctggcccagcagctggacgaggacaccgccggcatcggcgccaacctggggatcgccagcggcctgctgccgaccctgcgcaacgggcgctcgcgcttcatccatcacctgctgagccaggtgatcttccccgaggccaacctggcaggtctcgatcgccgcgaacgcacgcgcatccactggggccagcgagccctgtacgtcggttcgctggcgctccttctgctattcggcctgctctgggctggcggtttctcggccaaccacgagcgcctggagcgggtccgcgagctggcgcagcaatgggcccagcagcgccaggcgcttggcgagcgcgacgacgccatggcggcgctgaagacgctggatagcagctatgcggcgaccaccgtgtttccgcccaaaggggaagtctcgctgcacgagcgcgccgggctgtaccagggcaacgaggtcaacccgccgctggccgcggcctatcgccgcgagctggagacgcaactgctgccgcgcgtggcgcggatgctcgaagcgcagatccgcggcaacatgcagaatcgcgaacgcctgctcaacagcctgcgggcctacctgatgctgaatctgcgcgagcgccgcgagaacggatggctcaaggactgggtggctaccgactggtcgcagcgctatgccggcaacggcaccgtgcagaatggcctgaacacgcatttcgcccgtctgctcgagcaaccgttcagctatccgctgaacgagaccctggtggcccaggcacgccaggtgctgcgcagcgagtccctggccaacgtggtctaccgggtgctgcgcgaacaggcgcgaagcctgcccgagtatcgcttcggccagcacctggggccgcaggccggtctgttcgtcggcaccgactacgtgattccggggttctacacccagcagggctaccagcagtacttcgtggtccagggcgccagcctggtcaacgacatccttcgcgacaactgggtcctgggcgagggcagcgggatcagcgacatggacctgcggcgcctgatggtcgaactcgagcagttgtatttccgcgactacgcgaacttctggagcgaggcggtcggacgcctgggcctgctgccgttcaacgatgccggcgagggcgccgaccaggtttccgggctgctcgccgccaactcgccgatcctccagttgttgctggaggtccgtgagaacacccgtttcccggtcctggcggagagcgccgaggcgctggcagaggccagcgacaaggccgcggaaaagggcggcaagctgggcaaggcggccgccgcggcggccggcaaggccagggacgcgttggcgaagaacctgccggataccgcgaagaagtccctgcaacgccgcttcgagcccctgcatcgcctgctcgacgataacaacggcccggcggccgacctcaccccgctgttgcaggcgctcaacgagttgcagttgcaactcgccggactggcgcgcgccagccagccggagcaggcggctttcgacatggcgaagagccgcatgggcggccagcgcgatgccctgagcaacctgcgcaacgcctccgcgcgactgccgcgaccgctcggcggatggttcagcgtgctggccgaagacgcctggcggctggtcctcggcgatgcctacctgtacctcaaccagcgctaccagagcgagctgtacggtttctacagcaaggcgatcaacaagcgctacccgttcaacgcgcacagcgccagcgatgtcgcggtcagcgatttccgcgagttcttcaaggcgcagggcgtcgccgaacgcttcttcgaaacctacatgcggcccttcgtcagcggcgacccgggcagttaccgcctgcgcagcgtggatggttacagcctgccgatgtccaaggtctatctcgaccagatgggcacggcccaggtgatccgccagagcttcttcgccgagaacccggccgagccacaggtgcgcttccgcctggagccctataccctcgatcctggcgtcagccgcgccgagttccgtttcgacggtcagtccatggagtaccgccacggcccgatcgtgccgatgtcgttcaagtggcccagcgacgccgacggcggccgcaccagcctggtgctggagaagatggccggacgaccggtgggaatcgaacgcaataccgggccctggtcgctgttcaggctgttcgacctgatgcagaccgagtacctcagcgggcgtgacgtgatggtgctcaaggccgacctgggcggcctgcgcgccaactacctgctgctcgcccagcgcacgccgaatccgttcgatctcgcggtcctgcgcagcttccgcatgccggtgcagctctga

SEQ ID NO: 319858 - DNA, 729 bp, Pseudomonas aeruginosa
atgcaacgcaccgagccctggcgcagcgcggcgcgcacggatcgcggcaaggtccgcgcgcgcaacgaggatgccttcctggactgcccggatcgcgggctctgggcggtcgccgatggcatgggcgggcaccaggccggcgacctggccagccggatgatcgtcaccagcctggcggaactgccggcccgggcgggattcgacgagcgcctgaacgcgatgcgccagtgcctgcactggctcaaccggcgcctgggcgaggaactcaccctcagcgccgaacgcggcgacaggatcatcggcagtacggtggtggcgctggtcgtggagggttcgcgggcggcctgcgtgtgggtcggcgacagccgctgctacctgtggcgcggccagcggctgtaccagctgtcccgcgaccactcgctgttgcagcgactggtcgacgaacggcggatggatatcgagcaggcccgcgcctatccctcggcgcgcgcgctgacccgtgccgtcggcgctagcgaacaactggtgctggacgtgttggaactggaggtgcatcccggtgatgtcttcctgctctgcagcgacgggctctacgaagagctgagcgccgatgcgctgggtcgcgcgttgagcctggcatcgccgcaggtggcggtggagcggctgttcgacggtgccctgagcggcgccgcacgggacaacctgacggccgtggtgatccgccaatga

SEQ ID NO: 319859 - DNA, 990 bp, Pseudomonas aeruginosa
atgaacgaaccgctgtcgtcgctggagctgctgccggaggaggagggcggcgcgaacctgacctatttcgccttcgccgccccgaccgcctcggcgccggacctgccggcggtgttgcccggtccgctgccggacgttctttccgggcgctaccgtctggagcggatgctcggcgccggcggcatggggacggtctaccgtgcccgggacctgctccatgagcagttcggcgacccggcgccgctggtagcgctgaagctgctcaacgagtcggtcgccgagtcacccgacgccagcgccttgctctatagcgagttcgccctgacccggcgcttgcgccatccgaacgtcgtgcgtctgttcaccttcgacgtcgacaccgcatgccagcgcgcctacatcgtcatggaactcatgcctggcctgccgctcgaccgcctgctctgcgagcgtcccgaaggcctgccctggtccgagctgagcgcgatcgcccggccgttgctggatgttctggcctacgtccacgaacaaggagtactgcatggcgacctgaagccgagcaacgtgatgctcggcgaagagggcgtgcggctcttcgacttcggcctcggccaggcgcaggcaggcatcctggatggcctgccgcagctcagccggggccgcatcgacgcctggactccgggctacgccgctcccgaactgctcgagggcgcgccattgtcgccggcggccgacctgtatgcgctggcctgcgtcctctacgaactggccgacggtcgccatccgttccgccgcctgccctcgaaccaggcccgggagcaggggctggagcgccagctgcgcgcgcccggacacctgcctcggcgctgctggccggcgctgcgtaccgccctgagcctcgaccccgaacggcgctgcatcggcgtccgcgaattgcaggaagcgctgggcgcgcggcgttcctggctggccggcgttcttgcccgttga

SEQ ID NO: 319860 - DNA, 381 bp, Pseudomonas aeruginosa
atgaacctgatcgcgcacgtggaaataccggtgtccgacctggagagggcgatgcgtttctacgcctcggtgttcggagtggcgttcggcgaggtagccaccctgcacggaagcagaatggcgcatttccccttcgaggaaggccgtgacggtgccagcggcgcactcgccgagggcgacgtctacgtgcctacgctacatggggcgatcatctacctgaatgtcgcggacctggatgccgtcattgcccgggctctcggcgaaggcagcgaaatcctcttcccgaagacgccgcttggcgacggcgtgttcatcgccgagatcagggacagcgaaggcaatcgtatcgccctgcagagcgcttgcggagagcggccgtag

SEQ ID NO: 319861 - DNA, 462 bp, Pseudomonas aeruginosa
atggcgcatctggtctggcaggatgacctgaataccggtattcaggtcatcgacaatcaacacaaacgcatcgtcgagatgatcaatcacctgcacgacgcccagcaaggcaaggaacacgcggcgatcgccgaggtgatcgaggagctggtggactacacgctgtcgcacttcgccttcgaggaaaccctgatggaggacgccggctaccagttttcccgggcgcacaagaagatccacgagctgttcatccgccgggtctccgaataccgggtgcgcttccaggccggcgaggatgtcggcgatgaactcaagggcttgctctcgcgctggctgttcaaccacatccgcaacgacgacgccggatatgtggatgcggtacgccacagcatgtccgaactggtcaaggacaagagcgagggcggttggttgtcgcgctcgatgaagcgcttcttcggctga

SEQ ID NO: 319862 - DNA, 546 bp, Pseudomonas aeruginosa
atgtccctggaacaacactactcctcgatcctcacccagctcggcgaggacgttaaccgcgaaggtctgctggacacgcccaagcgtgccgccaaggccatgaagtacctgtgccgcggctaccaacagagcctggaagaagtcgtcaacggtgccctgttcagctccgacaacagcgaaatggtattggtcaaggacatcgagctgtactcgctctgcgagcaccacctgctgcccttcatcggcaaggcccacgtggcctatatcccgaacggcaaggtgctcggcctgtcgaaggtcgcgcggatcgtcgacatgtacgcccgccgcctgcagatccaggagaacatgagccggcagatcgccgaggcggtccagcaggtcaccggcgccctcggcgtcgcggtggtgatccaggcccagcacatgtgcatgatgatgcgcggcgtggaaaagcagaactcgtccatggtcacttcggtgatgctcggcgaattccgcgacaacgccgccacccgcagcgaattcctcagcctgatccgctga

SEQ ID NO: 319863 - DNA, 558 bp, Pseudomonas aeruginosa
atgcaagacgacgacttttccctgttcaagagcgagatgcgcggcgtcaagcgcatctcggtcgatcgagccgataccggcaaacctcgcaacgaccgccagcaactcaagcagcgccagctcaatgccagcgtgcgcaacgacgaaatccgcgtcgacggcctgtccgaccagttcgtcatcgacgtcggccccgaggacgagctgtcctgggcccgcgacggcgtccaggaaagccagttgcgcaagctcaagcagggcctggtgcccttcgacggtagcctcgacctgcacggcatgagcgtggagaaggcccggcagacgctatgggacttccttgccgaggccacccgcctggaaatccgctgcgtgcgcgtgacccatggcaaggccgcgcgcaaggacggacgcagcccgctggtgaaaagccacgtcaatacctggttgcgccagcacccgcaggtgctcggtttcacctcctgcctgccacgccacggcggcaccggctcggtctacgtgatgctgcgcaggaccatgctcgaaggccgcgacgagtag

SEQ ID NO: 319864 - DNA, 321 bp, Pseudomonas aeruginosa
atgaagctgtccgatagtttcgatgcgcgccggctgcgcccgcgccggccgagagtctggcgctggcgcctggcggcggcgttcgcggccctggtggcgagcctgggcgtgctgctgtcgctggccggcacctcggccttgatcggccgccagccggctgtcggcatgctgcatatcgaacccgccgccggcggcgtattgctggcccttggcctgctgtcgctctgcctcggcgtgttcttctggcgtttcagccgccgtcgcagccgccgcaacagcgacctgagcctgtcgccgaacctgatgaaaaagcgcgactga

SEQ ID NO: 319865 - DNA, 1038 bp, Pseudomonas aeruginosa
atgagcgcgccccgggttcgcctcggcgacctctcggtcggcttcgtccaggcgctggccgacgccctgctcgccgccggcgtcgagcccgcagcactgctcgagcagtacggcctcgaccagcggcgcctggccgaacccggggcgcgcctgtcgatccctcgctacatgcgcctcggccatgccgccatacagctcagcggcgaccccgcccttggcctgcagatgggccgcctgagccgtctcggacagatgggcctggccggcgtcagcgtcgcccaggcgcccaacctgcgcgccgccgcacgggcaatgatccacctggaaccgctttacgcgcagaactaccggggccagtcgagcctggtggaagacgccggcggcgcctggctgcgcttctattcgatcagcccttacaacgcctataaccgcttcgtcgtcgattcggtgctggcaggctggatcagccatctcggcgccctggcaaggcagccgttgaaagcggagcgggtggagatcgaatatccagcgccgccttgggccgagcgctacgaggcattcttcggctgcccggtggaattcggcgcgccgaccaaccagttgcgcctgagccaggccagcctggccctggcgaatgccgagcactgtccgagcacctggagccagatgctggaactctgcaaccgcgaactggagcagttgacccgcacccgcagttggcgcgagcgcgtcagccgcctgctggggccgatgctcaatggtcgcgaaccggacctcgaggaaatcgccgcgcgcctcaagttgccgacctggaccctgcggcgcaagctggccgaggaaggcacccagttccgcagcatcctcaacgacacccgccgcgacctggcgatggtctacatccgcgagaccgacctggctttcggcgaaatcgcctacctgctcggcttcgcctcggcggaagccttccagcgcgccttcaagcgctggagcgggcagacgcccggcgaattccgccgcgcccagcgacagagcgcctga

SEQ ID NO: 319866 - DNA, 1119 bp, Pseudomonas aeruginosa
atgcgcaagctgatcttcctgatcctcatcaccctcttcgccgcctacgccggctgggccgaacgccgcccggtaggccactacctgtccgacctgcgcagccaggtcagcgtggtccagggccagcccggcgagcgcggcaacctgctggcggtccagccggaactgttcacgccggactaccagagcgccgaacggttgcaactgaaattccacgcctacctggaaaatgcccgccgccagggcctgctcaacgagcgcacggtggtggtgttccccgagcatgtcggcacctggctggtggccagcggcgagaagcccgaggtctacgccgctgccgactggcccacggcgatggactggatggccgcgagcaacccactgaaggtggcgcgcggctggatcaccgcgcgcggcgatcagcgtctcaccgacaccctgttccggatgaaggcggtggacatggcccacgactaccagaccctgttcggcgggctcgcccatgatttcaaggtgacggtggtcgccggctccatcgtcctgcccgaccccgaggtcgaggacggcgagctgcgtcccggcaccggccagctgtacaacgtcagcctgaccttcggtcccgacggccggccgctcggccagccgcaacgcaaggtgttcccgacccgccacgaactgagctacctcaacaacggtcgcggcgagcgcctgcaggtgctggatacgccagcaggacgcctgggcgtgctgatcggcaccgacagctggtacccggacacctacgccaccctggtcgaacagcgcgtcgaactgctggcgatccccgccgccctgaaccagagcggtcgctggcagcagccctggcccggcttcgatgcggagctggttcccggcgacgtacgcctggcgccgaacagcctgagcaacgccgaggcctggcagcgcctggcggtcggcgagcgcctgctggccagcggtgcgcgcggcgccgccgtggccttcgcccatagccgcctgtggaacgtcaccgaagacggccaaagcctgctcggttcgtcgcagggcatgcgccaggccaatcccggcggcggtgcgcaactggtcaatctctggctatga

SEQ ID NO: 319867 - DNA, 2040 bp, Pseudomonas aeruginosa
atgaccgccgccgttccctatccgcacctgctcgccccgttggacctcggcttcaccaccctgcgcaaccgcaccctgatggggtccatgcacactggcctggaagagaagccgcagggcttcgagcgcatggcggcgtacttcgccgaacgcgcccgcggtggcgtcggcctgatggtcaccggcggcatcggcccgaacgaggagggcggcgtgtattccggcgcggccaagctgagcacgccggaagaggcggagaagcacaggatcgtgacccaggcggtgcatgaggcgggtggcaagatctgcatgcagatcctgcatgccggccgctacgcctacagtccgaagcaggtggcgccgagcgcgatccaggcgccgatcaatccgttcaagcccaaggaactcgacgaggaaggcatcgagaagcagatcgccgacttcgtcaactgcgccagcctggctcaggtcgccggctacgacggcgtcgagatcatgggatcggaaggctacttcatcaaccagttcctcgtgcagcacaccaaccagcgcaccgaccgctggggcggcagctacgagaaccgcatgcgcctgccggtggagatcgtccgccgggtgcgcgaggcggtggggccgaacttcatcatcatctatcgcctgtcgatgctcgacctggtcgagggcggcagcagctgggacgagatcgtgctgctggcgaaggccgtcgagaaggccggcgcgaccctgatcaataccggcatcggctggcacgaggcgcgcatcccgaccatcgccaccaaggtgccgcgcgcggccttcaccaaggtcaccgccaagctgcgcggcgaggtcggcatcccgctgatcaccaccaaccgcatcaacactcccgaggtggcggagaaggtcctggccgagggcgatgccgacatggtctccatggcccggccgttcctcgccgacccggatttcgtcaacaaggccgccgccggccacgccgaacggatcaacacctgtatcggctgcaaccaggcctgcctcgaccacaccttcggcggcaagctgaccagttgcctggtcaacccgcgcgcctgccacgaaaccgagctgaactacatccccaccaccaggccgaagaagatcgccgtggtcggtgccggcccggccggcctggccgccgccaccgtggccgccgagcgtgggcaccgggtcagcctgttcgacgccgccggcgagatcggcgggcagttcaacgtggccaagcgggttcccggcaaggaagagttccacgagaccctgcgctacttccgcaacaagctggagagcaccggtgtcgaactgcacctgaaccgccgggtcggcgtggacgacctggtcgcgggcggctacgacgagatcgtcctcgccaccggcatcgttccgcgcacaccggcgatccccggcatcgagcatccgaaggtgatcagctacctggatgcgatcctcgagcgcaagccggtgggtggcaaggtggcggtgatcggcgccggcggcatcggcttcgacgtctccgaattcatcacccataccggtccgtccaccagcctggagcgcgaggtgttctggaaggagtgggggatcgatactcgcctggaagcccgcggcggcatcgccggggtcaaggccgaggtgcatccggcggcgcgccaggtgttcctcctgcaacgcaagaagagcaaggtcggcgacggcctcggcaagaccaccggctggatccatcgcgccggcctgaagaacaagcaggtgcagatggtgaatgccgtggagtatctcgggatcgacgacgccggcctgcatatccgcgttgccgagggcgagccgcaggtgctgccggtggataccgtgatcgtctgcgccggccaggacccgctgcgcgagttgcaggacggcctgctggcggccggccagagcgtgcacctgatcggtggcgccgacgtcgccgccgagctggatgccaagcgcgccatcaaccagggttcgcgcctggccgccgaactctga

SEQ ID NO: 319868 - DNA, 1404 bp, Pseudomonas aeruginosa
atgagcatgcagaaaaagccacagatggcggaggccgtgctgttcttcaacgacagcggcgtctgcaaggaaatgctgtatcccgaattcgaggcgctgctcgatggcttggtgcgcatgccggaatacgccgaccggcagatgcacctggcctatgtgttgatcaatccgcgcctgcaggcgcgggcggcggtgttcttctatctcgatttcgacgagcagggcggcgccgacaccggctggaacctgcctctgcgcaacctcgccgaacgcgccggacgcggccccgacatgggcggcgggccgatccgcctggcctgtcgcagccagtgcccggtgtcctggcaccagatgcacctctgggacccggagagcagcgccggacgcaaccatttcgtgctcatccgcgacgcgctcaggcgcaaccagctgggcctgctggtggacgaagagcctgccgcggtggagccgcagcggctgcagatggccgccgaagagcaatggtacgccgccggtcccgccgccccgaaggcaccgcccgcggagcctccgcgcaagcaggaggacgagcagacggcgcgcctggcgcaactggtcaagcagcagcgacaacagctcgccgccctggcccggcagcaggagcagcgcctggccgggctcgcccggcagcacgaagaggaactggccaggcgcgaacaggacgcccgcgggcaactggacatcctgcgcagcgaagtgctcagcctgcaacaggccctggaacggcaggcgcgggagaacgccgaattgcagcagcgtctgctggaacagggcgagcagttccagcgcaaccgcgaggaactgacccggcaactgcgtttcatcgagaaccaggggcgcaacgagaccgacctgctgcgctcggagttcgccgacgaactggaggctcgggtggcggcggcggtggccggctacaaggagcaggtctcgatccgcgacgtcgaactggcctaccgcaacgagctggaccagcaactggagcaggaactggccgagctgcgcgccgagcgcgaccgtctggccgcccaggggccggagcaactgctggagcgtctatccggccagggcgtggtattcgtcgcctaccatcccggcgccgggcacctgaccatccccttgcaggacatcccgcgttaccaggacaatccgctggcctacgcggcggccaagtgcttcgtctccgagagccagtaccgccagtggctggaccacttccagcagccgcgctgcgaggcgctgctgcccggcggcgaacgctgcaacctgccgctcgaccgggtcgacaacccggcgcgcttcgtcgccggtgacaccaactgctgcgcccggcacaagaccacggggcgcctgcgcaccgtgagctga

SEQ ID NO: 319869 - DNA, 900 bp, Pseudomonas aeruginosa
ttgcagcgtctcgaactcgactggctgcaacgggccggggtcgaactggcgctgctgcgcctggaccaggccgatccgctgatctccggcaacaaggggttcaagctcgcgccacacctggcgctggcccacgagcaggggctggacggcctgatcagcctcggcggcgcccattccaaccacctgcacgcgctggccggcgctggcgcgcgtttcggtttccgttgcgtcggcctgttgcgcggacacgaagtcgatacgccgacggtgcgcgacctgcgcagtctcggcatggaactgcactggctcggctacggcggctatcgccagcggcatgccgccggcttctggcttccctggcgggaacgttacccaggcttgctgccggtcgccgagggcggtggcgggctgctgggcgcgcgcggttgcatcgggctggtggagcgcatagcgacccagttgccgacgctcggctgggacgattacgacgcgatctgggtggccgccggtaccggtacgacactggccggcctggtgctcggcgaggccgggcggcatcccgtggtgggcgcgctggcggtgccggaggaccacggcgtcgccgcccaggtcgcggcgacccttgccgaggcgggctggggcgataccggctatcgcctgctggacgccagccgtggcggtttcgcccgcctcgatgggcgattggcgcggttcatcgtcgagttcgagacggccagcggcgtcgccctcgaaccgctgtacaccggcaagctactgctcgccctgcgcgaggccgtggagagtggcgcggtggctcgcggcagccggctggtggcgctgcacagcggaggcctgcagggccgccgggcattgcaggagcgtttgctggcgttgctctga

SEQ ID NO: 319870 - DNA, 966 bp, Pseudomonas aeruginosa
atgacgctgctgaccgaactgctcgacgaattgcaccacccggccgtccgcgacctggcctggaccctgctcgccccgccgttgctgcgccggaccccggagccgcagcgccatccgctcgccgccagccgctggcgccaggaaccggagcgcctggccgcctggttgcgcgaacaggagcgacagccgcagcacctcgccgcctggctcgcgcaatggccacggcagcgtctcggcctgtactacgaacatctctggcaattcgccctggaacaggccccggacgtgcgcctgatcgccgccaacctgccggtgcgcgacggcgggcatacccttggcgaactcgacctgctgctgcgggacgacgacggcatccaccacctggaactggcgatcaaactttacctggggccccagtccggccccggcgactggctcgggcccggcggccaggaccgcctgtcacgcaagctggaacacctctgccgacaccagttgccgctggcggcgacccgcgagggtcgccaggtgctggccgcccatggcgccgaatcggccgtttccgcattgtggctgagcggctacctgttccatccctggcccgggccgggcagcctgcccgccgacatcgagccacggcatctgcgtggccgctggctccgccagcgcgactggccggcgtacctggccagcctggccggaccgcaggccgggcagcattggctgcatctgtcgcgcgagcactggctggcgccggccatgcggcggcaggacccgctcgacccaccgcgcgacggcgcctgctggaacatcgccttcgccgacgaggcacgtccgcaaatgctggtaagggtggtgccgcgcgacggctactgggtagaggccgagcgcctgttcctggccagcgacgactggccaccggggctcagcctgtggggtagcgcgcgccaggccgcggatgcctga

SEQ ID NO: 319871 - DNA, 888 bp, Pseudomonas aeruginosa
atggaaccctttcgcaatatcggcatcatcggccgcctcggcagcacccaggtgctggacaccattcgccggctgaagaaattcctgatcgatcgccacctgcatgtgatcctcgaggacaccatcgccgaagtcctgcccggacacggcctgcagacctgctcgcggaagatcatgggcgagatctgcgacctggtggtggtggtcggcggcgatggcagcatgctcggcgcggcccgcgcgctggcccggcacaaggtgccggtgctggggatcaaccgcggcagcctgggcttcctcaccgacatccgcccggatgaactggaggccaaggtcggcgaggtgctggacggccagtacatcgtcgagagccgcttcctcctcgatgcccaggtgcgtcgcggtatcgactcgatggggcagggcgatgcgctcaacgacgtggtcctgcacccgggcaagtcgacccggatgatcgagttcgagctgtatatcgacggccagttcgtctgcagccagaaggccgacggcctgatcgtcgccacgcccaccggttccaccgcctacgcgctgtccgccggcggtccgatcatgcatccgaagctggatgccatcgtcatcgtgccgatgtacccgcacatgctttccagccgcccgatcgtggtggacggcaacagcgagctgaagatcgtcgtgtcgccgaacatgcagatctacccgcaggtctcctgcgacgggcagaaccatttcacctgcgcccccggcgataccgtgacgatcagcaagaagccgcagaagctgcgcctgatccaccccatcgaccacaactactacgagatctgccggaccaagctcggctggggcagccgcctgggcggaggcgactga

SEQ ID NO: 319872 - DNA, 981 bp, Pseudomonas aeruginosa
atgcaactcgaccccggacgtggctacgacctgatcggcgatgtccacggctgcgcgcataccctggaccgcctcctcgacctgctcggctaccgcctgcagggcggcgtctggcgccatccgcggcgccaggcgctgttcctcggcgacatcgtcgaccgcggcccgcgcatccgcgaggccctgcaccgggtgcacgcgatggtcgacgccggcgaggcgctgtgcatcatgggcaaccacgaattcaacgcgctcggctggagcaccccggcggcgcccggcagcggccgccagtacgtccgcgagcatacgccgcggcatgcccggctgatcaaggagaccctcgagcagttcgagggccacgacgccgactggcgcgacttcctcggctggttccagcaactgccgctgttcctcgatgccgggcgcttccgcatggtccatgcctgctgggacggcgagctgatcgcgaccctgcgccggcagttccccgacgggcggatcagcgaagccttcctgcaggagtcggcggagcccggcagcttcgccgacctggcctgcaaccgtctgctgcgcggcaccgacatgcgcctgccgcacggtgccaccctgaccagcagcgatggctatacgcgcgccttcttccgcaccaagttctgggtcgaggacgaggcgccgcgcacctacggcgatatcgtcttccagcccgacgcgttgcccgaagcgatcgcccgcgagccgctcagcgaggagcagaagtccagcctgctgacctacggcgccgacgaaccgctgttgttcgtcggccactactggcgacgcggcacgccggcgccgatccggccgaacctggcctgcctggactacagcgcggtgatgtacggcaagctggcggcctaccgcctggatgaggaaacccgcctggaccggcacaagttcgtctgggtcgaagtgaagcggccggaggctgacgagtga

SEQ ID NO: 319873 - DNA, 861 bp, Pseudomonas aeruginosa
gtgagcgcggtgcaggtcctgaagtttcccctctcggtcgacctggccggcttcgtcggcctgctgcggcgtctgaacgtgccgcaccgggtcagcgaggaatccggccagcaggtcctctgggtgcccgacgagcggctcgccgagcaggtccgcgagttgtaccggcgttatcccgaaggcgatccgcaggcgaccctggaggccgcgccgcgaccggcggggcagggtttcgtccggcaactgcggatgagcccgatgaccgccgcggtgttgctgctgaccttcgtcgtcgccgctgtcacctaccttggcgacaacttcgcgacgatgcgctggctgaccttccaggacttccgtatccagggccagtacgcgctgttcacgccgttggccgagagcctggcggcgggtcaatggtggcggctgttcacgccgatgctgatccacttcggctggctgcacctggcgatgaacgccatgtggttctgggagctgggccggcgcatcgaattccgccagggccgtccgatgctgctcggcctgaccctgctgttcggcctggtgtccaacgtggtgcagtacgcggtgagcggcgccagcctgttcggcgggttgtccggggtgctctatggcctgctcgggcactgctggatcttccagtacctggcgccgaaccaggcctatcgcctgcccaggggcgtcgtggcgatgatgctgatctggctgctggtgtgcctgtccggggtgatcgacctgctcggcttcggctccatcgccaacggcgcgcacgttggcgggctgttggtcggttgcctcagcggtttgctgggcggcctgctggcgcggcgtcgccgttga

SEQ ID NO: 319874 - DNA, 264 bp, Pseudomonas aeruginosa
atgtcgtccttcaatcaagcgatcgagaacatcactcctgagatctaccagaacctcaagctggccatcgagatcggcaagtggccggacggccgcaagctgacccaggagcagaaggaactctgcctgcaggcggtgatcgcctgggagctgcagaacctccccgaggaggagcgcaccggctacatgggcccgcagcactgctcctcgcattccgacgagccgatcccgaacatcctgttcaagtcggactccgtgcactga

SEQ ID NO: 319875 - DNA, 834 bp, Pseudomonas aeruginosa
atggaagaaatcgcccgcggcgcgctgagcaagatgacggcgcgcctggaaagcaatgctcccgtgcaatacgccttccgcctcgacgaccgcgaagtcgcggtgaacccgctgatcggccggccgctgcgcctggagtacctcggcagcatcttctgcacccattgcggccgcaagacgaagaagagtttcagccagggctattgctatccctgcttcacccggctggcgcagtgcgacagttgcatcgtcagcccggagaagtgccactacgagcagggcacctgccgtgaaccggagtggggcgagcggttctgcatgaccgatcacgtggtgtacctggccaactcctccggggtgaaggtcggcatcacccgcgccagccagattcccacccgctggatcgaccagggcgcgcgccaggcgctgccgatcctgcgcgtggccacccgccagcagtccggcctggtggaagacctgctgcgcagccaggtcgccgaccgcaccaattggcgggccatgctcaagggcgaagccgagccggtcgatctggcggcagtccgcgagcagttgttcgaccagtgcgccgacggcctgcgcgaattgcagcaacgtttcggcctgcaggcgatccaaccggttatcgacctcgatccgctcgagatcgcctacccggtcgaggcctacccgagcaaggtcgccagcctcgacctggaaaaaacgcctatcgtcgaaggcacgcttcgcggtatcaagggccagtacctgatcctcgacaccggggtgatcaacattcgcaaatacacggcctaccagatcgccgtgcatcactga

SEQ ID NO: 319876 - DNA, 2658 bp, Pseudomonas aeruginosa
atgcgcaccgagcaaccgaaagtcatccacctcaaggactatcaggcgccggactacctgatcgacgagacccacctgaagttcgaactgttcgaagaccacagcctggtacacgccgagttgaagctgcggcgcaaccccgagcgcggcgccggcctgccgccgctgttgctgcatggccagcaactggagctgctggcgctcgaactggacggccaggcgctcggcgcggacgactaccaactggacgacgagcagctcggggtgcaaccgcggcaggccgaattcgtcctcaggagcacggtgcgtatccatccggagagcaacaccgcgctggaaggcctgtacaagtccggcaagatgttctgcacccagtgcgaggccgagggtttccgcaagatcacctattacctcgaccgtcccgacgtgatgagtcgcttcaccaccaccgtcagcgccgaacagcagcgctacccggtgctgctctccaacggcaacccggtggccagcggttccgaaggcaacggccggcactgggcgacctgggaagacccgttcaagaagccggcctacctgttcgccctggtcgccggcgacctctggtgcgtcgaggacagcttccgcaccatgagccagcgcgacgtggcgctgcgcatctacgtcgagccggagaacatcgacaaggtccagcacgccatggacagcctgaagaagtcgatgcgctgggacgaggaggtctacggccgcgagtacgacctggacatcttcatgatcgtcgcggtcaacgacttcaacatgggcgcgatggagaacaagggcctcaacatcttcaactccagttgcgtcctggcccgcgccgaaaccgccaccgacgccgcccaccagcgggtcgagggcgtggtggcgcatgagtatttccacaactggtcgggtaaccgggtcacctgccgcgactggttccagctgtcgctcaaggagggcttcaccgtattccgtgactcggagttctccgccgacatgaactcgcgcacggtcaagcgcgtcgaggacgtcgccttcctgcgcaccaaccagttcgccgaggacgccgggccgatggcgcatccggtgcgccccgactcgttcatcgagatttccaacttctacaccctgaccgtctacgagaagggctcggaagtggtgcggatgatccacaccctgctcggcgccgaaggcttccgcaagggctcggacctgtacttccagcgccacgacggccaggcggtgacctgcgacgatttcgtcaaggccatggaagacgccaatggcgtcgacctgacccagttcaagcgctggtacagccagtccggcactccgcgcctggcggtggaaggcgagtacgacgccgccgcccgccgctacaccctgacggtgcgccagagctgcccgccgactcccggccagccgagcaaggaacccttcgtcatcccgctggagctgggtctgctcgacggccagggccacgaacttccgctgtgcctggaaggcgaggccgtggcccagggcggcaaccgcgtgctggcggtgaccgaggccgagcagcgcttcgtcttcgtcgaggtgccggagcagccgctgccatcgctgctgcgcggcttctccgcgccggtgaaactgagcttcccctacagccgcgaccagttgctgttcctcatgcagcacgacagcgacggcttcaaccgctgggaggccggccaacagctttcggtgcaggtcctgcaggagctgatcggccagcaccagcgcggcgagcaactggtactcgacccgcgcctgatcgaggcctaccgcaccctcctggcggacgaggcgctggaccaggcgatggtcgccgagatgctctcgctgcccagcgaggcctatctcaccgagatcagcgaagtcgccgatgtcgacgcgatccatgccgcccgcgaattcgcccgccagcgtatcggcgaagcgctgttcgagccgctgtggcagcgttaccaggccaaccgcaagatttcccgcgacaccgcctacctcgccgaggcctcgcacatagcccggcgcagcctgcagaacatcgcgctgtcctacctgtcgctgtcgggccgggaggaaatcctcgccgcctgcctggagcagtacgaaggctgcgacaacatgaccgagcgcctgaccgccctggcggtgctggtcaactccggcttcgaggcggagaagggcaaggctctggccatgttcgccgattacttcaaggatgacccgctggtgatggaccagtggttcagcgtgcaggccggctcgccgctgccgggcgggctggagcgggtccaggcgctgatgcagcacccggccttcaccctgaagaacccgaacaaggtgcgcgcgctgatcggcgcgttcgccaaccagaacctggtcaacttccatcgtcctgacggcgccggctatcgcttcctcgccgaccaggtgatcgtgctcaacgcactcaacccgcagatcgcctcgcgcctgctggtgccgctgacccgctggcgcaagtacgacgaggcgcggcaggcgctgatgcgcggcgagctggaacgcatcctggcctccggcgaattgtccagcgacgtctacgaagtggtgagcaagagcctggcctga

SEQ ID NO: 319877 - DNA, 1965 bp, Pseudomonas aeruginosa
atgtacatccccaaccgccagccccggctgcgctccgcgccggcccgggccggcttcgccttcgccgggctgctgccgctgctgggcggccaggcccaggccgtcgaattcagcttcctcgacaacgaggtgtccggttcgctcgacaccacactgtcctacggcaccctgtggcgggtgcaggggcaggacaagagcaacaatgacatcaacaccaacgacggcaaccgcaacttcgataccggcctggtttccgaggtctacaagatcacctcggacctggaggcgacctggcgcaactatggcgtgttcatccgcggcacggcgttctatgacacccagatcatggacaagcgcaacgactactacagccacaacgatccatcgcagccgagccagagctatccccacgacgaccgtttcaccagccagacccgcgacatcgccgggcacaaggcggaaatcctcgacgcctacgtctacggcagctgggacatcggcaacatgccgctgagcgcgcgcttcggccgccaggtgttcaactggggcgagggcatcttctaccgtggcggggtcaacaccaccaacccggtggacgccgccaagtaccgcctgcccggttccgagctcaaggaagtgctgatgccggtggaagcgctgagcttcaacatcggcctgaccgacaacctgtcgatggaaaccttctaccagtggaactggaaggaaacccgcctcgacccggtcggtaccttcttctccgagaccgacctgttcgccgacggcggcaacaccggctacagcgacttcaccggtaccgcgctggacaccccggtgcccggcttcggcaacgtcatcggcctgtaccaggcgctgggcaacaatccgctgctcagcggcgcgctgaagaacaccggcctctatgccaacggcgtgaccccggcctacggcaacgtgatgaaggtgtcgtccatcggcaaggacatcaacgcgcgcaacgacggccagttcggcgtggccttccgctacatcgccgaggaactgaacagcaccgagttcggcttctacttcgtcaattaccactccaaggaaccgaccctgtacgccgacatcggcgactatgccggggccgacctggcggcgctggccaacaccctgcggccgatcgccggcaacctcgccgaagccctggccaacggcctggtgaccgccgacgtgatgggcaacatcaatgcccgccgcgagttcgccgaagacatccgcatgtacggcttcagcttcaacaccacggtgggcgacgcctcggtgttcggcgagctggcctatcggccgaacctgccgatcggcatcgccgccaccaacgacctgatcggcgacctcgcccacggtgcggcggaagccgccaacggcgggcagatcaacgtcggcgggcagatggtcggcctcggcgggcagatccacaactacgagcgggtcgaggcgttcaacacctccctcgggaccatctacaacttcggcccgtcgctgagcttcgactcgttgaccggcgtcgccgagctggcctcggaacacctgcgtggcagcagcctgaagtacaccgcctacgacggcagcacccgctactatgccgggcgcggcaacagctcgtacgtttccggcggcgaccgtggcgaccaggtgaaccgcaacgcctacggctataccctgctgctcagcggcacctggaacgacgtgttcgccggggtcaacgtgtcgccctacgtggtctacaaggacgacttcgaaggcaactcctaccagaccggcaacttcatcgaaggtcgcaaggcctacaccctggggatcaaggccacctacctgaacagcctggaaggcgaactgcagtacaccgagttctacggcggcgggcagaacaacaacatccgcgaccgcgacaacatcggcctgaccgtgaagtactccttctga

SEQ ID NO: 319878 - DNA, 1368 bp, Pseudomonas aeruginosa
atgttgaacaagcacctgctgatcggcgcttccctggcgctggcactgggcagcggcggcgcgctggccggcgtttccgccggcgaggcggcgcaactgaagtcgagcctcaccccgctgggcgcggagaaggccggcaacgccgccggcagcattcccgcctggaccggtggcattacccaggcgccggccggctacaagccgggccagcaccacccggacccgttcgccgcggacaagccgctgttcaccatcgacaaggccaacctggagcagtacagggaacacctgaccccgggccagctggcgctgttcaagacctacccggacagcttccggatgccggtctaccccagccgccgttccggctcggcgccgcagtggctgtacgacaacaccttcgccaatgccaccagcgccaggctgctggacggcggcaacgggttcgccgacgcctatggcggggtgccgttcccgattccgaagagcggcgtggaggcgctgtggaaccacgtcgcccgctaccgcggcacctatgtcgtgcgccgcgcttcggaagtcgcggtacagcgcaacggtagctactcgctggtgacctcgcagcaggaagcgctgttcaagtactacctcaagggcggcagcttcgccgacctgaacaacctgatgttctactacctgtcgttcaccaagagcccggcgcgcctggccggcggcgcggtgctggtgcacgagaccctcgaccaggtcaaggagccgcgccaggcctggggctacaacgccggccagcgccgtgtgcggcgtgcgccgaaccttgcctacgacacgccgatcgccgccgccgacggcctgcgcaccgccgacgacaccgacatgttcaacggcgcgccggaccgctatgactggaagctgctgggcaagaaggaaatctacattccctacaacaactacaaggtcagcagccccgaggtgaagtacgaggaactgctcaagccgggccacctcgatccgcaatacacccgctacgagctgcaccgcgtgtgggtggtggaaggtaccctgaagccgggcgcgcggcatatctactccaagcgcaccctgtacctcgacgaggacagctggagcgcggcggtggtcgaccagtacgacggtcgcggcgaactgtggcgggtgtcgatggcctacctgaagaacttctacgacctgccgtacacctggagcgcgctggatgtgttccacgacctgcaggcgcgtcgctaccacgtgcagaacctggacaacgaggagccgggtaccatcgacttcacccaggcgataccggacgactcctacttcaagccctcggccctgcgccgccgcggcacccgctga

SEQ ID NO: 319879 - DNA, 1098 bp, Pseudomonas aeruginosa
atgcgtgagcccatgacgtggcgcacttcgcccggccaatccgcggacgctttgcggcatccggccattccttccagatcgcccctgaccagcagggccctgtcgtttctcggggcgctttctcttctgaccttcgccgccaccccggtcctggccgagtcgacgccaaccgccgcgtcgccgcaattcgccgtggagtcgccgaaggccgccagcagcctgctgctcagcgtcgcccatgccggcaagcggctggtcgcggtcggcgaccgtgggcatatcctgctctccgacgacgacggcaagacctggacccaggccaaggtgccgacccgccagttgctcacctcggtgttcttcgtcaacgagcgcaagggctgggcggtcgggcacgatgcgcagatcctcgtcagcgacgacgccggcagcacctggaccaggcagttcgaggacctcggccgcgaagcgccgttgctggacatctggttcgccgacgaacagcacggcctggccgtcggtgcctatggcgcgctgctggagacccgcgacggcggccagcactgggaagacgtcagcgagcgcctggacaacgaggaccagttccacctcaacgccatcgccgcggtcaaggacaacggcctgctggtggtcggcgaagccggcagcctgttccgctcgaaggactggggcgccacctgggaaaaactcgaaggcccctacgagggctcgctgttcggcgccatcggtaccgccgatgcgggcggcgtgctggtctacggcctgcgcggccacctgttccgctccgccgatttcggcgacagctgggaagagataccgctgaaggcggcgtccggcgacctggaattcggtctctccgacggcgcgctgctggcggacgggcgtatcgtcgtggtcggccacggcggcagtgtcctcgaaagcaccgacggcgggcgcagcttcagcgtgttcaaccgtcccgaccggctgtccctggccggcgtcagcgccaccggcgacggccacctgatcctggtcggccagggcggcgtgcacctcgctgcggcgaacggtgccgcgctcgaacaacaacaataa

SEQ ID NO: 319880 - DNA, 2382 bp, Pseudomonas aeruginosa
atgagtgccatgaaccagcatcagcaaaacaaggcgagcctgctcgaacgcctgatcttcaacaaccggccggtggtgatcttcctctgcgtgctggtcagcgtcttcctgttctaccaggccacccaggtgcggccgtccaccagcttcgagaagatgatcccgctggagcacccgttcatccagaaaatgctcgagcaccgcaacgacctggccaacctcggcaacaccgtgcgcatctcggtggaggcggtgaacggcgacatcttcaccaaggagtacatggagacgctccggcagatccatgacgaggtgttctacatccccggcgtcgaccgttccggcctgaagtcgttgtggagccccagcgtgcgctggaccgaagtgaccgaggaaggcttcgccggcggcgaggtgatcccgcagacctacgacggttcgccgcgggcgctggaggaactgcgcaacaacgtgctcaagtccgggcagatcggccgcctggtggcgaacaacttcaagtcgagcatcgtcgacgtaccgctgctggagatgtacccgaacccgaagaaccagagcgaactgatcaagctcgactaccgccagttctcccatgagctggaagagaagatccgcgacaagtaccagttgcagaaccccaacgtgaaggtgcacatcgtcggcttcgcgaagaaggtcggcgacctgatcgacgggctggtgatggtggtcggcttcttcggtatctgcctgctgatcaccctggtcctgctgtactggttcaccaagtgcatccgcagcaccatcgccgtgctgatcaccaccctggtcgcggtgctctggcagctcggcctgctcaacctggtcggtttcggcctcgatccctattcgatgctggtgccgttcctgatcttcgccatcggtatttcccacggcgtgcagaagatcaatggcatcgccttgcagtccagcggcgccgacaatgcgctgatggcggcgcggctgaccttccgccaactgttcctgccggggatgatcgcgatcctcgccgacgccgtcggcttcatcaccctgctggtgatcgacatcggggtgatccgcgagctggccatcggcgcctcgatcggcgtggcggtgatcgtcttcaccaacctgatcctgctgcccgtggcgatctcctacatcggcatcagcaagaaggcggtgcagcgcagcaaggatgacgcggtgcgcgagcacccgttctggcgcctgctgtcgaacttcgccagcccgaaggtggccccggtgtccatcgccatcgccctgctgatgctcggcggcggcctctggtatggcaagcacctgaagatcggcgacctcgaccagggtgcgccggaactgcgtcccgactcgcgctacaacctcgacaacgacttcatcatccgcaactactcgaccagttcggacgtgctggtggtgatggtcaagacctccccggaaggctgctccacccaccaggccctggcggccatggacgagctggcctggaagctggagaacaccgagggcgtgcagtcggcgatctcgatggtcaccgtgtccaagcaggtgatcaaggggatgaacgaaggcaacctgaaatgggagaccctgtcgcgcaaccaggacgtgctgaacaactccatcgcccgtgccgacggtctctacaacaccgactgctcgctggcgccgctgctggtcttcctcaacgaccacaaggccgagaccctcgaccgcgcggtggcggcggtgcaggccttcgccgcagagaacgacaaggacgacctgcagttccagctggccgccggcaacgccgggatcgaggccgccaccaacgaggtgatcaagcagtccgaactgatcatcctggtgctggtgtacatctgcgtggcggccatgtgcatgatcaccttccgttccttcgccgcgaccctctgcatcgtcctgccgctgatcctcacctcggtgctgggcaacgcgctgatggcggcgctgggcatcggcgtgaaggtcgcgaccctgccggtgatcgccctcggcgtcggcatcggggtggactacgggatctacatctacacccgcctggagtctttcctgcgcatgggcctgccgttgcaggaggcctactacgagaccctccgctccaccggcaaggcggtgctgttcaccggcctgtgcctggcgatcggcgtggccacctggatcttctcggcgatcaagttccaggccgacatgggcctgatgctgaccttcatgctgctctggaacatgttcggcgccctctggctgctgccggccctggcgcgtttcctgatcaacccggccaagctgcaggccaggaaggcctcggtgttcgctcactga

SEQ ID NO: 319881 - DNA, 1296 bp, Pseudomonas aeruginosa
atgaaacgcggcctgagcctgatccccatcgtcggcggcggcgtcaccctgatcctcgccggggtgttgctggtctacacgcgcatgctcggcgactacggcgagaccggcgccctctacctgctcagcatgatgatggaagaggaagggctgtacttcgcccagcgctaccaggaagacccggctacgccggcgccggacagctactacttcaagggcagcgtcggcaccgcggggctgccgccgaaactcagggagatgctcgacaccccgccctacaagagcatcggcgccatgcaactgctcggcaactgggacgacgatgacgaagaggaggatgacgacgcgcccagcgacgatgcctacgtggtggtccgccagccactggccgacggcaagacgctctacctctacgacaacgacgccgccggcagcatcgacacgccgctgtccgacgccatcatcgacgcccgcgtcaggcagacctggatcgtcaccctatcggtcaccctgccttcgctggccgccgtcggcctgctggtctggttcatcgtcgccccgttgcgcaagctgacgcgctggtcgatgaccctcgacgaccttgccccggacagccagcggccgcgcttcaactaccgcgaactcaacgtgctggcggataccctgtggaacagcgtgacccggatcaaggacttcagccagcgcgaggagcgcttcctgcgctacgccagccatgagctgcgcaccccgctggcggtgatcggcatgaacctggagttgctcgaccaacccggccgcgcgccctccccgcatgccttgcaacgcatccgccgctcggcgctgggcatgcagcagatgaccgagaccctgctctggctcagccgcgagagcggcgaactgcgcgacgacggacacatcgaggtcggccgcctgctggaggaactgctcgaggaacagcaggcgctgagccagcgccgcggcctgaccttccacctcgacgtggagccacacagcctgccgcagacccgcgcacggatcatcatcggcaacctgctgcgcaacgccctgcagtacagcgacgagggcgtggtggaaatcgtcgtgcgcgaccgcagcctgctgatcagcaaccccatcggtgcggcccagggcacggaggagtcgatggcgttcggttatggcctgggcctcgacctggtccagcgcctgtgccagaagagcggctggcgcctgcattacagcagcgacgagcagcgcttccgctgcgagctgctgttccccgccacgccggactga

SEQ ID NO: 319882 - DNA, 672 bp, Pseudomonas aeruginosa
atgcatatccacgtactcgtcgtcgaagacaacttcgatctcgccggcaccgtcatcgactacctcgaggccgccggggtggtctgcgatcacgcccgcgacggccaggccggcctcaacctggcgcgcgccaaccgctacgacgtgatcctgctggacatcatgctgccgcgcatcaacggccggcaggtctgtcgccagctgcgcgaagccggcctgcagaccccggtactcatgctcaccgccctggataccctgcaggacaagctcgacggcttcgacgccggcgccgacgactacctgctcaagcccttcgaactgccggagctgctggtccgcctgcaagccctcagccggcgccgcagcggccaggcccagcgcctgcaggtcgacgacctggtgatggacctcgacagccgccaggccagccgcggcggcacgcccctggcgctgtcccccaccgcctggaagatccttgagtgcctgatgcgcgccagccccgcgctggtcacccgcgagcagctggggcgcagcgtctggggcgacgaaccgccggaaagcaacaccctcaacgtgcacatgcaccacctgcgcagcaccgtcgacaaggggttcgccacccctctgatccataccctgcacagcgtcggcttccagctggagcgcaaatga

SEQ ID NO: 319883 - DNA, 1080 bp, Pseudomonas aeruginosa
atgcgcttccgtaccctgtacctcgtcctgtgcggcctgctcctgggccacgccgcgacggccgccgaaccgccgaccgcgcccacgccgccgacgcagccggccgaagggccgggcggcgcggactatcgccatgccagcgtgcatcagtggcacttcggcgaaggcgctcgcgaatactgggtgttcacccccgagcaaccggtccccggcaacgctccgctggtgatcttcctgcacggctggagcgtgatgcagccggacctctaccgcgcctggatcgaccatatcgtccgccgcggcatggtggtggtctacccgcgctaccagccggacctgaagacgcccaacgcagacttcctcgacaatgccgccggcgccctcggcgacgccctcaggcgcctgcaggccggcgagctgggggtgcgcccgcggctgaaccaggtcgcctacctcggccactccgccggcggactgctcgccgccaacctggcggccgccagcgaacgcctgaagctgccggcggcgaaggcgctgatggtggtcgagcccggcaagagccagggcaagcgctgggacggcgtggcccaggaacgcctgtcggggctggccaagggcaccctgctgctggcggtctgcggcgacgaggacagccacgtggcctgcaccgacgccaagcgcatctaccgccagagccggcacattccgcccagcgacaagaacctgctgctgctgcgcagcgatcgccacggcgctccgccgctgctggccaaccacgcggcacccaccgcgccggtattcggcccgcagtatccgaaggaagaagacagcgactggttgctcgaccgcgtcgagaagcgcctcgaagtccagcaggccgaaggccgctataccggccacgacccgctggtgatcgacgccctcgactggtacggcacctggaagctgttcgatggcctcaccgacgcggcgttctacaaccgcaaccgccagtacgccctgggcgctacgccggagcagaccggcatgggccaatggagcgacggcaccccggtgaagccaatcaaggtgctcaagtag

SEQ ID NO: 319884 - DNA, 1632 bp, Pseudomonas aeruginosa
atgatccgcctgttctgcagcctgcttctcgcgctcctctgcgtctccgcccacgccagcttcagcgccagcgtcgaccgcgcccgcctgaccgaaggggaaagcgtcgaactgacgctggaatcggacgacccgaccctcttcggcaaacccgacctgagcccgctggacgccctcttcgaggtcctcggcacgcgccaggtcaaccgtctcgccacgcagaacggccgggcccaggccaccacccgctggatcgtcaccctcctgccgaagcagagcggctacgtggcgatcccgccgatcagcctcggcgccagcagcacccagccgatcaggctgcacgtactggaggcgcgcgaccgcgccaagagcagcaagctggcgccggtcttcatcgatgccagcgtcgaccaggagacagtctacgtgcaggcccaggcgatcctcaccctgcgcatctaccactcggtgtcgctatacgacgacagcagcctgaccccgctggcgatgaacgacgcgaaggtcgaacagctcggcgaggcgcgcacctacgagaaggagatcaacggcatccgccacggcgtgatcgaggtgcgctacgcgatcttcccgcagaagagcggcaccctggagattcctgcgcaagccttcagtgcgaccctggtcgaccgtggcagcgacgactacaaccccttcggcccgcgccccggccggcagatgcgggtgacttcgccgagcatcccgctgcaggtccggcccaagcccgccgactatccggccgacgcgccctggatgccggcccgcgcgctgagcatcagcgaaagctggagcccgcagccggagcaggcacaggtcggcgaatcgctgacgcgcaacgtgctgctgaaggtcgaggggctttccggcacccagcttccgccgttgccgctgcccgacgtgcaaggcctgcggcgctacccggaccaaccgcagctagccgaccagagcaccgaccagggcctcatcggcagtcgcgaggagcgcgaggcgctggtgcccgagcaggccgggcgcatcgagttgccggcgctcgaagtggtctggtggaacacccgcgaagaccgcctggagcgcaccagcctgccaccgcgcaccctggaagtggccgccgcgccgcaggccgaggcggagccgccggcggcggcgctgccgctcggcgaacgcctggagccgacgctctggccctggcaactggctaccgccgtgctggccctgaccaccctgctcggcttcggcctctggtggcgcgcccgccagctgccggcggtgatccgcgccgcggccaacggcccgagcagccgcagcctgctcgacgagctgcgccgcgcctgcctggccaacgatccccaggcgacccgccaggccctggacgcctgggcccgtcagcaacccgataccctggccgacatggcggcccgcttcgtaccgctgtccgacgccctggatggcctcaacggcgcgctgtacagcgagagcggccattcctggcagggcgaggacctgtggcgggcgatccgcgccctgcccaccacggaacaagcgccggcgggagcggtcgacaatggcggcctgccaccgctctatccgcgctga

SEQ ID NO: 319885 - DNA, 1740 bp, Pseudomonas aeruginosa
atgaacctgttgctggacgcctggccgcactggctgcgcccctactggctgctgctggcgccgctgcttggctggttgctgtggaagctgctgcatcgccagcgtcgtgccggacgctggcaattgctgttgccgacggccttccagccctggctgctggtcggcggcgccgggcggcagaaccgcatgccctggatctgcctcggcatcgcctggctgctggccctgctggccttgctcgggcccagttggcagcaactggaacagccctcgatgaagcgtagcgacccgctggtggcgatcctccagctgactcccgggatgcttgccggcgacctgtcgccgacccgcctggagcaggcccggcgcaagctgctcgacctgcttcgcacgcgcaacgacgcgcagaccgcgatcgtcgtctacgccggcagcgcgcataccctggtgccgctgtcggacgaccagctcaccgcgcgcaacctgctcgacgccctgaaaccttcgatcatgcccgagcccggccagcgcgccgacctcgccgtgcgccaggccctcgacctgctggaacagggcgcccagggccgcggccgcctgctgctgctgaccagcgagctgagcgaacccgagcgccagggcatccgcagcgccctcgagcaccgggcggcgcgcctcgccgtgctcggcgtcggcacgccgaagggcgctccggtgcagcaggaggatggcagcttcctcaaggacgaccagggcggcatcctcctgcccaggctcgacgaaagcgggctgcgccgcttcgccgcggagatcggcgccggctaccagcgcctgcggccgaacgaccgcgacctcgacagcctcggcctgctggcccgcggcggcacgctggaggaagatcgcgagaacgccctgctgcgcctgcagcgctgggccgaccagggttactggctgctcctgccgctgctcctgctggccgcctgtgccggacggcgcggctggctgttctgcctgccgctgttgatgctgagcctgccgcaaccggccatggccttccagttcgaagagcaaggccagcgcctgttgcaacggggccaggcggacgaggcggcgaagcgcttcgaggacttccgctggaaaggcctgtcgctctaccaggcccgcgactacgccgccgcggcccaggccttcgcccagggcgaccaggccgacgatcactacaaccgtggcaacgccctggcccgccagggcgaactggaagccgccgtcgacgcctacgaacaagccctggagcgccagccgcaactggtcgccgcgcaacgcaacaaggccctggtcgaggaactgctgcgccaacgccaggaacaggcggcgcagcagcaggccggcgagaacaaggaacagcgccaggaagcgagccagcagagcccgccatccggaagcagccagcggccgccgcgcgacgcggcgaccgtcgatgcgcagaaggcccaggccgcggcgccctcgaccagcctgccggaagacgaaggcgagaagaccgccggcgcacccggccaagcgcagccgcagcccaacgccgaggacgagcggacgggcgacgaggaagccgacgacggactcgacgacgaacgtcgccaggccctcgagcaatggctgcgacagattcccgacgatcccgccgaattgctgcggcgcaagttctggtaccaacagcagcaacgccaggaagccacgccatga

SEQ ID NO: 319886 - DNA, 1023 bp, Pseudomonas aeruginosa
atgtttgagttcgcctggccctgggtcttcgccctcgccccgttgccctggctgctgcgcctggtgctgccggccgccgacagcggcgaggcggcgctcaaggtgagcttcctcgacgaactcgaaagcctcgccggacgccgtgcccgcgcacgcctgccggcctggcggcagcaggtgcgcttcgccctgctctggttcctcctgctgctcgccgcggcccgcccgcagtgggtcggcgaccccctgccgctacccgccagcggccgcgacctgctgctcgcggtggatgtctccggctccatggactaccgcgacatgcgctggcaggaagacgagatcagccgcctggaactgatcaagaaactcttcggcgacttcatcgaagaccgtcgtggcgaccgcgtcggcctgatcctgttcggcagccaggcctacctgcaggcgccgctgaccttcgaccggcacaccgtgcgggtctggctggacgaggcacagatcggcatcgccggcaagaacacggcgatcggcgacgccatcggcctggcggtcaagcgcctgcgccagcggcctgcggaaagccgggtgctggtgctgatcaccgacggcgccaacaccggcggacagatagccccgcagatcgccgcgcaactggccgccgagcaacaggtgaagatctacaccatcggcatcggcgccgacccgcagcaaggcggcgtgcccggcctgttcggcttcaacccggggctcgatctcgacgagccgaccctgcgcggtatcgccgagagcactggcggcgaatacttccgcgcgcgatccagcgccgagctggaaagcatttccgcgaccctcgaccgcctcgaaccggtcgcccagcagactacccgggcgcgcccggccctggcgctgtacagttggccgctggccgccgccctcggcctgagtgtgctgctggtggcgctggaactctggccacgggaaaaccggacctggccgcgccgccgttccgggaggcaaccatga

SEQ ID NO: 319887 - DNA, 495 bp, Pseudomonas aeruginosa
atgaatccgctcgaccggctggaaccgctgatcgctcccctgcccgtcggctggtggccgccagcgcccggctggtggctgctggccgccctgctgccgttgctcggctgggggctctggcgactgcgccggcacctgccgcggcgcaccatcgccacccgcggcgaagcgccgctggatccgctgcgcgaagcggccctggccgaactggcggcgcttgccaagccctacggcagggcttccgccggaccctggctgcaagccatcaacggcctgctcaagcgggtctgcagggcgcgctggccagatagcggcagccacgccctcagcggccgcgcctggctggcgttcctcgacaaccgttgcccggccgccggcctgacccgctggatgatcctggtggaaggcggctaccgcgccgactgcaccctcgacgacaaggccgtggacggcctcgacgccgccgtcgccacctggattcgcaagcatgtttga

SEQ ID NO: 319888 - DNA, 981 bp, Pseudomonas aeruginosa
atgagcaacgagccagaaagcacgcagcacaagagcgccctgcagggactgaagggctacctgtcgagccagatcctcggccaggaaaaactcgtcgaccgcctgctgatcgcgctgctagccgacggccacctgctggtggaaggcgcgccgggactggccaagaccaaggccatcaaggacctcgccgaaggcctcgaagccgagttccaccgtatccagttcactcccgacctgctccccgccgacatcaccggcaccgagatctaccgtccggagaccggcaccttcgtgttccagcaaggcccgatcttccatcacctggtgctggccgacgagatcaaccgcgccccggccaaggtgcagtcggcgctgctcgaagccatggccgagcgccaggtttcggtcggccgcagcacctacgacctgccacagctgttcctggtgatggcgacacagaacccgatcgagcaggaaggtacctacccgttgccggaagcccagctcgaccgcttcctcatgcacgtcaagatcggctacccggaggcctcggtggaacgccgcatcctccagcaggcgcgtggcgaggcactgaacggcgaggcccggccggagcgccgggtgacccaggaaaccatcttcgccgcgcgccaggaaatcctcggcctgtacatggccgacgcggtggaggaatacctggtgcaactgatcatggccacccgcaccccggccaagcacgacgcggaactcgccgaatggatctcctacggcgccagcccgcgcggctccatcgccctcgaccgctgcgcgcgcgcccacgcctggctgggcggacgcgacttcgtcagccccgaggacatccaggcggtgctgttcgacgtgctgcgccatcgcctgatcctgaccttcgaggcggaagccgccggcatcgaccaggaccgggtcgtgcagcgcatcctcgacgtggtcgccgtggcctga

SEQ ID NO: 319889 - DNA, 771 bp, Pseudomonas aeruginosa
ttgccggggcttgcccggcgcaagggggagggccgcgcccggcgtgggtggcggcgctgggtcggtgggctgctgttgctgctcggcgcgctcgccagcggatgttcgaacgcgccgcgcaacgccgccggcgaggacaccagccagggttcgatgcgcgccggcgaattcctccagaccgatgccgatcgcatggccaccctggccatgcgcgacaacctgcaaagcctctaccagttgctctggaagctgtacaagcgcaatcccgccgaatggaagaagaccggcctgccgagccaggccgacgccgagctggcgatccgccgggccatcgagcagaaccgcgaactcagcgacctgggcggccgccgcgacatcgccgcgctgtcctactccctcgatccggcgttcaagggcgaccgcgtcggtgccttcatctactccctggccagcatgctgatcaccgcccatggcgggcgcaccgagttctacgtctaccaggggatcgacgcgcagtacgtctacaacgccgcgcgcaacgtcgaggtcgccacctggatgctggctacccgcaaggacgacaagggtgccccgttgctgctttccaacgccctcaccgacgacgccagcaacctcagctacgcccgcgagttcgccaagatcgtcgcgcgcctggacctgctcgccgaggtgctcggcgaacgctaccggcggatcagcgtgaactacgcccagggactgctgttcatgcatttcctgccggtgcagtga

SEQ ID NO: 319890 - DNA, 4863 bp, Pseudomonas aeruginosa
atggcgttcttcaccgcggccagcaaagccgatttccagcatcaactgcagacggcactggcgcagcacctcggcgacaaggcgttaccacaagtcacgctgttcgccgaacagttcttcagcctgatctccctcgatgaactgacccagcgtcggctttccgacctggtcggttgcaccctttccgcctggcgcctgctggagcgcttcgaccgcgaccagcccgaagtccgcgtatacaaccccgactacgagaagcacggctggcaatccacccacaccgcggtggaagtgctgcacccggacctgccgttcctggtcgactcggtgcgcatggaactgaaccgtcgcggctacagcatccataccctgcagaccaacgtcctcagcgtgcgccgctcggccaagggcgagctgaaggaaatcctgcccaagggtagccagggcaaggacgtcagccaggaatcgctgatgtacctggagatcgaccgttgcgcccacgccggcgaattgcgggcgctggagaaggccatcctggaagtgctcggtgaagtacgcgtgaccgtcgccgacttcgaaccgatgaaggccaaggcccgcgaactgctgacctggcttggcaaggccaagctgaaggtgccggcggaggaactgaaggaagtgcgcagctatctcgaatggctgctggacaaccacttcaccttcctcggctacgaggaattcagcgtcgccgacgaggccgacggcgggcgcatggtctacgacgagaaatccttcctcggcctgacccgtctgctgcgtgccggcctgagcaaggatgacctgcacatcgaggactatgccgtcgcctacctgcgcgaaccggtcctgctgtccttcgccaaggctgcccatccgagccgtgtgcaccgcccggcctacccggactacgtgtcgatccgcgagctggacggcaagggccgggtgatccgcgagtgccgcttcatgggcctgttcacctcctcggtgtacaacgagagcgtcaacgacatccccttcatccgcggcaaggtcgccgaagtgatgcggcgctccggtttcgacaccaaggcccacctcggcaaggaactcgcccaggtgctggaagtactgccgcgcgacgacctgttccagaccccggtggacgagctgttcagcaccgccctggcgatcgtccgcatccaggagcgcaacaagatccgcgtgttcctgcgcaaggacccctacggtcgcttctgctactgcctggcctacgtgccgcgcgacgtgtattccaccgagacgcgcctgaagatccagcaggtcctgatggagcgcctgcaggccagcgactgcgagttctggaccttcttctccgagtcggtgctggcccgcgtgcagttcatcctccgcgtcgacccgaagtcgcgcatcgacatcgacccggcgcgcctggaggaagaagtgatccaggcctgccgttcctggcaggacgactacagcagcctggtggtggaaaacctcggcgaggccaagggcaccaacgtcctggccgacttcccgaaaggcttcccggccggctaccgcgagcgcttcgccccgcacttcgcggtggtcgacctgcagcacctgctcagcctctccgagcagcgcccgctggtgatgagcttctaccagccgctggcgcagggcgagcagcaactgcactgcaagctgtaccacgccgacaccccgctggccctgtccgacgtcctgccgatcctggagaacctcggcctgcgcgtgctcggcgaattcccctaccgcctgcgccaccagaacggccgcgaatactggatccacgacttcgccttcacctacgccgaagggctggacgtggacatccagcagctcaacgagatcctccaggacgccttcgtccacatcgtcagcggcgacgccgagaacgacgccttcaaccgcctggtgctgaccgccaacctgccgtggcgcgacgtcgccctgctgcgtgcctacgcgcgttacctgaagcagatccgcctgggcttcgacctcggctacatcgccagtgcgctgaatgcccacaccgacatcgcccgcgagctggtgcggctgttcaagacccgcttctacctggcgcgcaaactcaccgcggaagacctggaagacaagcaacagaagctggagcaggcgatcctcggtgccctcgacgaagtccaggtgctcaacgaggaccgcatcctgcggcgctacctcgacctgatcaaggcgaccctgcggaccaacttctaccagcccgacggcaacggccagaacaagagctacttcagcttcaagttcaacccgaaggccattccggagctgcccaggccggtgcccaagtacgagatcttcgtctactcgccgcgcgtcgagggcgtgcacctgcgcggcggcaaggtggctcgcggcggcttgcgctggtcggaccgcgaggaagacttccgcaccgaggtgctcggcctggtcaaggcccagcaggtgaagaacgcggtgatcgtgccggtcggcgccaagggcggcttcgtcccgcgccgcctgccgcttggcggtagccgcgacgagatccaggccgaggcgatcgcctgctaccggatcttcatttccggcctgctcgatatcaccgacaacctcaaggaaggcgaagtggtgccgccggccaacgtggtccgccacgacgaggacgatccctacctggtggtcgccgcggacaagggcacggcgaccttctccgacatcgccaacggcatcgccgccgagtacggcttctggctcggcgacgccttcgcctcgggcggctccgccggctacgaccacaagggcatggggattaccgccaagggcgcctgggtcagcgtgcaacggcacttccgcgaacgcggcatcgacgtgcagaaggacaacatcagcgtcatcggcatcggcgacatggccggcgacgtgttcggcaacggcctgctgatgtcggacaagctgcaactggtggccgccttcaaccacatgcatatcttcatcgacccgaacccggacgccgccagcagcttcgtcgagcgccagcgcctgttcaacctgccgcgttcgagctgggccgactacgacgccaagctgatctccgccggcggcgggatcttcctgcgcagcgccaagagcatcgccatcaccccggaaatgaaggcgcgcttcgacatccaggccgacaggctggcgcccaccgagctgatccatgcgctgctcaaggcgccggtcgacctgctctggaacggcgggatcggcacttacgtgaagtcgagcaaggaaacccacgccgatgtcggcgacaaggccaacgatggtctgcgcgtcgacggccgcgagctgcgcgcgaaggtggtgggcgagggcggcaacctgggcatgacccaactggcgcgggtcgagttcggcctgcacggcggtgccaacaacaccgacttcatcgacaacgccggtggcgtggactgctccgaccatgaggtcaacatcaagatcctgctcaacgaagtggtgcaggccggcgacatgaccgagaagcagcgcaacgcgctgctggtgaagatgaccgacgcggtcggcgccctggtgctgggcaacaactacaagcagacccaggcgctgtccctggcgcaacgtcgggcccgcgagcggatcgccgagtacaagcggctgatgggcgacctcgaggcgcgtggcaagctcgatcgcgccctggagttcctgccttccgacgaggagctggcggaacgcatcagtgccggccaggggctgacccgcgccgagctgtcggtgctgatctcctacagcaagatcgacctcaaggaatcgctgctgaaatcgctggtgccggacgacgactacctgacccgcgacatggagaccgccttcccggcattgctggcggagaagttcggcgacgccatgcgccgccatcgcctgaagcgcgagatcgtcagcacgcagatcgccaacgacctggtcaaccacatgggcatcaccttcgtgcagcgcctgaaggagtccaccggcatgagcgcggccaacgtcgccggggcctacgtgatcgtccgcgacgtgttccacctgccgcactggttccgccagatcgagaacctcgactaccaggtgcccgctgatatccagctgaccctgatggacgaactgatgcgtctcggtcgccgcgccacccgctggttcctccgcagccgccgcaacgagctggacgcggcgcgcgacgtggcccacttcggcccgcgcatcgccgccctcggcctgaagctcaacgagctgctcgaagggccgacccgcgagctgtggcaggcgcgctaccagacctacgtcgacgccggcgtgccggaactgctggcacgcatggtggccggtaccagccacttgtacacgctgctgccgatcatcgaggcgtccgacgtgaccggccaggacaccgcggaagtggccaaggcctatttcgccgtgggcagcgcgctggacctgacctggtacctgcaacagatcaccaacctgccggtggagaacaactggcaggcgctggcccgcgaggcgttccgcgacgacctcgactggcagcagcgggcgatcaccgtctcggtgttgcagatgcaggacggaccgaaggaggtcgaggctcgcgtcggcctgtggctggaacagcacctgccgctggtcgagcgctggcgggcgatgctggtcgaactgcgtgccgcgtcgggtaccgactacgccatgtacgccgtggccaaccgcgagctgatggacctggcgcagagcagccagcacggtgtctgcatcccctga

SEQ ID NO: 319891 - DNA, 444 bp, Pseudomonas aeruginosa
atgcccaccaaccaggatctccaactggcagcgcatctgcgcagccaggtcaccaccctgacccgccgcctgcgtcgcgaggcgcaggccgatccggtgcaattctcgcaactggtcgtgcttggcgcgatcgaccgccttggcggcgacgtcacaccttccgagctggccgccgccgagcggatgcgctcgtcgaatctggccgcgctgctgcgcgaactggaacgcggagggctgatcgtccgtcacgccgatccgcaagatgggcgcagaacccgcgtgtcgctgagctcggagggccggcgaaatctctacggcaaccgcgccaagcgcgaagaatggctggtgcgtgccatgcacgcctgtctcgacgagagcgagcgcgccctgctggcggcggccggtccgttgctgacacgcctggcgcaattcgaggagccctga

SEQ ID NO: 319892 - DNA, 573 bp, Pseudomonas aeruginosa
atgaacacagcactgatcggtctcgactacatcgtcgatatcatgcatcccgacggtaggattgcccgctgtgcagaacaggccgccttgcgtggcgtggtcgcgcgtttcaaccgcgctctcgccgtcgccgagcagcgtggctggctgcggatcgcggtgagggtgggcttcgagcccggctatctggacctgccggaacattcgccgatcttcgctgccgcgcaggcactcggcgctctcgacctctgcgggcgcggttgcgcatttcatcctgacctgaagcgggatgccgtgcagatggaagtgctcaagccgcgcatcagcgccttctatgccacgcgcctggaggccgtgttgcgggcgaggcggatcgagcgcctggtgctcgccggtgtcagtacgacctgggctgtgcaggccgccgcgcgcgatgcgcacgatcgcgactaccaagtgctggtgttggaggaggcctgcgcggcggccagcgacgaggagcaccggcgctccatcgaggtcctgggcggcatcgcgcggatcgtcacgctcgaccagttggcagcgctctag

SEQ ID NO: 319893 - DNA, 987 bp, Pseudomonas aeruginosa
gtgtgcgcctcgctgacacgcctgttcgacggccgcgccatggggcgcgcgctcgccgtgtcgctgccgctgttcgtgctctacagcgccagcggcgatgccaactggctgctggcgaatatcgcgacgatctccgtggcggtcgtcgtcgagcgggtcggtagcgcaccgctcgcggcgctcggccagggggtggcgatcatcctcggctttctcggcctgtcgttcgcgctcgcctggggagcggcgtttgccatcgcttgcgcagcgctcgccgctgctgctgtcgcgctatccggcctggatacgcgcttgcgcacgctgggcaatttcgtctttattcctgtgctctatctggcctgcgaggttgccgcgacgcaccgcgctgcgctgtccctggtgccgtatctcgtcgtcgcgacgctaccatcggtggcgctcgccggtgtcgataccttgcgccacgcagcgctcgcacgccgttacggcaccctgctgcgctggcgtggggcgcacttgacgggccacgcggccgcgcatgacgagctgctccaggctgtgttggcggtcacactcgccgtagcctccagcgcgaccttggtggcgtggcggcacatcgaatacggccagtgggcgatctggtcgtccgccagcgtggttaccggcaatgccgccagcgcgcacctgaagctgcgcgatcgcgggcttggcgcgctgctcggcgtaccgctcggcctcgtggtaggggccgctctaccacatgttctattggtccacaccttggcgactcttgcctcggtcctcaccctcgtcggattccgtcactacgcgacaggttttgccgcgcgttgcgcgtgcatcgcctgcgcctcctgggcgattcagcagtcgcccctggtcgcctcgctgcgggtcgccgaagtactggcgggtggggcgataggcgtcgcctcggtgtggctggtgcggttcctcgcacgcaactga

SEQ ID NO: 319894 - DNA, 2736 bp, Pseudomonas aeruginosa
gtgccggcactgccgcaggggctgccggggggggcgtccagcgtggcgttctggtacgccgagcggccgccgctggccgagctttcccagttcgactgggtggtgctcgaagcggcgcacctcaagccggccgatgtcgggtatctgaaagagcagggcagcacgcccttcgcctatctgtcggtcggcgagttcgacggcgacgccgccgccatcgccgacagcggcctggcccggggcaagagcgcggtccgcaaccaagcctggaacagccaggtaatggacctcgccgcgccgagctggcgggcgtacctgctcaagcgcgccgcggagctgcgcaaacagggctacgccggcctgttcctcgataccctggacagcttccagctacaggccgaggagcgccgcgagggccagcgccgggcgctggccagtttcctcgcccagctgcatcgccaggagccgggcctcaagctgtttttcaatcgcggtttcgaagtgctgccggagttgcccggcgtcgcgtcggcggtggccgtggagtcgatccatgccggttgggacgccgctgccgggcaataccgcgaggtgccccaggacgatcgcgattggctgaagggccacctggatgccctgcgcgcccagggcatgcccatcgtcgccatcgactacctgccgccggagcggcgtgacgaggcgcgcacgctcgctgcgcgcctgcgtagcgaaggctacgtgccgttcgtcagcaccccggcgctggactacctggggatgagcgacgtcgaggtgcaaccgcggcgcatcgcgctgctctacgatccgcgcgagggcgacctgaccctgagccccggtcacgtctacctcggcggcctgctcgaatacctcggttatcgggtcgactacctgcccaccgaccagccgctgcccgaacgtccgctgagcggtctctacgccggggtggtgacctggatgaccagtggaccgccgctggccagcgacgccttcgacaactggatcgctgcacgtctcgacgaaaaggtgccggtggcgttcctcgccggcctgcccacagagaacgacggcctgttgcagcgcctgggtattcgccgactgtcgcagaaactcaaggtcaagccgagtaccgagacccacgaccaggcgctgcttggttccttcgaagcgccgctggtgatccgggtccgcgacctgccggcgctcaccgtactcgacccggcgcgggtggccccggcgctcaagctcaagggcgacggcaaggagtacgtgccggtggcgaccgccgactggggcggcttcgccctggcgccctatgtgctggaggagggtagcgagcaccggcgctggatcctcgatccgttcgccttcctgcgcaaggccttgcgccttgtgccgctgccgagtcccgacgcgaccaccgagaatggccggcgcatcgccaccgtgcacatcgatggcgacggcttcgtctcccgtgccgaggtgcccggcagtccctatgccggccagcaggtgctggaggacttcatcaagccctatccgttcctcacctcggtctcggtgatcgaaggcgaggtcgggccgaagggcatgtacccgcacctggccagggaactggagccgatcgcccggcgcatcttcgccgacgacaaggtcgaggtcgccagccataccttcagccatccgttcttctggcagccgcaactggccgagcagggcgagaacttcgaggcccagtatggctacaagatggccatcccgggctacgacaaggtcgacttcgtacgcgaggtgatcggcgcccgcgactacatcgagcagcgcctgaccaccccgcggaagccggtcaagatgatcttctggtccggcgacgcgctgcccgacgccgccaccatcaagctcgcctacgacgccgggctgatgaacgtcaacggcggcaacaccgcgctgacccgggcctttccctcgctgaccggactctacccgctgatccggcccacccgcggcggcgtgcagtactacgcgccgatcatcaacgagaacgtctacaccaatctctggcaggggccgtactacggcttccgcggcgtcatcgataccttcgccctgaccgacagcccgcgccgcctgcgcggcctgcacctgtactaccacttctattcggggaccaagcaggcctcgatccgcaccatgcaccagatctacgcggcgatgcaggcggagcatccgttgtcgctgtggatgagcgactacattccgcgcctggaaggcctgcatcgcgccagcctggccaagcgtgccgatggcagttggcaactgcgtggcttcgccgccttgcgcacggtgcgcctggacccggcgctgggttggccggacctcggccgctccacgggagtcgcgggcgtgcgcgacctgccccaggggcgctatgtgcacctgagtgcggcgaatgcgcgcctggtcctgcgcgacagccgcgatccgcggccggcgctggaggaggccaacctgccgctgaagcactggcgctaccgcgacgatggccgcgtcgagttcgccttcgccgggcacctgccattacgcctggtggtgcgcgcggcgggcgattgccggctgagtgcggccggcaaggccttcccgggaaaggccggcaacggcctgtggacgttcgagttgccgatggagcaggtgcgcgatggccaactcgtctgccgctga

SEQ ID NO: 319895 - DNA, 3582 bp, Pseudomonas aeruginosa
atggccaactcgtctgccgctgacaagcatccccaggcgcgcctgctgaatccctgggccctgctgccggtcgctctcggggtggcgctggtgctgtggctgaccttcaacagcgaagaagtattcatgcccagcggcgatggcgagcccgacgcggtctcggtgaactacgccgaactgttgttgcaggcgcacccggagaacgacgcgctgcgcctgaccctgatcgacctgctggtcaagctcggcgacttcgagcaggcgcgtcatcacctcgcccgtctgcgcggcaaggaccgcctggcaacgccgttctacgaggtggaactggacatccttggcgccctggccaggcccgagggcatggatgaggagcagacgcgccgattgctggagcgcctgcgcaagatcgagcatgtttcgttgaacgacgccatgctcgaacgacttgcccgtcatgccctggccctggacgcgccggacctggcggcgcggacctttgccgaactggccggccgcgacccgcagggccggcagcgctggctggacgaggcggcgcgctggtacctggcttccggcgagccgctgccggcggcggacatccagcggcaactggccgaagcgcaaaccgagccggcgaagcgcctggcctatctgcgccaggccttcgccagcctgctcgctggcgagcgcggcgaacaggcggcgttgttgctggacgagcggctggacgccttgccggaggatgaatcgaccctggtctggctcgccgagggcgtacgcgccgccgaaggcagccagcgctacgacctggccgaacgcttcatccggcgctggcgcgaattgcgccccgaggaccatgaggcgctggccgccgacctgcgcctgaacatggccgccgggcggatcgagcgggcctgggaggtcggccaggagctgctggccctgcgcccggaggacagggcgctgctggccaatctcgcgcgccttggcgaatggaccggcaacggcccgcgggcgctgggcttttggaagcaactgctggccggcgccgatgacccggccctgcgcgagcatgcctggcgcctgtcgctgcagatgttcgatttcgacagcgccatcgagctgctggcgcccatcggtgcgcagcgacagatgaccgacgaggaactcgatgcgctggtctacagccatgaaacccgcggcacgccggaagagggcgaggcatggctgcgcggctacgtgcagcgttatccgaaacagcgcctggcctggcagcgcttgcaacagattctcgaacacacccagcagttgcaggaagagaccggggtctgggcgcggatggcccggcatttcccgctgagtgtcaaggaacgcatgcagtgggcggaaacccactggaacctgttcgatccgcgccaggcctggaaggtcctcgccggcgtggatacccgcgcgatccgcgagccggagttctggcgcctgcgcgcggcgctggcctgggccctggagcaggacgacgatgcccgcgccgcctacgagcgcatgctggccctggacatccgcctgaacagcagcgacgaggaccagttgatcgccctgtaccgggacagcaatccgaagcaggccttgcaggtgcttatcggcagttggcagcgcagccgcgatccgcggcgcctggccagcgccctgcaactggcggagaacctccacgactggccggccctgaagagcctgctggccgaggccgaaggcctgccggaagcgcagggcagcccctattactgggtggccagggcgcggctggcggaacaggaaggccatggcgacgtcgccgagcgtctgtaccgggaagccctggtgcgtttccccggcgagaacctggtgcgcgaacgcctgctctggttctacatcgaccgtggccgtcgcgacagcctggcgcccctgttggcacagtggcatggcctggcgctgcgggacagcacgctgtggctgccgttcgccagcgccagcctgctgctcgagcgtaacgaccaggcgctggcctggttccgcctgtacctcaagtccaatcccaacgactggctggtgcaggccgcctacgccgacgcactggatgccagcggctaccaggacaaggcactgcgcctgcgccgactactgctccggcggctcgaccgcgaggcggtcagggccaccccggacagcttcgccgcctacctgcgcctgctcgccgtggcccaggggccgctgctcgcccagggcgaggcgcggcgggcctggaatggcgagccggcgatgctgcagctgtggttcgagcagttcctcgaccagctcgccgccaccaaccaggagccgctgaaggatgactggctggcctgggcgcgcggccggggcctgaagatcgggcgcaacgaagagatccaggccgccctgcgcagccagaatcgcgccgccctgcaacgcctgctggagcgcggcgagctggatccggcgcagcgggtcgaggcgctggtgcgtctcggccatggcggcgaagcgctgggcgaggccctgggcgcactgggcgacggccactcgcgcgacaaccgcgagcaactgcggcggcaggcggcggaaatcctcgaacgcactccccagggcctgcaactgggttggaacaagcgcgacttcggcggtctcgacttcaaggggccgacgctgcgcgcggcgcgccacctcggcgacgactggtacgccgatctcgaactgggcagtggccgctatcacggcgatgcgctggatagctcgctcctcggtagcgaacgcaacgccaggctgacgttgcggcgcgaactggccgatggcttcgccgcggcgacgctcgatggcagctggcgcgacgacgaggaccgccacggtctgggggtgctgcgcaattggcggctgagctcgcgcgacgaactggaagcgggcctcgactggcaccgcgagaccgacgagaccggcctgatgcgagccctcggcatgcgcgacagcctacggctcggcggccgccacaccctcagcgggcgcgaccagttgagctggtcgctggcgcacaaccgcttctctacccgccagggcgacgacctcggcaacggcgaggcgctgtccctggaatgggcccacacactgttcttcgacggcccggcctggcaactgcgcggcggcatcgactaccagcgcaatcgcctggagaaccgcgtgccggacgacctgctggcggcccatggcggtgcgctggcgctcgatggcgcgcgcagccaggacctgctgcaggaccgctatggccaggtctacctcggcagcacctggcgccgtggcttccctggcgcgctgaaccgcagccgtccgcaatacacctggatcgtcgacaccctggccggctggcagtggacagagaaggagttcaactacggcatcgatctcggcatcggcatggagctgctgggcgacgacgaactggcgttcaccttcggctaccagtcggctccccagggcggtggcggcgatgccggcggcacgctcggggtgacctacagcacgcgcttcggccgctga

SEQ ID NO: 319896 - DNA, 519 bp, Pseudomonas aeruginosa
atgcaatccatccgctgcctggctctcgcggccgtcgccctgttcatggcgggctgctccagcttcaccagcgaaagcgctacgccgctggcgcgcggcgcgcagtggggcctggtgccgctgctcaattactcccaggcgccgcaggccggcgagcgtgccgagcagatcctgctcagcgtgctggccgaggagggcgtgcggccgcgcctgtacccggcgcagccgcaaggcgacctgcaactggtcgacgaccgcgagcgccagcagcgcgcactggactgggcacgccagcagaagctggcctacgtggtcaccggcagcgtcgaggagtggcagtacaagaacggcctcgacggcgagccggcggtgggcgtcagcctgcaggtgctggagccggcctccgggcgggtgctctggagcaccagcggggcgcgcgccggctggtcccgggaaagcctggcgggcgccgcgcagaaagtcctgcgcgagctggtcggcgacctgcggctcgagtga

SEQ ID NO: 319897 - DNA, 1368 bp, Pseudomonas aeruginosa
atgtccgcgcacaaggatttcgccctcgcaccgcgcgccagcggcagcgtctcctgggtcgagacgctggtcatcagcgcgctcgcgctgggcctgggctggtggttcagcccggacgacccgctgcaggtcaacgccacctttccctgggtgatcctcgcgcccctgttgctgggcatgcgctacggcttcgtccgcgggttggccagcgcggcgctgctggtggcggcgctgttcgcgtttcgcgtccagggcgtcgaggcctatgcccaggtaccggcggccttcatcgtcggcgtgctgctctgcgccatgttggtgggcgagttccgcgacatctgggaacgccgcctggagcgcctggagctggcgaacgagtaccgccagttgcgcctcgacgaattcacccgcgcccatcacatcctgcgcatctcccacgatcgcctggaacagcgggtcgccggcaacgaccagagcctgcgcagttcgctgctcggtctgcgacaactgctgcgcgagctgccgggcgaggaggcaccgctcgatgcgctggcggaaaccgtgctggcgctgctggcccagtacggttcgctgcgcatcgccggactctaccgggtgcgccacgaccgcaccccggagccgcaacccttggcgacgctcggcgagatgccggcgctggacgccgacgatctgctggtgcgcacctgcctggagcgcggcgaactggtcagcgtgcgccaggaactgctggagcgcggcgagcagcgtgcgcacagcgcgctgcaggtgtgcgtgccgctggtcgacaccgatgggcggatcctcgccctgctggcggtggagcagatgccgttcttcgtcttcaacgaacgtaccttcagcctgctggcgatcctcgccgggcacatcgccgacttgctgcagagcgaccgtcgcgcactgcaactggccgacatcgacgcccagcgcttctcccagtacctcaagcgctccctgctggacgcccgcgaccatgggttgccggcctgcctgtatgccttcgagttgaccgatgcgcgctacggcgaagaggtccagcgtctgctggaaggcagccagcgtggcctcgacgtgcagttgcgactgcgcaacgacgagggccggcgggtcctgctggtgttgttgccgctgacttccgccgaaggctcccaggggtatctgcagcgcctgaggattctcttcgccgaacgcttcggccaggcccgcgagctggagtcgctgggcgtgcgcatccgccagtacgaactggacgccggcaacgatcggcaggcgctgggacatttccttttcaacgagtgcggcctgaatgatcagcaagtggctgtttag

SEQ ID NO: 319898 - DNA, 990 bp, Pseudomonas aeruginosa
atgatcagcaagtggctgtttagcggcgccttcctgttcgagctgagcagttgggcgagcgtcttcgccgacctgccgttcggccaggcgctggcgctctacctgttcgcccacggcctgggcagcgccctgctgtgcgtcggcgtatggctgctgctgccgcggcgctacaagttcccgctgccgtggagcccgctgttcctcttcagcctggccttcttcgtgccgctgatcggagcggtcggcgtcgctgcggcggtattcccggcgctgtacctgccgcgccagcgtggcgagcaggcctggcaggcgatgggcgtccccgagctgccgttccggccgaaggaaaagcgcctcgacatgatgttcagcgacggcggtctgcaggacgtcctgcgccatgcgccggacccgaaccagcggctcacggcgatcttcgccacccggcggatgcccggcaaggaggcgatcccgatcctcaagctggccctgcgcgaccccgccgacgacgtccgcctgctggcctactcgatgctcgaccagaaggaaagccggatcaaccagcgcatcgaggccgccctcggccgcctcgccggcgccacgccggcgcgacgcggcgcgctgcacggaaccctggcgcgctggtactgggaactggcctacctggggttggcccagggcagcgtgctggagcacatcctcgagcaggcgcgcgagcataccgaccaggcgctgcgcggcacaccctcggccgacctgcatctgctggccgggcgcatcgccctcgaacaaggccgcctggaggatgccggacgcgccctccaggccgccgaggaggcgggaatcgatagtgcccagctggcgccgttccgcgccgaggtggcgttcttccagcggcgctaccgggacatcccccggcttctcgccggaatgcccgacgacatgctgcaacggccgcccttcgcggccctggcgagatactggacatga

SEQ ID NO: 319899 - DNA, 1524 bp, Pseudomonas aeruginosa
atgaccgaacacaccgctccgacggcgcccgtcgccgatgtctgcctgctgctggagggcacctggccctatgtccgcggcggcgtctccagctgggtcaaccagttgatcctcggtctccccgacctgaccttctcggtgttcttcatcggcggccagaaggatgcctacggcaagcgccactacccgatcccggacaatgtgctgcacatcgaggaacacttcctggaaaccgcctggagttcgccgaacccgcagacgcgacagggcagtagcgagaccgaaaaggcgttgcgcgatctgcaccgtttcttccactacccggagacgccggacgtggaggagggcgacgcgctgctcgacctgctcgccgagggccgcatcggccgcgaggactttctccacagcaaggccagttgggaggcgatcaccgcaggctacgagcgctattgcaccgatccgtccttcgtcaattacttctggaccctgcgctcgatgcaggcgccggtgttcatgctcgccgaggcggcccggcggatgccgcgggcgcgcatgctgcactcgatctccaccggctacgccggcctgctgggctgcatcctgcaacgtcgctggggctgccgctacctgctcagcgagcacggcatctacaccaaggagcgcaagatcgacctggcccaggccagttggatcgcggagaaccccgacgagcagctgagtaccggactggatgccgaggtcagctacatccgtcgcttgtggatccgcttcttcgagcgtgtcggcctgctcacctatcgcgccgccaatccgatcgtcgccctctacgaaggcaaccgccagcgccaggtactcgatggcgccgagccacggcgcacccgggtgatccccaacggcatcgacctcgatgcctgggccggcgccctcgaacggcggccgccggggattccgccggtggtcgggctggtcggccgggtagtgccgatcaaggacgtgaagaccttcatccgcgccatgcgcggggtggtcagcgcgatgccggaggcggagggctggatcgtcggtccggaggaggaagacccggactatgccagcgaatgccgcagcctggtggccagcctcggcctgcaggacaaggtgaagttcctcggtttccgtcggatcggcgaggtcctgccgcaactcggcctgatggtcctcacctcgatcagcgaagcgcagccgctggtgatcctcgaagcctgggctgccggcgccccggtggtgagcagcgacgtcggctcctgccgcgaactgatcgaaggcgccgacgccgaagatcgcgccctgggtcgcgccggggaggtggtggcgatcgccgacccgcaggccacttcgcgggcgatcctcgccctgctgcgcaatccgcagcgctggcaggcggcccaggcggtcggcctgcaacgggtcgaacgctactacaccgaggcgctgatgctcggacgttaccgcgggctgtaccgcgaagccacggagattgcatga

SEQ ID NO: 319900 - DNA, 1371 bp, Pseudomonas aeruginosa
atggccggcatcggcttcgaactgcggaagatcctttcccgcgattcctatacggcgaccctgcgcgcctacctctacgccgggctgatcagctccggtccctgggtgctgtcgatcgtcagcgtgatgctgatcggcgtgctgagcctcggcgtggtggtgccggacgtgctggtccggcagttcctgatcacggtgacctacctgatggcgctgtcgctgatcttcaccgggggactgcaactgttcttcacccgcttcatttccgatcgcctgttcgagcgcaagcacgaggcgatcctgcccaacctggtgggcgtgctgttgctggtgacgttggcggcgggcctgctctcggcgatattgctggcgaccctgttcgatgagccgttcgcctaccgcctgctggtgatggccaacttcgtggtgctctgcaacctgtggctggtgatcatcttcctgtcgggaatgaaggcctacaaacgcatcctgctggtgatgttcatcggctacgcgctgatggtcgcctgtgcctacctgctgcgtttcatgcagatggacggcctgctgctggcattgctgatcggccacgccagcctgctgttcgtcttcctctacgacatcctccgcgagtacccggccaggcgcatggtggccttcgacttcctcgaccgccggcaggtcttcgtcagcctgctgctgaccggcctctgctacaacctggggatctggatcgacaagttcatcttctggttcaacccctccacctcggacctggtgatcggcccgctgcgcgcctcgatcctctacgacctgccgatcttcctcgcctacctgtcgatcattcccggcatggcggtgttcctggtgcgcatcgagaccgacttcgccgagtggtacgagcgggtctacgaggcgatccgcggcggagagaccctgcagcatatcggcctgctcaaggagcagatgatcctcgccatccgccagggcctgctggaaatctgcaaggtgcaggggctggcggtggtcctgctgttcctgctggcgccgcaactgctcggctggctgggaatttcccgctattacctgccgctgttctacatcgacctgatcggggtgagcatccaggtagtgttcatggccttgctcaacgtcttcttctacctggacaagcgccgcatcgtcctcgaactctgcgtgctgttcgtgatcgtcaacggcgccctgaccttcgtcagcctgctgctcgggccgagcttcttcggctacggcttcaccctgtcgctgctggtctgcgtgctggtcgggctgtaccgcctgaccaccgcgctggacgacctggagtacgagaccttcatgctcaatcgctga

SEQ ID NO: 319901 - DNA, 231 bp, Pseudomonas aeruginosa
atgaaagtggaagaactcccccaagagggtttcgccgagtgcccccgctatataaccctgatgcgtttcgccttcctgaccggcctcagcgaccggccggacctgctctacgcctggatagagagcggcgacctgccgatgcgaaccttcggtacgcaacgcctggtggatatgcagaagctgcaaaaacgcatcgaggaagcaaaaaaaggggccgattcaaccgggtga

SEQ ID NO: 319902 - DNA, 477 bp, Pseudomonas aeruginosa
atggtaaagaatcgacgtttgttcactgctggcaagcgcttgcgcgccctgcgcgagctgatgggcttgagccgtccgcagttcgccgagttggtggggatgacggccaagcgcctggagaacatcgagaacgagctgcagcgcatgcacgacgaggacttcgagaaggtctgcggaaccttcccggagttcagcgactggatcgcctatgaaggcagcatcgagccgcagtcgatcgcctggaaggtcgccgactcggcgcaggcggccgcggtctacctggtggagcgcaacccggtgctgcttgagcagcacggcatcgacatgcaggcctggcgcgaacgccaccgcgagatacgcgaggcgctgctggcggcggaacaggcgccggaggcggagccggcgcccctggaagagccgccggaacccaggcgccagcggaagaggaaaacgcccgcgagcggcaagggcgactga

SEQ ID NO: 319903 - DNA, 477 bp, Pseudomonas aeruginosa
atggcctatgtagtgaggaagcgctgcctgtttcgcgccggcgagcgcctgttcgggttgcgcgggctgacggggttgaaccgaccgcagttttccgaggtggtcggcatggatcccaaacgccttgagaacatcgagagtggccggcagcgcatgcacgacgaggatttcgagaaggtctgcgggaccttcccggagttcagcgactggatcgcctatgaaggcagcatcgaaccgcagtcgatcgcctggaagatcgccgaggccgcccaggaagcggcggtctatctggtggagcgtaaccccgagctgctcgaactccacggtctcgacgtgccggcctggcgcgagaagcatcgggaaatcctcaagaaggtgcgcaagcgggagttgtcgccgccacccgaaaaaccaccgaaacccaggcgcaagcgcaagccgagaagcaacctgcccacacccaccgacggtacctga

SEQ ID NO: 319904 - DNA, 1905 bp, Pseudomonas aeruginosa
gtgttcccttgcctaccccgttcgctactcgccggcgtcctgctggcgagcgccctgcccgctcacgcggagctgccccacgcgcccgcctacatcgatgacagcgcctacccggccgcggcccgccagcgcatcctgccaccgatgttcgagcagaggctgggcagcctgcgctacctcgccaagcccggcgaccccttgatcacccaggccgagagcagcgacttccagcgcaccagcgactaccgcgagacccgcgcctacctggagaaactggtagccgcctcctccggccgcatcgccctgcgcgagttgcccgagcgcagcgccgagggtcacccgatgctgctggtgaccgcctccaccgaggccgacaagtccgccgccggcctgaagcgctccgccaagccgaccttgctggtggaagccgagatccatcccggcgaggccaacggcaaggacgccatgttcatgctgctgcgcgacatgagcgctgccgaccgcccgctcgccgggctgctggagaagatcaacctgctgttcatcccggtggtcaacgtcgacggcgacctgcgccgcagcgcctacgggcggatcaaccagaacggcccgcgggagaccggctggcgggtgaacggccgcaatctcaatctcaaccgcgacttcaccaagctcgacagcgcggagatccgcaacgtcgcctgggtgttcaaccactacgagctgagcttcttcgccgacacccactccaccgacggcgccatgtatccctacgacagctcctactgccacaacggcaacggctggtcaccggcgagcagcgcctggatggaccaggtcatgcgcaagccggtgtaccaggcgctggaaagcctcgggcacatggtccatgaatgcatcagcctgaacgacaaccaggatccgacccagggctactacccctaccgcaccgacctggcgcgcttctccaaccagtacggcgacatccgcaacgtgccgtcgatcctcatcgagcaacacgccctgcatccgtacaagacccaggtgctgggcaactacgtgatgctcaaggcgatgttcgaggtgatcggcgagcaggccgccagcctgcgccaggccatcgccagcgaccgcgagcgcctgctgcggcagaaggaggtgatcctcacctggaagccgggcgaggccgccgagacgccgttcgtggtgggcgactaccgctacgagcaatcgccggtcaccggggcccgcaccatcgtctggagcaaccggccgaagacgctgaagctaccggtgaccgacaacggcgtacccgacctggtggtgccgcgtccccagcgtttcatcgtcccggcgcagtggcacgaggtgatcgcccggatcaaggcccacggcatccgctatagcaccctggagcgtccgaccgaaatcgccgtgaccctgtaccgcatggacgacatcaagctcgccgatggcttcgaaccggatcgcgtgcaaggcaaccggattccgggctacgaaggtcgcctgctggtcagcggcacgccgaagccgttccagcgcttgcagaccttcccggccggctcgctgtcgatcgacaccgcccagccgctgggcgtcctggccatcgacctgctgcaaccgcagagtccggattccttctggtcctggggcttcttcaattccaccctggtggccgccgaggagccggaggaatacgtgatggagccgatggcgcgcaagatgctggcggaagacccggcgctgaaggccgccttcgacaaacgcctgcgcgaggacaaggccttcgccgccgatccgcaggcgcgcctgcaatggttctaccagcgcacgccgttctacgacgtgaacgccttcgtctatccggtaggagtggtgttctga

SEQ ID NO: 319905 - DNA, 1002 bp, Pseudomonas aeruginosa
atgtccctaccccgcctcagcctctgtctcgccctcgcctgcgggccggcgctggccagccaggcgccggtctacggcgaacgcctggaaggcttcgactacgcctatccggtgcattatctggacttcacctcccagggccagccgctgagcatggcctacctcgacgtcgcgccgaagaaagccaacggccgcaccatcctgctcatgcacggcaagaatttctgcgccgggacctgggagcgcaccatcgacgtgctcgccgacgccggctaccgggtgatcgccgtcgaccaggtcggtttctgcaagtcgagcaagccggcccattaccagtacagcttccagcaactggcagccaacacccacgccctgctggaacggctcggcgtcgcccgggccagcgtgatcggccactccatgggcggcatgctcgctacccgctacgccctgctctatccgcggcaggtcgaacgactggtgctggtcaaccccatcggcctggaggactggaaggccctgggcgtgccctggcgcagcgtcgacgactggtacaggcgcgacttgcagaccagcgccgaaggcattcgccaataccagcaagccacctactacgccggcgaatggcgccccgagttcgatcgctgggtacagatgcaggccggcatgtatcgcggcaaggggcgcgagtcggtggcctggaactcggcgctgacctacgacatgatcttcacccagccggtgctctacgaactggaccggttgcagatgccgaccctgctgctgatcggcgagaaagacaacaccgccatcggcaaggacgccgcgccggcggaactgaaagccagcctgggcaactacgcgcaactgggcaaggacgccgcccgacggattccccaggcgaccctggtggaattccccgaccttggccataccccgcagatacaggctccggaacgcttccaccaggcactgctggagggtctgcaaacccagccctga

SEQ ID NO: 319906 - DNA, 882 bp, Pseudomonas aeruginosa
atgagttccaactcgcgtagcaacagcaccttcaccggtcgcctttccgcactcgccaaccgcctgcgcctgggtgccgcgcgaagcgatggccgggagctgcgcgaacgggcggccgccctcgagctgccgttccagccattgcgacggccggagccgagcgtctggtggcaggccggaccgcccctgcacaccctggtcgacctgccgcgcggcgcgctgtccggcccggtccaggaagacaaggcggaagcccacgcggtcctcaagcgcctggtgcgggtcagccactccaccctggagtcggtcgacctgaagaccatcgaaggcgtatgcagccgcgagatcctcgtccaggcaccttgcccacgcctggaagacctggccacggccgaggtctgccggggcgtacggatcatcagctacaaggatttcgtcaaggccctgagcctggccctgccgcgtttcaccaacggcgacagcatccgcctgcgccaggccgcctggcacggcgagcgcctgttctgggcgggcgaacgccaggcctgcgccttcgccgcggcgatcgtctacgcccgccgccgcgaactggaactgaagctgccggcacatctggaacgctacgaactggagcccggcgcgctggacgaactggaacggcgctaccacatgctgcggattccgacccaggcctggtccgagccgaccttcatgagcctgctgctggataccggcctgccctatgcgcgactcgccctgttcaccccggaaaccccggaatgcctgttgctgccccgcaacgacgaacgcgccgatgccctcggcgaaggtctgcgggcggcgggcgcggcagacgtggtgaagtatctgaagcaactgtag

SEQ ID NO: 319907 - DNA, 282 bp, Pseudomonas aeruginosa
gtgacattcaaccgcgtggtttgtggcaagctgtcgtggttcattcaagcggggggctccatgcccagcctcatcatggatatcgccctgtccggcgaacgcctgcaggccatctacggcggcagggccaatcgggtcctgctgcgcagccgcgacggtcgccgggtgaacctgccggcccatcacctgcgtccgttcatcggccacgatggcgtgcatggcacgttccgcctcgatttcagcgaggatggccgcctgctggcgctgcaacgcctcgcctga

SEQ ID NO: 319908 - DNA, 1029 bp, Pseudomonas aeruginosa
atgtacaccctggcccgccagctgctgttcaaactgtccccggaaacctcccacgaactgtccatcgacctgatcggggccggcggccgcctgggcctgaaccgcctgctgacgcccaagccagccagtctgccggtctctgtgctgggcctggagtttcccaacccggtggggctggccgcgggcctggacaagaacggcgacgccatcgacgggttcggccagctcggtttcggcttcatcgagatcggcaccgtcactccgcgaccgcagccgggcaatcccaggccgcgcctgttccgcctgccgcaagccaacgcgatcatcaatcgcatgggtttcaacaaccacggcgtcgaccacctgctggcacgggtgcgcgcggcgaagtatcgcggcgtactggggatcaacatcggcaagaacttcgataccccggtggagcgcgcggtcgacgactacctgatctgcctggacaaggtctacgccgacgccagctacgtcaccgtcaacgtcagctcgccgaacacgcccggcctgcgcagcctgcagttcggcgattcgctcaagcaactgctggaggcactgcgccagcgccaggaagcgctggcgctgcggcatggccggcgggtaccgctggcgatcaagatcgccccggacatgaccgacgaagagaccgcgctggtcgccgcggcgctggtcgaggcggggatggacgcggtgatcgcgaccaataccactctcggccgcgaaggcgtggaaggcctgccgcatggcgacgaggcgggtggcctgtccggcgcgccggtgcgggaaaagagcacgcacacggtgaaggtgctggccggcgaactgggcggacggctgccgatcatcgccgccggcggtatcaccgagggcgcgcacgcggcggagaagatcgccgccggggcgagcctggtgcagatctattcgggtttcatctacaagggaccggcgttgatccgcgaagcggtggatgccatcgccgctttgccgcggcggaattga

SEQ ID NO: 319909 - DNA, 2178 bp, Pseudomonas aeruginosa
atggctgatgtttacgaattgtttctgacctgcccgaaaggcctggaaagcctgctcctcgaagaggcgcaggggctcggcctggacgaggcgcgcgcccaggtgtcggcggtgcgcggacagggcagcctggaggtggcctatcgcctctgcctgtggtcgcgcctggccaaccgggtcttgctggtgctggcgcgattcccggtggagaacgccgagtccatgtacatggcggtccacgcggtgaactgggaagaccacctggacgccggcggcacgctggcggtggagttcagcggcaagggctcgggcatcgacaacactcatttcggggcgctgaaggtcaaggatgcgatcgtcgacaacctgcgcgagcgctccggccgacgcccgtcggtggacaaggtcaatccggacgtgcgcgtccacctgcaccttgaccgcggccaggcgaccctctccctggacctctccgggcatagcctgcaccagcgcggctatcgtctgcagcagggcgccgcgccgctgaaggagaacctggcggcggcggtgttgatccgtgccggctggccgaagatcgccgccgagggcggtgccctggccgacccgatgtgcggcgttggcaccttcctggtcgaggcggcgctgatggctgccgatatcgcgccgaacctcaggcgcgagcgctggggcttcagcaattggctgggtcacgtgccggcgctgtggcgcaagctccacgaggaagcccagcagcgcgcggcgaccggcctggccaggccgccgttgtggattcgcggctacgaggccgacccgcgcctgatccagccggcgcgcaacaatatcgagcgtgccggagtggccgactgggtgaagatctaccagggcgaactggcgactttcgagccgcgcccggacaagggccagaccggcctggtgatctgcaacccgccctatggcgagcgtctcggcgacgaagccagcctgctgtatctctaccagaacctcggcgagcgcctgcgccagagctgcatcggctggagcgccggggtgtttaccggggcgccggaactgggcaagcgcatgggcatccgcagccataagcaatacgcgttctggaacggcgcgctggcctgcaagctgctgatgatccaggtcgagccgcgccagttcgtcaccggcgagcgtggcgaacgcaacgacgaaggcctggcacgggcgccgagcgagccggcacggctgagcgagggggggcagatgttcgccaatcgcctgcagaagaacctccggcaactgggcaaatgggcgcgccgcgacaagatcgagtgctatcgcctgtatgacgccgacatgccggagtatgccctggcggtggatatctacggcgattgggttcacgtccaggagtacgccgcgcccaagtcgatcgatccggcaaaagcccaggcgcgcctgttcgacgccctggcggcgattccgcagaccctgggcgttgcccaggagcgagtggtggtcaagcgccgcgagcgccaggccggcaagaagcagtacgaacggcagagcagcgagggcaagttcctcgaggtgggtgagggcgatgtgcgcctgctggtgaacctgaccgattacctggataccgggctgttcctcgatcaccggccgatgcgcctgcgcatccagaaggaggcggccggcaagcgcttcctcaacctgttctgctataccgccacggccaccgtacatgcggccaggggcggcgcgcgcagcaccaccagcgtcgacctgtcgaagacctacctggactgggcgcgccgcaacctgtcgctcaacggcttttccgacaagcagcgcctggtgcacggcgacgtgatggagtggttgcgggaagacgatggccagtacgaactgatcttcatcgacccgccgaccttctccaactccaagcgcatggaaggcgtgttcgacgtgcagcgcgaccacgtcgaactgctcgacctggccatggcgcggctggcgccgggcggggtgctgtatttctccaacaacttccgcaagttcgaactggacgagagcgtgcaggcccgctatgcggtcgaagagatcactggcgaaaccctcgatccggatttcgcgcgtaatccgaagatccatcgggcctggagaatcaccgttcgctga

SEQ ID NO: 319910 - DNA, 1431 bp, Pseudomonas aeruginosa
atgttcaagtcgctgcgtactcttgccttcgccacgctcctgcctttcgcccttcccaccctcgcccaggtcaacgccaccctgccggccaacgtgcagaaagccctgcagaccaacaagctgaccggcaacgatctgtcgctggtgctgattccgctcgacggcccgggcaaccccacctactacaacgccgacgtatcggtgaacccggcctcgaccatgaagctgttcaccacctatgccgccctggaaatgctcggcccgacctaccagtggaagaccgagttctacaccgacggccagctcaagaacggagtgctcaacggcaacctctacctcaagggcggcggcgatccgaaactgaacatggagaagctctggctgctgatgcgcgacctgcgcgccaatggcgtgaccaaggtcacaggtgacctggtactcgaccgcagctacttcaacatcccgcagttgccggtattcaacgacgacggcggcgacgacaccaagccgttcctggtcggtccggactcgctgctggtcaacctgaagagcgtgcgcatggtggtgcgcaccgacggcaacaaggtcaacgtgcagatggacccgccgctggccaacgtacgcatcgacaaccaggtgaagatgaccgcgccggccacctgcccggcctggccgaagctgcgcttcagcccggtgacccagttcgacggcaccaccctgctggccaccggacagattccccagggctgtagcgcgcagacctacatgtcgctgctcgaccaccccggctacaccgccggcgcggtgcgcggcatctggcaggaactgggcggcagcatcctcggcaaggaccgccagggcagcgtaccgcgcaacgccacgctgatcgccaaggccttctcgccagacctggtcgagatcatccgcgacatcaacaaatacagtaacaacaccatggcccggcagttgttcctctccatcggcgcgcagttccgcaacagcgccgacggcgacgacgcccaggccgcgcagcgggtggtgcggcagtggctggcgcgcaagggcatcaccgcgccgcgcctggtgatggagaacggctcgggactgtcgcgccaggaacgggtcagcgcccgtgagatggcggcgatgctgcaagccgcctggcacagcccctatgcagcggagtacatctcctcgctgccgctggccggcctcgacggcaccatgcgcaaacgcctgcggcgcaccgcactggtcggcgaggcgcacgtgaagaccggcaccctcaacaccgtgcgcgccctcgccggcttcagccgcgacgccagcggccacaactgggtggtggtggcgatcctcaacagcccgcggccgtggggcgcttcggcgatcctcgaccaggtactgctgagcctgcacgcgcggaaataa

SEQ ID NO: 319911 - DNA, 345 bp, Pseudomonas aeruginosa
atggctactaatcgttcccgccgcctgcgcaagaaattgtgcgtcgatgaattccaggagctgggtttcgaattgaacttccactacaaggaaggcgtggatgccgatgcggtgaacgctttcatgttgcgcttcatcgatcaggcgatcgaagccaacgaactgacctatggcggctgcgacgaattcggtttcgtctgcctggcgcgccgtggctcggtcaatgaagagcagcgggccctgatcgaggcctggttgaagcagcaaccggaactggccagcgtcgaggtcggcgcgttggtcgacgcctggtacccggaacagcctgtcctgccgaagctctaa

SEQ ID NO: 319912 - DNA, 624 bp, Pseudomonas aeruginosa
atgagccgtatcctgatagtcgacgatcatcccgtgattcgcatggccatgaagatgttgctggaagccgaagggcaccagatcgtcggcgataccgataatggcgtggatgccatcagcctcgggcgggagctgaagccggacctggtcatcctcgatatcggcattcccaggctggacggcctcgaggtcatcagccgcctgatggtgctggcgttgcccctgaagatcctcgtcctgaccggccagagcgcctcgctcttcgccctgcgcagcatgcaggcgggcgccgccgggttcgtctgcaagcagggcggactggccgaactggtgacggcggtgaatgcggtcgcctcgggatacagttactttcccagctcggccatgcgtcctgtgcaacagggcgcctattccgacgatgtagaattgctcggacgcctgtccgatcgcgaagtatcggtattgcaatacctcagccagggttattcgaacaagcagatatccgagcagatgtttatcagcaacaagaccgtcagcacttacaaggcgcgcttgttgttgaagttgaacgccggctcgctggtggatctcatcgagttcgccaaacgcaatacgcttatctaa

SEQ ID NO: 319913 - DNA, 2226 bp, Pseudomonas aeruginosa
atgaagttccagaaacgcagtgcgtgcatgctcggcctgcttctcatattcgcctgcatggcgggatatgccgttccggcgagggcgacggctggcgaatattcttccatgctccggattcccgctccggatcgtccgggggacgccgatgtggtcgacgaagcgccgctacgccaggctgccgacgggctgagctcgccatccccttccagcctggtgctcggcctgctggtggcctgcctggtctgcgtcggatgcctgggctggaataccgtcctgcagctcaggctcaggcgttggcaacgtaccgaagccgacctgagcggccgcctggcattgaagcaggcgctggtcgacgggattccctacccggtgagcatccgcacgctcgacggtcgcctgctggcctgcaaccgcaattacctggaaagcctgcggatgacccgtgagcaggcccgcggcaccctgttgaccgattccgactgggtcgagggcagcaaggcacggctcatgcaccagcagtgcctggcggtggctcggggaggaacggcgagcttcaccgacatggcggtgcgcatcggcgggcaattgctggagatccaccattgggtcacgccctacagggatcgccagggccggatgctcggcctgatgaacggctggatcgacatcaccgaacgggagcgcctggcccgccagttgcgcgaggcgatgcgccaggcggacgaggcgaatcgggcgaagagcgtcttcctggcgaccatgagccacgagatccgtacgccgatgaatgcggtcatcggcatcctcgaactggtcctgcagcgcctggcgccggagcagcgcgaacgcgcctcgctggaggtcgcctacgaggctgcggggtcgctgcaactgctcatcggcgacatcctcgacgtcgccaagatcgagtccggtcacctgaccctcacgcccgagcgggttcgcctgcgccatgtcgtggagtcggtgcgccgcatgttcgaaggcctggcccggcagaaaggcctgaggctcgttgtggagctggacgatgccccgggacgggacgtgctgatcgatcccctgcgcttcaagcaggtgctctccaacctggtgagcaatgcgatcaagttcaccgagcggggacaggtgacgatccgtctccaggaaaggagcctggacgaggggagggcgatcgtccgggtggacgtggaggattccggtatcggtatcgctccggcggaccaggcgcgcctgttccagcctttcatccaggtggccaagggacgcacggtgcagggcgggaccggccttgggctggcgatctgtcggaagttggtggacctcatgggcggcgatgtcgagatgcacagcgagccgggcaaaggcacccgggtgtcgctcgacctgctattgcgccagtgcaggccgaaaatgcctgagtccggccaggacccgctggcagcatccatggagccgtctcgccgcctgcatatcctcatcgccgacgactatccgcccaaccgggtactgctgcgccagcaactggaatttctcggccaccgggtggcggaagcggaggatggccaggtggcgctggaactctgggccgacgagcgcttcgaggtgctgatcagcgactgcaacatgccgcgcctgaacggctatcagctggcacgcaggatacgcatccaggaacggtgcgagcggcgcgcgccgatcctgatcctcggctataccgccgacgccgagccggacgaggtacagcgctgtcgcgacgcgggcatggatgattgcctgttcaagccgctcggcctggagaccctgcgcaactacctcgcgacctctttcggccgcgacgccgcgcagccccgggggctctatgacgcggacgctctcagcagcctcggcggcggccgcccggaacggctgcgcgaactgctggagaccctgctaggcagcaaccgtcaggacctccagcgccttgccatcctcctgcgcgagggcgacagggccaggctcgccgagcatgcccaccgcatcaagggcgccgcgcggatgatcggggcgcgtaccctgctggaggcctgcgaggccctggaggacgcctgccggcgaagtggcgacggggagtgcctgcaggcgcctggcgaaagactccggctggccctggaggcgttgcaggaggaactccaggagcagttggcggccgctgcggtatga

SEQ ID NO: 319914 - DNA, 1332 bp, Pseudomonas aeruginosa
atggactggcagaccctgctcacccgcgaacggctcggaaagccggtacacagcaacgatgaactgggccgcagcgccttccacaaggaccatgaccggatcatcttctccggcgcgtttcgccgcctcggacgcaagacccaggtccatccggtctccagcaacgatcacatccacacccgcctgacccactccctggaagtcgcctgcgtcggccgctcgctgggcatgcgggtcggcgagatcctccgcgaggaactacccgagtggtgcgaccccagcgacctcggggtcatcgtccagtcggcctgcctggcccacgacatcggcaacccaccattcgggcactccggcgaagacgcgatccgcaactggttccagcaagccgccggacgtggctggctggacgagatgagcgacgccgagcgttccgactttctccacttcgaaggcaacgcccagggcttccgggtcctcacccaactggaataccaccagttcgacggcggcacgcggttgacctacgcaaccctgggtacctacctgaagtatccctggacctcgcgccacgccgaagcgctgggctacaagaagcacaagttcggctgctaccagagcgaactgccgctgctcgagcagatcacccataagctcggcatgccgcaactcgacgacgagcgctgggctcgccatccgctggtctacctgatggaagcggcggacgacatctgctatggcctgatcgacctcgaagacggcctggaaatggagctgctcgaatacagcgaggtcgaggcgctgttgctcggcctggtcggcgacgacctgcccgacacctatcgccaactcggccccagggactcccgccggcgcaagctggcgatcctccgcggcaaggccatcgagcacctgaccaatgccgccgcccgtgccttcgtcgaccagcagcaggccctgctcgccgggcagcttgccggcgacctggtggaacacatgcatggcccggccaagctctgcgtgcagcgggccaaggccatcgcccgggaaaagatcttccaggacaagcgcaagaccctccacgagatcggcgcctacaccactctggagatcctcctcaacgccttctgtggcgccgcgctggagcaatacggcgggcatacgccgtcgttcaagaaccggcgcatcctcgacctgctcggacgcaacgcgcccgacccgcagtggccgctgtaccgcgccttcctccaggtgatcgatttcatcgccggcatgaccgacagctacgccacggaaatggccagggaaatgaccggacgctcgagcccctcctga

SEQ ID NO: 319915 - DNA, 324 bp, Pseudomonas aeruginosa
atgagccaactaccggtgaacgcgaccggcctgtcgcgtcgcgaattgcgcaaggcggtgatccgcctgcgcctggaaatgcagcgccagcaattgcgccgcgaaagccaactgctggtgcaacccttccgccaggcccaggggctgggccacaacctcagccagcaactgttcggcggtggcaatgcggcgctctggggcgccggcggagccgcactgctgggcgtactgcttggcaagggcggacgctggcagcgtctgctgcgcctgggcgtcgccctggccccgctgttgctcggcctgcgcaagcagaaaggccgttga

SEQ ID NO: 319916 - DNA, 381 bp, Pseudomonas aeruginosa
atgagcgaaggaaaggacccggcggacggccgcccctccctgcggcgcttcggcgccgccttcctcggcctgttgcacggtcacgtcgagctgttcggcatcgagctgcaggaacagaaggccaacaccctgcgcctgctgctgttcgccgggctggccctggtattcgccctgctcctgctggtcggcctgtcgctgctggtgctgatcgtgttctgggacaccaaccggctcgcagcggcgctcgggttgtgcctgttctacgtgatcggctcgctgttctgcggctggcgcctgtaccagtcgatcaacgacgaaagctcgccgttcagcgccaccctggaagaactggccaacgaccgcgagcgactgctgccatga

SEQ ID NO: 319917 - DNA, 330 bp, Pseudomonas aeruginosa
atgccccgcaagaccactgcaaacgctgcaaaggatgaactgttggctgaattccaggcactggtcgccgataccgagaaactcctgcaaagcaccgccgacgtggcgggcgaccaggccgaagaaatccgcggcaagatccacgacagcctcaagcgcgctcgcgataccttgcgcgacaccaaggactcgctgaaggacaacgtccgcgaacgcagccaggccgcggtggacgccaccgaggtgtacgtcggcgaacacccctggcagagcatcggcatcgccgccggcgtcggcttcctgcttggcctgttggtcagccggcgctga

SEQ ID NO: 319918 - DNA, 1209 bp, Pseudomonas aeruginosa
atggataacctgaatagtgcggtgcaagtcctgatccacggctccaataccctgttcatcctgctcggagcggtgatggtgctggcgatgcacgccggcttcgccttcctcgaggtgggcaccgtgcgcctgaagaaccaggtcaacgccctgtcgaagattctgtccgacttcgccatctcggcgctggcctatttcttcgtcggctactggattgcctacggcgtgactttcttccatccggcggcggcgctgaccgtggacagtggctatgcgctggtgaagttcttcttcctgctgaccttcgccgcggcaatcccggcgatcatctccggcggcatcgccgagcgtgccaggttcggtccgcagttgtgcgccacggcgctgatcgtggccttcgtgtacccgtttttcgaaggcttggtgtggaacggcaatttcggcttgcaggaatggctgaagctggagttcggcgcgcccttccacgatttcgccggctccgtggtggtgcatgcgctgggcggctggctggcattggcggcggtgctattgctgggcagccgcaacggccgctatcgcgacggcaagctggtggcgatggcgccgtcgagcatcccgttcctggcactggggtcgtggatcctgatcatcggctggttcggcttcaacgtgatgagcgcccagaccctcgctggggtcagcgggctggtggcggtcaactccttgctggcgatggttggcggcaccatggcgtcgctgctgatcggccgcaacgacccgggtttcctgcacaacggtccgctggccgggttggtggcggtgtgcgccggttccgacctgatgcatccgatcggcgcgctggctaccggcctggtggcgggggccctgttcgtctgggcgttcaccgcgacccaggtgcgctggaagatcgacgacgtcctcggtgtctggccgttgcacggtctttgcggggtctggggcgggattgcctgcggcatctttggccagcaggcattgggtgggctcggcggggtgagcctggccagccaggcgctcggcagcctgctgggggtgacggtggctttcgccggcggcctgttggtctatgggctgatgaaggcgctgctgggcatccgcttgagccaggaggaggagtactacggcgcggacctgtcgatccacaagatcggcgcgatcagccacgaatga

SEQ ID NO: 319919 - DNA, 1266 bp, Pseudomonas aeruginosa
atgagcatgaccccgatcgcccgtgccgtggcttttgccgcgctgggttccagcattaccgtcccaaccctggcccatgccgagttcatcaaggacagcaaggccagcatcgaactccgcaacttctacttcaaccgtgatttccgccaggaaggcgccagccagtccaaggccgaggaatgggcccagggcttcctcctgcgctacgagtccggctacaccgagggcaccatcggtttcggcgtcgacgccatcggcctgctcggggtgaagctcgactccagccccgaccgcagcggcaccggcctgctcaagcgcgaccgcgagaccggccgcgcccaggacgactatggcgaggcagggatcaccgccaagctgcgggcgtcgaagagcaccctgaagatcggcaccctgacccccaagctgccggtgatcatgcccaacgacagccgcctgctgccacagaccttccagggcggcgcgctgaactccatggagatcgacggcctgaccctcgacgccgggcgcctgaagaaggtcaaccagcgcgactcctcggacaacgaggacatgaccatcaccggtggcggcaagcgcaacatcgtggtccgttccgggctgacctcggacaagttcgacttcgccggcggcagctacaagtggaccgacaacctcagcaccagctaccactacggcaagctcgacaacttctacaagcagcattacctcggcctggtgcacaccctgccgatcgccgacaagcagtcgctgaaatccgacatccgctgggcgcgctccaccgacgacggttccagcaacgtcgacaacaaggcgctcaacgccatgttcacctacagcctcggctaccacgccttcggcgtcggctaccagaagatgagcggcgacaccggcttcgcctacatcaacggcgccgacccctacctggtgaacttcatccagatcggcgacttcgccaacaaggacgagaaatcctggcaggcgcgctacgactacaacttcgccggcgtcggcattcccggcctgaccttcatgacccgctacgtcaagggcgacaacatcgacctgctgaccacctcgggcgaaggcaaggaatgggaacgcgacatggacatcgcctacgtgttccagagcggcccgttgaagaacctcggggtgaagtggcgcaacgcgaccatgcgcaccaactacaccaacgactacgacgaaaatcgcctgatcgtcagctacacgctgccgctctggtaa

SEQ ID NO: 319920 - DNA, 867 bp, Pseudomonas aeruginosa
atgcctttcctgtatcgccttgcctcgttgttgatcgccctcctcgtcctgccggtgcaggcggcggaaatgcgagtcgccctgttgcgcacctcgggagtggaaaccctcgatgcgctcaccgtcgacggcggctcctgggtgcgccgggtgccgctcagccataccgcggtgctgatcgagcaccacgccgccaccctgctcttcgacactggcctggggcgcgacatcgacgcccagttccgcgccgacatgccttggtgggcagcgccgctgttcgcttaccagaaagtcgtcccggcgcgcgaccaactggacgcagccggtatccgcgtcgatcgcatcctgctgtcccacgcacactgggatcacgcctcgggcctggtcgacttccccgaagtaccggtctgggcaccctacgaggagatcgccttcagccgcatcgccaccccgccggccgccttccccagccaattccgccatggcgtgcgctggcgaccttacagcttcgatccgcggccgttcatgggcttcgacgaaagcctcgacctgtttggcgacggccgcctggtgctggtccccctgcccggccatacgcccggctcggtcggtctgttcgtcaccctcgacagcgggcgccggctgttcttcagcggcgacaccagttggcgactcgaaggcgtcgaaggcccacggcagaaattcttcgccggccgcgccctggtcgatcgcgatcccgcgcgcaccctcgcgcaactggcgaagatccgcctgctgctccgcagcgacccgcgcctgagcgtgattccggcgcacgatgcgcgggtccaggccgccctaggctacttcccgcactggctggaatag

SEQ ID NO: 319921 - DNA, 837 bp, Pseudomonas aeruginosa
atgagccaggaacagagtcccttccacaccggcgaactggcgatccaggaacgcgccggcgttcgcgaacaggtcgccggcttcggcagccgcgcgatccgcaccttcatgccggaccagcaccgggagttcttctccctgctatcgctgttgctggtgggcagcctcgacgccgacggctaccccagggccaatctcgaggctggcacccgcctcggcatcctcggcctggaatggccgacccgccgccgcaaccgcatgaatggacgggtcctggcgcgggacggaaagggtttcacggtcggcgtcgagcaatccttcggaaactgtcccaagtacatccaggcgcgcagccatcagcccgtctccaggatcgcaagtcccgcgttgcagggcgaaggactcgatccacgctggctgtcgctggtctcgcgcagcgatacgctgttcatcgccagccagcatgccgacccgctcagaggcggcgtcgacgtctcccatcggggcgggccgccgggctttctccggctcggcgcggatggccgcctgtggttgcccgactatgccggcaaccgcctgttcaataccctcggcaacctgctccaggatcctcgctgcggcctgctgttcatcgatttcgacaatggcgacctgctgcacctgcacgccgaggccgagctgttctggccgggttcgcagccatccatcccctggcccgccggcgccgagcgcctgctggcgttgcgccccgcaggctggcgctggcggcgtggccgcctgccgctggcattcggcgagccccagccatccccttttcttcctcccggtgaatcttga

SEQ ID NO: 319922 - DNA, 597 bp, Pseudomonas aeruginosa
atgaaactgcatgacctggatctctccggcaacgcctacaaggtccgcctgttcctctccctcatcggccgcgaggcgacgctgcggccggtcgatttcctcaaccgcgagcacaagacccaggccttcctccgcatgaatccccgcggacagatcccggtgctggaagacggcgagctgcaactgggcgactcccacgccattctcgtctatctggcacgacgccatgccggtcccgagtggtatccgctcgaccccgtcagccagggccgcatcgcctactggctcagctattcggccaacgaggtgcagaacggcccggccagcgcccggctgatcactcgcttcaacctgccgctggatcgcgagcaaacccaccagcgaggcctggaagtgctgcgcctggtcgaccggcacctggccgagcatcgctggctggcccagggcgaacagccgagcatcgccgacgtggccctctacccctacctggccctcgcccccgaaggcggcctggcgctggaccactacccggcgctgaacgcctggatcgcccgcatccgcgcgctgcccggctacatcccgatgcccggcctgtag

SEQ ID NO: 319923 - DNA, 558 bp, Pseudomonas aeruginosa
atgacatcccgcaaacgcgagcaactgctcagcaccgccgtcgacctgttctatcgcgagggttaccacgccaccggcatcgaccgcatcctggccgagtccggggtggcgaagatgacgctgtacaagcactttcgctcgaaggacgaactgatcatggccgccctggaggtgcgtcggcagcgcaccgccgaacgcatgctcgaagccgaggcacggttgcagccgcgagcggcgatcctggcggtgttcgatggtctgcaggagttcctccaggacgaggcgttccgtggctgtgccttcatccatgccgccgccgagttccatgagcgctcgcatccgatccaccgccaggcggccgagcaaaaggccttcgttgaagcctatttccagcgccagctggagcgcctgggcgcgcgttcggcggcactgcttgcgcggcagttgcaatacctgatggagggcgccctggtgatggcgcacatccatgggccggcggatcaggctcgcgaggcccggcaggcggccgaaagtctgttgcaggtcgctggcatctga

SEQ ID NO: 319924 - DNA, 240 bp, Pseudomonas aeruginosa
atgcccccggaatgccaactcttcggaaccctcggttgccacctctgcgaagtcgcggaggcggtgctgatgcccttcgtcgaacatggcctgctggtcgaactggtggacatcgccgacgacgaagcctgggtcgagcactatggcctgcggatcccggtgctgcgccgctgcgacaatggcgccgagctgaactggccgttcgaggccgagcaggtcgcagccttcctcagctgctga

SEQ ID NO: 319925 - DNA, 1404 bp, Pseudomonas aeruginosa
atgaaaacgcccgcctggacgcgccatgccctctgggtcatgccgctcgccctggggctgcaatccgccgtggtcgcgggggatgagcagccaagcaagacttccagctattcgccggtggtgatcaatgaggacttcgccaccatcatgaagcgcatgacggcgaacaagccgtcgatcgaacaggcccacaagacgcttctcgagcagcgttacgatctcagcgacaggccggccaagggcgccagcatgacgcgcggcaagccgctgcaggaggggatccgggtgaagctgccggccggcaccagctgggaggaactggccaggctgagccccgaggaaatccgcaagcaggggctgttccccggtggcttcctgccgctgccgcaccccaaccatgccgaaggcgggatggtctttcccaagttcctcatcgacgagatcaagcgccaggaaagccgcgacctgacccgtttcgacctcgactacgacctgccggaccacttcctgccggaattcccggcaccgatgttccttaccacccgggctgacctgggcgatgtgtccaagggcaagctggtgaccatcgacaactatttcgagttgttcaacgggattctcaatcccaagcagctggaagggctgcgcctgctgctaacggcctttccgcagcagcagttcaacctcaccgacgatcgccgtagcgagcatccgagccgcggcgtagcctgcttcgactgccatgcgaacggccacaccaatgccgctacccacctggccggcgatgtgcgcccgcagccgttccgccaccgcatcgacacgccgacgctgcgcggggtgaacatccagcggttgttcggctcgcagagggcgctgaagaccgtcgaggacttcaccgagttcgagcagcgcgccgcctacttcgacggtgatccggtaatcgccaccaagaagggggtgaacgtgctcgagcgtggcagtcaagtgcatttcatgggtgagttccaggcgctgctggacttccccccggcaccaaagctggatgtggaggggcggctcgatccgggcaaggccagcgagcaggaattgcgtggcgaaaagctgttctacggcaaggcggcctgcgccgggtgccatgcgccgccttacttcaccgacaacctgatgcacaacctgaaggtggagcgcttctacgatccgaaactggtcaatggcgtgatggcgtccgccgacgggccgatcaagaccttcccgttgcgcgggatcaaggattcgccgccgtacctgcacgacgaccgcctgctgaccctggaggacaccgtggagttcttcaacctggtgctggagcgcaagctgtccgcggaagagaagggcgacctggtggcctacctgcgtaccctgtga

SEQ ID NO: 319926 - DNA, 222 bp, Pseudomonas aeruginosa
atgatcaagcggatgctacccgccctcctcctcgccgtaggcctcggcgccctcgcgggttgttccagccctaccgtgatcaccctcaacgacggacgtgaaatccaggccgtagacaccccttcctatgacgaggattccggcttctacgagttcgaacagctcgacggcaagcgcgcccgcgtgaacaaggaccaggtccgcaccgtcaaggaactctga

SEQ ID NO: 319927 - DNA, 597 bp, Pseudomonas aeruginosa
atgcccgatagcgccctgcccccctgctccatccttctcctggcgggaggccgcggccagcgcatgggcggtcgcgacaagggcctgatcgagtggcagggcctgcccctgatcgcccacctgcatcgcctggtgcgcccgctcaccgatgacctgatcgtctcctgcaaccgcaaccaggaacgctatgcggcctatgccgaccgcctggtgagcgacgacagccgagacttccccggcccgctcgccggcatccgcgccggcctggcggtggcccggcatccctggctgctggtgctgccctgcgacgcgccgcgcatcgaccgcgccttgctggaaaccctgctgcaggccgccggccgcacaccggcgcgcccctggatgctgcgctgcggcggccagtgggaaccgctgttcagcctgatcccgacgcacctggccgaagagatagaacacgcctggcgccagggcgaccgtagcccacgccacgtcctgttgccgcttggcgcggaggccatcgagctggccgcgggcgatccgcggctggccaacctgaacacccccgagctgttggctaatcaccgcgaactgaagtaa

SEQ ID NO: 319928 - DNA, 540 bp, Pseudomonas aeruginosa
atgagccacaaggccgaaacggcattcgtgccgttgaacatcgccgtcctgaccgtcagcgatacccgtaccctggaaaccgatacttcaggccagttgttcgtcgaccgcctgaccgaggccgggcacaacctggccgctcgcgtgctgctgaaggatgacctataccggatccgcgcacaggtcgcgacctggatcgccgaggatagcgtgcaggtcgtgctgatcaccggcggcaccggtttcaccggccgcgacagcaccccggaagcggtggcctgcctgctggacaagcaggtggacggcttcggcgagctgttccggcagatttcgctggccgacatcggtacctccaccatccagtcgcgggccctggccgggctttccaacggcaccctggtctgctgcctgccgggctccaccaacgcctgccgcactgcctgggaaggcatcctcgtcgagcaactggacgcccgtcatcgcccgtgcaacttcgtcccgcacctgaaacaggcggcgccctgcgagagccgcgggtga

SEQ ID NO: 319929 - DNA, 1032 bp, Pseudomonas aeruginosa
atgcagacccttggctccacctcggttccggccctgctgaaatacctgcgccatgccgaacggctcggcctggacatcgcccctgccctggccgccgccggcctccaggccgaccagctcaacgacaatcgccagcgcctgccgggcgaagcccacgagcgcctgctcggctatttctgcgagcattccggcgatcccctgttcggcctgcattcggcgcgtttcgtccagcccggctcctggagcgtgctcggctacatcgcgatgaactgcgccaccctgggcgaggccatgagccgcatcacgccctacgagaagctggtcggcgacatgggcaccagccgcatcgaggcggccggcgggcaggtccggctgatctggaactgccgccaccagacacccctggtacggcgccacatggtcgagcacgtcctggcttcctgggtcctctacgcgcgctggatcgccgacctggaaggttcgccggacgaggtctggctggaacacgacctgccggacggaacccgcgtggaagactacgagaccttcttcggctgtccggtacgcttcgcccaaacctgttcggcgctgctggtaccgctggactacctggcgctgccgctgcgccaggccgacgcgacgctgctgcgcactctggaggaacatgccctggcgctgatggccgagctggacgatgacgagccgctgccgctgcgggtgaagaacgccctgcgccagctactcaaggacggcctgccgcgcaaggaacgggtggcggagaagttcggcatgaccgtacgcaccctgcaacgccacctgcagcaagccggcagcagctaccagcagaccctcgacgaactgcgccgcgaactggccgagcactacctgctgcatagcgagctgccgatccaggacatcgcccagtacctgggctttaccgagtcgcgctcgttccatcgcagtttcaagggttggaccgggcagacgcccggcgagtaccggcaacggcgcaaggagccggcggcgcaatga

SEQ ID NO: 319930 - DNA, 1596 bp, Pseudomonas aeruginosa
atgcgccgttggaatggctggggcgaagaaagcaccgtggtcgaattgccggacagcgcccgtgggttcctggcggaactggtcgggcagggcgcacgcttgccggacgccagcctggaggcggcgctggcgaaggtcccggcgtcgcgcctggaggccgatccgcgctacagcatcgacccccgtgagcgtctgctgcatgcccgcgggcagagcctgccggactggctggcgatgcgcgagggcgacttcggcgtctacccggacgccgtggcctatccggaaaccgccgaacagatccgcgagttgctggccctggccgactcccgcgacctgcaactgattccctatggcggcggtacttccgtggccggccatatcaatccgcaagcctcgcggcggccggtactgacggtctcgctggagcgcatgaaccgcctgctcgatctggaccgcgagagcctggtcgcgaccttcggccccggcgccgccggcccgcaggtggagagccagttgcgtgcgctgggctacacgctcgggcatttcccgcagtcctgggagttgtcgacccttggtggctgggtcgccagccgctccagtggccagcagtcgctgcgctacgggcggatcgaacaacttttcgccggcgggaccctggagaccttcgccgggccgcttgaaatcgctaccttcccggcatccgcggcgggaccggacctgcgcgaactggtgctgggctctgagggacgcttcgggatcatttcctcggtgaaggtgcgggtctcgccgctggccgaggacgagcgcttctacagcgtcttcctgccgaactggcagcaggccctgcaagccacccgcgagctggcccaggcgcgcgtgccgctgtcgatgctgcgactgtccaacgccgtggaaaccatgacccaactggccctggccggccatcccggacagatcgcctggctggagaaatacctggcgctgcgcggcgcgggcgagggcaagtgcatgctgaccttcggcgtgaccggcaaccgccggcagaacggattgtcgctgagccaggcgaaggccttgctgaaacgcttcggcggggtcttcaccggcaccctgctggggcgcaagtgggcgcagaaccgcttccgcttcccctacctgcgcgaggccctgtggcaggcgggctacgccgtggacaccctggagaccgccaccgactggagcaacgtcgacggcctgctgcagaagatcgaggccagcctgcgagacggcctggccgccgagggcgagaaagtccatgtgttcacccacctctcgcatgtctatggcgaggggtcgagcatctataccacctacgtgttccgtccggccgcgagctatgcggcgacgctggagcgctggaagcgtctcaagcatgcggccagccaggcgatcgtcgacaatcgtggcaccatcagccaccagcatggcgtcggcaaggaccacgcaccctacctgccccgcgagaagggcgaactgggcgtcgccgcgctgcgtgccatggccggtcacttcgatccggccgggcggctcaaccgcggcaccttgttgcaggactga

SEQ ID NO: 319931 - DNA, 1581 bp, Pseudomonas aeruginosa
atgacttcagcctggaacgaggagtggcgtcgccgccgcctaccggcgctggcggggcaggagtgggacctgatcgtggtcggcggcggcatcagcggtgccggcatcctccgcgaagccgcgcggcgcggctggcgctgcctgctgctggagcagcgggacttcgcctggggcacctcgagccgctcgtcgaagatggtccatggcggcctgcgctacatcgccaagggccaatggcggctgacccgcgactcggtgcgcgagcgccagcgcctgctcggcgaggcgcctgggctggtggagccgttgagcttcgtgatggcccactaccgcggcggctttcccggcccgcggctattcggcggcctgctgagcgtgtacgacgcccttgccgggcggcgcaaccaccgtttctacgacgccgccgcgttgcgctacctggcgccgggcctgaaggagcaacggctgctcggcggcacgcgtttcttcgatgcggtgaccgacgatgcgcgcctggtgctgcgggtgctggccgaggcgcgtcacgacggcggcgaggcattcaacggcatgcgtgtgcgcgaattgctgcgcgagggcggccaggtggtcggcctgcgcgccgaggaccgcgagagcggcgagcttctcgacttccgctgccgcgccctggcggtggccaccggggcctgggccgatgagttgcgccagcccggcggaagcgagcacatccgcccgctgcgcggcagccatctattgctgccggcctggcgcctgccggtggcccatgccttcagcttcatgcacgccacggaccggcgaccggtgttcgtgttcccctgggagggcgcgacggtggtcggcaccaccgatctcgaccatcgcgacggccttggggaggacgcgcggatcagccgcgccgaactcgcctacctgctggcggcctgcgcccagcagtttcccgccgccgccatcgaggcgcgcgacgtgctgtcgacctgggccggcgtgcgaccggtggtcagcagcggcgacgacagcggcaagccttccgacgagaaacgcgagcatgtgctctggcgcgagccgggctgcgtgaccctggccggcggcaagctgaccaccttccggccgctggcggtggaggtgctacaagcctgcgcgccgctgctcgggcgcacggtcacggacgatggcgcggcggtattcggcgcctgcgaaggtccgctcatcgacgggctcggcagtggccagcgacgccgcctggccggtcgctacggacgcgacctggtccgcctcaagcggctggtggacaccctcggaacggactgcgtgggtgccagcgaaacgctctgggccgaattggcgttcgccgccgaggcggaaatggtgctgcatctcgatgacctgctgttgcgccgcacccgcctcggcctgctgttgcccggaggcggcgcggcatacctgccgcgtatccgcgcgctctgccaagcgcgcctgggctgggacgacccgcgctgggaacgtgagcaacaggcctatctggacctctggcgccggcactacagcctgcccgtctga

SEQ ID NO: 319932 - DNA, 1560 bp, Pseudomonas aeruginosa
atgaacgacaagaactatctgctggcgatcgacaatggcacccagagcgtgcgcgccctgctgttcgacctgcagggcaacctgctgggcaagggcaaggtggagctggaggcctactactcgaagcatccgggctgggccgaacaggaccccgagtactactgggcgatgctcggcgaggcctgtcggcggctctgggaccaggtggacatcgatcgcgggctcatccgcggggtgtcgctgaccacccagcgtggcacggtgatccacgtcgatgccgagggcaggccgttgcgtccggcgatcctctggctcgaccagcgccgggcggaggtccgcgagcgcatcagggggccttggggctggctgttcaagctggtcggcgccgagggcgcggtggagcatttccgcgcccaggccgaggtcaactgggtggcccaggagcagccggagatcgctgcgaagaccgacaaggtgttgctgctttccggctttctcagccaccgcctgaccggccgtttcgtcgactcggtggggtgctgcgttgcctacctgccgttcgactacaagcgcctgcgctgggccgcgccgcgcgactggaaatggcaggcgctggcggtacgccgcgagcagttgccggagctgttcaagccgggcgagcggctcggccagatcagcgccgaggccagccggcacaccggcattccgcaaggcctgccgttgatcgccgcgggggccgacaaggcctgcgaggtgctcggcgcaggtgcgctggagcccaccatcgcctgcctctcctatggcaccacggcgaccatcaacaccactcgcgcccgctacctggaaaccgtgccgctgattccaccctatccggcggcgattcccgatcatttcaataccgaggtgatgatctatcgcggctactggatggtcagctggttcaagcgcgagttcggcttgcgcgagatgcagcaggcgcgcgagcagggggtcgagccggagcaactgttcgacgaactggtcaacggcgtgccgcccggctcgatgggcctgaccctgcaaccctactggtcgccgggaatccgcgaaccgggactggaggccaagggggcgatgatcggtttcggcgacgtgcatacccgggcgcacatctaccgggccatcctcgagggcctggcctatgccctgcgccagggcaaggagcgcatcgagaagcgttcgggcacgccgatcgtgcgcctgcgcgtggccggcggcggctcgcagagcgacgcggcgatgcagctcaccgccgacatcttcggcctgccggccgagcgcccgcatgtctacgaggcgtccggcctgggtgcggcgatcgactgcgcggtggggctcggcctctatccggacgtcgccagcgcggtggccgggatgacccgcgtcggccgggttttcctgccccaggcggaagcccggcagatctaccagcggctctatggcgaggtctacctgcgcatgtatcgccagttgcgcccgctctaccgcagcattcgcgagattaccggctaccctgcctga

SEQ ID NO: 319933 - DNA, 909 bp, Pseudomonas aeruginosa
atggacaaggacaaggttctgctggtcctgcacggcaagcaggcgggcaacgaagaggttcgtgccgcggtcgcggcacagcgcgaggccgggcgggagctggcggtgcgggtaacctgggaggacggcgacgcccggcgcatcgtcgaggaggcgctggcggccggctatgcgacgctggtcgccggcggtggcgacggcacgctgcgcgaggtggccgaagcgctggcgcgcgggcgaggcgaggcgagcctggcgatcctgccgctgggcaccgccaacgatttcgcccgcgccgccgggattcccctggaaccggccgcggcgctggcgctgctcgaccagacggcgcggccgatcgacctgggcgaggtggacggcaagctgttcctcaacatggccactggcggcttcggttcgaaggtcaccgcgaatacctcggaggacctgaagaaggttctcggcggtgccgcctacctgttgaccgggttgacccgtttttccgaagtgcatgccgcccagggccgtttcagcgccccggacttccagtgggaaggcgagttcctcgccctgggcatcggtaacgggcgccaggccggcggcgggcacgtactgtgtccgcaagcgcgagtggacgacggcctgctggacgtgagcatcctgccgacgccgcaggacatggtcggtaccttgggcaccctgctcggcggtggcaacggagtggaaagcctgttcgtccgcgcgcgggtgccatggctggaagtggaggcggcggaaggtctcgacgtcaatctcgacggcgagccgctggaaggacgcaagctgcgtttctcggtttccccgggcgcgctgcgcgtgcacttgccggccggctcgccgttgttgcgcgagccgccgcgcgaggactga

SEQ ID NO: 319934 - DNA, 807 bp, Pseudomonas aeruginosa
atgttccgtctctccgcgctgtaccgctatccgatcaagtcttccgccgccgagtccctggagcgcgtcgcgctcgatgcgctgggcgtggtcggcgacagacgctggatggcggtggacaccgaaaccggacgtttcttcacccagcgcctgctgccgcagctggggcgtatccaggcgcgctgggcggcgccggaggtcctgcggctgaatgcgccggggatgtccgagctgagcctcgaagtaccggcagccgacgccaacctgcgtggcgtcacggtctggcgcgataccttgcaggcgccggatgccggcgacgccgcagcggactggctgacgcgcttcctcggccgcccgacgcgcctggtgcacattcccgaggcgcgcgcgcggcaggtcgataccggctacgccgaaccggggcagaaggtgcatttcgccgacggtttcccgctgctgctgatcggccaggcttcgctcgacgacctcagccagcgggtcggccggccgttggagatgctgcgcttccgtcccaacctggtggtggaaggcagcgccgcgttcgccgaggacggctggaaacgcatccgcatcggctcggtcgagttcgtcgtggccaagccctgttcccgctgcatcctcaccaccctggatccggcgaccggcgagcgcaacgaggaccgcgagccgctgacgaccctgaagacctaccgggaaaaggatggcgcggtgctgttcgggcagaacctgattgcgctgggacagggcagcctggaggtggggatgccggtggaaatcctcgactga

SEQ ID NO: 319935 - DNA, 387 bp, Pseudomonas aeruginosa
atgaacaagcccctcgccaccgccctgctcgccacctccagcctgctgctcgccgacggcgccctggccgccgacgcctgcggtacgccgcgcaacgccttcgacagcgtgtactgccgcagcggcgagttttcccaggccgaccgcgagctgaaccagcagttcggcaccctgcgcaagcacctgaacgacggccagaaagccctgctgaagaagagccagatcgcctggatcaaggagcgcgacgcggcctgcagcgaaagcaaggacaacggttatttcgtcaacctcgactgcgccaccgagaagacccgccagcgcctcgacttcctccgcgaacgcgagcgcgagtgcctgagcaccggttgcgtcgacgccaagctctga

SEQ ID NO: 319936 - DNA, 1929 bp, Pseudomonas aeruginosa
atgcgcggtcgcctgttcactctcgtttcctgccttttgctcagtatttccttcgtcgacgcggtccacgccgcttccctgaccgaacaacgccgtctctacgaccaggccaaggccgccctggccaagggcaacagcgcgccctacatggcctcgcgcagcgccctgcgcgattacccgctggaaccctacctggcctacgacgaactgacccatcggctgaagtccgccagcaacgaggaggtcgagcgcttcctcaccgaacacggcgacctgccgcagatcggctggctgaaactgcgctggctgcgcctgctggccgaccgcggcgactggaagaccttcgtcaactactacgatccgaagctgaacttcaccgaactcgactgcctgtatggccagtaccagctgggccacggccagaaggccgaaggctacgccaccagcgaacgcctgtggctggtcggcaagtcgcagccggctgcctgcgacaccctgttcggcctctggcagggcgaaggccagctcaccgaggaaaaggtctggaaacgcctcaagctggccgccgaagcgcgcaactacagcctcgcctcgcacctcgcgcagcgcctgccgaccctcggcaaccagggcgcgctgatggtcagcgtggcgcagaaccccgcccagctgagccagaccggccgcttcagccagcgcgaccatgccaccgccgacgtggtcggtctcggcctgcgccgcctggcgcggcaggacccggaaaaggcccttagcctgctcgactactacagctcggcgctacccttctccagcgacgagaaggtcgccatcgcccgcgagatcggtctcagcctggccaagcgcttcgatccgcgcgcactgccgctgatgacccagtacgatcccggcctgcgcgacaacaccgtcaccgaatggcgcacccgcctgctgctgcgcctgggccgctgggacgaagcctacgcgctgacccgcaagctgccccaggatcttgccgccaccagccgctggcgctattggcaggcacgcagcctgcaactggcgcagccgaacagcaaggagccgatcgcgctgtaccagaagctcgccggcgagcgcgacttctacggcttcctcgccgccgaccgcctgagcgtgccgtacaagctcggcaaccgtcctgcgcacatcgacccgcgcgtcctgcaacgcgtacgcaacgccgccagtacgcgccgggccatggagttcttcaaccgtggcgaagtgatcaacgcccgccgcgagtggtaccacgccgcgcgcctgttcgatcgcgacgagctgatcgcccaggccaggctggcctacgacatgcagtggtatttcccggcgatccgctcgatcagccaggcgcaatactgggacgacctggacatccgcttcccgatggcgcaccgcgccaccctggtgcgcgaagcgaagaaccgcggcctgcactccagttggatcttcgccatcacccggcaggaaagcgcgttcatgtccgatgcccgttccggagtcggcgccaccgggctgatgcagctgatgcccggcaccgccaaggagacctcgcgcaagttcggcatcccgctggcctcgacccagcaactgatcgtgcccgacgtcaacatccgcctcggcgccgcctacctgagccaggtgcatagccagttcaacggcaaccgggtactcgcctcggccgcctacaacgccggtccgggccgcgtccgccagtggctgaaagatacccgccacctggccttcgacgtgtggatcgagaccattccgttcgacgagactcgccagtacgtgcagaacgtgctgtcctatgcggtgatctacgggcagaagctcaatgcgccgcagcccatcgtcgactggcacgaacgctacttcgacgatttctga

SEQ ID NO: 319937 - DNA, 1923 bp, Pseudomonas aeruginosa
atgaccctgctcaagttcaccgatgtatcccttgcctttggcaccactcccttgctggacaaggtgtcgtggcagatcggccgtggcgagcgggtctgcgtgatcgggcgcaacggtaccggcaagtccagcctgttcaaggtggtcaagggcgaacagcaggccgacgacggcgaagtctggcgcgcaccggcgctgaagatcggcgaattgccccaggaactgccgcgtgccgacgaacggacagtgttcgacgtggtggccgagggtctggcggaagtcggcaagctgctcgccgagtaccaccacctgagcctgaacatccataccgacgacgacctggcgcgcctctcgcgggtccagcaggaactcgaggcgcgcgatggctggcgcctgcagcaactggtggacagcaccctcagccgcctgcagttgccggccgacaagaccctcgccgaactctccggcggctggcgtcggcgcgtgctgctggcccaggcgctggtcgccgagccggacctgctgctgctcgacgaaccgaccaaccacctggacatcggcgccatcgcctggctcgaggaagcgctgctgggcttcaacggcgcggtgctgttcattacccacgaccgcgccttcctgcaatccctggcgacccgcatcctcgagctggatcgtggccacctgatcgactggaacggcgactacgccagtttcctggtgcacaaggaacagcaactggccgccgaagaagctgccaacgcattgttcgacaagcgcctggcccaggaagaagtgtggatccgccagggcatcaaggcccgccgcacgcgcaacgaagggcgggttcgggcactgaaggaaatgcgtcgcgaacgcgccgagcgccgcgagcgccagggcaaggccagcttccagctggaaagcgcggacaagtccggcaagcaggtgatcgtggtggagcacgtcagcttcgcccatcccggcggccagccgctggtacgcgacttctccatggtcctgcagcgcggcgaccgtatcggcctgctcggcgccaacggtaccggcaagaccaccttgctcaagctgctgcttggcgacctgcagccgacctcgggcaagatcgaggtgggcaccaagctggaagtggcctacttcgaccagttgcgccatcagctcgaacccgagcagacggtgatcgacaatatctccgaaggccgcgagttcatcaccatcgacggccagaaccggcatgtgctcagctatctcggcgacttcctgttcagtccgcagcgcgcccgcaccccggtgaaggcgttgtccggcggcgagcgcgcgcgcctgttgctggccaagctgttcagcaagccggccaacctgctggtgctcgacgaaccgaccaacgacctcgacgtggaaaccctggaactgctggaggaagtcctgctcggcttccagggcaccgtgctgatggtcagccacgatcgggccttcctcgacaacgtggtgaccagcaccctggtcttcgagggcgagggcaaggttcgcgaattcgtcggtggctaccaggactggctgcgccaagggggcacgccgcgcctgctcggcgtgagcgagtcgaagagcggcaaggccgagctgaataccgcgctggcgcccgccgccgaacccgcgccggctgctgcggcgccgagcgaggcgccggcgaagaaaaagctcagctacaagttgcagcgcgagctggaggctttgcccgggcagatcgacgcggtcgaggcggagctggcgggtgtccaggaaaccatcgcgcagcaggatttctatctgcgcccgcaggacgagcagcgcgaaaccctggcgcggctggacgcgttgcagcaggaactcgatgccttgctcgagcgctgggccgaactggaagactga

SEQ ID NO: 319938 - DNA, 687 bp, Pseudomonas aeruginosa
atggcaatcgagtaccgcatcacgctggacgaccagcatcagctcaactatcgcatcgagctggagcggcactacgacccgcaggcggctgccgcagcgccgcgctggacgcgcctggaacacaatcgctgcagcaactgcccgctcgatcgcgaacgctacagccattgtccggcggcggtcgacctgcatggggtgatcgaggatttccgcaacctgccggcgttccgcaaggccggcatctgcgtgcgcacgccggagcgcgagtacatcaagcaggcgggcctggaggaaggactgcgcgcgctgatcggcttgatcatggccagcagcgcctgtccgctgctggcgccgctgaggccgatggccatgcagcacctgccgttcgccagcaaccaggagttcgtgctgcgggtggtgccgctgtacctgatgcgccagtacttcaacttccgcgaggggcggcatgccgattgggaactgaaagggctggtgcggctgttccagcagttgcaactggtcaaccaggcgttctggcagcgaatccacgacacctgtgtcagcgattccaacctgaaggcgttcctgaccttcttctcgctgtcgtcgagcatcagctattcgctggaaacccagttgcagaagatccgcccgctggtgatgagcgccgaggaaacgctcggctga

SEQ ID NO: 319939 - DNA, 438 bp, Pseudomonas aeruginosa
atgccctatcaacacattctggtcgccgtcgacctgaccgacgaatgcgacccggtgatgaagcgtgcggcggccctggccaccagcaaccaggcccggctctcggtggtgcatgtggtcgagcccatggccatggccttcggtggggacgtgccgatggacctgtcgatgttgcagcagcagcagttcgaccaggcccgtgaacgcctggatgccttcgccgtacgctatccggacctcggcagcgagcagcgccacctggtctacgggcaaccgcgccaggaaatccaccgcctcgccgcggaacaggcctgcgacctgatcgtggtcggcagccacggtcgccacggcctggcgctgctgctcggttccactgccaacgacgtgctgcacggcgcgccctgcgacgtgctcgcggtgcacctgaagaaagcctga

SEQ ID NO: 319940 - DNA, 435 bp, Pseudomonas aeruginosa
atgaccacttggctggtgatcctgctgctggctgtcatgctcagtcccctggcctggctgatgccgtccaacaggcagcgcggcaagatggccctgcgcctcgaggcgcgccgtctcggcctggccatgcagctcgcgcgccaggattggccgcattggctggagagcgctccgccgacgtcctgcgcgcagttccactgcccgcgccgacgcggccgggaggcctggtgctattggcagaataccccgggccagtggctgaaccagtggcgcgagccgtgcgcggacgatgagttgctggacgccctgcgcagcctccccggggatgtctacaaggtggaggcgaccgcccagttccttgccctgtattggggcgagcgcggcgatagcgccgacctcgggcgcatcgccgagtttctccgccagcgcgcctga

SEQ ID NO: 319941 - DNA, 804 bp, Pseudomonas aeruginosa
atgatctgccgtccgttcactctttgtctggccctgctcggcctgctgagcctccccgtcttcgcggcagggaccgccgatgacctgctcgccctgcaccagatgcggctcgccacgcagaaatccctgaacgccttcttcatgtacgtcggccaggaaggcgatcaacgctacgccagcctgatcgaaagctcggcgcagacggcggaagcccgcctgcagcgactcgacggcgtgaacggcagcgaatcccggcgcctgctgggccagcttcgcgagcaatggcgggactatgcgcaagacctcgacaagctgaccggcgcggtgcgcaacaagggctacagcgacctgcaaccggtcgccgacctggcacgacgcaaccagcaactgatggacctcagcggccagttgtatcgcagcctgcaacgggaaaacgccgccacggtgccgacgctcaccgagcagagccgcgaacagagcctgctgatgcaggacattgctctggactatgcctcgcgcaacgcgtcggtgggcgccagcttcttcggcggcggcgaggagcgtccactggacgacctggccagccgcttttcggtcaacctgttgaagctgcagcaggcgccgcagaacgacgaggagatcgccagggcgctgcgcagcgtggcgatcaagtggcactacatcgagaagtccctgcgcaactacaaccagaacagcgtgccgttcctggtcaacaagaatgcagatcggatcatcgatggcctggagaaggtcgccgcgctgtatgccgcgcgcaaccaatga

SEQ ID NO: 319942 - DNA, 2148 bp, Pseudomonas aeruginosa
atgatttaccaaggtaaagccatcacggttaagcctcttgagggcggcatcgtcgagttgaatttcgatctcaagggcgagtccgtcaacaagttcaaccgtctcaccctcagtgagttgcgtgcggcagtcgatgcgatcaaggccgatgcatcggtcaagggcgtgatcgtgaccagcggcaaggacgtgttcatcgttggtgccgacatcaccgagttcgttgacaacttccagctgcccgacgaggaactgatggcgggcaacctcgaagccaacaagatcttcagcgacttcgaagacctggacgtacccaccgttgccgcgatcaacggcatcgccctcggcggcggcctggagatgtgcctggccgcagacttccgcgtgatgagcgcgaccgccaaggtcggcctgccggaagtcaagctgggcatctacccgggcttcggcggcaccgtccgcctgccgcgcctgatcggctgcgataacgccgtcgagtggatcgcctcgggcaaggaaaacaaggccgaggacgccctgaaggtcggcgccgtcgacgccgtggtcgctcccgagcaactgcaggccgctgccctcgacctggccaagcgcgccgtcgccggcgagctggaccacaaggcacggcgccagccgaagctggaaaagctgaagctgaatgcaatcgagcagatgatggccttcgaaaccgccaagggcttcgtcgccggccaggccggtccgaactacccggcgccggtggaagccatcaagagcatccagaaggccgccaacttcggccgcgacaaggcgctggaagtcgaagccgccggcttcgtcaagctggccaagacctcggtcgcgcagagtctgatcggcctgttcctgaatgaccaggaactgaagaagaaagccaagaaatacgacgaagtcgccaaggacgtgaaactggccgccgtgctcggcgccggcatcatgggcggcggcatcgcctatcagtcggcgctcaagggcaccccgatcctgatgaaggatatccgcgaagagggtatccagatgggcctgaacgaggccgccaagctgctcggcaagcgcgtcgagaagggtcgcctgaccccggcgaagatggccgaggcgctcaatggcatccgtccgaccatgtcctatggcgacttcggcaacgtcgacatcgtcgtcgaagccgtcgtcgagaaccccaaggtcaagcaagccgtgctcgccgaagtggaaggcgcggtgaaggaagacgcgatcatcgcctccaacacctcgaccatctccatcagcctgctggcccaggcgctgaagcgtccggaaaacttctgcggcatgcatttcttcaacccggtgcacatgatgccgctggtggaagtgatccgtggcgagaagaccggtgaaaccgccatcgccaccaccgtcgcctacgccaagaagatgggcaagagcccgatcgtggtcaacgattgccccggcttcctggtcaaccgtgtgctgttcccgtacttcggcggcttcgccaagctgctgagcttcggcgtcgacttcgtgcgcatcgacaaggtgatggagaagttcggctggcccatgggcccggcctacctgtccgacgtggtcggcatcgacaccggccaccatggccgcgacgtcatggccgagggcttcccggaccgcatggcggtcgagggcaagaccgccgtcgacgtgatgtacgaggccaaccgcctgggccagaagaacggcaagggcttctacgcctacgagaccgacaagcgcggcaagccgaagaaggtcaccgatccgcaggcctacgaagtgctcaagccgatcgtggtcgagcagcgcgaagtgaccgacgaggacatcgtcaacttcatgatgatcccgctgtgcctggaaaccgtgcgttgcctggaagacggcatcgtcgagaccgctgccgaggccgatatgggcctgatctacggcatcggcttcccgcccttccgtggtggtgctctgcgctacatcgattcgatcggtgtcgccgagttcgtggccctggccgacaagtacgccgagctgggcgcgctgtaccacccgaccgcgaagctgcgtgaaatggccaagaacggtcagaaattcttcggttaa

SEQ ID NO: 319943 - DNA, 1176 bp, Pseudomonas aeruginosa
atgagcctgaatccgagagacgtcgtcattgtcgacttcggccgcaccccgatgggtcgttccaagggtggcatgcaccgcaacacccgcgccgagaccatgtcggcgcacctgatcagcaagctgctggagcgtaacccgaaggtcgacccggccgaagtggaagacgtgatctggggctgcgtcaaccagaccctggagcagggctggaacatcgcgcgcatggcgtcgctgatgacccagatcccgcacaccagcgccgcgcagaccgtcagccgcctgtgcggttcgtcgatgagcgcgctgcacaccgccgcccaggcgatccagaccggcaatggcgatgtattcgtcatcggcggcgtggagcacatgggccacgtcggcatgatgcatggcgtcgacccgaacccgcacctgtccctgtacgccgccaaggcctcgggcatgatgggcctgactgcggaaatgctcggcaagatgcacggtatcagccgtgaggcgcaggacaagttcggcgcgcgttcgcaccaactggcctggaaggccacccaggaaggcaagttcaaggacgagatcatcccgatggaagggtatgacgagaacggtttcctgaaagtcttcgacttcgacgagaccattcgtccggaaaccaccgtcgagaccctggccgagttgaagccggcgttcaatccgaaaggcggcaccgtgaccgcggggacctcctcgcagatcaccgacggtgcctcctgcatgatcgtgatgtcggcccagcgcgcccaggacctgggcatccagccgatggcggtgatccgctccatggccgtggcgggtgtcgacccggcgatcatgggctacggcccggtgccgtcgaccaacaaggcgctcaagcgtgccggcctgaccatcgccgacatcgatttcgtcgaactcaacgaagccttcgccgcccaggccctgcctgtgctgaaggacctcaagctgctcgacaagatggacgagaaggtcaacctccacggcggcgccatcgccctgggtcacccgttcggttgctccggtgcgcgcatttccggcaccctgttgaacgtgatgaagcagaacggcggtacccttggcgtgtccaccatgtgcgtgggcctgggacagggtatcaccaccgtcttcgagcgcatctaa

SEQ ID NO: 319944 - DNA, 375 bp, Pseudomonas aeruginosa
atgacgccccgggagcgcgggtttgcctattgtgcgatccgtgcctataccgggctgttgtatgtcggcattgtgccgttgttttccgattttcgagacaaggtaaggaacatggacctgcaggctgggctctatcgtcattacaagggacagaactaccgggtcctgggtgtcgcgcggcattcggagacggaagaggcgctggtgatctaccaggcgctgtacggcgaattcggtctctgggtgcgtccgctggagatgttcaccgaggccgtggaggtcgatggcgagtgggtgccgcgcttcgtcctggtgagtcccgaggccgatcccctgggcttgcagaaagctcccggcggggaagaccgcgcttga

SEQ ID NO: 319945 - DNA, 2607 bp, Pseudomonas aeruginosa
atgggtaaatcgctggtcatcgtggaatccccggccaaggccaagaccatcaacaagtacctgggcagccagtacgtggtgaagtcgagcatcggccacatccgtgacctgcccaccagtggttcgtcgagttccaaggagccggcggccaagggccgcaagagcgcctccgaggcgccggcgctgtcaccgaaggagaaggccaggcgccaactggtctcgcgcatgggggtcgaccccgagcatggctggaaggccaagtacgagatcctgcccggcaaggaaaaggtcatcgacgagctgcgccgcctggccaaggacgccgacaccgtctatctcgcgaccgacttggaccgcgaaggggaggccatcgcctggcacctgcgggaagccatcggcggcgacgaaagccgctacaagcgcgtggtattcaacgaaatcaccaagaaggccatccaggaggccttctcccagcccggcgagctcgatatcaaccgggtgaacgcccagcaggcgcggcgtttcctcgaccgcgtggtcggctacatggtctcgccgctgctctggcagaagattgcccgtgggttgtccgccggccgcgtgcagtcggtggcggtgaagctggtggtggagcgcgaacgcgagattcgcgccttcgtcccggaagagtactgggaagtgcatgccgacctcggtaccgccaagggcgccaacgtgcgcttcgaggttacccgtgagaagggcgaggccttcaagccgctcaacgaagcccaggccatggcggccctggaaaagctcaaggcctcggcctatagcgtcgccaagcgcgaggaccggccgacctccagccgaccctcggcgccgttcatcacttccaccctgcagcaggcggcgagcaaccgcctgggcttcggggtgaagaagaccatgatgatggcccagcgtctctacgaggccggctacatcacctacatgcgtaccgactcgaccaacctgtcggccgatgccattggcatggtccgcggtttcatcgaggacgagttcggccagaagtacctgccgggcaaggccaacgtctactcgagcaaggagggcgcccaggaagcgcacgaggcgatccgtccttccgacgtcaacctcaagccgacccagctgtccggcatggagcgtgacgccgagcgcctgtacgacctgatctggcgccagttcgtggcgtgccagatgaccccggccgaatacctctcgaccagcgtgagcgtcaccgccggcgatttcgagctgcgcgccaagggccgcatcctcaagttcgacggttatacccgggtactgccgcagcagagcaagccgggcgaggacgacgtcctgccggaaatgaaggaaggcgagaacctcaagctgatcaagctcgatccgagccagcacttcaccaagccgccggcgcgctactccgaagcgagcctggtcaaggaactggagaagcgcggtatcggccgcccctcgacctacgcggcgatcatctccaccatccaggagcgcggctacgtaaccacccacaaccgccgcttctatgcggagaagatgggcgacatcgtcaccgatcggctcaacgagagcttcgccaacctgatggactacggtttcaccgccgggatggaggagcatctcgacgacgtggcccagggcgagcgcgactggaagcacctgctcgacgagttctacggcgatttcaagaagaagctcgaggtggccgaagtcagcgagaaggggatgcgcgccaaccagccgaccctgaccaacattccctgccgcgagtgcggccggccgatgatgattcgtaccgcctccaccggcgtgttcctcggctgctcgggctacagcctgccgccgaaggagcgttgcaaggcgaccgtcaacctgattcccggcgacgagatcgccgcggacgacgagggcgagtccgagtcgcgggtgttgcgtggcaagcatcgctgcccgatctgcagtaccgcgatggacgcctacctgctggacgagaaacacaagctgcatatctgcggcaacaaccccgactgtccgggctacgagatcgaggaaggccagtaccggatcaagggctacgaagggccgagcctggaatgcgacaagtgtggcagcgagatgcagttgaagaccggccgtttcggcaagttcttcggttgcaccaatccgacctgcaagaatacccgcaagctgctgaagaatggcgaggcggcgccgccgaagatggacgccatccgcatgcctgaattgaagtgcgagaaggtggacgatatctacgtgctgcgcgacggcgcttcgggcatgttcctggccgccagccagttcccgaagaaccgcgagacccgcgcgccgttggtgagcgagatcatcccgcacaaggccgagctggatcccaagtaccattacctctgcgacgccccgcagaaagacccggacggccgtcccgcggtgatccgtttcagccgcaagaccaaggagcaatacgtgcagtccgaggtcgatggcaagcccaccggctggcgcgccttctacgatggcggcaagtggaaggtcgaagacaagcgctga

SEQ ID NO: 319946 - DNA, 519 bp, Pseudomonas aeruginosa
atggcccaagagctttatacccgcaccaaccagaagctgtatttcgccgggttggctctggaggcctggaagcgagccgatgccgagcgggcgatgaatgcccaggcgatcatccagggggagcgcgagtcggcgctgttccacctttatggcgcagtgctcggtgtatgccatgagatcgccggttactaccgtctgccgcaggctgccgctcctcgcgtggatgcattgctgaatgccgaagtgctggcggccgcgcccagccccgagctggctgaactggtggagttggcgtcgcagccggaaacctggctgggccagttgctgggcgcctactccgagctgttcctgccgccgcgaccgaccaaggcagcgaagatcgaccccagcacaccgttgatcgttgccgtgagtatcgacgaagaagcccccttgctttctcgcgaaaccctcgaggaatggcggcagtcgctgaagcaattggtcctgcgttttcgcgagagcctgacggagctgtaa

SEQ ID NO: 319947 - DNA, 234 bp, Pseudomonas aeruginosa
atgccaacatccttccttgaaatcgtagaaatgcccgacgggcgcatcgtgctgcgtcgcgccgatgacgaggaggcgttggtgaccctggagttctccggggacgcgaagaatttcctgcaaggccagcatgtcgaagtggccaaggccatgttcaatgtcggcgtgcaaatggccggtcgtcttgccgagggcgagatggaacacgacgaaggcccccgcgtcctgcactga

SEQ ID NO: 319948 - DNA, 486 bp, Pseudomonas aeruginosa
atgcagacctcccactcgctgcccagcgcccagttgccactgttccaggaagcgttctgggccagcaacggcgcacccttgctcgacgatgtcatcgacagcccttccagcgcctccatcgaggaacccgctgcctttagcgaactttcgctcagcggcctgccggggcactgcctgaccctgctcgcaccgattctccgcgagctcagcgaggaacaggatgcccgctggctgaccctgatcgctccgccggcgagcctgacccatgaatggctgcgccgcgccggcctgaaccgcgagcgcatcctgctactgcaggcgaaggacaacgccgctgccctggcgctcagttgcgaggccttgcgcctgggccgcagccacaccgtggtcagttggctggaaccgctgagccgggcggcgcgcaagcaactgtcccgcgccgcccaactgggccaagcacagagcctgaatattcgtctgggttga

SEQ ID NO: 319949 - DNA, 615 bp, Pseudomonas aeruginosa
atgcagaagctgacgccccgccaagccgagatcctctccttcatcaagcgctgcctggaagaccacggctttccgccgacccgggcggaaatcgcccaggaactcggcttcaagtcgccgaacgccgccgaggagcacctcaaggcgctggcacgcaagggcgccatcgaaatgactccgggcgcctctcgcggcatccgcattcccggcttcgaaccgcatgccgccaacgacgatgagggcctgccggtgatcggacgggtcgccgccggcgcaccgatcctcgccgaacagaacatcgaggaatcctgccgtatcaatcccgccttcttcaatcctcgcgccgactacctgttgcgcgtgcgcggcatgagcatgaaggacatcggcatcctcgacggcgacctgctggccgtccacgtcacccgcgaagcgcgcaacggccaggtggtggtcgcgcggatcggcgaggaggtcacggtgaaacgcttcaagcgcgaaggcagcaaggtctggctgctggcggaaaaccctgagttcgctccgatcgaagtcgatctgaaggagcaggaactgatcatcgaaggcttgagcgtcggcgtgatccggcgctga

SEQ ID NO: 319950 - DNA, 702 bp, Pseudomonas aeruginosa
atggcccagtcggaaaccgtcgaacgcattctcgatgcggcggaacagctgttcgcggaaaaaggcttcgccgaaacctcgttgcgtctgatcaccagcaaggccggggtcaacctggcggcggtgaattatcacttcggttcgaagaaggcgctgatccaggcggtgttctcgcgcttcctcgggccattctgcgtcagcctggaaaaggagctggatcgtcgccaggccaagcccgaggcccagcacgccaccctggaggacctcctgcacctgctggtgtcccaggcgatggcggtgaagccgcgcagcggcaacgacctgtcgatcttcatgcgcttgctcggcctggccttcagccagagccaggggcacctgcgcaagtacctggaggaggtctacggcaaggtcttccggcgctacatgctgctggtcaacgaggctgcgccgaagctgccgcccatcgagctgttctggcgcgtgcacttcatgctcggcgcggccgccttcagcatgtcggggatcaaggccctgcgggcgatggcggaaaccgatttcggcgtgaacacttccaccgagcaggtgatgcacctgatggtgccgttcttcgctgccggcatgcgcgccgagagcggcatcgacgatccgctgctggccggggcgcaactgcgcccgcggaacaagacgcccgccaaggcctga

SEQ ID NO: 319951 - DNA, 999 bp, Pseudomonas aeruginosa
atgcaaggctctctgatgctcgacatcggcggcacctggctgaccgccgaggaccgccaaatcctgcgccaccccgaggtgggcgggctgatcatcttcgctcgcaacatcgagcatcctgcccaggttcgcgaactgtgtgcggccattcgcgccatccgtcccgacctgttgctggccgtcgaccaggaaggagggcgcgtgcagcgcctgcgccagggcttcgtgcgcctgccagcgatgcgcgcgatcgccgacaaccccaatgccgaagagctggccgagcattgtggctggctgatggcgaccgaggtgcaggcggtcggcctcgacctgagtttcgcgccggtgctggatctcgaccaccagcgcagcgccgtggtcggtagccgcgccttcgagggcgacccggagcgtgccgcgctgcttgccggtgctttcattcgcggcatgcatgccgccgggatggccgccaccggcaagcattttcccggtcacggctgggccgaggccgattcccatgtggcgattcccgaagacgcgcgcagtctcgaggaaatccggcgcagcgacctggttccgttcgcccgcctggccggacagctcgacgcgctgatgccggcccatgtcatctatccgcaggtcgacccgcagcccgccggcttttcccggcgctggttgcaggagatcctgcgcggcgagctgaagttcgacggggtgatattcagcgacgacctgtcgatggccggcgcccatgtggtcggcgacgccgccagccgcatcgaggccgccctggccgcgggctgcgacatgggcctggtgtgcaacgaccgggcttccgccgagctggccctggctgccctgcaacgcctgaaggtgaccccgccgtcgcgtctgcaacgcatgcgtggcaagggctacgcgaataccgactatcgccagcagccgcgctggctggaagcactgtccgcgttgcgcgccgcgcaactgattgattga

SEQ ID NO: 319952 - DNA, 738 bp, Pseudomonas aeruginosa
atgagtgtctacgcgattatcggaggaaccggcctgacccagctggaagggctgacgctgagcgagtccctgccgatcgaaacgccgtatggcgcgccgtccgcgccgctccagcgtggccgctacgccgggcgcgaggtgctgttcctggcacgtcacggtcatccgcaccgcttcccgccgcaccaagtgaactaccgggccaatctctgggcgctgaagcaggcgggtgccgaggcggtgatcgcggtcaacgcggtgggtggcatccatgcggcgatgggaacggggcacctgtgcgtgccgcaccagttgatcgactacacctcgggacgcgagcacacctatttcgccggcgatatcgagcatgtcacccatatcgacttcagccacccctatgacgagccgttgcgccagcgcctgatcgaggcgttgcgtgcgttggggctggcgcacagcagccatggggtctacgcctgcacccaagggccgcgcctggaaacggtggcggaaatcgcccggttggagcgggacggcaacgatatcgtcggcatgaccggcatgcccgaggcggcgctggcccgcgagctggagctgccctacgcctgcctggcgctggtggtcaatcccgcggcgggcaagtcggcggggatcatcaccatggccgaaatcgaacaggcgttgcacgatggcatcggcaaggtgcgcgaggtgctggcgcgggtcctggccggctag

SEQ ID NO: 319953 - DNA, 630 bp, Pseudomonas aeruginosa
atgcgcttgttccgttgccttgccctgctgctctcactggccgcccccgcggcattcgccggcggtccctaccaggtggaactggtggtgttccgccaggccggcgatgccgtgccgtccagccagccggccccggacgactgggccaccggcgcacagccgctggccagcgacgccctgcgcgccaccgcgctcgacaaccagctcgccaagctcagccaggacaacggctacaccgtgctgctgcacaaggcctggcgccaggacatcggcgagaccccggtgaagatcgccctcagcgaaggccaggaacaggatcatcatttcccggtggaaggtacgctgaccctcagccaggtgcgcttcgtcgacatggaggccgatttctgggtcaatcgcttcggcgacgacggtttcctcgccggcagccagcacatcaggcagggcacgcggctgaagaatggcgaactgacctatctcgaccatccgagcctgggcatcctgatcaaggtggtgccggtcggcgcccgtcccgccgcccccaatcccatggaaatggaagaacagcaggcaccggcggacgcgccccccgtcgaaggcggcttcgacgccgcacctcctgcgcaatag

SEQ ID NO: 319954 - DNA, 3453 bp, Pseudomonas aeruginosa
ttgcccgtgtccgtactgcgtcttcccagcctgccggccagcgccggcaagcaacactggggcaacctccccggtgccgcgctgagcctggctgtcgccgaggccgccagttccgccaagcgcttcaccctgctgctgaccgccgacagccagaatgccgaacgcctggaacaggaactgcggttcttcgcccccgacctgccggtattgcatttccccgattgggaaaccctgccctacgacgtcttttcgccgcaccaggacatcatttcccagcgcatcgccgccctctaccagttgccgcagctcaagcacggcgtgctggtggtgccgatctccaccgccctgcaccgcctggcgccgacccgcttcctgctcggcagcagcctggtcctcgacgtcggccagaaactcgacgtcgagcggatgcgcctgcgcctggaaggcgccggctaccgctgcgtcgacacggtctacgagcacggagagttcgccgtccgcggcgcactgatcgacctgttcccgatgggcagcgagttgcccttccgtatcgacctgttcgacgacgagatcgagaccctgcgcaccttcgacccggagacccagcgctccatcgacaaggtcgagtcgatccgcctgctgccggcacgcgaattccccctgaacaaggaagcggtcaccggcttccgcggccgcttccgcgagcgcttcgacgtcgactaccggcgctgcccgatctaccaggacctcgccagcggtttgacaccctcgggaatcgagtactacctgccgctgttcttcgaggaaaccgcgaccctcttcgactacctgccgcaagacacccaggtgttctccctgcccggcatcgaacaggccgcggagcagttctggaatgacgtacgcagccgctacgaggaccgccgggtcgatccggaacggccattgctgccgccggcggaagtgttccttccggtggaagactgcttcgcccggctgaagaactggccacgggtggtcgccagccaggaggacgtcgagccgggcgtcgggcgcgagcgcttcccggccctgccgctgccgaacctggcgatcgaagccaaggccgccgagccgctggccgcgctgcgccggttcatcgaggagttccccggccgcgtactgttctgcgccgaatcggccggacgccgggaagtcctgctggagctgctggcccgactgaagctgcgccccgaggaagtcgacggctggccggccttcctcgccagccaggcacgcctggcgatcagcatcgcgccgctggacgagggcctgctgctggaccatccggccctcgccctggtcgccgaaagcccgctgttcggccagcgcgtcatgcagcgccggcgccgggaaaagacccgcgacggcggcgacgcggtgatcaagaacctcaccgagctgcgcgaaggcgcgccggtggtgcacatcgaccatggcgtcggccgctacctgggcctgatcaccctcgaggtggacaaccagcaggcggaattcctcatgctgcaatacgccgaggacgccaagctctacgtgccggtcgccaacctgcacctgatcgcccgctacaccggcgccgacgacgccctggcgccgttgcaccggctcggctcggaaacctggcagaaggccaagcgcaaggccgccgagcaggtccgcgacgtcgccgccgagctgctcgacatctacgcccgccgcgccgcccgcgaaggcttcgcgttcaaggatccgcaggccgactacgcgaccttctcggccggcttcccgttcgaggagacgccggaccagcaaagcgccatcgaggcggtggtcgccgatatgctcgcgcccaggcccatggaccgcctggtctgcggcgacgtcggcttcggcaagaccgaagtggcgatgcgcgcggcgttcgtcgccgtgcatagcggcaagcaggtggcggtgctggtgcccaccaccctgctcgcccagcagcactacaacagcttccgcgaccgcttcgccgactggccggtgagcgtcgaggtgatgagccgcttcaagagcgccaaggaagtcgagaatgctgcgcggctactggccgaaggcaagatcgacatcctcatcgggacccacaagctgctccaggaagacgtgaagttcgccaacctggggttggtcgtgatcgacgaggaacaccgcttcggggtgcgccagaaggagcagctcaaggccctgcgcagcgaagtggacatcctcaccctcaccgccacgccgatcccgcggaccctgaacatggccgtctccggcatgcgcgacctgtccatcatcgccacgccaccggcgcgccgcctgtcggtgcgcaccttcgtcatggagcagcagaacgcggtgatcaaggaagcgctgctccgcgaactgctgcgcggcggccaggtgtactacctgcacaacgaagtgaagaccatcgagaagtgcgcccgcgacctcgccgaactggtcccggaggcgcgcatcggcatcggccacggacagatgcacgagcgcgagctggaacaggtgatgagcgacttctaccacaagcgcttcaacgtgctggtggcctcgaccatcatcgagaccggcatcgacgtgcccagcgccaacaccatcctcatcgagcgcgccgacaagttcggcctggcccagttgcaccagttgcgcggccgcgtcggtcgcagccaccaccaggcctacgcctacctgctgacaccgccgcgccgtcagatgaccccggacgccgagaaacgcctggaagccatcgccaacgcccaggacctgggcgccggcttcgtcctcgccacccacgacctggagatccgcggcgccggcgagttgctcggcgacggccagagcgggcagatccaggcggtcggcttcaccctctacatggaaatgctcgaacgggcggtgaaggccatccgcaagggcgagcaaccgaacctcgagcagccactgggcggcgggccggaggtcaacctgcgggtgcctgcgctgatccccgaggattacctgcccgacgtgcatgcccggctgatcctctacaagcgcatcgccaacgcccctgacgaggaaggtttgcgcgagttgcaggtggagatgatcgaccgcttcgggctcctgcccgatccggcgaagaacctgatgcgcctgacccttctgaaactgcaggcggaaaaacttggaatactcaaggtcgatgccggaccgcagggcggtcgtatagaattcgccgccgatacccaggtcgacccgctggtattgatcaagctgatccagggccaaccgaaccgctacaagttcgaaggcgcaaccctgttccgcttccaggtgcccatggaacgaccggaagaacgcttcaataccctggaggcgctgttcgagcgcctgacaccgcaaaccacctaa

SEQ ID NO: 319955 - DNA, 1467 bp, Pseudomonas aeruginosa
atgtggaaggtattgcccgtgactcagaagcccgaccagtgtctcggtgaatggatcgatcgtgaagccatcgcggaagccatgatcccgctgattggccagctctaccgcaataacaatgtggtgacctcgatccatggccgtggtctgatcaaccgctcggtgatcgcgatcatgaaggcgcatcgtttcgcccgtcatcgcatggctgatgacgccgagctgtcggttcacgagacgttcccgatcctcaaggcgatgagcgagctcaagctgggcgccgcttccgtcgatctgggcaagatggtcgccaagttcaaggcagaaggtaacggccgcagcatcgaggacttcgtcaagtccgagctggccgaggtggtcggcaagcagaacggcgatgcccgcgaaggcaccgacgtcgtgctctacggcttcggccgcatcggccgcctgctggcgcgcatcctgatcgagaagaccggcggcggcgacggcctgcgcctgcgcgcgatcgtcgtgcgcaagggtgccgagaacgacctggtcaagcgggccagcctgctgcgtcgggactcggtgcacggtccgttcgacggcaccatcaccatcgacgaagaaaacaacacgctgaccgccaacggcaacctgatccaggtgatctactccaacgatccggcgtcgatcgactacacccagtacggcatcaagaacgccctgctggtcgacaacaccggcaagtggcgcgacgccgaaggcctcggccagcacctgaagtgcccggggatcgatcgcgtggtccttaccgctccgggcaagggtgcgctgaagaacatcgtgcacggtatcaaccacaccgacatcggcgccgacgacaagatcatctcggccgcctcctgcaccaccaacgccatcgtgccggtgctgaaggccgtcaacgaccagtacggcatcgtcaacggtcacgtcgagaccgttcactcgtacaccaacgaccagaacctgatcgacaacttccacaagggcagtcgtcgtggccgcagcgcgccgctgaacatggtgatcaccgagaccggtgccgccaccgccgcggccaaggccctgccggtgctgaaaggcaagctgaccggcaatgcgatccgtgtgccgacgccgaacgtgtccatggcgatcctcaacctgaacctggaaaaggccaccacccgcgaagagatcaacgagtacctgcgccagatggccatgcactcggacctgcagaagcagatcgacttcgtcagctcccaggaagtggtttccaccgacttcgtcggttcgcgccatgccggcgtggtggacgccgaggcgaccatctgcaacgacaaccgtgtcgtcctgtacgtgtggtacgacaacgagttcggctacagctgccaggtagtgcgcgtgatggaagacatggctggggtcaacccgccggccttcccgcgttga

SEQ ID NO: 319956 - DNA, 1410 bp, Pseudomonas aeruginosa
atggatggtcaacatctgcaccagggcgagctgaagcgtggcctgaagaatcgccacatccagttgatcgcgctgggcggggcgatcggcaccgggctgttcctcggctcggcgggcgtcatcaagacggccggcccgtcgatgatcctcggttacgccattggcggcttcatcgccttcctgatcatgcgccagctcggcgagatgatcgtcgaggagccggtggccggctccttcagtcacttcgcacacaagtactggggcggattcgccggtttcctttccggctggaactactgggtgctgtacatcctggtgggcatgtcggagctgaccgcggtgggcaagtacatccagtattggtggccggacgtgccgacctgggcgacggcggcggcgttcttcgtgctgatcaacgcgatcaacctggccaacgtgaaagccttcggcgagaccgagttctggttcgcgatcatcaaggtagcggcgatcgtcggcatgatcctgctcggtatctacctgctggtcggcggcggtggcggaccgcaagcctcggtgagcaacctgtgggaccgcggcggcttcttccccaacggtctcagcggcctggtgatgaccctggcgatcatcatgttctccttcggggggctggagttggtgggtatcaccgccgccgaggcgtccgagccgcggaaggtgatcccgaaggcgatcaaccaggtgatctaccggatcctgatcttctatatcggcgccctggcggtgctgctctcgctgtatccatgggaccagttggtggagaccatcaacgcttccggcgacgactacagcggcagcccgttcgtgcagatcttctcgttgatcggcagcggcaccgcggccaacatcctcaacttcgtagtactcaccgcggcattgtcggtctacaacagcggcgtctactgcaacagccggatgctctacggcctggccgcccagggtgacgcgccgaaggtgctgatgtcggtggaccgccggggcgtgccggtgctgtcgatcctggtctcggcgctgatcaccttcctctgcgtgatcgtcaactacgtattgccgcacaaggcgctggagctgctgatgtcgctggtggtggcggcgctggtgatcaactgggcgatgatcagcctgtcgcacctgaagttccgcgcggcgatgaagcgccagggcgtggacaccttcttcaaggcgctctggtcgccgttcagcaactacctgtgcctggccttcgtgttgttcatccttggcatcatgctgatgatccccgggatcaacatctcggtgtacgccattccattctggctgctgctgatgtggttgtgctaccgggtcaagctgtcgctggcggaaaggcgcgggctcggccagcaggcctga

SEQ ID NO: 319957 - DNA, 1338 bp, Pseudomonas aeruginosa
atgatcaagataaaacgtggcctggacctgcccatcagcggcgcccccgaacagcgcatcgaggcagcacgcccggtacgcagcgtggcgttgatcggtttcgactaccacggcatgaagccgaccatggcggtgcaggtaggcgaccgggtgaagctggggcaggtgctgttcaccgacaagaagaatccctccgtcagctataccgcacccggcgccggtgtggtcagtgccatccatcgtggcgagaagcgcgtcctgcaatcggtggtcatcgatctcgacggcgacgagcaactggagttcgcccgttatcccgctgacaaactcgccacgctgagcgccgagcaggtccgcgacaacctgttgcagtcgggcctgtggaccgcgctgcggacccggccgttcagcaaggtgcccgatcccgagtccagccccagttcgattttcgtcactgccatcgatacccagccgctggccgccgatccgcaggtggttatcgcggagcagggcgaggccttccaggccgggctgacggtgctcgggcgcctggcccgggtgttcctgtgcaaggcggaaggcgtttcgctacccggcgaggcgctctccggcgtgaccgcgcaagccttcgccggtccgcatccggcgggcctgcccggcacccatatccacttcctcgacccggtgggtgccggcaagagcgtgtggaacctgaactaccaggacgtgatcgccatcggcaagctgttcacgaccgggcaattgtggaccgagcgggtgatcgccctggccggtccggtggtggaaaagccgcgtctggtgcgcacccgcttgggcgccaacctcgacgaactggccgccggccagctgcagccgggcaacaaccggctgatctccggctccgtgctgggcggtcgcaccgcccatggcgcctacgcctacctggggcgctaccacctgcagttgtcctgtctcaaggagggcgaccagcgtgagttcctccactacctgcgcgccggggtggaaaagcattcgttgctcaacgtgttcgtctccaggctgctcggcggcaagcgtttcgccttcaccaccagcaccaacggcagcccgcgggcgatggtgccggtaggcaattacgaggcggtgatgccgctggatatcctgccgacccaactgctgcgctacctgatcgtcggcgacacggaaatggcccagaagctcggcgccctggaactcgacgaagaggacctggcgctgtgcagctacgtctgcgccggcaagtacgaatacggcccgattctgcgggacaacctggcacgcatcgagcaggagggctga

SEQ ID NO: 319958 - DNA, 1212 bp, Pseudomonas aeruginosa
atgggtttgcgtaacctgctcgacaaggtcgagcatcatttcgagaagggcgggcgctacgagaagtggtacccgctgtacgaagccgtggacaccttcctctatcgtcccggcagcgtcacccgcaccactgcacacgtgcgcgacggcatcgacctgaagcgcatgatgatcatcgtctggctgtgcaccttcccggcgatgttcttcggcatgtacaacgtcggccaccaggccaacctgatcttcgcccagagccccgacctgttgagcgcccaggatggctggcgcttcgccctgatcggcgcgctggccgggttcgacccgaacagcctgtgggattgcctggtccagggcgccgcgtacttcttgccggtgtacctgaccaccttcatcgtcggcggtttctgggaggtgctgttcgccagcatccgccgccatgaggtcaacgaaggcttcttcgtcacctcggtgctgttcgccctgaccctgccgccgtccgtcccgctgtggcaggtagccctggggatcagcttcggcgtggtgctgggcaaggaagtgttcggcggcaccgggaagaacttcctcaatccggcactggtcggccgggccttcctgttcttcgcctacccggcgcagatgtccggcgacgcggtatggacctcggtggacggcttcgccggcgccacctcgctgagcctggccgccgccggcggcgtggacaacatcctcggccacggcttgacctggatggatgccttcctcggccacatgcagggttcgatgggcgagaccagcaccctggcgatcttcatcggcggcgccgtgctgctgctgacccgcatcgcctcctggcgcatcgtcgccggggtgatgctggggatggtcgccatgagctacctgttcaacgccatcggctcggccagcaacccgatgttcgccatgccctggtattggcacctggtcaccggcggcttcgccttcggcatgatcttcatggccaccgacccggtctcggcgtccatgaccgataccggcaagtggctgttcggcgccctgatcggagtgatggtcatgctgatccgggtggtcaacccggcgttcccggaaggcatgatgctggcgatcctgttcgccaacctgttcgcaccgctgatcgaccatttcgtcgttcaggccaacatcaagcggaggctggcgcgcaatggctaa

SEQ ID NO: 319959 - DNA, 786 bp, Pseudomonas aeruginosa
atggctaatcaagaatccaccacccgcacactgctggtagccctggtggtgtgcctggtcagctcggtgttcgtcgctggcgcggcggtggcactgaagccgacccaggcggaaaaccgcctgctcgacaagcagcgcagcatcctcgccatcgctggtctcggcgagccgggcatgtccggcaaagaggtcaaggcgctgttcgacagtcgcatcaccgccaaggtggtcgacctccagagcggcaccttcagcgatgcccaggacccgctcggctacgacccgctgaaagcggccaaggacccggcgctgtcggatgcgctgcccgccgccgaggacatcgcctcgatcaagcgccgcgagcgctataccacggtctacctggtggagaccgacggcaagctcgacaccctgatcctgccggtgcgcggctacggtctgtggtcgaccctctacggcttcctggcgctcaagggcgacctcaatacggtcgccggcttcggcttctaccagcatggcgagacccccggtctcggcggcgaggtcgacaatccgaaatggaaggcgctgtgggtcggcaagaccctctacgacgcccagggcaatcttgccgtacagatcatcaagggctcggtggacccgcaatcggcgaaggcgacccaccaggtcgacggcctggccggcgccaccctgaccagcaagggtgtcgacaacctgctgcatttctggctcggcaaggacggtttcgacgccttcctcgccaatctgcgcaaaggggaggcgtga

SEQ ID NO: 319960 - DNA, 672 bp, Pseudomonas aeruginosa
atggctgctcaacccacgatccgcgaagtcctgttcaatccggtcttccagaacaatccgatcggcctgcagatcctcgggatctgctcggcgctggcggtaacctcgaacctgaagaccgctaccgtcatggccatcgccctgaccctggtgaccggcttctccaacctgttcatctcgatgatccgccggcagattcccagctcgatccggatgatcgtgcagatggtgatcatcgcctcgctggtgatcgtcgtcgaccaggtgctcaaggcctatgcctatagcctgagcaagcagctctcggtgttcgtcgggctgatcatcaccaactgcatcgtgatgggccgcgccgaagccttcgccatggccaacccgccgctcgtgtcgttcttcgacggcatcggcaacggtctcggctacagcgccatgctgctggtgctgggcttcgtccgcgagctgttcggcgccggcaagctctacggcatcagcgtgttgccgacggtcaacgatggcggctggtaccagccgaacggcctgctcctgctgccgccttcggcgttcttcctgatcggcctgatcatctgggccctgcggacctggaagaaagaccaggtcgaggccccgacctacaagatggccccgcaggtatccagcaaggaggcttactga

SEQ ID NO: 319961 - DNA, 609 bp, Pseudomonas aeruginosa
atggagcactacatcagcctgttcgtgaaggccgtgttcgtcgagaacatggcgctggcgttcttcctcggcatgtgtaccttcatcgccatctcgaagaaggtggagaccgccatcggcctgggtatcgcggtgatcgtggtgcagaccatcaccgtgccggccaacaacctgatctacacctacctgctcaaggacggcgcgctggcctgggccgggctgcccgaggtggacctgagcttcctcggcctgctcagctacatcggggtgatcgccgccatcgtgcagatcctcgagatgctcctcgacaagtacgtacccagcctctacaacgcgctgggcgtgttcctgccgctgatcacggtgaactgcgcgatcatggccggctcgctgttcatggtcgagcgcgactacaaccttgccgagagcacggtgtacggcgtcggctcgggcttttcctgggcgctggcgatcgccgcgctggcgggtatccgcgagaagctcaagtacagcgacgtccccgagggcctgcagggcctggggatcaccttcatcaccatcggcctgatgtcgttgggcttcatgtcgttctccggcgtgcagttgtaa

SEQ ID NO: 319962 - DNA, 1224 bp, Pseudomonas aeruginosa
gtgatcggattcgagattttcctggccatcggcatgttcaccgccatcgtcctgggcctggtggcgatcatcctggtcgcccgcgccaagctggtgtcgagtggagacgtgaccatccagatcaacggcgagcacagcctgaccgtgccggccggcggcaagctgctgcaaaccctggcggcgaacaacgtgttcctgtcttccgcctgcggcggcggcggcacctgcgcgcagtgcaaatgcgtggtggtcgagggcggcggcgagatgctgcccaccgaggagtcgcacttcacccggcgccaggcgaaggaaggctggcgcctgtcgtgccagacgccggtcaagcaggatatgcagatccgcgtgcctgaagaggtcttcggggtgaagaaatgggagtgcacggtggagtccaaccccaacgtcgccaccttcatcaaggaactcaccctgcgcctgccggacggcgagagcgtggactttcgtgccggcggctacgtgcagctggaatgcccgccgcacgtggtcgagtacaaggacttcgatatccagccggaatatcgcggcgactgggacaagttcaacatgtggcgctacgtgtcgaaggtcgacgagacggtgatccgcgcctactcgatggccaactacccggaagagaagggcgtggtcaagttcaacatccgcatcgcctcgccgccgccgggcagcgacctgccgccggggcagatgtcgtcctgggtgttcaacctcaagccgggcgacaaggtcaccgtgtacgggccgttcggcgagttcttcgccaaggacaccgaggccgagatggtcttcatcggcggcggcgccggcatggcgccgatgcgttcgcacatcttcgaccagttgcgccggctcaagtcgaaccgcaagatcagcttctggtacggcgcgcgctcgctgcgcgaggccttctataccgaggagtacgaccagctgcaggcggagaaccccaacttccagtggcacctggcgctgtccgacccgcagccggaggacaactggaccggcctgaccggtttcatccacaacgtgctgttcgagaactacctgaaggaccacccggcgcccgaggactgcgagttctacatgtgcggcccgccgatgatgaatgccgcggtgatcaagatgctcaccgacctgggcgtggagcgcgagaatatcctgctggacgatttcggtggctga

SEQ ID NO: 319963 - DNA, 1002 bp, Pseudomonas aeruginosa
atggccggactggcagcgctggcgctggtcctggccggttgcggcgacaccctggaaagcttcggcggcccgaccatgggcagcacctattcgatcaagtacgtgcgcggcgcctcggcgcccgacgtccagacggcgaaagccgcggtggaggcgatcctcgccgaggtcgaccggcagatgtccacctaccgcgacgactccctggtctcgcgtttcaatgcgctgccggcgcagtcctgcatggagctgccgccaccgatgctggagttgctgcgctacggcggcgagttgtcggagcagagccagggcgccttcgacatgaccgtcgagccgctgatgaacctctggggcttcggtccgcaggcgcgggtggagaaggttcccagcgccgagcagatcgccgcggtgcgccgtgacgtcggccatcgacacctgcgcatcgacggccagcgcctgtgcaaggacgccgccgtacagctggacttcgacagcatcgccgctggctatacggtggacgcggtaggcgaacgcctgaaggagcttggcgtgcgcagctacctggcggaaatcaccggcgagttgaaagccgaagggcgcaagccggacggcacgccctggcgcatcgctatcgaagcgccgcgcgagggccagcgggtcgcccagcaggtactggcgctggacggctacggcgtctcgacctcgggcgattaccgcaactatttcgaagagaacggccagcgctattcgcacaccttcgacccgcgcaccggcgcgccgatcgaccatcacctggcttcggtcacggtgatcgatccgtcgacgcgcaacgccgacggcctgtcgaccctgctgatggtgctcggtccggaggagggctaccgtttcgccgagaagcaccgactggcggcgctgttcgtcagtcgccagggcaacggtttcgacagccgcaccacgccacgctacgagcaactgttcggcaaccaaggagaacgtccatga

SEQ ID NO: 319964 - DNA, 228 bp, Pseudomonas aeruginosa
atgacctggctactggtcttcgtcatcatgctgctggtggtcttcggcatgtccatcggcgtcatcatgggccgcaagccgatcgccggttcctgcggcggcatcgccaacctggggatcgagaaggaatgctcgatctgcggcggcgaccggcagaaatgcgaggaagccaaccgcgacgaatctgtagtgcccggaaaactcgcctacgacgcgaccaaacgctaa

SEQ ID NO: 319965 - DNA, 1395 bp, Pseudomonas aeruginosa
atggctgtctacaactacgacgtggtgattttgggcacgggtccggcgggcgaaggggcggcgatgaacgcctccaagtacggacgcaagctggcggtagtcgacagccgtcgcgtggtcggaggcaactgcacgcacctcggcaccattccttccaaggccctgcgccactcggtgaagcagatcatcgagttcaacaccaacccgatgttccgccagatcggcgagccgcgctggttctccttccccgacgtgctgaagagcgccgaccgggtgatctccaagcaggtcgcttcgcgtaccggctactacgcgcgcaatcgcatcgacatgttcaccggcaccgccagcttcgtcgacgaacgcaccgtcgaagtggtgacgccgagcggcgcggtggagcgcctagtcgccgaccagttcgtgatcgccaccggctcgcgcccgtatcgtccttcggacatcaatttcaaccacccgcgggtctacgacagcgacaccatcctgtccctgagccacaccccgcgccggctgatcatctacggagccggggtgatcggctgcgaatacgcgtcgatcttcagcggcctgggcgtgctggtggacctgatcgatacgcgcgaccagttgctcagcttcctcgatgacgagatttccgatgcgctgagctaccacctgcgcaacaacaacgtgctgatccgccacaacgaggagtacgagcgcgtcgaggggctggacaacggtgtcatcctgcacctgaagtcgggcaagaagatcaaggcggacgcgctgctctggtgcaacggccggaccggcaacaccgacaagctcggcctggagaacgtcggcatcaaggtcaacagccgtggccagatcgaggtggacgagaactaccgcacttcggtgagcaacatcttcgccgctggcgacgtgatcggctggccgagcctggccagcgctgcctacgaccagggccgctcggccgccggcaacatcgtcgagagcgacagctggcgcttcgtcaacgatgtgccgaccggcatctacaccattccggagatcagctcgatcggcaagaacgaaagcgaactgaccgcggcgaagattccctacgaagtgggcaaggcgttcttcaagggcatggcccgggcgcagatttccaacgagccggtgggcatgctgaagatcctgttccatcgcgagaccctggagatcctcggcgtgcactgcttcggcgaccaggcttcggaaatcgtccacatcggccaggcgatcatgaaccagccgggcgagctgaataccctgaagtacttcgtcaacaccaccttcaactacccgaccatggcggaagcctatcgggtagcggcgttcgacggcctcaaccggcttttttga

SEQ ID NO: 319966 - DNA, 723 bp, Pseudomonas aeruginosa
gtgactctcatctatggacatcgcggcgccaagggcgaagcgccggaaaacaccctggccagcttccaacgctgcctggagcatggcgtcaaccgttgcgaactggacctgcacctgtcccgcgacggcgagctgatggtgatccacgacccgaccctgaagcgcaccaccggccgccgcggcaaggtcgccgaacacgacgcggccaccctggccacctacgacgcgcgcaagggcggccccggctgggtacggccgacgccgatcccgcggctggaggagttgttcgagaagtgcccgttcgagcactggcaactggaagtgaagagcgcctcgcgcgaacgcgcggcgcggacggtaacgcggatcagggagctgaccgagcgcttcggcaaccgcgacaaggtcaccgtcaccagcggttcgcggaccgtgctcaaggccctcaacgaactgaccccagagctgtcgcgcgggctggtcgccgaatacgcctggctcgacccgctgaaggtcgcccagcactatggctgtgccctgctcgccctgaactggaccctatgcaccccggaacgcctgctcaaggcccagcgccaggggcttcacgtctcggtgtggacggtcaacgaaccggcgctgatgcgccggctcgccgacttcggcgtggacagcctgatcacagactttcccggtttggccagcgccaccctcgggaatcgctga

SEQ ID NO: 319967 - DNA, 309 bp, Pseudomonas aeruginosa
atgctccgttcgctactgctgtgctccctcctcctcgccccgccgctgttcgccgacaccctgagcattccgctgggcgcccagggcgatacccgggtcgccctgcccgcgcacggcgaaagccgcgaagccgtgctgcaacgcttcggcctggccgacgaggaacatcccgcggtcggccagccgcccatcgtgcgctgggattaccgcgacttctcggtatatttcgaaagcggcctggtgctcgacagcgttcgccatcatcggccgcggaatcccgcgcaaccctcgaacaaggagccacagtga

SEQ ID NO: 319968 - DNA, 600 bp, Pseudomonas aeruginosa
atgtccactcgtgacgcggatgaccgccgcgaatactaccgtatcgaagataccctcgcactggaatttcgccctgccggggccgtcgaagacggcctggagagcgagccgggggccaccctgttcagcctgctcagcgacctccacctgatggattacgaatcgcagcaccttctgcgccacatcagcgaacgcgaccgcacgctggccaactacctgaaggtgatgaacaagcgcatcgacctgcttggccaggtcatggtgcagagcctgctcaaggagatcggcgaaccgcgcaaggtcagcctgtccgaggggggagtcagcttccgccacgaccgcgcattgccggtcggccagttgctcgtcctgcgcatggtcctgttgccgcaggggttcggcctcgaactgcgggcccgggtaatccacgcccagccacacgacgacgaattcgagatcggcaccgagttcgaagcgttgagcgacgcacagcgccagttgctggcccggcatatcctccagaagcaggcccagcagcgccgcctggcacgggccggacagggcccgctcggcgagccgggccaaccttcttcgacctga

SEQ ID NO: 319969 - DNA, 1251 bp, Pseudomonas aeruginosa
atgttcagacccctgtccgttttcatcggcacgcgctatacgcgggccaaacgtcgcagccatttcgtctccttcatttcgctgacctcgatgatcggcctggcactgggcgtgctggtgatgatcgtggtgctctcggtgatgaacggcttcgatcgcgaaatgcgtacccgcatcctcggcatggtgccgcaggccaccgtcgagtcgtaccagcccatcgatgactggcgcgccctggccgagaaggtcaaggcccacgagcatgtcaccgcggtagcgccgttcacccagatgcagggcatgctcagcgccaatggcgcggtgcagacggtgatggtcgatgcggtcgatccgctggaagaggccaaggtctcgatcattcccgatttcttcaagcagggctcgctggcggaactcaaggccggcggcttcggcatcgtcatcggccaactggcggcgcagaagctcggcgtcggcatcggcgacaaggtcaccctgatcctccccgaggtggcggtcaccccggccggggtattcccgcggatgaagcgtttcaccgtggtcggcaccttccgcgtcggcgccggcgaactggatggcggcctgtcgctgatccacctggaagacgccgcgcgcctgcagcgctggaagaccaaccaggtacaggggctgcgcctgaagctcgacgacctgttccaggcgccgcgggtggcctgggagatcgcccggaccctgaccgacaatgacttctacgcccgcgactggacgcgcagccacggcaacctgtaccaggccatccgcatggaaaagaccatgatcggcctgttgctgctgctgatcgtcgcggtcgccgcgttcaacatcatttccaccctggtgatggtggtcaccgacaagaagtcggacatcgccatccttcgtaccctcggcgccacgccggggcagatcatggctaccttcatggtccagggcacggtgatcggggtgatcggcacgctggtcggcggggtcctcggggtggtcgcggcgctcaacgtcagcgcctggatttccgccctggaaaagctgctgggccaccagttcctcgcgtccgacgtgtacttcatcgattacctgccgtcgcaactgatgctcgacgatgtcgtgctggtctgcggcgcggccctggtccttagcttcttcgccactttgtatccagcctggcgtgcggctcgcacccagcctgcggaggctttgcgttatgaatga

SEQ ID NO: 319970 - DNA, 684 bp, Pseudomonas aeruginosa
atgaatgacaagtcggtgctgagttgccgcaacctgagcaagagctacgacgagggaccgcaatcggtgcaggtgctgtccggcgtcgagttgaacctgctgcctggggagcgggtggctatcgtcggcagctccggttcgggcaagagcaccttgctgaacatgctcggcggcctggacacgccctccgccggcagcgtctggctcgccggcgaggaactctcggcgctgaacgagacggcccgcgggctgctgcgcaaccgcgcgctgggcttcgtctaccagttccaccacctgttgccggagttcaccgccctggagaacgtctgcatgccgctgttgatcggccgcacgccgatcgcggaagcccgccagcgggcggccgagctgctggagcgggtcgggctggggcatcgcctgtcgcacaagccggccgagctgtccggcggcgagcgccagcgggtggcgatcgcccgcgcgctggtcaaccgtccgcagctggtactgctcgacgagcccaccggcaacctcgaccagcataccgcccagggtatccaggagctgatgctggaactgagccgttcgttgcagacctcgttcctggtggtaacccacgatctccaactggccgggcacatggatcgcatcctgcgcctggaagaaggccgactgatcgccgcgtag

SEQ ID NO: 319971 - DNA, 1245 bp, Pseudomonas aeruginosa
atgttcagaccgttaccgttcttcataggcctgcgctacacccgcgccaaacgccgcaaccactacatctcgttcatctcgctgacctcgatgatcggcctggcgctgggcgtgctggcgatgatcatcgtgctctcggtgatgaacggcttccagaaggaaatgcgcacgcggatcctcggcatggtgccgcatgccactatcagcgcgacgcagccgctggacgactggcagaccgtcgccaacgcggcgctgcggcaccgcgaggtggtcggcgcggcgccgttcgccgaactgcagggcatgctgtcgtacaagggcaacatgctgccggtgctggtcaacggcatcgacccgcaggaggagcgcaaggtttccatcatcggcgagcacatcgtccagggcagcctggacgacctcaagcctggcgagttcggcatcgtcctcggcgagatcaccgcgcggcgcttccatgtcaatgtcggcgacaagctgaccctgatcgtcccggaggccaccagtgcgccgggcggcatcactccgcgcatgcagcgcttcaccatcgtcgccctgttcaaggtcggtgccgaactggacaactcgctggcgctgatcgacatcgccgatgccggccagttgctgcgcctgcaaccgggccaggtgccgagcgtgcgcctggagctgaaggatctctaccagtcgccgcaggtcgccgccaaggtggtcaaggagttggggcagggcttcaggtccagcgactggaccaggacccagggcagcctgttcaacgcgatgaagatggaaaagaccatgatcggcctgctcctgctgctgatcatcgcggtcgccgccttcaacatcatcgccaccctgatcatggtggtcgccgacaagcgcaccgacatcgcgattcttcgtaccctcggcgccacgccgcggcagatcatggcgatcttcatggtccagggcaccgtcatcggcgtgatcgggacggtcatcggcggggtactcggggtgttcgcggcgttgaacatcaccgggatgatcgaccgcatcgaacggttggtcggacacaaggtcttcagctcggatgtgtacttcatcaactacctgccttccgatctgcaggtgctggacgtggtgctgatctgcagcgctgcattgctgatgagcttcctcgccaccctgtacccatcctggcgcgcggcgcggacacaaccggccgagtcgctgcgctacgagtga

SEQ ID NO: 319972 - DNA, 534 bp, Pseudomonas aeruginosa
atgccgcgtcgcctgttcaagcgctacatgcccgatccggaaagcatccgctcgcagaagtcgctgcgctttctcggcaagttgacgcacgatcccaacctttggcatctcaatcgccactcggtatcgcgcgccatggccgccgggctgttcgccgccttcatcccgatgccgatgcagatgctgctggcggccggtctggcggtgtggattcggagcaatctgccaatctccgtcggattggtctggctgaccaatccgatcacgatgcccccggtcttctattgcacctacaagctgggcgcctggttgatgcaggtgccgccgcgcaccctgccggaccatctcacctgggaatggatcagccaggagctgtccagcctctggcagcccttcctgctcggttcggtggtgtgcggcatcatcgccgccatcctcggctacgcgctgacgatgctctactggcgctggtgggtgcagcgcagttggagccgacgctgccggcaacgtcgcgaacgggtcgccgcgaagtga

SEQ ID NO: 319973 - DNA, 1626 bp, Pseudomonas aeruginosa
atgcttcttcgtcgtatcgccatcaccccacgcgccgtcatcggcttcgccatcctcgcctcgctgctggtggcgctcggcctcttcgcgcacaaccgcatgggttcgctgaaccgcgccgccaaggatatcggcgaggtctggctgcccagcgtcgaagcctcggcccagctcagcggcctgatgagcgaactgcgcctcggcgagatgaaccacgtgctgctgcacgacgccacgcgcatgcgccagcaggaacaacggatggacgaggtcatcgctaccctcgccagggtggaaagggaataccgccccttgctggtcctggacgaggagcgcgcgttgctcgaccagttcgtccagcgccagcaggagtacctcgaaggacacgccgccctgctcgcgctgtcccgtgacaaccgtaccgacgaagccagcgtgctgatgggcggggcccagttgcagcgctacgagcaggtgcagcggaccctgaagcaactcatcgccctcgaccgcgaggccgcccgcgcctccaccgccgaagccgccgatgtctactcccgggcctccaccgcgatcctcgcggtgctgctggtggccctggcggccagcgtgacgatcgcctggctgctgacccgcagcatcgtcgtgccgatccgccaggcggtgtcctgcgccgaccgcatcgcggcccgcgacctgaccggcgagatcgccagcgacggcgacgacgagccggcgcaactgatgaaggccatgcgcagcatgcaggccagcctgcacgacaccatcgagcagatcggcgattccgccgcgctgctggccgccgctgccgagcaactgaacgcggtgaccgaggaaggcaaccggtcgctggcccggcagaacgatgagatcgagatggccgccaccgcggtcaacgaaatgagcgcggcggtcgaggaggtcgcgcgcaacgccagctccaccgccgaggcctccagtctctcggaacgggccgccggcaacggccgcgcacgggtcggacagaccgtccgctcgatccgccagatgaacgccgagatcggccagaccgcgcgcctggtggaaggcctggccagccaggcgcaggatatcggcaaggtgctcgacgtgatccgcgccatcgccgagcagaccaacctcctcgccctcaatgccgccatcgaggccgcccgcgccggcgagcagggccgcggattcgcggtggtcgccgacgaagtgcgcgccctcgcccaccgcacccagcaatcgacccatgagatcgaaggcatgatcgccagcgtccgcgagggcaccgacaccgcggtgtccgcgatgcgcgagaacgaccagcgcgcccggcagatgctcgacgaggccgaggccgccgaccacgccctgggcgagatcgccgagcacgccacgcggatcaacgagcgcaccctggtaatcgccagcgctgccgaggagcaggcccacgtcgcccgcgaggtcgatcgcaacctggtgaacatccgcgacgttgccgtgcagaccacccagggcgccgagcagacccgcggcgccagccacgagctgtcgcgcctggccaacgacctcaagggcatgatcggtcgcttcgtggtctga

SEQ ID NO: 319974 - DNA, 396 bp, Pseudomonas aeruginosa
atgtcggcaagcgcgaagctctccaggatggtttgcttgctctgcggttttttcagcacaggtatcagtatggccagcagtctgattcttctcagcgcttccgatctcgccgggcaatggaccctgcagcaggacgaggcgcccgcgatctgccacctggagctgcgcgacagcgaagtggcggaagccagtggctacgacctgggcggcgataccgcctgcctcacgcgctggctgcccagcgagccgcgcgcctggaggcctaccccggccgggatcgcgctgctcgaacgcggcggcctgaccctgatgctcctcggtcgccagggcgagggcgactaccgggtgcagaagggcgacggcgggcagttggtgctgcgccgcgcgacgccctag

SEQ ID NO: 319975 - DNA, 1440 bp, Pseudomonas aeruginosa
atgtccagcaattctcttgcattgaaaggtcgtagtgatgcgtatacccaggtagacaacttcctgcatgcctatgcgcggggcggggacgaattggtcaatggccatccgtcctataccgtagaccaggcggcggagcagatcctccgcgaacaggcgtcttggcagaaagcaccgggcgactcggtgctgaccctgtcctattcgttcctgaccaagccgaacgacttcttcaatacgccgtggaagtatgtcagcgatatctactcgctgggcaagttcagcgccttctccgcgcagcagcaggcccaggccaagttgtcgctgcaatcctgggcggacgtcaccaatatccacttcgtcgacgccggccagggcgatcagggcgacctgaccttcggcaacttcagcagtagtgtcggcggtgcggcgttcgccttcctgccggatgtaccggatgcgctcaaggggcaatcctggtacctgatcaacagcagctacagcgccaacgtcaatccggccaacggcaactacggacgccagacgctgacccacgagatcggccataccctgggcctgagccaccccggcgactacaacgccggcgagggcgatcccacctacgccgacgctacctacgccgaggacacccgcgcctattcggtgatgagctactgggaagagcagaacaccggccaggacttcaagggcgcctattcctcggcaccgctgctggacgacatcgcggcgatccagaagctctacggggccaacctgaccacccgcaccggcgacacggtgtacggcttcaactccaacaccgagcgcgacttctacagcgccacctcgtccagttccaagctggtgttctcggtgtgggacgccggcggcaacgacaccctggacttctccggcttcagccagaaccagaagatcaacctcaacgagaaggcgctgtccgatgtcggcgggttgaagggcaatgtgtcgatcgctgccggggttaccgtggaaaacgccatcggcggctcgggtagcgacctgttgatcggcaacgacgtggccaacgtgctcaagggcggcgccggcaacgacatcctctacggcggcctcggcgcggaccagctgtggggtggcgcgggagccgacaccttcgtctacggcgatatcgccgagtcctccgcggcggcgccggataccctgcgcgacttcgtcagcggccaggacaagatcgacctgtccgggctggacgccttcgtcaacggcgggctggtgctgcaatacgtcgacgccttcgccggcaaggccggccaggcgatcctgtcctacgacgcggcgagcaaggccggcagcctggcgatcgacttcagcggggatgcccatgccgatttcgcgatcaatctgatcggccaggcgacccaggccgacatcgtcgtctga

SEQ ID NO: 319976 - DNA, 1446 bp, Pseudomonas aeruginosa
atgaccatgcgccgcctgatgacctggctgttcggcgccttcctgttgctgctgcgcgaggacgccttcgccctcggcctgctggacggctatcacctggccctggagaacgacccgcagttccaggccgcgatccaggagcacgaggccggcaggcaataccgtgcgctcggccgcgcggcgctgctgccgcgcctggtgtacagctacaaccgtgggcgcagctggtccgatgtgacccaggccaccacccgcggcgatttcaaggaagaccgcgactacgacagctacgtctccaccctcagcctgcaacagccgttgttcgactacgaggccttcagccgctaccgcaagggcgtggcccaggcgctgttgtccgacgagcgcttccgcagccagagccaggaactgctggtccgggtcctggaagcctataccggcgcgctgctggcccaggaccagatcgaactggcgcgggcgcagaaacgctcctaccgcgagcagttccagctcaaccagcgccagttcgagcgcggcaacggcacccgcaccgacaccctggagacccaggcccgcttcaacctggcccaggcccaggaaatcgaggcgcgggacagccaggatgccgccctgcgcgagctggagcggctggtcggggcgccgctggagatcgccgacctggcgccgctcggcgaacgcttccaggtgcgcccgctgagccccgccagctacaccgcctggcgcgacctggcgctggccgagaatcccgagctggcctcgctgcgccacgcggtggacgtggcccgctacgaggtcgagcagaaccgcgccgacttcctgccgcgcctgggcctgtacgccagcaccggcaagtccaagtccggttcggagaacacttacaaccagcgctacgagaccgacagcgtcggcatccagttgagcgttccgctgttctccggcggcgagaccctggcggcgacgcgccaggccacgcatcgcatggagaagagccattacgacctggacgacaaggtccgcgagactctcaaccaggtgcgcaagatgtacaaccagagcagcagcagcgcggcgaagatccgcgcctacgagatgaccgtggattcggcgcggacgctggtgatggccacgcgcaagagtatcgccgccggggtgcgggtcaacctcgacctgctgaacgccgagcaggcgctgtacagcgcgatgaacgagctgtccaaggccaagtacgactacctcacggcctggacacgcctgcgtttctacgccggggtgctggacgaagccgacctggaactggtggcggcgaacttcgtttccggcgagacgccggcgcgccgccgcgactgcgcgacgacggattgcccggcaccgctgcacaccctgtcgaagaccgatacggaggaaaaccggagcgcgctcaattga

SEQ ID NO: 319977 - DNA, 1299 bp, Pseudomonas aeruginosa
atgacccgcacggtgaaacgcgacgagaacgcctatgcgcgactgggctggctgctggtcctgttcggcttcggcggcgcgctgctctgggccgccttcgcgccgctcgaccagggcgtggcggtgccggccacggtgatcatctccggccagcgcaagtcggtgcagcatccgctgggcggggtggtcaagcacatcctggtgcgcgacggccagcatgtggaggcgggcgagccgctgatccgcatggaaccgacccaggcccgggccaacgtcgattcgctgctcaaccggtacgccaacgcgcggctcaaccaggcgcgcctgcaggccgaatacgacggccggcggaccctggagatgcccgcggggctggccgagcaggccccgctgccgaccctcggcgagcgcctggagttgcagcggcagttgctgcacagccgccagaccgcgctggccaacgaactctccgcattgcgggcgaacatcgaggggctgcgcgcccagctcgaagggttgcgccagaccgagggcaaccagcgcctgcaacaacgcctgttgaacagccagttgagcggtgcgcgcgacctcgccgaggaaggctacatgccgcgcaaccagttgctcgaacaggagcgccaactggccgaggtgaacgcccggctatcggagagcagcggtcgcttcgggcagatccgccagagcatcgccgaggcgcagatgcgcatcgcccaacgcgaggaggagtaccgcaaggaagtcaacgggcaactggcggaaacccaggtcaatgcgcggacgctctgggaggagctgtcctcggcgcgctacgaactgcgccacgccgagatccgcgcgccggtcagcggctacgtggccggcttgaaggtgttcaccgatggcggggtgatcggccccggcgaattgctgatgtacatcgtgcccaacagcgacagcctggaagtggagggccagctcgcggtgaacctggtcgaccggatccacagcgggctgccggtggagatgctgttcaccgccttcaaccagagcaagaccccgcgggtcaccggcgaggtgaccatggtcagcgccgaccgcctgctcgacgagcagaacaagcagccctactacgcgctgcgcgcccaggtcgacgcggccgcgatgggcaagctgaagggcctgcagatccgcccggggatggcggtgcaggtgttcgtccgcaccggcgagcgctcgctgctcaattacctgttcaagcccctgttcgaccgcgcccacgtggcgctggcggagaactga

SEQ ID NO: 319978 - DNA, 1782 bp, Pseudomonas aeruginosa
atggcaaggctcggttccagcgttaccaacgaaatcaaacaggccctggcggccagccgcggcgcattgcgcagcgtggcggcgttctccggggtgatcaacctgctgatgctggtgccctcgctgtacatgctgcaggtgtacgatcgcgtgctgtcctcggccaacgaagtcaccctgttgatgctgaccctgatggcgcttggcgtgttcgtcttcatgggcgcgctggaggcgctgcgcagcttcgtcctggtgcgggtcagcgaacgcttcgacggccagttgcacgggcggatctacgccgccgccttcgaacgcaacctgcgcgccggcggccaggaggccagccaggcgctgcacgacctgaccaccctgcgccagttcatcaccggccaggcgctgttcgccttcttcgacgcaccctggttcccggtctacctgctggtgatcttcctcttcgacccctggctcggcctgctctcgctggtcggcgcgctggccctgatggccctcgcctggttcaacgaacgcgccacccgtgcgccgctggccaaggccggcgagttgtcgatcaagtccggccaactggccagcaacaacctgcgcaacgccgaggtgatcgaggcgatgggcatgctcagcagcatgcgcgggcgctgggaacggctgcaccaggcgttcctcgaccagcagagcctggccagcgagcgcgcggcgcggatcaacgcgctgagcaaatacctgcgcatcgccctgcaatccctggtgctcggcctcggcgcctggctggcggtggagggacgcatcaccccggggatgatgatcgccggctcgatcctgatgggccgtgcgctggggcccatcgaccaactgatcggcgtgtggaagcagtggggcgcggcgcgcgatgcctatcgccggctgagcggcctgctcgacgaattccccgtccgcgagcggcgcatggaattgcccgagccgcgtggccacctgctgctggaatcgctggacgcggcgccgcccggcagcgaggcgcgcaccctgcgtggcctgaccctggcgatcccggccggctcggtggtcggcgtgatcggtccgtccggctccggcaagtcgagcctggcgcgggtagtgctgggcatctggccgaccctgcacggcagcgtgcgcctggacggcgccgagatccgccagtacgagcgcgagaccctcggcccgcgcatcggctatctgccgcaggacatcgaactgttcgccggcacggtggcggaaaacatcgcccgcttcggcgaggtgcaggccgacaaggtggtggaggcggcgcgcctggccggggtccatgaactggtcctgcgcctgccgcagggctacgacaccgtgctcggcgtcggcggcgccgggctttccggcggccagcgccagcgcatcgccctggcccgggcgctgtacggcgcgccgaccctggtggtgctcgacgaacccaactcgaacctcgacgacagcggcgagcaggcgctgctggcggcgatccaggcgctcaaggcgcgtggctgcacggtgctgctgatcacccaccgggccggcgtgctgggttgcgccgaccgcctgctggcgctgaacgccggccagttgcacctgtacggcgagcgcgaccaggtgctcgccgccttgaacaaccagcgcgccgcgtcggcgtcgcagcagcgcgcggactaccgggtggccggctacggcgcgccgcaggtggtggccgcgccgcgccagggaggtgtggaatga

SEQ ID NO: 319979 - DNA, 1215 bp, Pseudomonas aeruginosa
atgggattattcaatgcagccgcgaacctgttcggccaggtctacgagcgtgcgacgcaggtggccgccaccgccgtcacggcggtggcggacgtggccaggacattggtgggctccaccgtcgacgccgtggagcagcaggtgcacgaagcgcttacatcggtgcatgacgccgttgccagcgtggagcaggcgctggagggtacggtcggcgcggtggccggcacgctcggcgagatcgccggcgacgccctcgacaccgtaggctccgcggtcggcacgctgggcgggctggccggcaactcgctggcgatcgccgacgacttgttgcacgggcgcgtcgagccggaggattacctgaagctggtcggtgacctggggcagggcgtcggtgccaccgtcggccatgcctgggaattcggcagcgacagcctgaaggccgccaacgatctctaccacgccgcctaccagggtggctcgctaagcctcggcaatagcgacggcctgctcggggtcaatgtgatcggctcgctgctcggcggcaatcacgaccagggcgtgattcccgatagccgcggcatcctcggcccgctgccgatcaacgtctccttcaccgagcaaggcctgaccttcggcggtgagacgccgctgactccgttggtcaccgcagccctggcgctgaatccgatcaccgcgccgctggtgccggtgctggcgccgctcaacctcggcggcctgggagtggtcggctcggtcgacaaggaaggcttcagcgccaagttctacggtatcgccggacccagctacaacctcggcgtggccaatctcggcggcaccctggaattgggtagctacaacgaggtcaagctgctgagctggaacgaggtgaccctcaaggacctgcccgtggtcaaggacatcggtgtctcgctgccgacgctggacctgcacttcgacagcaagctgtatgcgcaaacgattgccggtgtcgatgtcgccggggtcgggccgaagggccagatcgagctggtgcatgacctcgacaatgacctgtcgatcgtcgccggtatcgccggggataccgcgcacagcgcactggacggtgccggcaaggtgctcgcggcgctgctcggccacggcggcgaagcggcgccgccgacaatccagctgatcggcgccgacccggcgccggagcatcaggccctggccgcctga

SEQ ID NO: 319980 - DNA, 315 bp, Pseudomonas aeruginosa
atgacgaaggatgaaaaggaaaagacccacgtcgacgcaatcatcgaacgctacaaggacctgatggtcgagattccccccgccgaccggcaacccggtctctccctgctctggccggttcccgcccagcccgccatcgacaagggcgtccgccaggccgagaactggcttgccgaccagatcgaaggccagctctggaccgccttcgccttcggccgcgacagcctgcccacaccgatgcagaagaccgccttcgaagtggccttcctgacgcgcctgcagcagcgcctggtagccgctcgacgttccggttga

SEQ ID NO: 319981 - DNA, 300 bp, Pseudomonas aeruginosa
gtgagcttcctggccgtagtggtggaaaacgtcccgccgcgcttgcgcggacgtctggcaatctggctgctggaagtccgcgcgggcgtctatatcggcgatgtatcgcggcgtacccgggaaatgatctggcagcagctgagcgagggctacgaggagggcaacgtggtaatggcctgggccgccgccaacgaatccggctacgagttccagaccctgggcgttaaccgtcgacatccagtgttgttcgacgggctgcaattggtggcattccagcctctggatcggaccacggaatag

SEQ ID NO: 319982 - DNA, 873 bp, Pseudomonas aeruginosa
atggtgttcgtccagtacgggcagatcgacgtgcgggacggcgccttcgttgtcatcgaccagaccggcgtgcgtatgcacattccggtgggctcggttgcctgcatcatgctcgaacccggtacccgggtgtcccatgccgccgtacacctggcctcgactgtcggcaccttgctggtgtgggtcggtgaggccggcgtgcgtctgtacgccagtggccagcccggaggcgctcgtgctgatcgtctgctgtaccaggcccgtctggccttggacgacgagctgcggctcaaggtggtacgcaagatgtacgaactgcgtttcgccgagccggcgcccgcgcggcgtagtgtcgagcaattgcgcggcatcgagggcgcccgggtgcgcgagacctatcggctactggctcgccagttcggagtggactggcgggcgcgcaattacgaccggcggaagtgggatgccgccgacgtaccgaatcgctgcctgtcggcggccaccagttgcctctatggaatcaccgaagctgcggtgctggcggcggggtatgctccggcggtcggcttcatccatactggcaaaccgctgtcgttcgtttacgacatcgccgacctgttcaaattcgacacagtggtgccggtcgccttccgtatcgccgctaaggcgccgtcgcaacccgagcgtgacgtgcggctcgcctgccgggatatcttccgttcgagcaagctgctgacccgcatcattcccaccatcgaagaggtactggccgccggcggcgtcgaacctcccagcgcaccgcccgagtcggtgccgtcagccattcccaacccggagggaatcggcgacctcgggcacaggacgcaagggtga

SEQ ID NO: 319983 - DNA, 612 bp, Pseudomonas aeruginosa
atgtacctgaccagactgacccttgatcctcgcagcgctcaggcgcgccgcgacctaggcgacgcctatgagatgcaccgtactttgtcgcgggttttcgccgacgagcaggctccggcatcgcgcttcctctggcgtctggaggcctcggggaatgcctggtccactccgaccttgctggtccaggcggccagcgagggtaactggtcggtgctgcaggcgctccctggctacctgctgggggagccgcagagcaaatctctggctttgcgacagtggctggaaagcgatatctcctaccgtttcagattgttcgccaatccgacggtgacacgccagggcaagcgctatgggctggtgggcgaggagcagcaactggcttggctggcacgccagggcgagcggcacggtttcgtggtcgaggcggccctcgtaaccttcagcgaagtgcttggcagccgcaaggggcagacacgcatcagcgtcttgcgcgccgcgttcgaggggcgtttgcggatcagtcgcccggatgcctttggtcaggctctggtcgctgggataggccctgccaaggctttcggctgtggcctgctgagcctggcgcgtagctga

SEQ ID NO: 319984 - DNA, 663 bp, Pseudomonas aeruginosa
atggctaccttgctgatgcgcctgcaagggccgatgcagtcatggggcaccaccagccgttttgacgagcgcgacacccagctggaaccgtcgaagtcgggagtgcttggcctggtctgcgccgccctgggacgtgatcgcagcgagccgctggaggatctggccagcctgcggatgggggtgcgcgtcgaccgagagggcattccgttgcgcgactaccagacggccaccggtgtgctggtcgccagtggcaaggccgatccgcggcggacagtggtcagcccgcggcattacctggccgacgcggtctttctggtcgggctcgaagggcgcgaccaggccctgctggagcgaatccagcaagccttgcgtgcaccgttctggccgctgtgcctgggccgcaagagtttcgttcctgggagcccggtgtggttgcccgagggcctttcttccctggcactggaacaggcgttgcaggcctggccacgcctggccgaggcgcaaccgggcgaccgcggcaagcccttgcgttgcctgatcgaggatgagcgcagcggggtggtacgcctcgatcagcccatcgccccctttgccgaacgccgtttcggcccacgcttcgtacgctcgggagtcgcggatgtacctgaccagactgacccttga

SEQ ID NO: 319985 - DNA, 1143 bp, Pseudomonas aeruginosa
atgaatttgttcatcgagttccatctgatccagaacttcgctccgtccaacctcaaccgtgacgataccggagcgcccaaggatgccatctttggcggtcaccgtcgggctcgcgtcagcagccagtgcttcaagcgcgcgatccgcctgactgcccacgagcaggagttggtcgcgcccgaacatcgcggcgtgcgcaccaagaagctcaaggcattgctgctggagcggcttgccggacgcgatcccgccgaggccgagggcaagatcgagacggcgctggcggccgcggggctcaagctcaaggacgatggcaagaccgaatacctgctgtttctcggcgaagcggagattgccggtttcgccgcgctgatcgagcagcgctgggatgaactgggcagcgccgcgccggctggcgagaaaaagggcaagaaggaagccaaggcgaacgtgccggcggaagtgatcaagcaggccagggccctgctcgacggtggcaaggccgttgacgtggcgctgttcgggcggatgctcgccgatctgcccgaagtcaatcaggacgcggcctgccaggtggcccatgcgatcagtacccatcgtgtcgagcgcgagttcgattacttcaccgccgtcgacgatcgcggtggcccggacgaaagcggcgccggcatgatcggccaggtggagttcaattccgccacgctgtatcgctacgcagtggtcgacctgcgcaagttgctcggcaacctgcagaacgacggcgagctggtgctgtcggcgctggaagcgttcacccaggccatggtccgggcgatcccgtcgggcaagcagaacaccttcgcggcgcacaacctgccggccttcgtcggtatctgcctgcgccacgcgggcccgctgaacctggccaacgcctttgagaaaccggtcgtcgcgcgtgccgatgcctccctcagcgagcgctccgttgccgagttggcccgccacgaccagcaattggcctcggtctatggtgacagccgcgaccgctgggcttatctggacatcagcggtgcctggccgaaggagcgtggcgagccggccggcaacctgcagcaactcgccgattggctgcgcagccaggtttccagccgtctgggaggctga

SEQ ID NO: 319986 - DNA, 531 bp, Pseudomonas aeruginosa
atgagtgctgccgaacatcctttcatcggccatctgcagcgcttgcagaatgatcgcggtgcgctggccgttctacggcgcagcctgggtttcgcgccgggcgcctatgtaccggcctatccctatgttgaacgctttgtcggtgccgagcggcatgcgcacgatgcctggcgcctggccttgtacctgaccgccggcctgttcgccagccaccccgagcagggcccggcgagcctggcgacgcgcttcggcgaactgatgaaggcgcgcgatagcgccagcatcgagaggcgcttcattgccctgttatccgccgatgcggaaaacctgtcggtgtacctgcgacaggttgtgagcctattggcggcgggcaagctcgccttcgactatggcgtcttgctcgacgaccttgcccattggctcgacccttacctgcctgttgcgcgcggcgacgccattcgccagcgctgggccagggatttctacgcggcgctggccaacacaaccgacacctcccttcacaaggattga

SEQ ID NO: 319987 - DNA, 1569 bp, Pseudomonas aeruginosa
atgactgaacactacaacctgctggacaccccctggctgccggtccgcctggcgaacggcgaggtccgcgagatggggctgctggaggtgttccgcgaggccgggtgtatcagcgccctggcggaaaccgagccgcccagtgtgattgcacagtaccgcctgctgctggccattacccaccgggcgcttttgctggagtacggcgcgtggaaggatagtggcaggctgcgttggttccgcgaggggttgcccattgacgtcgtggaacgctacctggagcgttggcgagagcgtttctggctgttccatccacagtatccgttcatgcaagtcgcggccttggctagcgccgcggaaacctgcgacaaacagaagccctgggcccagatttccctggccagcgccaacggcaatacccctgtcgtgttcgaccattcctatgacctggcgccttccgcggtgagtgcggaccgggcgttgtgcgccttgctgggcttcctacagttcactccgggcgggttggtcaagactgttcgcgattcggacaaagccggcgcactggccaatacggcggcggtggtgcccctggcggacagtctggcgaaaaccctgtgcctggccttgcacccggcctcgggcgaagcagccttcgatttgcctgcctgggagcgggaagccttgacgattccgcaactggccgccgaccccattcttgccagcgggcctaacgatcgctacacccggcagtcgcgagcagtgttgttgctgccggaggaagagggctgcgtccgctggattcgtttcgccgccggccaggcgctggccgacgatgtccaggcgccggaccccatggccagctaccgccccggcgccaacaacagcatggtccggctgagcttcggtgaagggcgggtgttctggcgcgacctgccgagcttgctgccggacagcgcggcggctggctcgaaacgggctgccgttctcgactgggcttccaacctgcgcagcatcggcgccgatgcgccgtcctcgatgctgctggtcgccggattggccagcgaccaggccaaactgttgcgctggcgctccgagaccgttgtcctgcctgcggccctgctcgactcggagggctgtgccaacgaactgcgccgttgtatccgggaatcggaagacctgtacggcgaactgcgcaagatcgccgtggcaatgctcgccgaggcgttgcccgatcctgccagcaaggacacctgggcgagggctcgtacgtcgtttgacaacggtccggctgcggccacctatttcgccttgctggagcgctcgttgccctcgctcatggccctcatcggcggcgatagcttggagatgctggacgaagccgaggcgttctggcgaagccgcctgctggcagccctcgaggtcgcctggcagggcgtgcgggaaggcctgggcctgtcggtcgcagcgttgcgtgcggaggccaaggtccggccgcgctacctggcgttgctgcgtcgttaccgtagcgaacgtacctcttccactccatttgcagaggagcagcgtgcatga

SEQ ID NO: 319988 - DNA, 2673 bp, Pseudomonas aeruginosa
atgctcggcttttctgacatggatgacgcatcgcgatacctctgggccaagagcgatgagggggctggccatggtttgctggcacacctgctggatgtggccgcggtggccctgacggtgctggagcacgagccgcggagcagtcggcgatgggccgccgaggccctggggctgccgctggacggcgcgccgcgctggatcgctacgctggttgggctgcacgacttcggcaaggcgatagccgggttccaggccaaatggccggcgggtcgcgagcgggacgaggccaacggcctgcggttcgatacgcgcctgttgaaggtcaccgaccacgcctgtgccagcgcctcgctcctgcgcccgctgctgctggaaaaaggcgatgcatccttgctgtggatactgcacgtgctgcaggcgatcagcgcccatcatggctacaacttcacttctgccgatatagaacgggtggtccagcgacacgagccggccgactggtgccaggcccggcgtcgcctcttcgatctctattggcagctgttggcgccgacaggccaggcgtccctggaggagctatcgcagcctgccgttcagtggctggcggggctgaccagcgtttccgactggattggttccaatccagagtggttcccgctgggtgagcgccagccggccttcgccgactatttcgaggatgcccggcggcgtgccgaggcggcgctggcggccatcggctggcggcattaccggccgttgcttgcggaactgtccgaggtcgaccaactgctcggccgtgtgcttggccttcagcaggcggtcgaggcgcgtcctttgcagcgcatcgccgacggactgctggcgacggccgcgggacctgcgttgctgttggtggaggcgccaatgggtgagggcaagaccgaactggcgctgcttgctcatctgcgcctgcaggcggccaaccagcatcgcgggctgtacctcgccctgccgacgcgagcgaccggaaacgccttgttccgtcgggtccgcactttcctggaggcctttgccggcggcgacggcgcggatgtgcaactggtccacggcggggccgggcaggacgcgcaggtcctgcacttgcgcgggatcgccggcggcgcaggtgcaagcgtggcgtcctcggcctggttcgcccgtcgtcggcgggcgctgctctctccgtatggcgtgggcacggtggaccaggcgctgttcgccgcgctgaacgtcaagcaccacttcgttctgctctgggggctggcgaacaaggttgtggtacttgacgaagtgcacgcctacgacacctataccagtgccttgatcgaggcactgttgcgctggttgcgggccatgggttgctctgtggtgttgatgagcgcgaccttgcccgctcagcgccgttgcgagctgctgcgcgcctggggtgtgaacgacgcggagttaacgcagacggcctacccgcgtttgctgctggccgacgggcggggtgtccggtcgaaggcctgccaggctcgttcgcttccacggattctcctgcgcgaagtaacggaagccctcccaggtatcgccgaacaggcgttgcaggccttgtcccatggcggctgtggcgtagttatcgtcaacaccgtagaccgcgcgcaacgactctatcgcctgctgcaggcacaggtcggcgaggaaacccgcttgctgctgttccatgcgcgttttcccgaagaccagcgcggacgcctggaaggccaggtgctcgactgcttcggcaaggaggggcagcgccccgagcgggccttgttggtggcgacccaggtagcggaacaatcgctggatattgactttgacttcatgttcaccgacctggcgccggtggacctgctcctgcagcgcgccgggcgcctgcaccggcacgctcatcggttgcgccccgaggcgcatgccgaggcacggttgtacgtggccgggctgaacccgcaacgcttccccgagttgaaggcgacggcttgggagtatgtctacgacccctacatcctggggcggacctgggcgctgctgtccctccgggatcatctgcgactgcccgaggatatcgacctgctggtccaggcggtctacgacgaggaggtgcaactgccggcggagatcaccgagcgcgatcgccatttcatcgaagtggaagcctacggcaagcgcctgggtgagcgtcgcaccgagcgaatgatggcgacgaacgtggcgatcgctgtggaagacgagccccagttggcttacacgcagcgcaatcgaggttatcaggaaggcgaggaaggactcggtctgccgaactacacccgcctgggagacgagtcggtttccctggtcccggtgtatcgccgggaaggcggctggtccttgtccgctgggggagaactcttcgacccggcgcatagggtttccgatgacctggcgctggccttggccagccggcagatcaagacctcgcgcaaagatctggtcaagcacctgctggcaacggaggtgccgcgtgccttcgtcgagcatccgttgctgcggcagctcaggccgttggaactaattgaaggacaggcggtgataggcagattgacggtggtgctggatgaggagctgggcttggtgtttatcagggaccccaaggagtaa

SEQ ID NO: 319989 - DNA, 2577 bp, Pseudomonas aeruginosa
atggcacagcctttcaccatcgaaccggacccgaacaccctcgaccatccaccggccttcctggccaacggaggagcggtcgggaaactgttgctcagcctcgacgcggccagttcgcccctcggcccgccggacgcctggtcggcgagcctgaagacgacgatggccacgctgctgccggccaaggcgcagatcgtgctgttctggggcgcggaattcgtcgccctgtacaacgatgcctacgcgccgagcatcggcgacaagcatccgcgcgccctcggccggccggcgatagagaactggcgggagctgtgggatgacctcgaaccgctgctgcgcggggtgtacgagaccggtgaaaccttcgcggcaaaggatcggcccttctacatcgaacgccatggacgcggcgagacggtctatttcgacgtgtcctattcggcggtgcgggaaaccgacggttccgtcggcggcgtgctgtgcatcgtcaccgagaccaccgagcgggtgcgtttcgaacgccgccaggcgttcctcctggaactgggccagaccctgccgtccctggccgatcccctggagatcgaagccaccgccctgcgccggctcggcgaggagctgggcgcgtcgcggatattcttcggcgaggacaacggcgacggcatgaccttccaggttcatcgcgactatctccacgacggccgctcggcggtcggtcggcatcgctacctgtcgttcggcgccaccctgtccggcgaactgcatgccggacgcagcgtggcgcgggaagacctcgccggggagcgcggcatgagtctcgacgaggcggcgagccgcgcgcgcctggggctgggcgccacgctgcacgtcccggtgctgcgccacggccggctggaggcgctgctggcgatccacttcgcccatccgcaggcgctcggcgaagatccgcgccgcctggcggaggaagccgccaagctggcctggacctcgctcacccatgcccgcgcggagctggcgctgcgcaccagttccgcgcaactggcggcgatgttcgaccaggccagcgcgggcatcgcggtatgcgaccggaactggcgcttcacccgggtcaacgatcgctactgcgagatcgccggccgttcgcgcgagaccctgctcggcctgcgcatgcaggacatcctcgaccccgccgacttcgccctccccgcggcgccaggcggagcgaccggcgcggcgttcgagatgagcggccgctacgttcgccccgacggcgatacggtgtgggtgcagaaccaggtcacgccgctggtggacgagcagcatgccgccagcggcctgctctgcgtgtgcatggacatcagcgcgcgggtacgcgccgagaacgagctgcgcgaactcaacgaaagcctggaagaacgtgtcgcgaccatgctcgcccagcgcgaaagcgccctggcgcagcttcacgaggcacgcaagatggagatggtcggccagttgaccggcggcatcgcccatgacttcaacaacctgctgacgccgatcatggcctcgctggaactgatccgccggcggctcgacgacgcccgctccaccgacctcatcgacggcgcgctacagtccgccgaacgggcgcggaacctcgtcggtcgcctgctcaccttcgcccgccggcaaaccctcaagccgcaggcggtggccctgcgcgagctggtcgaaggcatgcacgacctgatcgagcgctcgctcggcccgaccatcgaggtccgcatcgagatcccggaacgcctacctgcggtggtggtggatccgcaccagttcgaactggccatcctcaacctcgcggtgaacgcccgcgacgccatgggcgaaggcggccgcctggaaataggcgcgcggaccgacctggtgatcgacggcgcggtggacggtctcggcgccggccgctacgtgtgcctggaagtcgccgacaacggcggaggcatgcccgccgaggtgctggcccgctgcatggagccgttcttttccaccaagggcgtgggcaagggcaccggcctcggcctgtcgatggtccagggcctggtcgcccagtccggcggcggcctgggcatccactcggagatcggcaaggggacccgggtgagcatctggctgccgatcaccgcggagcagacgcaatccaccgcagaaagctgcccggacgcaccggaagcgttgcggccgacccacgtgctgctggtcgacgacgacaggatggtgcgctacaccaccgcgctgctgctcggcgatctcggctaccaggtcagcgaggcggcgtcggcggaggaagccctgggcgaggtcgagcgcggcctggcgcccgacctgctggtcaccgaccatctcatggccgacaagaccggcgtgcagcttgccgaggaactgcgccagcgcttcccgcaattgccggtgctggtcatcaccggctacgccaacctcaggcccgagcaactcaacggcttcgaggtgttgaccaagccgttccgccacaacgaactcgccgaacgcctcgcccggctgctggaagcctcgccgtga

SEQ ID NO: 319990 - DNA, 1773 bp, Pseudomonas aeruginosa
atgccgctgcgccgtgccgttttcgccatccttttcgcgtccctgggcagtcctttggtcgccgccgaaacacccctgcgcctggagcgcctggagcgctgcggcgatctcctggccagcgagcggcaggagtggtgcctgcgcgtgcgcggcctgggcgccggcctgccgcgcctgttgctggacggccgcgaactgccggccaccgccctgcggcgcgagggcgacggcctgcggctccgcctggaccgccgtggtcacgccagcggtccgctttggctggagcagggcgggcgcagcagcaatccggtatggctgaccctgaacggcagccatgtgctcgccgccggtcccgacgaggtggcgaagaacatggatggcctgaccacctacgtcgacctggtcagcctgttgatcgaggagaaccacgacggtcgccgggaggccgaacgcctggccgataaatatggcgcgcgggtggtcggcgcgatcccgccgttgaacctctaccagttgcgcctgccggcgcgcgacctcgtccagcgcgacgcgctggtcctccgcatcggcagcgagaccagcgtggacgccgtggtggtggaggagtccgcgccggagaagggcgaggaaaccgaggcggcgcgccggcccgtggacaagccggacagcgactccgacgagtgggcggccaatcgtttcatggacgcggtgaactattaccagcgtcgggtccgcgcccgccaggccccgctggagacccgcccggtgcgcatcggggtgatcgagcgcgacgtcgatttcgacgcccccgacttcgccgactacctcggcccctgcaaggcgcccgcgccgcgtacctgcctctacgcgcgcgatgccgaacgtcccgacaaccacggttcgacggtcgccggcatcctcgccgcgcgctgggaccagggcggcaacagtggcttcctgcgtgggctggaccgcgccagccagggtttcgaagtgatcgtcgagcgcaattccgacgctggcatcacggccaacgtcgccgcttcggtgaacctggtggaggatggcgtgcgggtgctcaactggagctggggcatccaccgcgtcggcgctcgcgacgtcgacggcgacgaggtggattcgctggtgcgctcggggatcgccatgagcggctacgaggagttgctcgaggagttcttcctctggctgcgcaaggagcatccggacgtgctggtggtcaactccgccggtaacggctcgtcctactccggtaccgacgaataccgcctgccgtcctccttcgtcaccgagcagttgctggtggtgggcggccaccagcgcagcgagcgccaaggcctggcggtggacgacccggcctacgcggtcaagcgcagcacctcgaacgtcgacatgcgggtggatgtcaccgccgccgcctgtacccatgcctcgaccctggagcgggacgcgtggggcgaagtgcactgcggcacctcctatgccacgccgatggtcgccggcacggtcgccgccatgctttccctcaacccgcggctgcgacccgaggagatccgcatgctgctccggcgcagcgccatgaccatcggcggcgactacgatttcgagccggccgatgccgaggacctcaccgcaccgatcctgccctcggagcgcggctaccgcctggaccaccgcgacgtcggccgctcggcgcggctggacatgcagaaagccctggacctggcggtgaagagccgcgagcgcgtgcgctga

SEQ ID NO: 319991 - DNA, 1449 bp, Pseudomonas aeruginosa
atgccgcttgccagtcatctgcgttgcgtggcgctggcgctggggatctccaccgcgctgggctgcgcgaaccgcaaccaacccgcgccacgcgcggaaagcctcgaccctggcctgtcgagggtggcgggaacccgcggcgacgcgctgcccgcccagtggtggacgctctaccaggaccctgggctgaaccacctggtggccgccgcgctgcgccacaaccgcgacctggccgcagccgatgcccatgcccgcgcgctcctcggccatctgcgcggcgcacagggcgaacgctggccacggaccgaggtcggctatggctaccagtatgggcgcgacggcgacgaccagaccctcgccgaagccaccgacgaggacctgcacagccagtggaaacacaccgcccgcctcgacctgtcctaccagttggacctgtggggcgaagtccgcgcccgcatcgccgcggcgaaggcggatgccgaagcggcgcaagcggcgcgcgacctgctcagggtcagcgtggccagccagaccaccctcgcctacgtccgcgcctgcgccctggcgcgacgggcagaggtacaacgccgatcggtcggcctgctcgacgcgagcctggcgctgagcgaacgccagctcgccgccggcctttccagcgagctgcagcgacgccggctgctggccttgcgcgagcggacccgcgccgcgctgccgatgctcgaggcgcggcggcgcgcggcactctacgaactggcgctgctcagcgggcgctcgccgcgccagttggacgctcctgccgcgacctgcgccggcataccgcaactgcgccgtgccctgcccaccggcgacggctggagcctgctggcgcgccgcccggacgtccgcgcggccgagcgccggctcgccgccgccgacgcccggcgcgcgctggccgaagccgagctgtacccgcgcatcagcttcgccgtcggcgccgagacctccgcagtgaccctcgccggcctcggcggcagcggcgcgctggcctacgcggccggcccgctgctgagctggcgcttccccaaccgggaaagcgcgcgaggccgcctggacagcgcagcggcagagcgcgacgccgccctggcgcgcttcgacggagcggtgctcggcgccctgcgcgaggtcgagcgtgccctggcgctgtatgccggcgagcgccagcggcgtgccgacctccagcgtgccctcgacgagcagcgccacgcctaccggttggcgcgcagcaactatcgcgccggcgccctcgatgccctcgagctgctcgacagccaacgcagcctggtcgccgaccgggcgcgcctggtcgacgccgagatgcgcgtcgccgagcgccaggtcgaactgttccgggctctcggcggcggctggcaagccgctcccagcccctcccatcaggaaaacggacaatga

SEQ ID NO: 319992 - DNA, 1152 bp, Pseudomonas aeruginosa
atgaaccaggcaatcagggaacccatcgaacacaccactggcgaaaccatgccagcagccacgcgccggcgccgaacctggctgctgggcggcctcgccggcgccatcgcgctcgccgccctgctggcctggtggtggagcagcggacgcttcctggagggcaccgacgatgcctatgtacgcgccgactgggtggcggtcagcgcgcaggtctccggctacgtcgccgaggtgctggtggccgacgacgccgacgtccaggccggcgacctgctgctgcgcctggacccgcgcgacttccgccagcgcctgcgcgccgccgaggcccgcgaagcggcggcgcaggcggcgctggaagcccagcgcgcgaagctggagaccctcgatcggcaactgctggagcaggcgcagacgatcagccgcgcccgcgccgatggcgaagcggcgcgagccgaatggcgccgcgccgagaccgactggcgacgctaccggcaattggccgacgagcatgccaccagtcgccagcgcctggagaacgccgacgcggcgcaccagcgagcgcgggcggcggcgcggcgggcaaacgccgaggaaggccgccagcgcgccgccagggacgtactgaagagccggcgacgcgaggcggaggcggcgctcgcccagcgccaggcggagctgcaggaagccgcggcggcgcgcgaactggcgcgccacgccctggacgataccgaaatccgcgccccattcgccggccgcgtcggccagcgcaaggtgcgcctgcgccagtacgtcacgccggggctgccgctgctggcggtggtgccgctggagcaggcctacgtggtggccaactacaaggagacccagctcgaacgcatccgtcccgggcaaccggtagagctggaggtggacacgttcggccgccgctggcgcggccgcgtcgacagcgtggcgccggcctccggcgcggtattcgcgctgctgccgccggacaacgccaccggcaacttcaccaagatcgtccagcgcttcccggtgcgtatccgcctggacgccgacgccgccgagcggggccggctgcttccggggatgtcggtgatcgccaccgtggacactcgcgaaccggacggagcctccgccgatgagcgctga

SEQ ID NO: 319993 - DNA, 1512 bp, Pseudomonas aeruginosa
atgagcgctgacgacaaggtatcgctgcgtgcctgggtcgccgtcaccggcggcctgttcggctgcttcatggccggcatgaacgtgcacgtcaccagcgcggcgctgccggagatagaaggcgcgctgggagccaccttcgaggagggctcgtggatctccaccgcctatctggtcgcggaaatcagcatgatcccgcttaccgcctggctggtggaagtgttctccttgcgccgggtgatgctcctcggctcgctggtgttcctgctcagttcgctgagctgcgcgctggcgccgaacctgtcgacgctgatcctgatccgggtgatccagggggcttcgggggcggtgctgatcccgctgtcgatgcaactgatcctcaccgagctgccgtccagccggatacccctcggcatggcgctgttcagcctttccaacagcgtggcccaggccgccggcccgtcgatcggcggctggctggcggatgcctattcctggcgctggatctttctcctgcaactgttgccggggatcgccctgctggccgcggtggcctggtcgatccgcccccgcgacggcgaccgcgaacgcctgcgccaggccgactggctcggcatcggcgcgatggtcgccggcctcggcgcgctgcagatcgtgctggaggaaggtggccgccgcgactggttcgagtctggcttcatccgcgccttcgccgtcctcgccgtgctcgccttgctgctcttcgtacagcgccaactgtggggcgcgcggccgttcatcaacctgcgcctgctgggcagctacaacttcggcgtgtccagcctggcgatggcggtgttcggcgcggcgaccttcggcctggtgttcctggtgcccaactacctgtcccagttgcagggtttcaacgcccggcagatcggcgacagcctgatcctctacggcctcgtgcaactgctcctggcgccgctgctgccgcgcctgatgcgctggctgaaccccaagctgctggtggccggcggcttcgcgatcatggccctgggctgctggatgggcgcgcacctgaacgccgacgcgggacgcaacgtgatcatcccctccatcgtcgtgcgcggcatcggccagccgctgatcatggtcgcgctctcggtactggcggtgaagggcctggacaaggcccaggccggctcggcctcggcgctgatctcgatgctgcgcaacctcggcggcgcgatcggcaccgcgctgttgacgcaactggtctcgctgcgcgagcgcttccactccgagcggatcggcgagaccctgacgatcttcgacggcgccctgcaacagcgcctgggcggtagccaggtgcggatacaactgccggagcagcagcaggcgctggccctgctcgaccacggggtgcgccagcaggcctacctgatggcctactccgacgccttctacctttcctgcgtggcgctcctggcctgcgccctggcctcgctgatgctgcgccagaaggactga

SEQ ID NO: 319994 - DNA, 783 bp, Pseudomonas aeruginosa
atgctgatcgacctgccttccacccgtccggtcttcgcctatgcccaggattatctccacggcgagcgcgtcgagctgcaccggcattcgcgcgcgcaattgatccatgcgctcagcggggtggtcacggtcggcaccgccgagggcacctgggtggtgccgccgggacgcggtgtctggttgccggccggtatcgagcatgccctgcgtttcgccggccaggtgcgcatgcgcaccttgttcatcgccccgcaagcgcgccacgacctaccgcgggactgccgggtggtggacgtgccgccgttgctgcggcaattgatcgtcgcggcgatgcggatcgccccggactacccgccgggtggccgcgacgagcgggtgatggagctgatcctcgatgaactgcgggtgctgccgatcctcgccctgcacgtgccacagccggtcgatccgcgactggcggcgctgtgccgcagcctgcgcgccgagccggccgccgactggagcctgggcgatgctgcgcgtcgcctgggcgtcagcccgcggaccctgacccgcgccttccagcgcgaaaccggtctcagcttcgtccagtggctgcggcgcatgcgcctgctcgccagcctcgatgcgctggcggcagggcattcgatcctcgaggtcgcactggacctcggctacgacagccagagcgccttcagcgccatgtttcgccggaccctgggcgtttcgccgagcctctatttcggccgcggcgccgcctaccgggtggccgagggcgactga

SEQ ID NO: 319995 - DNA, 504 bp, Pseudomonas aeruginosa
atggcctcttacgcggaactgttcgatatcggagaagacttcgccgccttcgtcggccatggcctggccacggaacagggcgcggtcgcgcggttccggcagaagctggaaagcaacgggctgccgagcgcgctgacggaacgcctgcaacgcatcgaacggcgctatcgcctgctggtcgccggggaaatgtggtgcccggactgccagatcaacctggccgcgctggacttcgcgcagcgcctgcaaccgaatatcgagctggcaatcatttccaagggccgcgccgaggacgacctgcgccagcgcctggcgctggagcgaatcccgattccgctggtactggtgctggacgaggagttcaacctgctcggacgcttcgtcgaacggccgcaggcggtgctcgacggcggtccgcaggcgcttgcggcgtacaaggcgggcgactacctggagcacgccatcggcgacgtcctggcgatcatcgaaggcgcggcgcgctga

SEQ ID NO: 319996 - DNA, 258 bp, Pseudomonas aeruginosa
atgaaaacctcgttcttgctggccttgctgctgtcctgctggtcccaggtccaggcggcggacgacgacgggaaagagttgccgccgatcgagcgctacgactacggcatgccgctggacatcgagcgggtgctttccgtcacgccggtgccggccacctgtggcgtggtgccgctggtgatgctctaccgcgacagcgccggacgcctacatcgcttgcagtaccgaggccttggcgcgggctgttcgcgccactga

SEQ ID NO: 319997 - DNA, 2040 bp, Pseudomonas aeruginosa
atggcggcgtcggcgtccggcgggcgcgattggtatgcggcgttgccgttgccctggcggaccgacagcctgggctacgtgctgcgcagcatcggcgctgccgctctggcgctcggcctggggctctacctgcaactggattcgccgttttccgcggcgtccactgtgctgttgctgatcaatccggtgcagggagcggtggtcggcaagggctggtggcgcgccgtgggtaccctggtcggcacgctcgctgccttcgtcctgaccgcgctgttcgcccagaagatgctgctgttcgtcgtcgccctgggtttctggctgggtctctgcgtcggcgtcatgagcctggtccggcacttctacgccaccgccgcggtggtcgccggctacactgtgtgcctggcgctgggaccggccatggtcgagcccgaggcggccttcgagcacatcgtcacccgcgcctcggcggtaatcgtcggggtctgctgcctgagcctggtgaccgtgctcttcagccgcaggaccgtgtccgggcgggtgcgccagcgtctcgtctcgctctgcgcggcgacgctggcgctggtcgctgcgcggcatgccggtgcggctgacggggaactggagcgccgtcgccggacgctggccggcgaggtctacgcggtagacgacctgctgggcgtcggtcgcgccgagtcgcgggcgctgagcgctgcgctcccggcgatccgcggtggcctggcggcgctgttttccacgctgatggagttccgcttcgccggcgagacgcattgggcccggcgcttggcggagcgtggactggcgctgccgatggccgacgacctgtgcctgctgggcggccaactggagcgcggcgagctcgacttcgccggcgccgcgcgacggctcgcgagcttgcgcggtcgcctggcggcgattcggcgcggacttccgacagaccaagcggatgcctgtcgcgaagggctgttcatggagcgtctcgacgagcaactggatgacctgcaggccgccctgcgggggttcgcccggctcgacggccgggcccccgccgacgtccgcccagcggccttccatcgacattaccgcgaggccttgcgcaacggcgcgcgagcctggctggcgatgctggtcggcggcgccctgtggttcctcagcgggtgggaccaggggccgaccctgctggcggtgctcggcccctactgcacgctgctggcagcctcgccctttcccgccgagggcacgcgcaatttcattcgcggcacgctctacgcgatacctgccgcattgctctgcaaattccttctgctaccgctgatcaacggttttccattgctgctgctgtgcctcgccttcttctggtcgttcggtatccaggccaccacagtgcccaggcgggcgttgcagggaatcgcctacctgatcgccttcaacaccctggtcgccaccggcaatctcgcccgcttcgatttcggcgacttcgccaaccagtcctgcgcctgggtgctggcgctctgcatcagcctgctggtctaccgcctgctgccgaaggacctggaacggcattcggcgtcgctgctcgaccatctgcgccgcgagaccctcgccttgctgcgtcgtcgcgccggtttcgacgcgcatgcctggcaggcccgccagcagcatcgcatcgcccagctgggcgcgctgcatggcatggaacatccgcgcagcgcgctggccctgcgcctgggcttcgtatccctgcaactcggccgcgagtcgcggcgcctgtggcgcgccctggccgggctcgacccggccgccgcggaggcgcggtggatcgagcgcgcactgcgagccatcgccgtccgccatcgcgatccgccgctcgccgcgcggcacgcacgccgtgccggcgcccgcctggcggccgccggcgagtggcgcctggccgcgatcctcaccgacctcgcctggttgctccgggcctattcgcaaagcgtctcgtccgacggggcgcagcatggagaaaagacctcatga

SEQ ID NO: 319998 - DNA, 909 bp, Pseudomonas aeruginosa
atgtccatcgttcgtctttccaaggtggctgcgaccttcgcctgcggcctgctcgccctgtgcctggcgttgcagttgtggcaagcctacgtgctggcgccctggacccgcgacgggcgggtcagcgcgcaggtgattcgcatcgcgccggaagtttccggcagcgtcgaggcggtgttcgtcgcagataaccagcgggtggcccgcggcgatccgctgtaccgcatcgatccgcgcagctatcgcctggccgtgcgccagcgcgaggcggagctggagcaggcgcgggaaacactgcgccaacgtgacgagcaatggcgccgacgcatgcagttggccggcgcggtttcgcgcgaggaggtcgccaacgccggtcgcgccctgcgtatcgcccgcgcccgcgccgaggccgccggggcggcgctcgaccaggcgcggctggacctgcggcgcagcgagttgcgctcaccggtggacggctatgtgacgcagttgcgcgtgcagcccggcgattacgcggcggcgggccggaccaacatcttcatcgtcgatcggcgaagcttctgggtcaccggctatttcgaggaaaccaagctgcgcaatgtacaggtcggcgcgccggcgacgatcaagctgatggggttcgatccgctgctcgacggccatgtcgcgagcatcggtcgcggtgtcgccgacctcaacgaaagccgtgccgacagcggcctgccgcaggtcagcccgaacttcagctggatacgcctggcgcagcgcgtgccggtgcgcatcgaactcgaccgggtaccggcgggcgtggtgcttgccgccggcatgaccggcagtgtcgaggtgctgcaggcggggaccgcgcggcactggcggctgacccgctggttgcaggagtacctttga

SEQ ID NO: 319999 - DNA, 189 bp, Pseudomonas aeruginosa
atgctgagcgaagtctccgtttccggcctctacgtgccgccattgttcctctacctgtgcctggcgatgccgctctacctgctgctggagcgcctcgcctggcgctggctggaatgcgcctggcatcccggcctgctgcgtttcttcctgtcgttcatcgtgctgtccgtgctggtgctgaagttctga

SEQ ID NO: 320000 - DNA, 807 bp, Pseudomonas aeruginosa
gtgagccgtgaaccgcagacctacctcgcccaacgcttcgatcccgacgcgctcggccagccggccctggccctgcagctggaggtccggcacaacgacaccgaggtgccggtgcaccggcatcgcaagggccagctggtggtggcctgccgcggcggcatcacctgcacggtgcccgatggcctgtggatggtgccggccgggttcggcgtgtggattcccggcggcatcgcccacagcaaccgggtcaccgccaacggcaaggtctgcttcctcttcgtcgagcccggggcggcacgcctgccgagcgactgctgcaccctggccctgtcgccgctggtcctcgaactgatcctgcacctgagcgcgcaaccgcaggactatccgcacgacggcccgctcgcacgtctcgccggggtgctgctggaactcctggaacaggcgccgaccgaacagctctacctgccgctgccggacaaccgcggcctgcgccgcatcgccgacgaactgacccgcgcccccggcgaccgcgccagcatggccgaatgggccaggcgagtggcgatgagcgagcggtccctggcgcggatggtgcgccgggagaccggcatgaccttcggccagtggcgccagcaattgcagatcatcatcgccctgcagcaactgtccgccggcgtttcggtgcaacgcaccgccgagatcctcggctacgagtcggtcagctcgttcatcggcatgttccgcaaggcgctcggcagccccccggcccgctacgtgcgcgacagcatgcggcggccagccgactga

SEQ ID NO: 320001 - DNA, 351 bp, Pseudomonas aeruginosa
atggttacgcacttcttgagcgaatccggccaggcagcctgcgggcgcggcgacagcaacgtgaacggctcgagcgacgtcggccaggtcagttgcaagacctgccggcgcaccaacgccttcgcccaggcccaggaaaacgccgctccggccagtgcccctgtcacccccaccgccgctgcgccagtgatcgacaaggccgcgccgcggccgaaagccgaggccaggcccgccgccgcgcagcgccaggaccgcgatgccgcccgcaaggcctggcaggcgcgtctcaacgaattgtccgggaagaaccgcatgccgcgctcgcggcgccgcgcgcaagcctatctctga

SEQ ID NO: 320002 - DNA, 891 bp, Pseudomonas aeruginosa
gtgaaggaaccgcgtgccctggaggaatatcgccgggcgatagtggcggcctgtccggaactggcggacgccacgttcaccatcctggcctcgggctggcattccacggcggtggaggtcggagggcgctgggtgttcaagtttccgcgcggcgcggaggccgaggcggcgctgctgcgcgaggccgccgtgctacgcctggtgcgtccggcggtgagcctggcggtgccggcgccgcaggtgtttgcgggaccgccgctgttttcccgccacgagaaactgcctggcggttacctcctgggcgaggactaccggcgcctggacgaacccgcacggcaggcggtcggcgatgcgttggggcgcttctacgccgagctgcatcgactgccaccggcgcgcatgcgggcggttggagccttgccggtgcgtccctgggagtcgcccacggcgatgcgcaggcgcgccttgccgctgctgcctgcggcctggcgcgaacgcgcgggacgcttggtgcgggaatacgccaagctgcctgccgatccgctgggttcgatcttcggcttcttcgacggccatggctggaacatggcattcgatagcgaggccgggcggctgaacggtgtgtacgacttcgccgacgcgggcatcggtccgctgcaccaggaattcatctattccgcgttcatcgatgccgacctcaccgagcgcatcgtcgccgcctacgagcgcttcagcggtcggcgcctggagcgtcggcggatcgccttgctgacggcggcgcatcggttgtcggagctggccgagctggccgacgagccgcgccatctgccggagatgctcgccggcgccctcgacggcctggccctggcggaggcgcagggcctggcctga

SEQ ID NO: 320003 - DNA, 609 bp, Pseudomonas aeruginosa
atgtcaacgcacttcccagacgacccgtcgccacgccgccgcctgtcccgcgacgagcgccagcgccagttgctcgaggtggcctggcggctggtccgcgaagaaggtaccgaggcgctgaccctcggacgcctggccgagcaggccggggtgaccaagccggtggtctatgaccacttcggcacccgcgcccgcctgctggcggcgctctaccaggattacgacctgcgccagacggcgctgatggaggctgccctggaagcgagcgaggcgaccctggaggggcgcgccgacgtcatcgcccgcgcctatgtcgactgcgtgatgcaacaaggccgggagattcccggggtggtcgcggccctcgccagctcgccggagctggagcggatcaagcgcgactacgaggttctcttcatggacaagtgccgcgccgtgctggagcccttcgccggcggcggacggctgaccgtcgccgctctgcgcgcaatgatcggcgccgccgaagcgctgtcgcacgcggccgccaccgaagagatcgccccggaagaggcgcggcgggaactgtacgaggcgatcgtggcgatggtcgcgcggagtcgtcggtga

SEQ ID NO: 320004 - DNA, 606 bp, Pseudomonas aeruginosa
atgcatgccctgatcgtcgtcgcccatcaccatcctcgctctctcacacatgccctcgccgcgcgcatcgccgaaggcgtggtccgcgccggtcattccgcggaaaccgccgacctggcggcggaaggcttcgagccgcgcttcggcctggccgaccacgccgtgcatcgcggccaggcgtcgcctcccgccgacgtcctcgccgagcaggcgcgcatcgatcgcgccgataccctggtgctggtctacccgatctactggtggtcgatgccggccctgctcaagggctggatcgatcgcgtgttctccaatggctgggccttcgactacagcatcggcggcgacctgcggaaaaagctgcagcgcctgcgcgtggtgctggtcggtgtcggcggcgccgatgccggcaccttcgagcggcacggctacgccggggcgatgcgcacccagatcgaccatggcatcttcgattactgcggcgcacgggtggtccgttccgaactgttgctggagtcggagagcgccgatccagccgcgcacctggagcaggctcggcgaatcggcgccgagctgttcgccagcgcccggcggccgacgccggcctga

SEQ ID NO: 320005 - DNA, 1122 bp, Pseudomonas aeruginosa
atgatgacccgcagacatttcctccagcgactcggcgccagcgccggcctcggtgccgccctcacgctcggcctggagttcggctcgccgcgtggacaggcggcggcagccgatcactggcatatgcccgacgagcacctgccgcaggaacgggtgttccttgcctatgccgcgtccccgtcgatctggaaggacctggccgaggacgtgaaccgcagcgtcgccctgctggccaggaccatcgcccgctaccagccggtcacgctgctctgccggcccgcgcaggaggccgcggcgcgccgcgcatgcggcggcgccaacatcgactacctggcgttgccgctggacgatatttgggtccgcgactacggcggctgcttcgtgctgaacggggagggcgaagcgggcctggtggatttcaacttcaacggctggggcggcaagcagcaggccggcaacgatagccgcgtcgccggcgtgctaagcgagcgactggaggtccgctacatcgccagccaactgaccggcgagggcggcggcatcgaagtggacgggcgtggcacggcgatcctcaccgaaagttgctggctcaacgacaatcgcaaccccggcatggacaagggccaggtcgaggccgaattgaaagccctgctcggcctgcgcaagatcgtctggctgccgggtatccgcggcagggacatcaccgatgcgcatgtcgacttctatgcgcgcttcgtcaggccgggcgtggtcatcgccaatctcgacaacgacccggactcctacgactacgccgtgacccgcgaacacctggagatcctgcgcacagccaccgacgccgacggtcgcgctctgcaggtgcataccctgtcgccgcccctgaagccgcgccgcgactactcgcgaaacaacccggacttcgccgccggctacatcaactacctgccgatcaacggcgcggtgattgccccgcagttcggcgacgccagcgccgatcgccactgcggggaattgctgggccgcctgtatccggggcgggacatcgtccagctgaacatcgatcccatcgccgccggaggcggcggcatccattgcgtgaccaagcacatgtcacgtgcctga

SEQ ID NO: 320006 - DNA, 1113 bp, Pseudomonas aeruginosa
atgaaacgttccgcgcgaccgctgctcgccgcgctgctcctgggcctgggcgtggcccaggcggaagagaaagtgctgcgcctgtataactgggccgactacttcgcgcccgataccctcgccgcgttcacccgggaaaccggcatccgcgtggtctatgacttgatggacagcagcgagaccctcgaggccaagttgatgtcggggaacagcggctacgaccttatctttcccggcgataccgtggccgagcggctgatgcgcgccggcgccctgcagaagctcgacccccgccgcctggagcatctcgacgagatcgagccgggcctgcgcgaactgcaagcccgctacgcgcgttcgcgcgacgccgcggtgccctacacctggggcaccatcggcctgaccttcaaccgcgagcagatcgaacggcgcctggccgacgctccgctggacagcctcgacctgctgttcaagccggaattggcggcgagattcgccgactgcgggatttccctgatcgactcgccggacgaagtgctggcgctggccctgcattacctggggcgcgatccgcgcagcggcaagccgcaggacctggccgccgcgctggccttgctgcagcgcatcaagccctacattcgcaagttccagtcgcagccggtggcgcaactggtgaacgaggagatctgcctgtcgctgggctacagcggcgatgcgatccaggcccagcgcgccgccgacgaagccggcaaggcactgcgcttcgtctaccgggtgccgcgcgaaggcacgtctctgtggatggacagcatggcgattccggtcgacgcgcagcacccggaatatgcctatgcgttgatcaacttcatcatgcgcccgcagaacatggccgcgatcagcagcgctaccggctacccgatctccagcgccggggcgcgggccctggtatccgccgacatgcgcgacaacccggacatctatccggacgcggcgacctacgcccggctgtttcccggccaggacatcccgcagcgcgacatgcgggcgcggatgcgcgcctggactaccttcaagaccacccgttccgatcccgttcccgaggacccgaaatga

SEQ ID NO: 320007 - DNA, 912 bp, Pseudomonas aeruginosa
atgcgccacctgaccctggccactacccagttcgcctgtagctggagtctcgacgacaatctcgaccgcgccgagcgcctggtccgcgaagcggctgcccggggcgcgcaactggtcctgttgcaggagctgttcgccaccccgtacttctgcatcgagcaggaccatcgccatctgcgcctcgccgaaaccttccgtggcagccgggtgctggcgcgcttttccagcctggcgcgggagcttggcgtagtcctgccgctcagctggtacgagcgcgccggcaacgcgcgcttcaactcgctggcggtggccgacgccgatggccggttgctcggcgtctaccgcaaggcccacgtccccaacgccatcggctaccaggaaaaggaatatttcagtccgggggatagcggctttcgcgtctgggacaccgcggtcggccgtatcggcgtcggcatctgctgggaccagtggtttcccgagaccgcgcgctgcctggcgctactgggcgccgaggtgctgctgtttcctaccgccatcggctccgagcctggcgccgcgcagctggattcccgcgatcactggcagatcgcccagcgcggccaggccgccgccaatctggtaccgctggtggctgccaaccggatcggccgcgaggtcgcttgcggcgacccggcgctggccatgcggttctacggttcgtccttcatcgccgaccacaagggtgccttgctcgccgcggccggccgcgacgaggaggcggtgctggtctgtggcctcgacctcgatgcgataggcgaagaacgcctggcctggggtgtctatcgtgaccggcggccagagctgtatggcccgctgatgagcctggacgggcgtgacccggccagccgacacgcctgggaggtgtccccatga

SEQ ID NO: 320008 - DNA, 1041 bp, Pseudomonas aeruginosa
atgaatacgctcgacacaggctggcgcatgcccgccgaatggactccccatgccgccacctggatggcttttccgcacaatcggatgctctgggagtccgaatggggcgtgagcctggcggacgtacaacaggacttcgccgcagtggccaacgccatcgcgcgtttcgaaccggtgaaactggtggtcgaccccgccgcgctggacagggccggggagctgtgcgcgggcaatgtcgaactcatcgagctggccatcgatgacagttggtgccgcgattccggaccgagtttcgtctgccatccgcaactcgggttggccggtgtcagctggcgtttcaacgcctggggtggaaagtccgcctacgcgcaggacgccagcctggcgcggcggattctcgatggcctcggcctggagtgtttcggcgtgccgctggccaacgagggtggggccatccacgtggacggcgagggcacgctgatcaccaccgagtccgtgctgctcaatgccaatcgcaaccctggcctgagcaaggccgagatcgaggcattgttcgcccgcctgctcggcgtgaccaggaccatctggttgcccggcgatcccgaccggatcacaggcgacatgaccgatggccatgtcgacggcgtctgtgccttcacccggcccggcgcgttgttgctggacgccacccgcgacaccacctccgcctacgccgaggtggtgcgggagaaccgtcgcgccctggagctggcgctcgacgcccgcggtcggcgtttcgagctgatcgaactgttcgatgccggcgaagtggctccggaggagggggtgttctgtgcctcctacaccaatttctatatcgccaatggcgcgatcatcatgccggcctacggtgtcgccgccgacgacgcggccgccgcgaccctggcccgggccttccccgctcgcgaggtggtgccggtgcgcatcgaccacctggcccacggcggcggcggcgtgcattgcatcacccagcagcagccggcctggccggcgcggaggtga

SEQ ID NO: 320009 - DNA, 888 bp, Pseudomonas aeruginosa
atgctcaaacactggcccccactgaatgcccttcgtggcttcgaagccgccgcccgcctcggcagcttccacaaggccgccgaggagctgcacctcacccagtcggcgatcagccagcagatccgcagcctggaaggctatctcgagcaaccgctgttctttcgcaacggacgcaaggtgagcctgaccgacgctggcttcgatctgctcagcaccacccagtccctgctccagcaactggccgcgggggtccgtcgcctcgaccagtaccgcaagcccaaccagttggtggtcaataccaccccggccttcgcccgccactggctggtgccgcacctgggcgatttccatcgccgtcacccacaggtggacctctggctattgaccaccgacgaggtacccgagatggccagccagaccatcgacgtagccatccgcgacgacctttgcgcccaggccgaatgcagctttcgctcgctcctccaagaccgcctctaccccgcctgccatcccgacctgctggcgctgccggcggaacggcgcggcaccctgcacggcgagcgcgaaatggactggagccactggcaggtacagggcggcgcgaacgttggccaacgcagtgccggcctgaacttctccgaccccggactgctgctggaggccgccacccagggcctcggcatcgcgctggtcagccagttgctggccgcacccgcgcgagccgccggacagttggtcgcgctctgcgaacagaatgtccgcgggcccgaatgggcctggctggtgcaccgcgacagcgaacgcaacagcctgacccgggcattctgccaatggctggaagaaaccattggcggagcatcgcgcacagcccccggacggcgcggataa

SEQ ID NO: 320010 - DNA, 1158 bp, Pseudomonas aeruginosa
gtgaagtttccgttccatccctggcgccgcctgctgctctgcgcgctccctttcgccgccctgctgaccgcatgcgacgacggcaagaaagagcccccgcccaaacccgccgaagtcaccacctacaacagcgtgccctgggacgccctgccggccaccagcgacgccgacctgctcgccggcttcaatgcctggcgctcggcctgcgcgcggctggccaaggacccggtatggggcgagccctgtgcgagcgccacgacggtcgccgccgatccgacggcggtgcgcgcgttcctccaggagcggatgcaggtctatagcctgcgttcctccagcaacggcgaccagggcctgatcaccggctactacgaaccggtctaccacggcagcctgagccagggcgagaagaccccggtgccggtctacggcgtaccggacgacctggtggtggtcgcgctggaaagcgtctacccggaactcaagggcaagcgcctgcgcggacgcctggaaggccgggtgctgaaaccctacgacgacgccgcgacgatccgcgacaacggctccagcgcgccggtgctcgcctggctgggcgacccgatggacctgcagttcctgcagatccagggttccgggcgcatccagctggaagacggccggcaactgcggatcggctacggcgaccagaatggccacccgtacaagccggtcggccgctggctggtcgagcagggcctggtgccgaaggaagaggtcagcatgaagcgcatccgcgactgggccgaggccaatccgcagcgggtctccgaactgctggcgagcaatcccagcttcgtgttcttcagcctgcgcccggacagcgacgaaggtccgcgcggctcgctgaacgtaccgctgaccgacggctacagcgtggccatcgaccgcaaggtgattccgctgggcagcctgatgtggctgtccaccacccgccctgacgacggcagcgcggtggtccgtccggtggcggcccaggataccggcggggccatcgtcggcgaggtccgcgccgatctgttctggggcaccggcgacgccgccggcgaactcgccggacacatgaagcagccgggccggctctggctgctatggcccaagggggcgccgctgcccgcctcctga

SEQ ID NO: 320011 - DNA, 1821 bp, Pseudomonas aeruginosa
atgtcccagaactccctgctcgacctgtacgcgcacccgacggtggtggcccgcttcagcgaaatggcagcgcttcatccccatcgcgaagccatcagggaccgtttcggaagtgtcgactatcggcaactcctggatagcgccgaacaactttcagactatcttctcgagcattatccgcagccgggagtttgtcttggagtgtacggcgaatattctcgggaaagcattacctgtctgctcgccatactgttatccggccatcactacttatatatagacctgaaacaaccggcggcctggaatgcagagttgtgccggcaggtcgactgccgcctgatcctcgactgctcgaccacgccgacgcccgccaacggtcttccctgcgtcccggtcaggcacctgcctgccgctccagcctcggtcgcccggccatgcttcgcggcggaccagatcgcctacatcaacttctcctcgggcaccaccggccgcccgaaagccatcgcctgcacccacgccggcattacccgcctgtgcctgggccagtcgttcctcgcgttcgctccgcagatgcgcttcctggtgaactcgccgctgtccttcgatgcggcgaccctggagatctggggtgcgctgctcaacggcggctgctgcgtgctgaacgacctcggccccctcgacccgggcgtgctgcgccagttgatcggagagcgcggagccgacagcgcctggctcaccgcctcgctgttcaacaccctggtggacctcgacccggactgtctcggcggccttcgccagttgctcaccggcggcgacatcctctcggtgccgcacgtgcgccgggcgctgctgcggcatccgcgactgcacctggtgaatggctacggaccgacggagaacaccaccttcacctgctgccatgtcgtcaccgacgacgacctcgaggaagacgacatccccatcggcaaggccatcgccggcaccgcggtgctcctgctcgacgagcacggacaggagatcgccgagcccgaccgggccggggagatcgtcgccttcggcgccggcctggcgcagggttatcggaacgatgcggcgcgcacccgcgccagcttcgtcgagttgccctatcgcggccgcctcctgcgtgcctaccgtaccggcgaccgcgctcgctacgacgagcagggccggctgcgcttcatcggccgcggcgatggccaggtcaagctgaacggctatcgcctcgacctccccgccctggaacagcgcttccgccgccagccaggcatcctcgactgcgccctgctggtccgcgagcgcaacggcgtcaagcaactgctctgcgcctggacgggaaaagccgacgccagcccacaggccctgctccgccaactgcccacctggcagcgcccgcatgtctgcgtccgggtcgaggccttgcccttgacggcgcacggcaagctggaccgcgccgccctgctgcgccgcctggaagaaccgctggagcgctgcgccagcgcgctcgatcccgaccaacgcggctgcgcgcagctgtggagcgaattgctgggttgcgaggtcggcgccgccgaccaggatttcttcctctgcggcggcaactcgttgctcgccctgcaactggtcgccctctgtcaatcggcgggtgcgggagcaaacctgggactcgccgacttgcaggcaaactcgcgcctcgaccagttcagccgtctcctgcgcagccacggcctggcgccggagcgtctgctggaacgggcggcgacgccggagcagccgctggtgctgtcgaggagcgcggcatga

SEQ ID NO: 320012 - DNA, 1263 bp, Pseudomonas aeruginosa
atgaacgtcggtctctccgcggaggtgcgctaccactggttccgcgagcacctggtggtggtcggcgattggcaccgcctgtccccctccgagcgcgaccgcctgcggcaccaaccgatgccggatgaggccgcgcagtccttgcgcgtcgacctgtcgccctggtcctgcgggatggtcttcagcgagctgctcggcgccgacctgacccgcttcggcctctgctacctggctccggccgaggtgccggcatccgacctgacgcgcctggggcggcgcctgcgcgaagagttcccgttgctcgacagccaggtggacagcggcgcggaaggtttcgaactggtcgtccacgggcagcccgaggagagcccggcgctggaagtcggccccttcgccgacgaaaacacgctcatcgcagcgctgctgcaacgcccgcattccctgttcgagcgcggcctgctgcgactgttccacgggcgctgcggaggacgtgcgcgctggggcgtctggctgcatcacctggtcgccgacgccgacttcgccagcgtgctgctggcccgcctggccgtgctcaacgccgaccccacgaccgaagcggcggcccccgagttcggcttcctccagcagcaatggcgcctggagcgccagctgcgcgagcgcaggaccaggctggaagactactggagcgagcgcggcgaggcgttccgtgaactggcgagcctgccctgggcggagctcgccagccattgcgaggatttccgcttggctgccacgccaggaggcggcgaagccgccctgctgacccggctcgcctgcgccctggctctcgccctggccagccagggcgccaccggcaaggtcctggcgctgaccccggtcagcctgcgcagtcgccgaggcacggcggtttccggttgctggctgaacctggtgccgctgttgctggacgccgcgaccgccgaggacaccttcgaacgacacaggctcgaggccttcgagcacagcctgctgccggcggaggccatcgccgaacgggccgggctgcgctatgccgacgcccaggtgatgatcaatgtcatcgaccagccattccgcagcgccgggttcatccaccgaccgacactgaagagccgcctgccgctgaccctgaccctggtccggcgcgacgacggcggctgggacgccagcctggccagccgcttcggccgcgaacggaccctggcgctggcggcggccatggccgaggcgctacgcccatgctga

SEQ ID NO: 320013 - DNA, 615 bp, Pseudomonas aeruginosa
atgctgatcctgctgcctgacttcatcggccacccgagctgcttccgcgggctgctggcacgcctcggcgcaacggactgccggctggtcgactaccaccggctggatgcctacgccagcatcgaagccctcgccagccaggtactcgacggcctggcggaagaaccggactggctgatcggctattccttcggcggcctggtcggctacgagatggcccgccagttgccggccagccgcctgctgatgatcgacagccacctgccctggccggccctgcggcgaatgccgccgagcgagcaataccagcgctggctgagcgccgagatgcgcgaatggatcgccctgatgagcgagcttggcgaactgcgcgaagaggtcctgctgcgcaatgtcgagctgttcggccgctggcagccccgccatcgcctcgcccgcgccagctgggtgcgctgccgggacgacgccggccgcgacccggccgccgaacgctggtgcgacctgatcgagcggctcgacaccttcccctgcgagcgtccgcaccacctggccctgcaggacccggcggtgatcgatttcatcgtccacaccgtcagcaaggagtccatccaatga

SEQ ID NO: 320014 - DNA, 879 bp, Pseudomonas aeruginosa
atgaaacactatcggcaggtggtatccccgcaattgcgccaacaggcgctggactggatcctcgccgcggcgcagcggccggacccggcgctggaaccggaattcgacatcgccgacgacgagcgccgcgaggcgaagaaggtgcgcaacctgcaccgccacgacccgctcttctgggacgactggttcgcccgctccgggctcgacgcgctggtccgcgaccatctgcgcaagccgcgcctgctgcgccacgcggcgttcatcaagcgccacgccgacgagtcctacatcccgctgcaccaggacatcgcgctatgggagaagcgctacgaaagcgcgcagaccttctgggtcgccctgaccccgtcgcggaacgacaacggtgggatgttctattaccccgacgaccgcacgatcttcccccacgagttcgacctcgcctacccgatgttcaagtgcatcgacctccaggccaacggcatttcccgcgagcaactggtggatgccgagctggacgccggcgacgtcctggtctggcccgcccgcaccgcacatggcagccacaacaaccgcagcggccagctgcgcatcggcatgccgatcgtcttcgtcgacgacgacgaattccaccaactgaatcgagaggacagcatgaaaacctggatcgcttccaacctgaaaagcgtgttcccggacgaggcaatcaccgaggacaacctcgaccactatcttccgcagctgtgcgactactcgctgaagatggtcaccttcctcgcccgtttctcccgccagttcggccatgcgccgaagatccacgacttcatcagggagccgcggctggcgacgctgtcggcctcggacgcgggagcgagacgatga

SEQ ID NO: 320015 - DNA, 1368 bp, Pseudomonas aeruginosa
atgatccgggtcatcgactgcaccctgcgcgaggggtgccaggcccgccagtgcagcttcgacagcgcgcagtcggtccagctggcgagggaaatcgcggcgctgggggtggatatgatcgagtgcggccacccgcggatttccgcggacgaacgcgagcgggtacgcgccgtggtggcggcggtttccacgccggtgctggcccacgcccgggcgcgccgggaggatatcgatgcggtgctggaaaccggtgcgcagtgggtcgggctgttcgcctcgatcaacgcgatctcgctggaaaccaagttcaagggcatgagccgcgaggaggtgctcgaactgttccacgacgcgatccgctacgcccgcgaacgcggcctgcgggtccgggccacggtggaagacgccgcgcgcacctcggtcagcgacctggtcagcatgatcgccaccgcgcgcgacgccggcgccgatcgcatctgcttcgccgacagcgtcggcatcctgctgccggacgagaccttcgacgtgctctcgctgctgcgccacgagttccccgacgtggtcttcgagtaccacgtgcacaacgaccgcggcctggccctgggcaataccctggcggcgatccaggccggggtccagtggcactcggcgagctgcaacgggatcggcgaacgcgccgggatcaccgacaccttccagttgctgaccctgctgcacaccaagttcgccgccgaccgcttcaaccttaagaacgtcctcgcggtctccgagctggtcgaggcgcacagccggatcaagcgttcgccgatgcacccggtggtcggcgagaacgccttcgtccatgtcgcccgcctgcaccagttggccatgcaggaaaaccaggacgcctacagcgccttcgatccggaactgatcaacggccgcgtctcgctgcaacgctacacgccgatgcaccgccaatccctgttcctcacgcctttcgagaaatccgccagcgaactgaagtaccaccgccacggccccggcaagcgcttcgtcatgctcgaccggcgcctgctcgacggctcgccgttctacttcatcgcccgccagttccacgacgtcggcgacggcgggccgggccacgtcgacagccacgtgcacaactgcgactcggtgttcctgttcctcggcagcgacgaggactaccgcggcctggaggtggaagtcctgctcggcggccaactgcgccgtttgcagagcccggccagcgtgttcatccccgccggcgtcgagcacagctaccgctacctcggcggcagcggcacctacatcaatttcgtccacaagggcgattaccacgagagcctactggagattacccaatga

SEQ ID NO: 320016 - DNA, 747 bp, Pseudomonas aeruginosa
atgaagcagttcgacaagcacgcagacgcctacaacgtggtccgcggcaagatcgcctatccggattcgctctaccgcaacctcgccgaacgcgccccggcacgcgaagcggcgctggacatcggctgcggcaacggcgtctcgaccgtccgcctgcaaccctggttccgctacgtggaaggcagcgacctgggcgaggcgctgatcgccaaggcccgcgagaactacccggagatccgcttcagcgtgtcgccggcggaaaccttcgcgccgcaacgccgcttcgacctggtcaccagcgccacctccttctactggatggaccgcaagcaggtgctgacgcgcatggccgactggctgacccccggcgggctgttctgcgcctacaagtacgacttcccgatcgcctacgggccgctgcgcgacttcatcgagcacgaactggtgaacaagtgggccaaacaccgtgatccgcgcctgacccgctatgacgacaccctggagatcatgggcagttgcccgcacctgcgcgactgccgccgcgaagtgttcgccaacatcatcttcctcagcccggaggaggtcgcgctgttcttcctctccaccagctacgtgacccgctacatcgagcaggaaggcggcgaagactacgccgaccgcttcatcgccgcggtgcgcgagatcgagagcgcgccgcaggtggcggtgaacttcgacatccacgccttcaccgcgctgaatcgctga

SEQ ID NO: 320017 - DNA, 1479 bp, Pseudomonas aeruginosa
atgagcagcctccccgtacccgtatcgctcgacagcaccctccgccatctcggcagcgccgacccgcggcggccgttcctgatcgacgcccgcgagccggagcgaccgctggaatacacctggggcgacgccgaccgccaggtcgatgccctcgccgagcagatcgccgcgcatgcctgccgcagtgtcggcgtgctgctcgacaacagctaccgcaacctctgcctgatctatgcggtcatgcgcgcgggcaagcatctggtgctgatcgatcccgagtggggggaggccgcgaagcaggccatcgtcgacgagatgcgcctggacgcgctggccagcgaacatccgctcgagggcgcgctggccgggctgcgcctggcgctggacttcgagcgcagcgcgacgcaccggctcgaccgcgccgcgcacagccacatgatcctgttcacctcgggcaccaccggccagccgaaaggcatcgaactcagccagcaggccatgctccatgcctaccgcatcggccgcgactgcctgggcatcggcgagcacacgcgctccggttgcttctaccggatcagcggcctgggcatcctcggcatcaatttcctcttcccgctgctgtacggcggcagcgcggtgctcctgccgctgcactgctgggccgacagcgaaggcttctgggaatgcgtggaacgcttcggcatcagtttcctctacctggtgccgccggtggtcaaccacatggtcaaggaaggctccccgccgccgcgccgcttgccgttgcagcgcctgctctgcgtcgccggctcggcgcgcctggacgccgacctgcaggcggccttccagcgcgactacgcggcgctggcgaacatctacggcctcagcgagtgcggcttcgccttcctcttcggcaagcgtcgcggcgatgcgttcgacaactcggtgggacctgccgtcggcctggaactcaagctgaccgaccccgacggccgcccgctggagggcagcggcgaacgcgggcgcctgtgggtgcgcacgccgagcctgttctccggctacgtcaaccgccccgacctgaccgcccaggtgctcgaggacggctggctgaacacccaggacctcgcctacttcgacgaggaccgctgcgtgcacgtcctcggccgttgcgacggcaccatcaacaagggcggcaacctgttccacctgaatgaatgcgaaagggcgctcaacggcctggacgaggtgatcgacgtctgctgcctgaaggtcgactgcccgctctatggcgaagactatgtcgccgtgatccacaccgcgccgcaggtcgagttcgccttcctgccctggctccagcagcagctcggcaccctccgcgcgccacagcgcgtggtgctgtcgcaccaggccctgccgctgaacggcgccggcaagcacgaccgccgtgcgctcgccgccctgctgcaacgggaagcctcgtga

SEQ ID NO: 320018 - DNA, 1518 bp, Pseudomonas aeruginosa
atgtgcggcatcctcggttacgtcggcaccggtttcagtgtctcgcgcttcgccggagcgctacgcctgctggcccatcgcggcccgttcggcgagggcatcgcggccctgccgaacggcgccatcggcatggtctaccaggccggctgcgaaatccatggcgagatccgcctgctgctcgacggcttgcagcgcggggtactgccggacggcatgtacgccctcgccagctgggacccgcagacccggcaattgaccctgctgcgcgacgagttcggcatcaagccgctgtactacagctaccagcccgagcgcggcctgctggccttcgcctccgagccgcgggcgctgctgcacctgctcggcggcgcccgcgccgacgccgaggcgatcgcccaggtggtcgccgccggcgtgccgctggaaggccagaccctgttccagcaggtccgtctgctgctgcccggcgaggtgttgcgcttcgatctctcccaggagcgtccgcgcctctgccagcgccagcggctggccaccgccccggccagcgaggcggacagcctcgacgagcagctcggcgaaaccctcgaacgctgccgccagaccttccgcccctgcgccctgctggtcagcggcggggtcgattccaacctgctcggcagctacctggacccgcagttgcaacgcttccacctgtgcctggaaggcgacgaggaaagcctgctgccacaccctcggctgcaacgcttcgagctgcgccaggaagccttcatgccgctgctgcgtcgcgcggtcggcaacttcggcggggcgacacggatgtccagcctgctgatgtaccagcgcctggccgacggtatcggcgagcagggctatcactgcgtgcttctcggcgaaggcgccgacgaactgttctggggctacccgcgccatctcgaactctggcgccggcgcgacgcgccggaaccgcggcgcttcgccgccgcctggttcggcgagtaccggtgcaaggccgcgctgctggcggaaccggcgggccgacgggtcgccgagcggatcgaggaactcgcccacgaggccctcggccagggcctcgaggcggcgatcggccagttcgacctgcactactcgctggagccgctgctgcgccgcgccgaccatctgctgatgtcgcgcaccatcgaagcgcgcaccccctacctgcatggcgccctggcgcagcgcgccgggcgcctccagcggatcgtcggcgacaccgccaaggcaccgctggtggcgctcctggagcagcgcgagaaacgctggcaggcgcagccgaaacggcatttccgcctgccgttcgaacggtggccgcaggccctcggggaaatgcgccggcacctcgccgaacgcctgccggcgctccacgacctcggcctggaaggcctggatgcaccgagcgtcgcggcgctgcccggcgaccagttgttcaccctcaccaccctgtcgctctggcagcaggaatacggagcctcgctatga

SEQ ID NO: 320019 - DNA, 960 bp, Pseudomonas aeruginosa
atgacaaccatccatcgtcgccccgcgccctggcggggcaacgcggtgttctgcgcttcggccgctttcgccgccggcctggaaacgctgttcgcgcgcctgctggagcggcgtcccgcggatagcgcggaggctctcctgcgccagcgcctgcatcacgaactggagcacggcaacggcgtgctgctgcacgattccgcgctgctgcgcggactcgccgaggacgaattccagcgggtgttccgcgcattctgccaatggctgggacgcaccgtggcgatcaaccgcaacggcgagtacctcaaggaagtgcgcgacctcggtctgcgcgacgcccgcgacgcgccgcagcgcggccacctgaccagccaggaactggccttccactccgatcgcgccgatctcaccgtgctcgcctgctggtcgccggcgcgtcggggcggcgccttccgcatccgttcctcggccgacgtcctcgccaccctggaagccgccaatccggcctggctgcccctgctcggccaaccgatcccccacgacctgcgcgacgaaggcgacgccgactacgcgctggtgccgctgctcacggaaaccccgcgaaccttcgtcttgcgctatatccgcaagttcaacgaatcggtgacgcgccacgggctaagcctcgccccgcaggtgcgaagcatgctcgacggcctggacgaggcgatcgaacgcgccgacggctatgccgaactggacttcagcaagggcatgctggtgctggtgaacaaccacaccaccctgcacgcgcgcaccgagttcagcgacgacgagcggcagcgccgctgcctgctgcgctgctggctgagcagcgagttcacccgcgaactgccggaaagcttcctgccgctgttccaccaggtagccgccggcagcctgcgcggcggcatccgtcccctcgcccaggagccccgcccgtga

SEQ ID NO: 320020 - DNA, 1230 bp, Pseudomonas aeruginosa
gtgagcgacaacaccttcagcgtgcaacgcttccgcgccctgccgacggaaatccacgtgatgctcgtcggtacgctgctgacccgcggcgcctacttcatggtctggccgttcctggcattgctgctgtggcgcgagttccggctgtccgccagcgccatcggcctgctgctggcgctggcgaccgtctgcggcgcgctcagcggcatctacaccggctggctgtcggaccgtttcgggcgcaagcgcctgatcttcttcggcaccagcctcagcgggctttccttcgtgttgctgggcttcagcggccagccgctgtcctacggactggcgatctccggggtgagcatcggctgcgccctgctcgaatccagttgcaaggcgctgatcggcgaccgcgtcgaggatcgccgctcgcgggaactggcgctctactgccggtacttcctgatcaacctcggcgccgccctcggcccgctgatcggcctgactctcggcgtcgccgcccaggccggcaccttcctggtcaccgcgctggtctacttctgctacagcctgctgctctggcgcctgctgcaccacctcgaacttaagcggcgcagccttgccccgcgatcctcgacggggttcctcgaagcctgcctgagcatggcccggcatcgcgccttcaccctgctgttgctgtgcaacatgctggccgcgctgatctacgccaccttcgattcgaccctcgtgcagtacctcacccgcagcggtctgcccgacgtggtcaacagcatcgccctgctggtgaccatcaacgcgctgaccatagtggtcgcccagtttcccctcctccgcctgctggaaaacaccggcaccggcggccgcctgatgctcggcatgctgctcatgctcctggcccagctaggcttcgcctggaccccggtgaccctgttcgccggcctggcgctggccacggtggtactcagcctcggcgaactgatcgtgttcccgaccttcagcgtggaggtcgaccaactgacccccgacgacttgcgcggcagctatttcggcgcggccaatctctacagcctcggcaccgcgctggcaccgctgtacggcgggatcatgctcgaccatgccggcagccaggcgctgtacctcggcctggccgcgctgtgcggggtgatcatgctgctgcaggtcggcgcggtcggcctgcgccaggccgagcgggccggcggatga

SEQ ID NO: 320021 - DNA, 636 bp, Pseudomonas aeruginosa
atgagcggcgcgctgctggtctcgggatttttcctgcgccgctccgcctggtccgtggaaggcgccggctggcgaagctgcgaccatctgcgcgacgcgcccggatgcgacctggcgcattggctggaccaggccgccgccacgctggccggcgaggagcgggtgatactctgcggccacagcttcggcggctacctggcgcaatgcctggcggcccgcctgggcgagcgcgccgcgcacctgtacctgttcagcgcgctggtcagcgagggcggcggcgcgctggaaagctaccaggacagcggccaggacaatctcctcgggctatgccgcctcgacccgctcggagggcgggtccgcctggaagaccgcgccggcttcctcgaactgctcggcgccgaggtgccgaccagcgccagcgaacccgcgcaattgctgatcgactcgccgcggcaggttcgtccagcctgcccggtcacctacgttgtggcggccgccgaccggctcagcccgccgccgctgcaacgtaccttcgcccaccgcctggacgcgcgagtgcgggaatacccgggcgggcacctcgccgcactggcggacccgcgcttccttcgcgcccttatcgaatctaataattag

SEQ ID NO: 320022 - DNA, 699 bp, Pseudomonas aeruginosa
atgatcgaacgtcgtcccttcgaccgtctgggccatgccaaccacggctggctgaacgcgcgtcatcatttttccttcgccgactactatgacccggagcgcgaggactggggccgcctgcgggtctggaacgatgacgagatcgccgccggcagcggcttcccgccgcacccgcaccgcgacatggagatcattacctatgtccgcgaaggcgcgatcacccaccaggacagcctgggcaacaagggccgcaccgaggccggcgacgtgcaggtgatgagcgccggtaccggcatcgtccattcggagtacaacctggaagccgagaccacccggatcttccagatctggatcatcccggaccgccgcggcgaccaaccgcgctggggctccaaaccgttcccgaaggccgagcgcgacggtcgtttcgtcactctcgccagcggcgacgagcaggacagcgaagcgctgcacatccgcgccgacgccgaggtcgccgcggtgaccctgaaggccggccagagcgccgagtacgccctggaaaacggtcgccgcgcctacctggtgccggccaccggcagcatcgaggtcaacggcgtgcgcgccgaggcccgcgatggcctggcggtacgcgacgaaccgaccctgaaggtcaccgccctggaagacagcgaagtgctgctggtggaagtggcctga

SEQ ID NO: 320023 - DNA, 936 bp, Pseudomonas aeruginosa
atgcgtgaactgcaacccctgctggagaaccacgggctgctcctgctgttcctcaacgtgctctgcgagcaggccgggctgccgattcccgcctacccggcgctgatcgtcgccggcgcgctggccatgcagggcgtcggcgcgccgctgggcgtggtcctgctggtggtggtgctcgcctgcctgctggcggacgtcgcctggtacctggccggacgccgctacggcggcttcctcctgcgcagcatctgcaaggtctcgctgtcccaggacagttgcatccgtcagagccagaacatgtacctgcgggtcggtccgagggcgctgctgatgtcgaagttcctgcccggcgccagtgcgttgtccaccaccctggccggcatgacccgcacccacctgcgccgcttcctcgcctacgacgccgccggctcggcactctgggccggttccgcgctgctgctgggggtgatcttcagcgatgcggtagaccacctgctggccctgctcagcgactacgcggccatcggcgcgctgctgatcgccggcgccttcgccgccttcatcgcctggaagctctggcagcgccagcgcctgctgtcgcgcagccggcggattccgcgaatcagcgtggaggaactggaaaaccttcgcgaacaggggcaattgccggtgatcctcgatgtccgcgcccatcacgaagacgagccgagcggcattccgggagccatcccggtggagctgaacgtgtcgctgaaggacctccccggcgacctcagggacgccagcatcgtcatctattgcgcctgtccccacgaactttccgccgcgatgctcgcccagcgcctcaacgcctccggcttcacccgcacctgggcgctggccggcggcctggacgcctggcgcaaggcctacgggcaggtcgtggcgaacgcctga

SEQ ID NO: 320024 - DNA, 1500 bp, Pseudomonas aeruginosa
atgcctgtcgaacacctggacgtactcatcgtcggcgccggattgtccggcgtcggcgccgcctaccacctgatgaagcattgccccggcaagagcttcgccctgctcgaagggcgcgcggcgatgggcggtacctgggacctgttccgctaccccggcatccgttccgactcggacatgttcaccctcggctacaacttcaagccatggagcgatcccaaggccatcgccgacggtccgtcgatccgccgctacatcgaggagaccgcacgggagaacggcatcgaccggaagatccgctaccgccaccgggtgctcagggccgactgggattccgccaatgcgcgctggaacctcgacgtgcagcgcggcgacgagcccgagccgctgcgcatgaccgcgcagttcctgctgatgtgcaccggctactaccgctacgaggccggctataccccggaattcgtcggtcgcgaggacttcgccgggcaggtcgtccatccgcagctgtggcccgaggacctcgactacagcggcaagaaggtggtggtgatcggtagcggcgcgaccgccgtgaccctggtgccgtcgctgaccgacaaggccgcccacgtcaccatgttgcagcgctcgccatcctacgtgatcaccctgccgcagaaggacgcgatctccaatttcctccgccgcttccttccggaaacctggatctaccgccaggcgcgggcgcgcaacgtggccatgcagatggtcttcttcatgctcgccaggaccttccccggcctggtccgcaaggccctgctcaagctggccagcctgcaactgggcaaacgcttcgacatgcgtcacttcagcccgcgctacaagccgtgggacgagcgggtctgcgcggtgccggacggcgacctgttcaaggtgctgcgcaagggcaaggcgtcggtggtcaccgagcacatcgaccgcttcgtcgagcggggcattcgcctgaagaccggcgaggtgctggaggcggacatcatcgtcaccgccaccggcctcgacctggtgatgttcggcggcgccgagctggcggtcgacggcaagccgttccaggtcaaccagagcatgggctatcgcggcatcatgctgcgcgacctgccaaacctggcggcggtggtcggctataccaacgccagttggacgctcaaggcggacctctccagcgaatacttctgccgcctgatcaatcacatggatgccaccggcatgcgccaggtgaccgcccgcgacagcaccggcgacgtgcgcgaggagcccttcctcaacctcgactccggctacatccagcgcgccgccgagcgcatgcccaagcagggcgaccggatgccctggaagctttaccagaactacgtcctcgacctggcgctgctgcgctacggcaaggtcgaggacggctacctggtgttctcctcgccggcgccgcagcggcaagccggcggcgcggcggtgcaggccctgggctga

SEQ ID NO: 320025 - DNA, 1842 bp, Pseudomonas aeruginosa
gtggaacacggaagcagttttctccagtccggcgtggtcttcctgatcgcggcggtgttcatggtgccgctggccaagcgcctgcaactgggcgcggtgctcggctacctgctggccggcgtgctgatcggtcccagcgtgctgggcctggtggacaacccggaaagcgtcgcgcagatctccgagatgggcgtggtattgctgctgttcatcatcggcctggagctgtcgccgcggcgcctgtgggtgatgcgcaagtcggtgttcggcgtcggcctgctgcaggtgctgctgaccggcctggtgatcggcaccgtggccctggtcggcttcgaccagccggtgaacagcgcggtggtgctcggcctgggcctggcgctgtcgtccaccgccttcggcctgcagatcctcgccgagcgcaaggaactgacccagccccatggccgcctggccttcgccatcctgctgttccaggacatcgcggcgatcccgctgatcgccatgatcccgctgctcagcggtgcgcacagcgacgccggcggcagcgaactgacccagaccctcaaggtggtcggcagcatcgccgcggtggtggtcggtggccgctacctgctgcgcccggtgttccgcatcgtcgcccagaccaagctgcaggacatgtccaccgccaccgcgctgctggtggtgatgggcaccgcgctgctgatggagctggccggcgtgtccatggccctcggtgccttcctcgccggcctgctgctggccgactcggagtaccgccacgaactggaggcgcagatcgagccgttcaagggcctgttgctcggcctgttcttcatcagcgtggggatgagcgcggacatcagcctgctgctcaagtcgccgtggatggtgctcggcctgaccgtgctgctgatcgccctgaaggcgccggtgctgtacttcgtcggacgcatttccggcggcctcgacaaggcctcggcgctgcgcctgggcgtggtcctggcggccggcggcgagttcgccttcgtcgtgttcaagatggcccgcgaccagggcctgttccagaacgacctgcacaacctgctggtgctttccatcaccctgtcgatggctctgaccccgttgctggtactcggcctcgcgcgcctgctggcgaaggagccggaggcgacgaagccgccgccggaaatggaacgcatcgacaacgacgacaccccgcgcgtggtgatcgccggggtcggccgcatgggccagatcgtcgctcgcgtgctgcgcgcccagcgcgtgccgttcatcgccctggacacctcggtggagaccatcgagctgacccgtaccctcggcgcgatcccgatcttctacggcgacccgatgcgcccggagatccttcgcgcggcccaggtagagaaggccgagttcttcgtcatcgccaccgatgacccggagaccaacatcgagacggccaagcgcgtgcgcaagctgtatccgcacctgaagatcatcgctcgcgcgcgtaaccgccagcacgtccacctgttgctcgacgccggggtcgagccggtgcgcgagaccttcttctccagcctggagatgagccgcatggtgctctgcggcctgggtctgagcgaggaacaggcggacgcgcggatccgtcgtttccgccggcacgacgaagaggtcctggcctcccagcacctgttctacaacgaccgcgacgcgctgatcaaaagcgctcgcgaggcgcgggtcgagctggagacgctgttccagaccgaccagttggaagaccgtggcgcggtagcggcggagaccccggagaaaccttcccgcgcctcctag

SEQ ID NO: 320026 - DNA, 474 bp, Pseudomonas aeruginosa
atgcaattcgaacacctggtccaggtcaacgaccggacacttgtcgacctgccggtcctcgaccggctgcaactctgggaaggcctggtctgccgtgcgcgcgagccacagtatttcgtcgtcggcctggagcgtttcgagatcctcgtcgatgacggcgaccgcctgcaccggcgcctgtacctgccgggtctggtggtcgaggacgaagtcgtgctgaaggcgccggacagtgcccactacagtatcaagccgagcgccgaggtggccggcggcagcctcgacatgaccatcgaggagccggaacccggctcgctgttcgtgcgtttcgcctactgcacccgctacctgcagccgctgggcgacgaactaccctacgacgccttcgtcaagcaggcctatatcgccatggatgtggagaccatcgccaccatccgcgaccggttcggcgccagcgccgccagcgggagttga

SEQ ID NO: 320027 - DNA, 948 bp, Pseudomonas aeruginosa
atgagcaataccgaagagcgttgcgacctgtcctcctcgcgggactgtccggagcgccgcgaacacctgctgcaacgggtcaccgcgcgtgccgcggaaatcggcggcgggatcaccgtcagtcggctgatgccgtcgcgccagcgtcggatgatcggtgcctggtgcttcctcgaccatgccggtcccgccgaattcgaacctggcggcggactggccgtgggcccgcacccgcacatcggcctgcagacctttacctggatgatccagggcgaggcgttgcaccgcgacagcctgggcaacgtccaggtgatccgccccggccaggtcaacctgatgaccgccggtcatggcatcgcccacaccgaggagtcgctgcccgacgagcgccacgcccacgccgcgcagttgtggatcgcgctgccctacgagcagcgcgacatcgccccggccttcgaccatcatcccgacctgccgcgctggcaggagcagggggtcaccttcaccctgctggccggtgcgctggccgggcgacaggcgccgtgccggctctactcgccgctgctcggtgccgacctggcctgccacgacgcctcgaccctgcaactgacgctcgacccgcacttcgagtacggcctgctgccgctggaaggcgggttggaagtgggcggcgagcatttcgcggtgaacgaactggcctacctgggcgacggccgcgacggcctgcaactgcaactcgaccctggcgcgcgggtgctgttgctgggtggcgcaccgttcggtgcggagatcttcatgtggtggaacttcgtcggccacagcaagggcgagatcgcccgggcgcagaaggcctgggaggagggggatgcccgcttcggccggctcgacgccctggaagggccgcgcttgagcgctccgccgattccctggaagatcgacgccgagtga

SEQ ID NO: 320028 - DNA, 558 bp, Pseudomonas aeruginosa
atgagcgacgacatcaaggtattgggcatttccggcagcctgcgcagcggctcctacaacagcgcggcgctgcaggaggcgattggcctggtcccgccgggcatgagcatcgagctggcggacatctccggcatcccgctgtacaacgaggacgtctacgccctcggcttcccgcccgcggtggaacgcttccgcgagcagatccgcgcggcggacgcgctgctgttcgccaccccggaatacaactattcgatggccggggtgctgaagaatgccatcgactgggcctcgcggccgccggagcagccgttctccggcaagccggcggcgatcctcggtgccagtgccgggcgtttcggcaccgcgcgggcgcagtatcacttgcgccagacgctggtgttcctcgacgttcatccgctgaacaagccggaagtgatgatctccagcgcgcagaacgccttcgacgcccagggccggctgctcgacgacaaggcgcgcgagctgatccagcagcagttgcaggccctgcagctatgggtgcgccgcctgcgcggttga

SEQ ID NO: 320029 - DNA, 408 bp, Pseudomonas aeruginosa
atggctacccaggtcgtcaacgcttccctcggcaccaccccttatcgcgtgaccctcggcgacgacagccaccagtggctgagcgacgtgccggccgccctcggcggcgccgacagcggtccctcgccgcacgagatcctgctctcggcgctgggcgcctgcacggcgatcaccgtggcgatgtacgcgcagcgcaaggagtggccgctggagggtatcgacgtgcaactgaacatcgtcgaggaacgcaccaagccggagcccttcacccatatccgccgcgacatccgcctggccggcgatctcgacgccgagcagcgccagcgtctgctggagatcgccaatgcctgcccgatccatcgtgtactctccggagaggtcagcgtcagcagccagctacgcgactga

SEQ ID NO: 320030 - DNA, 618 bp, Pseudomonas aeruginosa
atgtccttcacctacaagcgactcgacaagaacgatgcggcggtgctgttcgtcgaccaccaggcaggcctgctctccctggtccgcgatttcagcccggacgagttcaagaacaacgtcctggcattggccgacatcgccaggttcttcaacctgccgaccatcctcaccaccagcttcgaggatggccccaacggcccgctggtgccggaactcaaggaaatgtttccgcaggccccgtacatcgcccgccccggcaacatcaacgcctgggacaacgaggacttcgtcaaggcagtcaaggccaccggcaagaagcaactgatcatcgccggcgtggtgaccgatgtctgcgtagccttcccgaccctctcggcgctggaggaggggtttgacgtattcgtcgtcaccgacgcctccggcaccttcaacccggtggtgcgcgacgccgcctgggcgcgcatgaccgccgccggcgcgcaactgatgaactggttcagcgtcggctgcgaactgcaccgcgactggcgcaacgacatcgaaggcttcggtgccatcctcggcggccacctgccggcgtacgccaacctgatccagagcttcggcacgaagaagtaa

SEQ ID NO: 320031 - DNA, 915 bp, Pseudomonas aeruginosa
atgagcctgcgccttgaagacatacaggccttcctcaacgtggtcgagctgggcagcatcagcgccgccgccgaacgcatgagcctgtccaagtccgtgatcagcaaacgcgtcagcgacctggagcgccacctcggcgtgcgcctgctctaccgctcgacgcgcaacgtcgagccgaccgaggccggcggcttcttctacaagtcggccaaggcctcgctgcaggacctgaacaacgccgcggaaagcgtggccctgcgcgagaacgacctgtgcggggaattgcgggtgatggcgccgatgagcttcggcacgctctggctggggccgctggtgatggaattcatggcgcgcaacccgcgcctggaagtggtcctgcaactggacgaccggatcgtcgacttcgagaaggaaggctacgacctggcgatccgcatcacccgcctgcaggacagctcgctgatcgcccgccaactgggcaccagccgccgggtagtgtgttgcagcccggaatacctggaacggcacggcccgctgcaacgcatcgaagacatcctctgccatccctgcatcggctacagccacaacaccccgtcgcagctatggagcttcgagccgcgggtggccggcgagccggcgcggatgatcaccccgcgcggacgcttcaacaccaacaacggccagaccatgcgcgacgccgcggtgcgtggcctgggcctggcgatgctgccgctgttcatcgccgccgaggacctggccgccggccggctggtcgaggccctgccgcaggagcggccgctggacgacctgatctacgccatgtattcgcgagcggcaaccctctcgccgaaggtgaagctgttcgtccagtttctccagcaggccctgggcagcccgccgtggggcgtgcgctga

SEQ ID NO: 320032 - DNA, 663 bp, Pseudomonas aeruginosa
atgaccacccgcaccctcaacctcgacgacaacctctaccgctacctgctggacgtttcgctgcgggaaaccccgctgatgacccgcctgcgcgaggaaaccgcgaagctgcccaacgcacgctggcagatcgcccccgagcagggccagttcatcgccttgctgctgaccctgatcggcgcgcggcgggcgctggaggtcggcaccttcaccggctacagcgccctgtgcatggctaccgcccttggcgagcaggggcgtcttacctgttgcgacctgcccggcgactaccacctgactgcgcgccgctactggcgcgaagccgctgtcgaggagcgcatcgagctacgcctcgggcccgccctggaaaccctgcgtgcgttgctcgacgaaggcctggccgggcagttcgacctggccttcatcgacgccgacaaggccaactaccccgaatacctggaggctgcgctggcgctggtgcgccagggtgggctggtgcttttcgacaacgtgctgtggagcggccgggtgctcgaagcgcagccgaagagtgcggatacccgcggcatccagcagctcaacctggcgctgaagaacgacgcgcgggtggactactcgctgctgccgatcggcgacgggctgagcgtctgtcgcaagcgctga

SEQ ID NO: 320033 - DNA, 534 bp, Pseudomonas aeruginosa
atgcatgcactggcccgattctcgatcctcgcctttgctgcgctgcttaccgcctgcgccagcaaagcgccgccccccgcgcccgccaaacaggtcgtattccgtccggcgacgaatttctcgcccgccgccgacgatgtgctgttccgtgccctcggcctggtcggcacgccctaccgctggggcggcaacacgcccgattcgggcttcgattgcagcggcctgatcaacttcgtctaccgcgacatgaccggcatcaagctgccgcgctcgacccgcgagatgatttccatgcgcgcgcccagcgtgccggtgcaggccctgcagaccggcgacctggtgttcttcgccacctccggtggtcgcaccgtgagccatgccggcatctacgtcggcgagggtcgcttcgtgcatgcgccgcgcaccggcggcacggtgcgcctggacagcctgcagaacagctactggcaacgcgcgtacctggacgccaagcgcgtgctggtcgcgccgtcgcccttggcgcggatgccctga

SEQ ID NO: 320034 - DNA, 612 bp, Pseudomonas aeruginosa
atgcttaaacgcttagcacccctcgtgcccatgagtttcgttctgctgctggccgcttgcgccagccattcgccggagccgcaggtcgccaaagagccgaccgcagccaagagcagcatcgacgtcgaacgcgacgcgatcgcttggcaggatgttgaggacgaaggggcggacaattcatcggctggtacgcctgcgctggcgtccagcatcctcgagcgcgctttcgaactgatcggtacgccgtaccgtttcggcggtacgacggcgaaaggcttcgattgcagcggcttcgtcggctacctgttccgcgaggaggccggcatcaagctgccgcgctccacccgcgaactcatcgatatggacgtaccgctggtctccaaggacgagctgcagcccggcgacctgctgttcttcaacaaccgtggccgtggccgcgtcagccacgccggcatctacatcggcgatggccagttcatccattccgccagccgtcgcggcggcggggtgcgggtggacagcctggactccagctactggagcctgagctacatggaagccaagcgggtgctcgaacccggctacaaggatgccctgacgagcaagcgctaa

SEQ ID NO: 320035 - DNA, 771 bp, Pseudomonas aeruginosa
atggacagccacagcccgatcgccaccgtcgcccaggccctgcggcgcgccgaacgcatcctggtcatcactggcgccggcctctccgcggattccggtatgcccacctatcgcggcctaggcggtctctacaacggtcgcacggaagagggcctgccgatcgaggcggcactttccggaccgatgctgcggcgcgatccggcgctgtgctggaagtacctcgcggaactcggcaaggcttgcctggcggcccgacccaacgccggccacgaagccatcgccgagttgcagaagcacaagccggaatgctgggtgctgacccagaacatcgacggcttccatcgccaggccggctcgccggccgagcggctgatcgagatccatggcgaactggcgccgctctactgccagtcctgcggtgccgagagcggcggcctggaggagcatctgcacggccagttgccgccgcgctgcgccgcttgcggtggggtgctgcggccgccggtggtgctgttcgaggaaatgttgccggaagaggcgatcgataccctgtaccgcgaattgcgcaaaggcttcgatgcggtgctggtggtgggaaccaccgcgagcttcccctatatcgtcgaaccggtgctgcgcacgcggcaggcgggaggcttcaccgcggaggtgaatcctggcgtgaccgacctcagcgagcgggtcgatgtgaaaatgacaggacgagccttagacatcatgccgcaggtggtaagtcacatttatcgataa

SEQ ID NO: 320036 - DNA, 1401 bp, Pseudomonas aeruginosa
atggcgcttgtcgaggagccgacgatttccacgcgaagcggtgaactggcctggttggtggactgcctggcgccgattttcgacggcctgcggcaaccggtcacggtggttgacccctccggtcgcttcgtctactacaaccgtgccagcggcctgctcgatggtctcgacccgcagcgggcgttgggtatgcacctgttgcagagcgctccctggctggcggccgagcaaagcacgctgttgcgttgcctggccgaagggcggccgtcgatcgatacgctgcaggcctacgtgggggccggcggcgagctgttgcagtatcgccaccgggcgatcccgctgcgcgggcgcgacggttgcctgctcggcgcgatggaactcggcgaagtcgtcgccgagaccgaagaggccgcaggcctggcggattgcccgaacatcctgagcgtggcgccgagcctgctgcggcagttgcagcgcctggacgttttcgccgccaccgacctgccgctgctgatccatggcgagaccggcaccggcaaggaactgttcgcccgtcgcgcccatgccctgagcccgcgacgcagcggtccgatgatcagcctgaactgcgcagcgattcccgagacgctgctggaaagtaccctgttcggcaccacccgcggcgctttcaccggcgccgagaaccgcaagggcatgttcgccctggcgcagggcggcagcttgttcctcgacgagatcaattccatgccgatggccatgcagagcaagctgctgcgggtcctgcaggacggcagctacctgcctctgggcagcctgagcccgcagcgggccgatgtgcgcctgatcgcggcgagcaaccagccgccgcgccaggcgatcgccgagggacgcctgcgcgaggacctgtactaccgtctggacgtgggcagcctgtgcatcccgccgctgcgcgagcgccccggcgatgtggaactgctggcacgggcgttcgtccgtcgcgatgcgcgcagcctcaacccgcgtgtcaccgctcttggcgagcgggcgctggcgcagttgctggcctgcgactggccgggcaacgtccggcaactggaaaacgtgatccggcgcagcctgttgctgcacggggagggcggcgcactgctggatgaggtggcgttcgccgacgacggcgccgaggccgtgggcggcgaggccgcgctctcgatgaacagcgcggcggtcggaggcctgcgcgaggcgctggcgcaacaggagcgcaacctgatagaagacgccttgcgccaggcgcgcggcaatctctcccgggccgccgcccggttgcggattccgcgcacgaccctgctcgggcgcatgcgccggctcggcttgccggcttccctcgatccgccagcctga

SEQ ID NO: 320037 - DNA, 765 bp, Pseudomonas aeruginosa
atgttcaagcacatcatcgctcgcacgcccgcccgcagcctggtcgacggcctgacctccagccacctcggcaagccggactacgccaaggccctggagcagcacaacgcctacatccgcgccttgcagacctgcgacgtggacatcaccctgctgccgccggacgaacgcttccccgactcggtgttcgtcgaggacccggtgctctgcacctcgcgctgcgccatcatcacccgccccggcgccgaatcgcggcgcggcgagaccgagatcatcgaggaaaccgtgcagcgcttctatccgggcaaggtcgagcgcatcgaggcacccggcacggtggaagccggcgacatcatgatggtcggcgaccacttctacatcggcgaatcggcccgcaccaacgccgagggcgcccggcagatgatcgcgatcctggagaaacatggcctcagcggctcggtggtgcgcctggaaaaggtcctgcacctgaagaccgggctcgcctacctggaacacaacaacctgctggccgccggcgagttcgtcagcaagccggagttccaggacttcaacatcatcgagatccccgaagaggagtcctacgccgccaactgcatctgggtcaacgaaagggtgatcatgcccgccggctatccccggacccgcgagaagatcgcccgcctcggctaccgggtgatcgaggtggacacctccgaatatcgcaagatcgacggcggcgtcagttgcatgtcgctgcgcttctga

SEQ ID NO: 320038 - DNA, 1419 bp, Pseudomonas aeruginosa
atggccgattcggacaagggaaaactggggctgccggcgctgaccgcgctggtggtgggcggcatcatcggcagcggcatcttcagcctgccgcagaacatggccgaaggcgcaggcgccggcgcgatcctgatcgcctgggcgatcaccttcgtcggcatgctgaccctgacgcggatattccagtggctgtcgaccacccgccccgaactggacgacggcgtctacggctacgcccgcgaaggcttcggcgaatacctggggttcaatgccgcctggggctactggatttccgcctgggtcggcaacgccggctacctggtggtgctgttcagcgccctcggctcgttcggcgcgctggccttcttcggcgacggaaccacctggccggcgctgctcggcgaattgacggtgctctggctgatgcatgccttcgtcctccacggcgtgcacaacgcggcgatcaccaacgccatcgtgaccctcgccaaggtggtgccgatcgccctgttcatcctctgcgtagccctggccttccgcatcgagacctttcacctggacttctggggcagcccggccctgggcagcgtcacccgccaggtggaaaccaccatgctctacaccgtctgggtattcctcggcatcgagagcgccacggtctatgccagccacgcgcggcacgcggccgatgtcagccgcgcaaccctgctcggcttcgtggtcaccctgctgttgctggtctgcgtctcggtgctgtcgctgggcgtggtgccgcagcacgaactggcgcagatgaagaacccctcgatggcccaggtgatggccgcggcggtgggcccctggggcgccacgctgatcaacgtcgggctgatcgtctcggtcggcggcgcgctgctggcctggaccatgctcgcggtggaaatgctctacctggccagccgtggcccaacgcacaccgcgccggcactgttcggccgcaccaatgcggtggaaaccccggcgccggcactgtggctgaccagcacgctgatctctgcgctgctgctggtggccttcctcaacgcctcgggctacaacgcgctgatccagttggccacctcgatggcgctgatcccctacctgctctgcgccggcttctgcctgaagctggtggcgcgccgcccacactcgggcgcgatgctggcgctggcgctgttggggacgctctacggggtctggctgatctacgccgccgggctgaaatacctgctgctgtcgatgatcctctacgcgccaggcctgggcttcttcctgcatgcccgtcgccagcgcggcctgccggcgttcggcaatcgcgccgaaggcagcgtcgcggcgctggtgctggtcctcgcgctggcggcgctgtggatgatcggcagcggtcggctgaccctctag

SEQ ID NO: 320039 - DNA, 672 bp, Pseudomonas aeruginosa
atgcgcgactacgcctggatgtacgaatactgcctgaaccgcttcggctccagggaggcgctggaagcgcgcctgccgcagccgaagagcgccgccgagctgcgcgcggtgggtgacgaccgctacctgtcgctgatcagcctgcggatcttccgcgccggcctcaagcacagcctggtggacgccaagtggccggccttcgaggaagtgttcttcggcttcgatccgcagaaggtcgtgctcatgagcgccgagcatctcgagcggctgatgcaggacgcccgcctgatccgccacctgggcaagctcaagagcgtgccgcgcaatgcgcagatggtgctcgacctggcccgcgaacatggcagcttcggcaacttcctcgcggattggccggaaaccgacatcgtcggcctgtggaagctgctgagcaagcgcggcaaccagctcggcggcttgtcggcgccgcgtttcctgcggatggccggcaaggacaccttcattcccagcgacgacatggtcgccgcgctgaaggcccaggagatcatcgacaaaccgcccaccagcctcaaggacctggcggccgtccagggagccttcaaccagtggcgcgaggagagcggccggccgctgtgccagctgtcggtgatgctggcacatacggtcaatcattga

SEQ ID NO: 320040 - DNA, 825 bp, Pseudomonas aeruginosa
atgggcaccctttcggtcaatcagaacaaactgcagaagcgcctgcgccgcctggccggcgaggccatcaccgacctcaacatgatcgaggatggcgacaaggtcatggtctgcctgtccggcggcaaggacagctacaccatgctcgacatcctgctctacctgcagaaggtcgcgccgatccgcttcgagatcgtcgcggtgaacatggaccagaagcagcccggttttcccgagcatgtcctgccggagtacctgaagtcgatcggcgtggagtaccacatcgtcgagaaggacacctactcggtggtcaaggagaagatcccggaaggcaagaccacctgctcgctgtgctcgcgcctgcgccgtggcacgctgtacaccttcgccgacgagatcggcgcgaccaagatggccctcggtcaccatcgcgacgacatcctcgagaccttcttcctcaacatgttctacggcggcaccctgaaggccatgccgccgaagctgctggccgacgacgggcgcaacgtggtgatccggccgctggcctattgcagcgagaaggacatcgaggcctattcccagctcaaggagtttccgatcatcccctgcaacctctgcggttcgcaggagaacctgcagcgccaggtggtcaaggaaatgctgctggaatgggaacgcaagtcgccggggcgtaccgagatcatgttccgcgccctgcagaacgtggtgccgtcgcaactggccgaccgcaacctgttcgacttcgccaacctgcgcatcgacgagaacgccacgccgcgcttcctcgacgtgatgaacctctga

SEQ ID NO: 320041 - DNA, 594 bp, Pseudomonas aeruginosa
atgactcccgacctcgaccaccgcctcgacctcgccgggcagatcttctgcctgctgcgcgagcatcccgaggggctttccgaataccagttgatccagctgctgaaggcccgccattcgacgcatatcccccatcgcgaactggccgacaagctggtgctgttccgcacccatttcctcctgttcaacgcgctctaccacctgcgcgaccacctctgggccgagcgcgaggcgcacttggagatcagcccgctgagcctgcgcctgcatccttacgtggatggcacgcaggcgctggaacagggcgatccgctgcgcgactactacctcgacctgcgtcacctgggggagaccagcgaggccgacgtcgagcggctgctgcagagtttctggacgcgcatgcagggcagcgaggagaaggctgccgccctcgccctgttcgagctggaaggcgcggtcgactatcccgccatcaagctgcgctaccggcaactggtcagccagcaccatcccgaccgcggcggcagcactgcgcgcctgcaatcgatcaacaaggcgatggaaatactgcaacgctattacagccggccgtga

SEQ ID NO: 320042 - DNA, 600 bp, Pseudomonas aeruginosa
atgatccatcatgtatgggggctcttcacccatcccgatcaggaatggcaggaaatccgtggcgaagaagaaagcatcagccacatgtacctgacccacatcctgatcctggctgccattccggcgatttccgcctatatcggcacgacccaggtcggctgggtggtcggcggcggcgatccggtcaagctgacccaggccagcgcgttgcagatgacggtcctcacctacctggcgatgctcgccggggtggcggtgatgggcgcgttcatccactggatggcgcggacctacgacgccaacccgagcctgacccagtgcatcgtgttcgccgcctacaacgccacgccgctgttcatcgccgggctggcggcgctgtatccgcacctctggctgggaatgatcgtcggggtggcggcgatcagctacacggtctacctgctctacgtggggattcccaccttcatgaacatccacaaggacgaaggcttcctgttctccagctcggtgctggcggtgggcctggtggtgctggtggcgatgatcgccctgtcggtgatcctctggggcagcggggtcggcccggaatacaccagctga

SEQ ID NO: 320043 - DNA, 498 bp, Pseudomonas aeruginosa
atgcccgaacacctcaacgcccgcgtcgaggcctgctatcggcaggccgaacacttcttccaacgcagcttcccccgcccgaccgtcagcttccgcctgcgcggccagaaagccggggtcgcccacctcgacgagaacctgctgcgcttcaatccccagctgtaccgcgagaatcgcgagcacttcctggaacagaccgtggcccacgaagtcgcgcacctgatcgcgcaccagttgttcggcccgcgcatccgcccccacggcgaggagtggcagttgatcatgcgcggcatctacggcctgccgccggaccgctgccacacctacgcggtcaagcgccgcgccaccacccgctacctgtaccgctgccattgcccggagcacaacgacttcccgttctccccgcaacgccacaccctggtggccaaggggcgccgctactactgccggcgctgcaaggcgaccctggtgttcaccggcgaagtgctccgcgagtga

SEQ ID NO: 320044 - DNA, 1182 bp, Pseudomonas aeruginosa
atgaaaggcccgttgtcatcgttgaaagtgctggatttctcgaccctgttgccggggccgttcgcctcgctgctgctggccgacatgggggcggacgtgctgcgcgtggagtcgcccgggcgcatggacctggtgcgggtgctgccgccgcacgtcgacggcacctcggccagccatgcctacctgaaccgcaacaagcgttccatcggcctcgacctgaagcggcagggcgcgcgcgaggtggtgctggagctggtacgcgaatacgacatcgtcctcgaacagttccgtccgggggtgatggacaagctcggcgtcggctacgaggcgctgaaggcggcgaacccgcggctgatctacgtggccatcaccggctacggccagaccgggccgtaccgcgagcgcgccgggcatgacatcaactacctggcgctggccggcgtcgccagctacaccgggcgccgcgagcgtggcccgttgccgctgggggtgcaactggcggacctcgccggcggttcgttgcatggcgtgatgggcctgctggcggcggtcatccaccggcagcagaccggcgaggggcagttcgtcgacatcagcatgaccgactgcgccttcagcctgaacggcatggccggtgcaggctatctcgcggccggggtcgagccggagatggaggcgctggcgctgaacggcggcagcttctacgactactaccgcacccgcgatggccgctggttctcggtgggcagcctggaaccgcagttcatgcagcagttctgcgccgccatcggccgcccggaactggccgcccgcggcctgtcgccgaagccggaagagcagcgggcgctgaagcgcgagatcgagatggagttcgagaaacgcgacttcgccgaatggcaggcggtgttcgccgccctggatgcctgcgtggagccgctgctgccgctctccgaggcgctggaacacccgcaattgcaggcgcgcgggctggtcgcccgggtgccgctggcggacggcggcagccaggcgcagatggcctgtccgatcaagttttccgccggcctgccggcgcctcgccacatcggcgcggcgctcggcgccgacaccgtggcggtgctcgaaggcctgggctactccgccgaacggatcgccgagctgaaggcggccggggccatcgcctga

SEQ ID NO: 320045 - DNA, 1140 bp, Pseudomonas aeruginosa
atgcaacggcagatcttcgagaccgaacacaacctgttccgcgatgccttccgcgcctttctcgacaaagaggtggtgccgcaccaggacgcctgggaagaggccggggtggtcgaccgcgctgtctggaggaaggcgggggagatgggcttcctgctgccctgggcggacgaggagtacggtggcgccgggctcaaggacttccgctacgagcagatcatgtgcgaggagctggcgcggatcaacgaaccgggcttcatgatcccgctgcactcggcgttgtgcgggccgtacatcgccgaatacggtagcgccgagcagaaggcccgcctgttgccggggatcgtccgtggcgagaccatcctcgccgtggccatgaccgagccgtccgccggctccgacctggccggcatgcgcagcaccgcggtggacaagggtgaccactggctgctcaacggctccaaggtgttcatctccaacggcctgctggccgacctggtgatcgtcgcggcgaagaccgatccggcgaacaagcacgccatgggcctgttcctggtggagcgcggcatgcaaggcttcgagcgcgggcgcaacctgaagaagctcggcatgaagagccaggacaccgccgagctgttcttcaacaatgtgcgggtgccgaaggaaaacctgctgggcgacgccaagggcggcttcttctacctgatgaacatgctcgcccaggagcgcctgaccaacgcctgcggcgcggtggccggggccgaggcggcgttgcaggcgaccatcgactacgtgaaggagcgccaggccttcggccggccggtggcgcacttccagaacacccgcttcaagctcgccgaaatgcgtacccagatcgacgtggcgcaggtcttcaccgaccgctgcgtgatggaccacaaccagaagaagctgtcccccgaggtcgccgccgaagccaagctgttcaccaccgagctgctgggcaaggtggtcgacgaaggcgtgcaactgcatggcggctggggctacatgtgggagtatccgatctgcaggatgtacgccaacgcccgcatccagcggatcttcgccggtacctcggagatcatgaaagagatcatcagccgcggcatgaagctctga

SEQ ID NO: 320046 - DNA, 1020 bp, Pseudomonas aeruginosa
atgagcgccctgctgcaaggcgcctcggcgccggccttcgtcgggcaccctggctatcggcgcatgttcgccgcagacgcgctgaccctgggcctgttcctgccgttgcgtttctaccagggcgacatgcgggtgctgctgggccaggcgcggctggtcgaagaaatcgatcgactgggattcgccgccgtctgggtacgcgacgtaccgctgttcgacccacgcttcggcgatgccggacaagtgttcgacccgttcacctaccttggctatctggccgcgcggacccgccgtatcgccctggccaccggcagcgcggtgctttccctgcgccaaccggtcgacctggccaaggccgcggcgagcgtcgaccggttgtccggcggacgcctggtgctgggcctcgcctccggcgaccggccggtggagttccccgcctacgggttggagcatgctcagcgcggcgagcggttcgcccagggcctggactacctgcgccaactgctgcacggctgccggcacgtcgcctcgccgctcggtacgctggacgacgccgaactgttgccgcgtccgccggccggcgccatcccgctggtcgtcaccggctccgcgcggcagccggcggactggctggctcgccaggcggatggctggctgacctatccggagtcgactgtcgatgcgtccggaccacgtcgcctggcccggaagatccgcgcctggaggatgtccatcgcggacggcgggttccgcccgcacatgaccaacgaatggctggacctggtagacgacccggcgtatccgcgtacgccgttgcacggcggctacgtcctgcgcaccgggcgcaacggcctgatcgagctgctcggcgaatggcgtgcgtcgggcgtcaaccatgccgccctgggcatccagttcgccgccaggccggcagcggaagtcatccaggaactggccgaggaggtgctgccgttgttcccgtcccacccgggcgtgcagccggcgagcatggactggtag

SEQ ID NO: 320047 - DNA, 630 bp, Pseudomonas aeruginosa
atgccttccctccagctctacagcgacagttcacccaacggattcaagatcaccatcgccctcgaggaactggggctgccctacgcactgcaccacgttcgcatcgaccatggcgagcaacgccgcccggaattcctgcgcctgaatccacatggccggataccggtgctggtagaccgggccgccggcatcaccctgttcgagtcggcggcgatcctgcagtacctggcggagaccagcgggcggttgcttcccgacgccccccgggaacgctgggaggccctgacctggctgactttccatgcttccagcatggggcccatcctcggccagcgcgtgcatttcgagatattcgccgaagagcggtacccgccggccatcgaacgctatcggcggctctccgaggaggttttcgccaccctcgaccagcgcctggccggacggtcctggctggccggtgagcaatactccatcgccgatatcgccaccttcggctggacccatacggcgcggatcgtcgacttcgacttcagccattatcgccacctggacgactggcaccggcgcatggccctgcggcctgcggtgcagcgcgggatcctcctgccggaaccggcggtgggtccatga

SEQ ID NO: 320048 - DNA, 891 bp, Pseudomonas aeruginosa
atgggtgccgtcctcccgctcctcgcgctacgcgctttcgtcgaaaccgcccgccatggcaatctcacccgcgcggccgcggccatgggcgtcactcccggcgcggtaagccagcagctcagggctctgcaggcgcgcaccggcgtcgtcctgttccagcgcttcagccatggcatgcgcctgacgccggagggcgagcaggtctatcccggcctccgccaggccttcgagcagatcaccgcgagccttgcccagctggaggcgatcaatgcccgccagaccctcacggtcagcaccgagccctccttcgccgccacatggctggtgccgcgcctcggtcaattcagcgcgtcgcacccgcaggtggaagtccgcgtggaggctacggcactgctcgccgacctgcgccgggaacgaatcgacgtcgccatccgccacgggctcggcgactaccccggactcgacgtgcaggcgctgatggccccgccgctgatcccggtggccagcccgcgcctgctggcggaaggccctgagatccgcgaagcgatcgattgcctggcctacccgctgttgcaggagtcggagcgcaatgactggcgcctgtggctgcgggcgatgggggtggaggacgacccgcgcagcgagagaggtccggctttcgccgacgacctgctgctggttcgcgccgccgaggccggccagggtatcgcgctggtacgggagatccatgcccgcgccgagatcgccagcggccgcctggcggtcgccctcgagcggccctggccgagccgcttcgcctattacgcggtgagcctgccaggagcggcgcaacgagcgcccctctcgctgttcctcgcctggctgcgcgagcaggccgccgccgaggcataa

SEQ ID NO: 320049 - DNA, 1311 bp, Pseudomonas aeruginosa
atgaccaaacaacccttctacaagagcctgtacgtgcaggttctggtcgccatcgccatcggtatcgcgctcggccactggtacccggaaacggcggtggcgatgaagccgttcggcgacggcttcgtcaagctgatcaagatggccatcgcgccgatcatcttctgcaccgtggtcaccggcatcgccggcatgcagagcatgaagtcggtcggcaagaccggcggcatggcgctgctgtacttcgaggtcgtctccaccgtggccctgatcatcggcctggtagtggtcaacgtggtccagccgggcgccggcatgcacgtcgacccgaacaccctcgacaccagcaagatcgctgcctacgccgctgccggcgagaagcagagcactgtcgacttcctgatgaacgtgatccccggcaccgtggtcggcgcgttcgccaacggcgacatcctccaggtcctgttcttctccgtgctcttcggctacgccctgcatcgcctgggcagctacggcaagccggtgttcgagttcatcgagcgcgtctcccacgtgatgttcaacatcatcaacgtgatcatgaaggtcgccccgatcggcgcgttcggcgccatggccttcaccatcggcgcctacggcgtgggttcgctggtgcagctcggccaactgatgctgtgcttctacatcacctgcatcctgttcgtgctcatcgtcctcggcggcatcgcccgcgcccacggcttcagcatcctgcgcttcatcaggtacatccgcgaggaactgctgatcgtgctgggcacctcgtcttccgagtcggccctgccgcggatgatcgacaagatggagaagctcggctgcaacaagtcggtggtcggcctggtgattcccaccggttactccttcaacctcgacggcacctcgatctacctgaccatggccgcggtgttcatcgcccaggccaccgatacaccgatggacatcacccaccagatcaccctgctgctggtgctgctgatcgcttccaagggcgccgccggcgtcaccggcagcggcttcatcgtgctcgccgcgaccctttccgccgtcggccacctgccggtcgccggcctggcgctgatcctcggcatcgaccgcttcatgtccgaagcccgcgcgctgaccaacctggtcggcaacggcgtggccacggtagtggtttccaagtggtgcaagcagctcgacgagggcactttgcagcgcgaactggccggcgagggcaacgcttcgtcgcctgccagcgatattccggtgggcggccgcgaagcggtctaa

SEQ ID NO: 320050 - DNA, 1002 bp, Pseudomonas aeruginosa
atgcgtgagcgcaccatcgccagccatttcgtccgcgccgcgttgcgcggggccacgcgccaaggcctggacggccccgccctgctgcgtcgcgccggcatccagccggccctgctggacgaaccgcgggcacgcatcgcgccggagcagttcacccgcctgatgcagttgctctgggaagtgctggacgacgaatacatgggcttcggcgaagtccgcagcaagcgcggcaccttcgccatgatgtgccacaccctgattcattgccggaccctggaaaaggccctgcagcgcggcgaactgttctacggcctgttcccccaggcgccgctgatccacctgcggcgcgacggcgacctggtgcgcctgagcctcgaggaacgccacctgtcggacccggatcacttcctcgccgaaagcctgctggtgatctggcaccgcctcgccagttggctgatcggccagcgcatccgcctggaggaagccaccttcagctacccggcgccggaccaccaggccgagtacgacctgctgtttccctgcccccggcggttttccgccggctgcaccagcctgctgttcgccgcccgctacctgggcatgccgctgctgcaggacgaacgcaccctcaagcagttcctccagcactctcccgccgacctgctggcgcgcccggacggcggcgacagcctgaccagccagatccgccgcctgctcggccgcgactgccggcgctggccagacctcgaccaggtcgcccgccaactgcacatgagttcgcagaccctgcgacgccacctgcgcgaggaaggcggcagcttccagcaactcaaggaccacctgcgccgcgacctggcgatctaccacctgggtcgggacgagctatcgatccaggacatcgccgagcagctcggcttttccgagccctcggccttccatcgcgcgttcaagaagtggaccggcctcacccccggcgcgtaccggcaccaggcggaagcctga

SEQ ID NO: 320051 - DNA, 3282 bp, Pseudomonas aeruginosa
atgttcagtggcaaaaccgacgacaggggcttgtgggcgggcatccaggccggtgtgctgttctttctcgccgccctggcctgcatctacctgtcgcgccagcctgccaccatcgcggcgatctggctgcccaacgcgatcctcaccgccgccctgctgcgcgcgccgctgcgccagtggccggcgatcctgctctgctccgccgtggccaacctggcggccaaccgcctgtatggcgacagcctgtggatgagcgcggcgttcctgccggccaacctgagcgaagcgatcttcgccgcgatgctgttacgcatcaaccgggtgcgcgaggacttcgagttcaacctgcattcggcggttcgcgtgctctgggccggcgcgctgatcccgcccttgctcggtgcctcggtgggcgcggtgctggtcagcgtcttcggcatggggcgtttcccggaaatgtgggcgcgctggtacgtgggcgatggagtggacaacgcgatgctcctgctggtgaccctggtgatcagcttcgtggccctgacgcgcctgccctacgccttcatctacgtgctcctgccgctgctggtggccgccgccagcaccagcgtgttcggcaccgcgctgatcggctgcctgaacacctgtttcatcgccgtgctgatcgccctcggcgtgttcgtccccgagtcgtcccagcagcgtttcggcgagccgctgctgtacctgccgatggccttgaccctcattcccgccttcctggtctcggtgatcatggagcgcagccgccgcgagcagcatcaggtggccatcggcgaggcgcagttccgcggcgccatggaattctcggcgatcggcatggccctggtgtcgctggaggggcggctgttcaaggtcaacgaggcgctgtgccggatgctcggctattccgccgaacgcctgggcgagctgtcgttccaggagatcacctatgtggacgacctggaactggacctcgacctggtgcgcgacctgctcgccgggcgtatcaactcctaccagatggagaagcgctacctgcgccaggacggcgaaaccttctgggcgcgcatcagcgtgtcgctggtgcgcgacgaggagggagtcgcccagtacttcgtcacccaggtggaggatatcgacagtcgcaagcgtgccgagttggagcgcgagcgcctcgccgaacggatcaagctggccaccgacgccgggcagatcggcatctgggagtgggacctggcgcgcaaccgcctgcactgggatttccgcatgttcgacctgtacggcatccgcagcggtcccggggagaccacggtggagcagtggaaggcgagcctgcatgccgaggatcacgaccgcgtgctgcgcgagctggagcgcgccgtcagcgggttgcagaaattcgactgcgagttccgtatcgtccgccccaaccgcgaggttcgccacctgcgggcgatcgccacgctgacgcgcgacgaggacaaccgtccggtgcggatgatcggcatcaacagcgacatcaccgagatccgcaccctggcggaaaccctgcacgaggaaaaggaacgcctgcaggtgaccctgtattccatcggcgatgccgtgttgaccaccgacgccggcggccgcgtgaccttcatgaacccggtggccgaggcgatgaccggctggaccttgcaggacgccatcggcgcgccccacgaactggtcttcaacgtgctcgacagcgacaccggcgaggccctggaaagcccggtgcgacgctgcctgcagaacacccgggtgttctacctggaggacggcgccacgctgatcagccgcaagggcgagcagcacgatatccagaattgcgcggcgccggtgcgcacccgcgatggcgagatcatcggcaccgtgctggtgttccagaacgtcaccaaggcccgggcgatgcagcgcgagctgagctatcacgcctcccacgatgccctcaccgggctgttcaaccgcaccaagttcgaggaggagctgcaacgcgccctggccaacgcccaggagcgggcgacccagcatgcgctgtgcttcatcgacctcgaccgcttcaaggtggtcaacgattccgccgggcacgcggcgggcgacatgctgctgcgcgagctgagccggattctcgccgaccgcacccgcgcctccgacaccctggcgcggctgggcggcgatgagttcggcctgctgctgttcgattgcgacctggcggaggcggagcaggtggcgagcaagctcatcgagcagatctgctcggtgcgcttcccctgggaagggcggctctacgacgtgggcgcgagcatcggtatcaccgcccttaccgccacctcgcgcagcaccagcgaactgatgagccaggccgacgtggcctgctacgcggccaagcatgccgggcgcaaccgggtttcggtgtaccagttcggccatgaggaagtggagcgccagcaccgcgacatactcctcgccagcgggctgcgcgaggccctggagaacgaccgcttccagttgcaggcgcaggagatcgtcccggtcggcccccgccgcgacggcgaccggcactacgagctgctgctgcgactgtacgatccggatggccagatgactccgccgggcgccttcatcccggccgccgagcgcttcaacctgatggccagcatcgaccgctgggtgatcaacgaggcgctgatcaacttcggcgcgcggatcgccgcggtggagggcctgagcatcggcatcaacctgtccggcaactcgctcaacgacccgctgttcctgccttacctgctggatcgcatcgaacactcgccgctgaggccggagcgcctgtacttcgagctgaccgagacggcgttgatgaaccagttgtcggtggcttcgcggatcgtcgccaagctgcgcgacctcggctgcaaggtggcgctggacgacttcggctccggcctgagttccttcaattacctgaagaattttgtcgtcgacgtgatcaagatcgacggcagcttcgtccgcaacctggacaagagcccggtggaccaggccatcgtcgactccatcaaccagatcgcccaccgcctgggcgcggtgaccgtggccgagttcgtcgagagccgggaaatcctcgatcacctggcgcgcctcggggtggatttcgcccagggctacgcggtcggtcggccgcagccgttcgccacggtgctcgaccaactgcgcagcgggcttcgtcgccaggagctgggctga

SEQ ID NO: 320052 - DNA, 1347 bp, Pseudomonas aeruginosa
gtgatccgttccctgcgcatccgtctgatgctcggcgccgccgccctggcggtgctgttcatgctggcactgctgccggccctgcagcgggccttcggcatcgccctggagaacaccatcgagcagcgcctggccgccgacgtggcgaccctggtctcggcggcgcgggtggagaagggccgcctggtgatgcccgagcacctgccggtggaggagttcaacctgccggaggccaaggtcctcggctatatctacgaccagaatggcgatctgctctggcgctccacctcggcggccgacgagtcgatcaactacacgccgcgctacgacggccgcggcaacgaattccacaccacccgcgatgcgaagggcgaggagttcttcgtgttcgacgtcgagatcgacctgctgcgcggcaagcaggcggcctacagcatcgtcaccatgcaatcggtcagcgagttcgagagcctgctcaaggggttccgcgagcagctctacctgtggctcggcggcgccctgctggtcttgctcgggctgctctggctgggtctgacctggggcttccgggcgatgcgcgggttgagttccgagctggaccagatcgaatccggcgagcgcgagagcctgagcgaggagcatccgcgcgagctgctgcgcctgacccactcgctgaaccgcctgttgcgcagcgagcacaagcagcgcgagcgctaccgccactccctcggcgacctggcgcacagtctgaagacgccgctggcggtcttgcagggggtcggcgaccagctcgccgaggagcccggcaaccgcgagcaggtgcgggtgctacagggccagatcgagcgcatgagccagcagataggctatcagttgcagcgcgccagcctgcgcaagagcggcctggtacgccatcgcgagcaactggcgccgctggtggagaccctgtgcgacgcgctggacaaggtctatcgcgacaagcgggtaagcctgcagcgggacttctcgccgtccttcagcgtgccggtggagcgcggcgcgctgctggaactgctcggcaacctgctggagaacgcctatcgcctgtgcctgggccgggtccgcgtgggcgcccggctggggccgggttactcggagctgtgggtcgaggacgacggtcccggagtgcctgccgaacagcgcgcacgaatcatccgccgcggcgagcgcgccgatacccagcacccggggcagggcatcggcctggccgtggcgctggacatcatcgagagctacgacggcgaactgagcctggacgattccgagctgggcggcgcctgcttccgcatacgtttcgctacagtctga

SEQ ID NO: 320053 - DNA, 678 bp, Pseudomonas aeruginosa
atgaaactgctggtagtggaagacgaggcgctgttgcgccaccacctctatacccgcctgggtgaacaggggcacgtggtggacgcggtaccggatgccgaggaagccctctaccgggtcagcgaataccaccacgacctggcggtgatcgacctcggcctgccgggcatgagcggcctggacctgatccgcgagctgcgttcgcagggcaagtccttcccgatcctgatcctcaccgcccgcggcaactggcaggacaaggtcgaaggcctggccgccggggccgacgactacgtggtcaagccgttccagttcgaggaactggaagcgcgcctgaacgcgttgctgcgacgctcctcggggttcgtccagtcgaccatcgaggccggccccctggtcctcgacctgaaccgcaagcaggcgctggtcgaggagcaaccggtggcgctgaccgcctacgaataccgcatcctcgaatacctcatgcggcatcaccagcaggtggtggccaaggaacgcctgatggaacagctctatcccgacgacgaggagcgcgacgccaacgtcatcgaggtgctggtcggccgcctgcggcgcaagctggaggcctgcggcggcttcaagccgatcgatacggtgcgcggccagggctacctgttcaccgagcgctgccggtga

SEQ ID NO: 320054 - DNA, 603 bp, Pseudomonas aeruginosa
atgaaagcactcaagactctcttcatcgccaccgccctgctgggttccgccgccggcgtccaggccgccgacaacttcgtcggcctgacctggggcgagaccagcaacaacatccagaaatccaagtcgctgaaccgcaacctgaacagcccgaacctcgacaaggtgatcgacaacaccggcacctggggcatccgcgccggccagcagttcgagcagggccgctactacgcgacctacgagaacatctccgacaccagcagcggcaacaagctgcgccagcagaacctgctcggcagctacgacgccttcctgccgatcggcgacaacaacaccaagctgttcggcggtgccaccctcggcctggtcaagctggaacaggacggcaagggcttcaagcgcgacagcgatgtcggctacgctgccgggctgcaggccggtatcctgcaggagctgagcaagaatgcctcgatcgaaggcggctatcgttacctgcgcaccaacgccagcaccgagatgaccccgcatggcggcaacaagctgggctccctggacctgcacagcagctcgcaattctacctgggcgccaactacaagttctaa

SEQ ID NO: 320055 - DNA, 168 bp, Pseudomonas aeruginosa
atgaacgaacaacccgaccagggacgcgtcaagggcatggaagccaggctcttcctgtttctcgtgatctgcctgttcccgctgctgtccgtcgcactggtcggcggcttcggtttctgcgtctggatgtaccagctactggccggcccgcccgggccgccggcctga

SEQ ID NO: 320056 - DNA, 492 bp, Pseudomonas aeruginosa
atgagcagtcgccgagagctgttccgccgcctcggcgggcacccgccgacgcggcgcccgccgtggaccgccgccgacttcgccgcaggctgcacaggctgcgccgcctgcgtcgaggcctgcccggaaggcgtgctgaagctcggcgccggtcggctcgtcgaactcgacctctccagcgccggctgcacgctgtgcggggaatgcgccagccgctgcgaggccggcctgttcgatggcgcgcgcccggccttcccctggatcgccacgatcggcgaagcctgcctggccctggccgggatccactgccgcagttgccaggacgcctgcgaacccgccgcgatccgcttccgcccggcccccggcggcgtcgccctggccgagctggacagccagcgctgcaacggctgcggcgcctgcctggcgccctgtccgagccaggccatccaactgcgcgcgctatccaccaaggagtctccacgacatgcctga

SEQ ID NO: 320057 - DNA, 330 bp, Pseudomonas aeruginosa
atgcctgaagccctgcagatcgccagcctcatcctgcattgccgacccgagcgactgccggcggtgaaggccaacctggcgctgctcgacggcctggagatctaccaggaaagcccgcagggcaagctgatcctggtgctggaagccgaacgcgaagaacagattctcgacaccctgggccagttgcagaacctgccaggagtgctcaacgccgtgctggtctaccacgagatcctgcacgacgacgatagcaacgacgcggcggccatgaccgaccgcgcgataccgtgctcgcccgaggagacaatcgatgaacctcacccgtcgtga

SEQ ID NO: 320058 - DNA, 2505 bp, Pseudomonas aeruginosa
atgaacctcacccgtcgtgaattcgccaaggccaacgccgccgccatcgccgcggcggcggccggcctgccgatcctggtccgcgccagcaacctggtgaccgaggcggacgtcaccagcctggtctggaacaaggccccctgccgcttctgcggcaccggttgcagcgtgatggtcgccacccgcgacggccaggtggtggccacccatggcgacatcaaggccgaggtcaaccgcgggatcaactgcgtgaagggctacttcctgtcgaagatcatgtacggcagcgaccgcctgacccgcccgctgctgcgcatgaaggacggcaagttcgacaagcagggcgagttccagccgatcagttgggaacaggccttcgacatcatggccgagaagttcaaggccgcgctcaaggccaagggaccggagtcggtcggcatgttcggctccggccagtggacggtctgggaaggctatgcggcgaacaagctgttcaaggccggcctgcgcagcaacaacatcgaccccaacgcccgccactgcatggcctcggcggtgatgggcttcatgcgcagcttcggcatggacgagccgatgggctgctacgacgacatcgaggccaccgacagcttcgtcctctggggctcgaacatggccgagatgcacccggtgctctggtcgcgggtcaccgaccgccggctcagcgcgccgcaggtcaaggtcgcggtgctgtccaccttcgagcaccgcagcttcgagctggccgacttgcccatggtgttcaagccgcagaccgacctgatcattctcaactatatcgccaaccacatcatcgagagcggcgcggtgaaccgcgacttcgtcgagcgccacgtgcgcttcgcccatggcgccgaggacatcggctacggcctgcgcccggacgacccgctggagaagaaggcgaagaacgccgacaaggccaacacctggagcgatatcgacttcaaggccttcgccgagttcgtcaagccctataccctggagcgcaccgcgcgcgaaagcggcgtgccggccgagcggctgaaggccctcgccgaactctacgccgaccccaagcgcaaggtggtgtcgttctggaccatgggcttcaaccagcacacccgcggggtctgggcgaacaacctgatctacaacatccacctgctcaccgggaagatcagcgaaccgggcaacagccccttctcgctcaccggccagccctcggcctgcggcaccgcgcgcgaagtcggcaccttctcccaccggctccccgccgacctggtggtgaccaacccgaagcaccgggaaaccgcggagaagatctggaaggtgccggccggcaccatccaggagaaggtcggcttccacgccgtgcagcagagccggatgctcaaggacggcgtgctcaacgtctactggacccaggtcagcaacaacatgcaggccggtcccaacgtgatgcaggaagtgctgcccggctggcgcaacccggacaacttcgtgatcgtctccgacgtctaccccaccgtctcggcccaggccgccgacctgatcctgcccagcgccatgtgggtggagaaggaaggcgccttcggcaatgccgagcgccgcacgcagttctggcaccagttggtgaaggcaccgggcgaggcgaagtccgacctctggcagctggtggaattctccaagcgcttcaccaccgacgaggtctggcccgcggaactgctggcgaaggcccccgagctgaagggcaagaccctctacgacgtgctgttccgcaacggccaggtcgaccgcttcccggccagcgacctggccaagggctatgccaacgacgaggtcgacgcattcggcttctatatccagaagggtctgttcgaggaatacgccgccttcggtcgcggccacggccacgacctcgcccccttcgacgcctaccacgaggcgcgcggcctgcgctggccggtggtggacggcaaggagacccgctggcgctaccgcgagggctacgacccctacgtgagcaagggcagcggcgtgcagttctatggctatccggacaagaaggcgatcgtcttcgccctgccctacgagccgccggccgaggcgccggaccaggactacccgttctggctcgccaccggccgggtgctcgaacactggcacaccgggagcatgaccgcgcgggtcccggagctgtacaaggcggtgcccgacgcgctggtctacatgcacccggaggatgcgcgccagctcaagctgcgccgcggcagcgaggtcaaggtggtgagccggcgcggcgagatccgcgcgcgggtcgagacccgcgggcgcaataagccgccccaggggctggtgttcgtgccgttcttcgacgccaacaagctgatcaacaaggtcaccctggacgccaccgacccgatttccaagcagaccgactacaagaagtgcgccgttcgcatcgaactgctcaacctggcctga

SEQ ID NO: 320059 - DNA, 492 bp, Pseudomonas aeruginosa
atgaaacctctgctgactgccctgctcctcgtcctgctcggcgcccccgcggccttcgccgccgacctcggctacccgctggacgcgcccgcccccgacggccgccgccccggcggcacgctggccgaaagccgccccgcgccgccgctggcggccgaggaaaacaaggacctgaaacgcgagcgcaactaccccgagcagccgccgaccattccccacagcatcgtcggctatcgcatcgacaaggacagcaacaagtgcctgtcctgccacagccgcgccaacagcgcgcgaacccaggcggtgatgatcagcatcacccactacatggaccgcgacggccagccgctggccgccgtctcgccgcgccgctacttctgcgtgcagtgccatgtgccgcaacaggacgtaaagccgctggtcgacaaccgcttcgagaacatcgaccagatcctcgagaaagaagccgccaatgcggcgcgcaaaccctga

SEQ ID NO: 320060 - DNA, 597 bp, Pseudomonas aeruginosa
atgaaagcactcatcgcctggctggtcggttactggcgggtcctgcgtcgtcccagcgtgcatttcagcctgggcttcctcaccctcggcggcttcatcgccgggatcgtcttctggggcggcttcaacaccgccctggaggcgaccaacaccgagaccttctgcatttcctgccacgagatgcgcgacaacgtgttcgtcgaactcaaggacaccatccactacagcaaccgttccggagtccgcgccacctgtcccgactgccacgtgccacacaagtggaccgacaagatcgcgcgcaagatgcaggcctccaaggaggtctggggcaagatcttcggcaccatcaacacccgcgagaaattcctcgatcaccgccgcgagctggccgagcacgaatgggcacgactcaaggccaacgattcgctggaatgccgcaactgccacaacttcgagttcatggacttcacccggcagagcgtgcgcgcgcggcagatgcactccaccgccctggccagcggcgaagccacctgcatcgactgccacaaggggatcgcccaccacctgccggacatgaccggggtgaagggctggtag

SEQ ID NO: 320061 - DNA, 1197 bp, Pseudomonas aeruginosa
atgcgcagccttcttctctcctcgctggccctgctacccgccctggccctggcgcaacccgacgcctcgagcttcccttcctgcctcgccggcctgcagaagaaggcccaggcgcagggcatttccgccgacagttatgagcgcttcaccagcggcctgcaggccgacctcagcgtgctcgacctgctcgacgcgcagccggagttcaccaccccgctgtgggactacctggccggcctggtggacgagcagcgggtcagcgatggcaaggcgatgctcgcccagcacgacaagctgctcgaccaggtggccgcgcgctacggcgtggacaagtacacggtggtggcggtgtggggcgtggaaagcgactacgggcggatcttcggcaagcgtccgctgctgacctcgctgtcgaccctgtcctgctacgggcgccgccagtcgttcttccagggcgagttcctcgccaccctgaagctgttgcaggccggcgacatccgcgacgccggcatcaccggctcctgggccggggccttcggccatacccagttcatgccatcgacctacgcgcggatcgccgtggacttcgacggcgacggtcgccgcgacctggtaggcagcgtgccggatgccctcggttccaccgccaactacctgaagaaggctggctggcgcacgggacagccgtggggctatgaagtgaaggtgccggccgacttccccgccagcctggccgggcgcggcaagcgccagccgctgtcggcctgggtcgcccgtggggtgaggcgggtcgacggccagccgctgccgggcggcgacgagaaggccgcgatcctcctgccggccggggcccagggcccagccttcctggtctatcgcaactacgatgcgatctattcctacaacgccgcggaaagctacgcgctggccatcgccctgctttccgaccgcctgcgcggcggcagcggcctggtggcgtcctggccgaccgacgacccgggcatcagccggctcgagcgcaagcaattgcagaaggcgttgctggcgcgcggctacgacatcggcgaggccgacgggctgatcggcaccagcacgcgcaaggcgatccaggccgagcagaagcgcctcggcctgaccccggccgacggtcgcgccgggcgcaagatcctcgaggcgctgaagggcgcccagccctga

SEQ ID NO: 320062 - DNA, 735 bp, Pseudomonas aeruginosa
ttgatccactggttgagcgacccgacgttctggacagccctgctgcagatcgtcgccatcgatatcctcctgggcggcgacaacgccgtagtcatcgccctcgcctgccggcacctgccggcgcaccggcgcaagcaggcgatcttcggtggcgtcgccggcgccatcctgatccgcatcctgctgctgttcttcgccctgcacctgctcgacctgccctacctcaaggtaatcggcgcgctcctgctgctgtggatcggcatcaagctgctgctgccggaggaggagaacggcgacgacatcaagggcagcacccacctgctcggcgcgatcaagaccatcatcatcgccgacgcggtgatgagcctggacaacgtcatcgccctgtccgccgcctcggccggggatttcttcctggtctccctgggcgtgctgatcagcatcccgatcatcgtctggggcagccagctgatcctgcgcctgatcgaccgcttcccgctgatcatcctcttcggcggcggcctgctcggctggatcgccggcggcatgctgctcaccgacagcgccctgaagccctggctggcgccctacgcgcaatgggattcctacctgcactacggtgcggcggccttcggcgcgctgttcgtgatcctcctcggcagcctcctggcgcgccgccagttgaagcagcggcatgccgcgccggcggacgccgccgaaagcgaaggccgctaa

SEQ ID NO: 320063 - DNA, 2058 bp, Pseudomonas aeruginosa
atgaaacgcaggagtgtgctcttgtcgggtgtcgccctgagtggaaccgcactggccaatgactcgatattcttttcacccttgaaatacctcggggcggaacaacagcgatctatcgatgcctcgcgaagtttgctggacaacctgattccgccgagtttgccgcaatatgacaacctggccggaaagttggcgcggcgtgcggtattgaccagcaagaaactggtatatgtctggaccgagaacttcggcaatgtcaaaggcgtgccgatggcccgctcggtgccgctgggcgagttgccgaatgtcgactggctgttgaagaccgccggggtgatcgtcgagctgatcgtcaatttcgtcgcctcgttgccggcgtcggccgcagcgcagttcgagcggatcgccaccgggctcagcggtgacctggaggcggcgcgccaggtccacgaggcgttgctggaggaggcgaagaacgatccggccgcggccggcagcctgctgctgcgcttcacggagttgcagacgcgggtgatcgccttactgacgcgggtcggcctgctggtcgacgatattctcaagagcgccagcaacctggttacccagggggggcagggcgacggcctgaatcgcttccgcgcggtgttcggcaccctgcgcctgccggaggtcgccgacagcttccgtgacgacgaagcgttcgcctactggcgggtggccgggcctaatccgctgctgatccgtcgcgtcgatgcgctgccggccaactttccgctgggcgaggagcagttccgccgggtgatgggcgccgacgacagcttgctggaggccgccgccagccgccgcctgtatctgctggactacgccgagctgggcaagctggcgccgtcgggagcggtggacaaactgctcaccgggacgggcttcgcctatgcgccgatcgccctgttcgcccttggcaaggatcgggcgaggctattgccggtggccatccagtgcggtcaggaccccgctacccatccgatgttcgtgcgtcccgccgagtcggagagtgatctgtactggggttggcagatggccaagacggtggtccaggtcgccgaggagaactaccacgagatgttcgtccacctggcccagacccacctggtgagcgaggcgttctgcctggccacccagcgcaccctggcgcccagccatccgctgcacgtcctgctcgccccgcacttcgagggcaccctgttcatcaacgagggggcggcgcggatcctgttgcccagcgcgggcttcatcgacgtgatgttcgccgcgccgatccaggacacccaggccaccgccggcggcaatcggctgggtttcgacttctaccgcggcatgttgccggagagcctgaaggcgcggaacgtcgacgacccgctggcgctaccggactacccctatcgcgacgacggcctgctggtatggaatgccatccgccagtgggcggccgactacgtggcggtgtactacgccagcgacggcgacgtcaccgctgacgtcgaactggcggcctgggtcggcgaagtgatcggcagcggcaaggtggccgggttccgcccgatcaccggtcgcagccaactggtcgaggtgctgaccatggtgatcttcactgcctccgcgcagcatgcggcggtcaattttccccagccttcgatgatgacctacgcaccagccatctgtgccatgagcgcggcgccggcaccggactcgccaagcggcaagagcgaggccgattggttgaagatgatgccgccgaccctggtggcgctggagaaggtgaatatctatcacctgctcggttcggtctaccacggtcgcctgggcgactaccggcagaccgggttcccctacgcgccggtgttttcggacaggcgggtgaccgccagcggcggcccgctggagcgcttccaggcacgcctgaaggaggtcgaggcgaccattcgcacgcgcaaccaggcgcgccgcaggccctacgagtacctgttgccgagccggatcccggcgagcaccaatatctga

SEQ ID NO: 320064 - DNA, 321 bp, Pseudomonas aeruginosa
atgaaaaatcaggtgaatgccctggcggttctaagtgtgggtgaaatcgaacaagtttctggcgcagggactttcctgggcgatgccatcatcaacggcgtctacgcggccaactccttcctgaactcgccgctgttctccagcatcggcaacgcggccagcgccatcggcctcaaccgtacccacgagctggtcgacctgctggccttccaggtgccttcggtggcggcgatcaccgtcggcaagattctcggcgggaccgacaaccataatgttccgctgcattacaacaaggaaagcggcgaagggctttacagctga

SEQ ID NO: 320065 - DNA, 672 bp, Pseudomonas aeruginosa
atgcctgacctgagtacctggaacctgaccattccccagggccgcccggccatcaccatctccaccagccaattgcagcgcgactaccgcagcgactatttccagcgcaccgccgacggcattcgcttctgggtgccggtgaacggcagccacacgcgcaacagcgagttcccgcgcagcgagttgcgcgagaccctgtccagcggcaggccctacaactggcgttacgccagggccgacaactggctggaggcgactctgcgcatcgaggcggtgccctcgacccggcgcatgatcatcggccagatccacagcgatggcagcaatagcggccaggccgcgccgctggtgaagctgctctaccagttgcggctcgaccaggggcgggtccaggcgctggtccgcgagcggccggacgacggcgggaccagagcctacacactgatggacgggattcctctcggccagccgttcagctaccgcatcggcgtgtctcgcagcggattgctcagcgtgtcggtgaatggtagcgccctggagcagcaactggacccgcagtgggcctaccagggcctttatttcaaggccggactctacctgcaggacaaccgcggaccgtccagcgagggcgggcgggcgacattcagcgagctgcgcgttagccatcaatga

SEQ ID NO: 320066 - DNA, 789 bp, Pseudomonas aeruginosa
atgcgcctgctctgcgccctgctgttcatcgcctgcgccgccagcgcccaggccgctatccagacccgcgagatgccttaccggagcgcagacggcacgcgcatggtcggctatttcgcctacgacgacagcaagccggggatccgccctggggtcatcgtggtccacgaatggtgggggctcaacgactatgccaaacgccgcgcccgcgacctcgccgaactcggctacagcgccctggccatcgacatgtacggcgaaggcaagcacaccgagcacccgcaggacgcgatggccttcatgcaggccgcgacccgggatgccgacgccgccaaggcgcgcttcctcgccggcctggaactgctgaagcggcaaccgcagaccgatcccagccagatcgccgcgatcggctactgcttcggcggcaagatcgtcctcgacatggcccgccagggcctgccgctggccggcgtggcgagcttccacggcgccctcggcaccgccaccccggccagcaagggcagcgtcaaggccaagatcctggtggagcacggcagcgccgacagcctggtcccggccaaggacctcgacgccctgaaacaggaactgaacgccgccggcgccgactaccgggtggtgatccaggacgacgccaaacacggcttcaccaaccccgacgccgacgcgcacaaaggccacggcctggacatcggctacgaccgccaggccgaccagcgctcctgggcagacctgcaggcgttcctcaaggacatcttcgggcagggttga

SEQ ID NO: 320067 - DNA, 729 bp, Pseudomonas aeruginosa
atgcgcgccatgaacgaccgtctcccctccttctgcaccccgctggacgaccgctggccgctgcccgtcgcgctgcccggcgtgcaactgcgcagcacccgcttcgacccggcgctgctgcaacccggcgacttcgccctggccggcatccagccgccggcgaacatcctccgcgcggtggccaagcgccaggccgagtttctcgccgggcgcctctgcgcacgcgccgccctgttcgccctcgatggccgcgcccagacgccggccgtcggcgaggaccgcgcaccggtctggccggccgcgatcagcggctcgatcacccatggcgaccgctgggccgccgccctggtggcggcgcgcggcgactggcgcgggctcggcctggacgtggaaaccctgctcgaagccgaacgggcgcgctacctgcatggcgagatactcaccgaaggcgagcgcctgcgcttcgccgacgacctggagcgacgcaccggcctgctggtgaccctggcgttctcgctgaaggaaagcctgttcaaggcgctctatccgctggtgggcaagcgcttctatttcgaacatgcggaactgctggaatggcgcgccgacggccaggcccggctgcgcctgctcaccgacctgtcgccggagtggcgccacggcagcgagctggacgcccagttcgccgtgctcgacgaacgcctgctcagcctggtggcggtcggcgcctga

SEQ ID NO: 320068 - DNA, 813 bp, Pseudomonas aeruginosa
atgcaggtggatgaacagcgcttcggcggtatcggccggttgtacggtcgcgaggggctgcaacgcctggccgatagccacgtcgcggtggtcggcatcggcggggtcggttcctgggcggcggaagcgctggcccgcagcggcgtcggcgagatttccctgttcgacctcgacgatgtctgcgtgaccaacaccaaccgccaggtgcatgccatcgaaggctcggtgggcaaggccaaggtcgaggtgatggcggcgcgcatcctggccatcaacccggcctgccgggtccacgcggtggccgatttcgtcacccgcgagaccatggccgagtacatcgtcgacttcgactacctgatcgactgcatcgatagcgtggccgccaaggccgcgctgatcgcctggtgcaagcggcgcaagatcccggtgatcaccaccggcggcgccggtggccaggtcgacccgacgcagatccaggtcgccgacctgaacaagaccttcaacgacccgctggcggccaaggtgcgttccaccctgcgccgcgactacaacttctcgcgcacgccggggcgcacctacagcgtgccctgcgtgttctccagcgaacaactgcgctacccgaagccggacggcacggtgtgccagtcgaagagtttcgtcggcgaaggggtgaagctggactgcgccggcggcttcggcgcggtgatgatggtcaccgccaccttcggcatggtcgccgccgcccgcgccgtcgagcgcctggcggaaggccgcgcgctgcggccgtcgcggcgcacgccggggaacgcctga

SEQ ID NO: 320069 - DNA, 2610 bp, Pseudomonas aeruginosa
atgtcttcacgcaagatcgggctcaacctggtggtcatcgtcgccctggccgccctcttcaccggcatctgggccctgtacaaccgtccggtcagcgtaccggactggccggaacgcatctccggcttctccttctcgccgttccgcctcaaccagaacccgcagagcggccgctaccccagcgccgaacagatgcgcaccgacctggaactggtcgcccggcacacccacagcatccgcacctattcggtccagggcgcgctcggcgacatcccggcgctggccgaggcgttcggcctgcgcgtcagcctgggcatctggctcggcccggacctggccagcaacgaggccgagatcgcccgcgccatccgcatcgccaacgagtcgccgagcgtggtgcgagtgatagtcggcaacgaggcgctgttccgccgcgaggtgacggcggaacagttgatcgcctacctcgaccgggtccgcgcggcggtcaaggttccggtgaccaccgccgaacagtggcacgtctaccgcgaacacccggaactggcgcaacacgtcgacctgatcgccgcccacgtcctgccctactgggaggccacgccggtggccgacgcggtggacttcgtgctcgaacgcgcgcgcgaactcaaggccgccttcccgaggaagccgctgctgctcgccgaggtcggctggccgagcaacgggcgcatgcgcggcagcgccgaggcgacacccgcggaccaggccatctacctgcggcgcctgaccaacgcgctcaacggcgaaggctacagctacttcgtcatcgaagccttcgaccagccctggaaggtcagcgccgaaggctcggtgggcgcctactggggcgtctacaacgccgaccgcaaggccaagttcaacttcaccgggccggtggtgccgattcccaagtggcgcgccctggccatcgcctcggcggtactcgcggtactcgccttcaccctgctgctgatcgacagttcctcgctgcgccagcgcgggaggaccttcctcgccgtggtctcgttcgcctgcgcctcggtgctggtgtggatcgcctacgactacagccagcagtacagcacctggttcagcctgaccgtcggcgcgttgctgggcgtcggcgcgctgggggtggtcatcgtgctgttcaccgaggcccacgagctggccgaggcggtctggacgcgcaagcggcgccggccattcctgccgatcaccgccgcgcaggcctatcggcccaaggtgtcgatccacgtgccctgctacaacgagccgccggaactgctgaagcagaccctcgacacccttgcccgcctcgactacccggactacgaagtcctggtgatcgacaacaacacccgcgacccggccgtctggcagccggtcgaggcgcactgcgcgcgcctgggcgagcgcttccgcttcttccacgtcgccccgctggaaggcttcaaggccggcgcgctgaacttcgccctgggccacgtggcggcggacgtcgaggtggtcgcggtgatcgacgccgactactgcgtcgaccccgactggctcaggcacatggtgccgcacttcggcgacccgcggatcgccgtggtgcagtcgccgcaggactaccgcgaccagcacgagagcgccttcaagcggctctgctacgccgagtacaagggcttcttccacatcggcatggtcacccgcaacgaccgcgacgcgatcatcgagcacggcaccatgaccatgatccggcgcagcgtgctggacgagctgagatggccggaatggtgcatcaccgaggacgccgagctgggcctgcgggtgttcgagaagggcctgtcggccgcctacttcgagcgcagctacggcaagggggtgatgcccgataccttcatcgacttcaagaagcagcgcttccgctgggcctacggcgcgatccagatcatgaagcggcataccgacgccctgctgcgcggccgcagtcccgacggcagccgcctgacccgcggccagcgctaccacttcgtggccggctggctgccgtggatcgccgacggcctgaacatcttcttcaccctcggcgcgctgctctggtcggcggcgatgatcatcgtgcccaagcgcgtcgacccgccactgctgatcttcgcgatcctgccgctggccctgttcgtcttcaaggtcggcaagatcctcttcctctaccggcgcaccgtcggcgtcgacctgcgcgactcgttcttcgccgccctcgccggcctggcgctctcgcacaccattgccaaggcggtgctgtacggcttcgtcacccgcggcatcccgttcttccgcacgccgaagatgcgctccagccacggcctgctggtggccctggcggaggcccgcgaggaagtcttcgtgatgctcctgctgtggggcgcggcggccggcatcgtggcggttcagggcgtgccgagccgcgacctgctgatctgggtcgccatgctcctggtgcaatcgctgccctacctggcggcgctggtcatggccctgctctcgtcgctgccgaaaccgcgcgaggaactggccggcggcgccgagcggatcggcggttga

SEQ ID NO: 320070 - DNA, 1152 bp, Pseudomonas aeruginosa
atgaccgcctcttcgccgagtctctcgccgaccctcgaactcgcctgcgagttgatccgccgcccctccgtcacgccgctcgacgccgactgccaggccctgatgatgcgccgcctggaagccgccggcttcgccctggagccgatgcgcatcgaggaggtggacaacttctgggcacggcgcggcggcgacggcccggtgctgtgcttcgccgggcacaccgacgtggtccccaccggcccgctgcaggcctggcagcaccaacccttcgacgccctgatcgacgaccagggcatgctctgcggacgcggcgcggcggacatgaaaggcagcctggcgtcgatgatcgtcgccgtcgagcgcttcgtcgccgaccacccgaagcacaagggcgccatcgccttcctcatcaccagcgacgaggaaggcccggcccaccacggcaccaaggcggtggtcgaacgcctcgccgcacgcggcgagcgcctggactggtgcatcgtcggcgaaccgtcgagcaccagcctggtcggcgacgtggtgaagaacggccgccgcggctccctcggcgccaagctgaccatccgcggcgtacagggccatgtggcctacccgcacctggcgaagaacccgatccacctggccgccccggcgctggccgaactggcggcggaacactgggacgacggcaatgccttcttcccgccgaccagcttccaggtttccaacctgaactccggcaccggcgccaccaacgtcatccccggcgaactgaccgcgctgttcaacttccgcttctccaccgaatccaccgtcgaaggcctgcagaaacgcgtcgaggcgatcctcgacaagcacggcctggactggcacgtcgaatgggcgctgtccggcctgccgttcctcaccgagccgggcgaactgctcgatgcggtggccgccagcatcagggcggtcaccggtcgcgagacccagccctcgaccagcggcggcacctccgacggacgcttcatcgccaccatgggcacccaggtggtcgaactcggcccggtcaacgccaccatccaccaggtcaacgagcgggtcctggccagcgacctggaactgctcaccgaaatctactaccagaccctggtgaggctgctcgcctga

SEQ ID NO: 320071 - DNA, 804 bp, Pseudomonas aeruginosa
atgctgatctgcccgctctgctccgccgccctgggcgaggtcgacaacggcgtcgcctgccccgccgggcaccgcttcgaccgcgcccgccagggctacctgaacctgctgccggtgcagcacaagaaaagcctcgatccgggcgacaacgccgccatggtcgaggcccgtcgccagttcctcggcgccggccactacgcgccgctggcccggcgcctggccgaactggccgccgaacgcgcgccgcgacgctggctggatatcggttgcggcgagggctactacagcgcccggctcggcgaagccctggccggcgccgaaggctatgccctggatatctcccgcgaggcggtgaaacgcgcctgccgccgcgcgccgcagttgtcctggctggtggcgagcatggcccggctgccgctggccgacgccagttgcgagctgatcgccagcgtgttcagcccgatcgactggaacgaagccgtgcgcgtcctcgcccccggcggcggcgtactgcgcctgggcccggccagcgcgcacctgctggaactgcgccagcggctctatgacgacgtgcgcgactacgccgacgacaagcacctcgccggcctgcccgcgcaactgcgcctgcgccacaccgagaccctcgagttccgcctggcgctggacagctacgacgcgcgggaaaacctcctggccatgaccccgcacggctggcgggtcaaccccgagcgccgcgcgcgaatcctggccgaacccttcgaagtcagcgtggcggtgcgctacgattggctgcaacgcgactga

SEQ ID NO: 320072 - DNA, 384 bp, Pseudomonas aeruginosa
atgcgccaaccggatatcgagatctacctgaaagacgccgagcacgcggccgtcgccgcctggctggaacaggcgctgggaccctgcggcccatggcaggagcgcggccagactctcaagtgcaccgcccgcggcgagcacggcgcggtgcgcgtcacctggctgccgaaggcggtgggcaagtggcacagcctgttcttggagagcgacagcacgccctgggacgacgacctcgcctgcgccagggccgcgcatgccgcgctcggcgtggagatccgctgcgcgccgggcggctgggaggaaaaccagggcgaagaggacgccgaccgctggctgcgggtcgacgccgggggcgtcgaggaaattacctggcgcaccgcctga

SEQ ID NO: 320073 - DNA, 210 bp, Pseudomonas aeruginosa
atggctgatcgtgaggtcggaaccgtcaagtggttcaatgacgccaaaggttatggattcattcaacgcgatagcggtccggacgtgttcgttcactaccgcgccatccgcggcgagggtcaccgctccctggtggaaggccagaaagtggaattctcggtgatccagggccagaaaggcctgcaagcggaagacgtctccaaggtctga

SEQ ID NO: 320074 - DNA, 1617 bp, Pseudomonas aeruginosa
atgaaatccatcttcctgcgcatctatggcggcatgctcctggccctgctgctggtcagcggcctgggcctgctcggcctgcactggatcaacgaggtgcgcggcgagcactaccgcgaggaactggcgcgcggcaccttccgcctgatggccgacaacctgcaaccgatgaccgccaccgagcgcaagcgcgccctggcgcagtggagccgcttgctggggattcccctgcaactgcgcgggctggatgagctgcggatggatggacgcagccgcgcgcgcctgatgaacggccaggtgctggtgaagcagaccgccgagcacgccgtcaccgtctatacccaggccagcgccgccgagaacctggtgctcagcggcgaggtgcagcaggtcagcgagcaactggcgcgggccacggtttacctgctgatggacgaactggtgcgctacccggccagcgaacagccttaccaccttgcgcggatcgtccgcgacaagcgcttcggcttcccggtgcacctgctccaggtcaaggaactggacctcgacgacgaccagcgccggcgagtggtggagggcgacacggtgatggcgctgggcaaggacggcgactcgatccgcatcttcgccggcatcctcgacacgccctgggtgctggagctgggcccgctgttccagatgaacccctatccgccgcagctgctgttgctgctcggcgcgctgtgcctgagcttcatcggcctgatcacctacctgctggtgcgtcgcctggagcagcgcctgcgcagcctggaggcggccgccacgcggatcgcccgcggcagcctggatactcgcgtcgaggtgcgcggaggcgactcggtgggacgcctgggcgcggccttcaaccatatggccgagcacatccaccggctgctgacggtgcagcgcgagatggttcgcgcggtgtcccacgagctgcgcacgccggtggcgcggttgcgcttcggcctggagatgatcgagaccgccgagaccgacggcgcccgcctgaagtacctggagggcatggacaacgatatccaggacctcgacaagctggtcgacgagatgctcacctacgcgcgcctggaacagggctcgccgccgctgacctaccagcgcctggagctgggcgtgctggtgcgccaggtggtggaggagatcgccccgctgcgtcgcgaggtgctggtcagttgcgaggagggcgcgctggtgcctgaggagctgggcagttggatcgaggccgagccgcgctacctgcatcgggccttgcagaacctgctgaccaatgcgctgcggcatgccgatcgtcgggtcaggatcagcttccgggtcagcctggagcgttgccgggtggatgtcgaggacgacgggccgggggtgccggaggcgcaatgggagcggctctttacgccattcctacgcctggacgatagccggacccgtgcttccggcgggcatggcctgggactgtccatcgtccggcggatcgtctactggcatggcggccgggcctccatcggccgcagcgagactctgggcggtgcctgcttcaccctggcctggccgcgcaaggcgggtctgcgcgaccgctga

SEQ ID NO: 320075 - DNA, 711 bp, Pseudomonas aeruginosa
gtggagcaagaagcctggcgcatcctgatcgtcgaggacgatcgacgcctggccgagctgacccgggaatacctggaaggcaacggcctgaaggtcgacatcgaagccaacggcgcactggcggcggcgcgtatcctcgccgaacgcccggacctggtggtgctcgacctgatgctgccgggcgaggacggcctgtccatctgccgccaggtgcgcccgcagttcgacggtccgatcctgatgctcaccgcgcgcaccgacgacatggacgaggtgctcggcctggagatgggcgccgacgactacgtgtgcaagccggtgcgcccgcgtgtgctgctggcgcgcatccgtgccctgttgcggcgcagcgaggcgccggaagcgggcgcccaggcggcggacagcaaacgcctggcgttcggtcgcctggtgatcgacaacgcgatgcgcgaggcctggctggacgggaccaccatcgagctgaccagcgccgaattcgacctgctctggctgctggcggcgaacgccgggcgcattctctcccgcgaggagatcttcaacgccctgcgcggcatcgagtacgacggccaggatcgctccatcgacgtgcgcatctcgcggattcgcccgaagatcggcgacgacccgatgcacccgcggctgatcaagaccgtgcgcagcaagggctacctgttcgtcggcgagggctga

SEQ ID NO: 320076 - DNA, 2892 bp, Pseudomonas aeruginosa
atgcataccgacaccacacgcgagaacccgcaggccagcgcgccgcaggccgccgattcgtcgcaggatctggccgccaccgcgccgggccagctgcgcgtgatcaagcgcaacggcaccgtagtcccctacaccgatgacaagatcaccgtggccatcaccaaggcgttcctcgccgtggaaggcggcaccgccgccgcctcgtcgcgtatccatgacaccgtgcgccgcctgaccgagcaggtcaccgccaccttcaagcgccgcatgccgtccggcggcaccatccacatcgaagagatccaggaccaggtcgaactggccctgatgcgcgccggcgagcagaaggtcgcccgcgactacgtgatctaccgcgaagcccgcgccgccgagcgcaagaacgccggcgccgccagcgacgtcgcccagccgcacccgagcatccgcatcacccgcgccgacggcagcctgtcgccgctggacatgggccgcctgaacaccatcatcagcgaagcctgcgaaggcctggccgaggtggacggcgcgctgatcgagcgcgagaccctgaagaacctctacgacggcgtcgccgagaaggacgtcaacaccgccctggtgatgaccgcgcgcaccctggtcgagcgcgagccgaactactcctacgtcaccgcccgcctgctgatggacaccctgcgcgccgaagccctgggcttcctcggcgtggccgagagcgccacccatcacgagatggccgagctgtacgccaaggccctgccggcctacatcgagaaaggcgccgagttcgagctggtcgatgccaagctgaaggaattcgacctggagaaactgggcaaggccatcgatcacgagcgcgaccagcagttcacctacctcggcctgcagaccctgtacgaccgctacttcatccacaaggacggcatccgcttcgaactgccgcagatcttcttcatgcgcgtggccatgggcctggccatcgaggagaaggaccgcgaggcacgtgccatcgagttctacaacctgctgtcgtccttcgactacatgagttccacccccaccctgttcaacgccggcaccctgcgtccgcagctctccagctgctacctgaccaccgtgccggacgacctgtcgggcatctacggcgccatccacgacaacgccatgctgtcgaaattcgccggcggcctgggcaacgactggaccccggtgcgcgcgctgggctcctacatcaagggcaccaacggcaagtcccagggcgtcgtgcccttcctgaaagtggtcaatgacaccgcggtcgcggtcaaccagggcggcaagcgcaagggcgcggtctgcgcctacctggaaacctggcacctggacatcgaggaattcctcgagctgcgcaagaacaccggtgacgaccgtcgtcgtacccacgacatgaacaccgccaactggatccccgacctgttcatgaagcgcgtcttcgacgacggctcctggaccctcttctcgccgtccgacgtccccgacctgcacgacctctacggcaaggccttcgaggagcgctacgagtactacgaggccctggccagctacggcaagctgaagctgcacaaggtcgtccaggccaaggacctgtggcgcaagatgctctccatgctgttcgagaccggccacccgtggctgaccttcaaggacccgtgcaacctgcgcagcccgcagcagcacgtgggcgtggtgcacagctcgaacctctgcaccgagatcaccctgaacaccaacaaggacgagatcgccgtctgcaacctgggctcgatcaacctggtcaaccacatcgtcgacggcaagctggacaccgccaagctggagaagaccgtcaagaccgcggtacgcatgctcgataacgtcatcgacatcaactactactcggtcccgcaggcgcagaactccaacttcaagcaccgtccggtcggcctgggcatcatgggcttccaggacgccctgtacctgcagcacatcccctacggttcggacgcggccatcgccttcgccgaccagtccatggaagccatcagctactacgcgatccaggcttcctgcgacctggccgatgagcgcggcgcctaccagaccttccagggctcgctgtggtcgcaaggcatcctgccgatcgactcggagaagaagctgatcgaagagcgcggcgccaagtacatcgaagtcgacctgtcggaaaccctcgactgggcgccgctgcgcgagcgcgtacagaaaggcattcgcaactcgaacatcatggccatcgcgccgaccgcgaccatcgccaacatcaccggcgtctcgcagtcgatcgagccgacctaccagaacctgtacgtgaagtcgaacctctccggcgaattcaccgtgatcaacccctacctggtgcgcgacctcaaggcccgcggcctgtgggacccggtcatggtcaacgacctgaagtactacgacggttccgtgcagcagatcgagcgcatcccgcaggacctcaaggacctctacgccaccgcgttcgaagtcgagacccgctggatcgtcgaagccgccagccgtcgccagaagtggatcgaccaggcccagtcgctgaacctgtacatcgccggcgcctcgggcaagaagctcgacgtgacctaccgcatggcctggttccgcggcctgaagaccacctactacctccgtgccctggccgccaccagcaccgagaagtccaccatcaacaccggcaagctcaacgccgtgtcggccggtggcaacgacggcctgcaagccgccccggccgccgagccgaagccggcgccggtgccgcaggcatgcagcatcgacaaccccgactgcgaagcctgccagtga

SEQ ID NO: 320077 - DNA, 1248 bp, Pseudomonas aeruginosa
atgctgagctgggacgaattcgacaaagaagacccgaccgaagccaaggccgcgcccgccgccgcccaggccgttgcccagggccatgacaagctggacgacgaagccgccggctcggtggaagaagcgcgcgccgtttccgccgacgactccgacgccgtcgcccgcgccaagaaggccctgaacgacctcgacatccaggaaggcctggacgacctcgaaggctccgccgcgcgcgtgcaggtcggcgacaagcagatgatcaacgcccgcgccgacctcaaccagctcgttcccttcaagtacgactgggcctggcagaagtatctggatggttgcgccaaccactggatgccgcaggaagtcaacatgaacgccgacatcgccctgtggaagagcaaggacggcctcagcgaggacgagcggcgcatcgtcatgcgcaacctcggcttcttctccaccgccgactccctggtcgccaacaacctggtgctggccgtgtaccgcctgatcaccaaccccgagtgccgccagtacatcctgcgccaggccttcgaagaggcgatccacacccacgcctaccagtactgcatcgagtcgctgggcatggacgagggcgagatcttcaacatgtaccacgagatccccagcgtggcgaagaaggcctcctggggcctgaagtacacccgctcgatctccgacccgatgttccagaccggcaccccggaaaccgaccgccagttcctgcgcaacctgatcgcctactactgcgtgctggaaggcatcttcttctactgcggcttcacccagatcctctccatgggccgccgcaacaagatgaccggcaccgccgagcagttccagtacatcctccgcgacgagtcgatgcacctgaacttcggtatcgacgtgatcaaccagatcaagatcgagaacccgcacctgtgggacgcccagatgaaggacgaggcgacccagatgatcctccagggcacccagctggagatcgaatacgcgcgcgacaccatgccgcgcggggtgctgggcatgaacgcggcgatgatggaggactacctgaagttcatcgccaaccggcgcctgacccagatcggcctgaaggaagagtatccggggaccaccaacccgttcccgtggatgtcggagatcatggacctgaagaaggagaagaacttcttcgagacgcgggttatcgagtaccagacgggcggagcactgagctgggattga

SEQ ID NO: 320078 - DNA, 1578 bp, Pseudomonas aeruginosa
atgtctgaatcattgaaacatctcgagctacctgaaacctatgaaaaaataacagctttactaggaggcagtgactctaccaacactcttcttagtagattcatacttcctatacaagatgcggaaaaagagctctctgagataaccgcacagacatacggtgacggaaaagtaatttttatcttaggaaagcctggaataggaaagtctacattcattcactccctagcgtggcgtccaacaatagaagtttgctctgtcacagcaatgaactgttcagaagtagacagcggaaagcttttagaggaaatattagagaatatcagaaaaacttcaaaaaaagcgagagccaatagagatcttggccacacagctatagttctagactatatagaaaaccttgaagaacaagaccatactaagataagagctttttttaggacattgaacggtctcttaagatcttctccaattctgattctgtggccagttaccgatctacacgatgttaaaacgatgattggatatgcatcagcagtatccagcacggtatttgtaaaagggaaagaaatactgagttttagcggcccccctattagcgcctacccaagcattgcaaaaaacacaatatcagtcttaaacgatgggctttccatttcagactttaacttaacggacgaagactttgatgaactcctaaaagagctacgttcagagggagaagacaaaacgactttaagaaactacctattgaaagtacgccagagatggtctgacataaataattatttacaaaagaaaagagagaaagtacctcaacaaacagaaatctggtttgttattgcctatccagatgcagaaaatatagctggtcagttctctagaaaaagcaaagatgtattcgatgcttggattgcctcccatgcaaaactatcggaatacattcacaacaaccaaaaggaggctgcctgggatgccaagcgacttcagtatgcactaaccgggaactttacaaccagaatcctttacctcccagcaaacacactagcctcaacagtctgtgcatacggagagatcccggactttccaccaagcaatgttcctgtaccaacttcttggttcaagaaagaaactgccaggaaaactttaagaaacagcccattagtacgccaactcttaaaccagcatgtaaagatgggaaaaagaagggggggaacggcatctcaagccctcatagatgcagctccggtatataaagctatttcagagcgcgccacaggaaaaagtatatacagcgaccacccctttaacaaagcattaaaaacagcgctacaggatgtactaggaaatcaagttaaaagcatcgattttgagaaagtccatccttggctaccgagcatcagacccgacatccagataaaaactaatgatgaccgaatagtctgtattgagatgcactacacatctaggcaggattcttacattttagcagactacatcctcgaaaaacttgacaaatatatgagacaacttgataggtacatcagaaactctcaactccgcctacctggcctatag

SEQ ID NO: 320079 - DNA, 555 bp, Pseudomonas aeruginosa
atgtctgacgccctcctccactacagccgtttcacccaccaccatcgggtcctgcgcgccgtgctgctggatgaggaaggctggttcgtgctctccgacctggtacggctgctgggccgttacctgggcggtcgggcgccggcggcgttgtgtgacgaggcgccgtggccgctggcgacggcggaacagcgcgagcgcttgttcgccctctgccatgcgctggagcggcatctggacaccgatcagtggcggctcgcctggctccatgacgaacgccacgggccacgccaggactgcctggtcagcgagtccgggctctacgctctgctctggctcgcagcgcctggcgcggcacggggtatgcgccgttgggtcagcggctcggtgctgccacgcctgcgcagccagtcccgccccaacgccacgccccagcgcgccgtgctgcactggaaaaccgccgagatcgacaccctgcactggcaaggcaagacctggatccccctctccgactgcccccacctcctcgacagcccacgcccgctgatccgggcctga

SEQ ID NO: 320080 - DNA, 1989 bp, Pseudomonas aeruginosa
atggctgtcaatgattacgaacctggttcgatggttattacacatgtgcagggtggtgggcgtgacataatccagtatattcctgctcgatcaagctacggtactccaccatttgtcccaccaggaccaagtccgtatgtcggtactggaatgcaggagtacaggaagctaagaagtacgcttgataagtcccattcagaactcaagaaaaacctgaaaaatgaaaccctgaaggaggttgatgaactcaagagtgaagcggggttgccaggtaaagcggtcagtgccaatgacatccgcgatgaaaagagtatcgttgatgcactcatggatgccaaagcaaaatcgctaaaggccattgaggatcgcccggccaatctttatacggcttcagactttcctcagaagtcagagtcgatgtaccagagtcagttgctggccagccgaaaattctatggagagttcctggatcgccatatgagtgagctggccaaagcgtacagcgccgatatctataaggcgcaaatcgctatcttgaaacaaacgtctcaagagctggagaataaagcccggtcattggaagcagaagcccagcgagccgctgctgaggtggaggcggactacaaggccaggaaggcaaatgtcgagaaaaaagtgcagtccgagcttgaccaggctgggaatgctttgcctcaactgaccaatccaacgccagagcagtggcttgaacgcgctactcaactggttacgcaggcgatcgccaataagaagaaattgcagactgcaaacaatgccttgattgccaaggcacccaatgcactggagaaacaaaaggcaacctacaacgccgatctcctggtggatgaaatcgccagcctgcaagcccggctggacaagctgaacgccgaaacggcaaggcgcaaggaaatcgctcgtcaagcggcgatcagggctgccaatacttatgccatgccagccaatggcagcgttgtcgccaccgccgcaggccggggtctgatccaggtcgcacaaggcgccgcatcccttgctcaagcgatctccgatgcgattgccgtcctgggccgggtcctggcttcagcaccctcggtgatggccgtgggctttgccagtctgacctactcctcccggactgccgagcaatggcaggaccaaacgcccgatagcgttcgttacgccctgggcatggatgccgctaaattggggcttcccccaagcgtaaacctgaacgcggttgcaaaagccagcggtaccgtcgatctgccgatgcgcctgaccaacgaggcacgaggcaacacgacgaccctttcggtggtcagcaccgatggtgtgagcgttccgaaagccgttccggtccggatggcggcctacaatgccacgacaggcctgtacgaggttacggttccctctacgaccgcagaagcgccgccactgatcctgacttggacgccggcgagtcctccaggaaaccagaacccttcgagtaccactccggtcataccgaagccggtgccggtatatgagggagcggccctcacaccgttgaagaccggcccggagtcctatccgggaatgctactggacctaaacgatctgatcgtgattttcccggcggattctggagtcaaacctgtttatgtaatgctcagtagtcctcttgatagtggtatcttcacacggaggcaactacagaaaaaatttgatagccacaaatatgattttgggctgggtgaaaaaagcgccaacaatggaacgcttgcagagtttagggataaaattcttgagcaccttgccgatcctgcaaccgtagaaaaagggacttaccactccgaagtaaactcaaaagtacattacaatgccaggactaatattgttgttatcattggagaggatgggatgtttgtttctgggtggaggattgaacctggcacggatcaatacaatttttacatgaaaaatgaggtgctttaa

SEQ ID NO: 320081 - DNA, 369 bp, Pseudomonas aeruginosa
atggacgccaaagctctgctcctcggcagcctctgcctggccgccccattcgccgacgcggcgacgctcgacaatgccctctccgcctgcctcgccgcccggctcggtgcaccgcacacggcggagggccagttgcaccagccaatcatccttgaggcccggcgctccaccggcgaatgcggctgtacctcagcgctggtgcgatatcggctgctggccatgcatgccaatgcgaaggcacaggtccttcaggaaggtctgctcgacggtcgctacgaaggcgcccgtaccctaacgctggcagcagatgcgcaactggcggccgacagcacgctcgtggtacgtcttggttgcgccgtcgccgaatga

SEQ ID NO: 320082 - DNA, 780 bp, Pseudomonas aeruginosa
atgcacttgctttacccctccgcccccgaccgcagcaacgcggtcgatgaactcttcgtcgaggaatatgacgcggcccgttcggcaggcttggcctgttcgctgttctgcgacgaggaactggagagtggacgctttcgcgcccgcccggagtttccggcaaacccccaggtgctgtatcgcggctggatgctcacaccggaaaactacgctcgcctgcacggcgcgatcctcgtcgctggcggacggcccctgaccagtccacagcaatatcggcactgccattacttgccggagtggtatccgctctgtgaggacctcacgccggcgaccctgttcctgtccaggaacgccgacttcgaggcagtgttggcgcaaagcccgtggcgcgcctggttcgtcaaggaccatgtgaaatccctgaccacccagcgcggctcgaaggccaccaatgctgcggaagtgcgggaagtcctcgattcgatcgagcgttatcgaggcaccatcgaaggcggtgtatgccttcgggagttcgaggcgctgcgtgcggaaaccgaggaacgctacttcgttcttcacggccgcgctcacgggcgtctcgataccgtcccgccgctagtggaacgggtggcacaacgtatcgattgcccgttcttttccgtcgacgtggtcgagtcgaccagtggcgagttgcgcctgatggaactcggcgatggccaggtctccgaccgcaagcaatggcccgccgcacgcttcgcggcgatgctggcacaggcatag

SEQ ID NO: 320083 - DNA, 174 bp, Pseudomonas aeruginosa
atgaaaggaggagtgatggacgcctttcaattttgcttcgcgggcatcgttggcagcgtttctggcagggtcgtggcctggggcggcctgactgtcgatatcgaccagatcgagaatgcttggctccgtcgggcgattgaagactatcgctgtggccgtagggggcagaaatga

SEQ ID NO: 320084 - DNA, 216 bp, Pseudomonas aeruginosa
atggatttggaagagctgaaccccggcgccctgatcgggccgcaacaggatgtggaatccatcgaacggtgggcggagcgcaacggcatcagctatggcaccgcccgcgcctgggtttaccggggtgtgctgccgtccgtgaagctggggaagctgcgcatggtgaatagcgcgctgctgcgcaactggctgttggaacaggagtggacagcatga

SEQ ID NO: 320085 - DNA, 465 bp, Pseudomonas aeruginosa
atgatcatcggctacctcaacagcggtgatttcttcggcgagctgggattgttcgaaaaggaaggcagcgaacaggaacgcagcgcctgggttcgcgccaaggtggaatgcgaagtcgccgagatcagctatgcgaagttccgcgaactgtcgcagcaggactcggagatcctctacaccctcggcagccagatggccgaccgcctgcgcaagaccacccgcaaggtgggcgacctggccttcctcgacgtcaccggacgcgtcgcccgcaccttgctggacctgtgccagcaaccggacgccatgacccacccggacggcatgcagatcaagatcacccgccaggagatcggccggatcgtcggctgctcgcgggaaatggtcggacgcgtgctgaagagcctggaggagcagggcctggtgcatgtgaaaggaaagaccatggtggtcttcggcacccgctga

SEQ ID NO: 320086 - DNA, 837 bp, Pseudomonas aeruginosa
gtgagtgtgccgacggttctgcagaagatcctcgcccgcaaggccgaggaggtcgccgagcgccgtgcgcgcgtcaacctggccgaggtcgagcggctggcgcgtagcgccgatgcgccgcgcggcttcgccaatgccctgctggagcgggccaagcgcaaggagccggcagtgatcgccgagatcaagaaggcatcgccgagcaagggcgtgctgcgcgaacacttcgtcccggcggagatagcccgcagctacgaggcgggtggcgcggcgtgcctgtcggtgctcaccgacgtggacttcttccagggcgccgatgcctatctgaaggaagcgcgggccgcctgtgcgctgccggtgatccgcaaggacttcatgatcgatccgtaccagatcgtcgaggcgcgggcgatcggtgccgactgcatcctgctgatcgtctcggcgctggacgacgtgctgatggccgaactggcggcgactgccaagtcggtcggtctcgacgtactggtcgaagtgcatgacggcaccgagctggaacgtgcgctgaagaccctggacacgccgttggtgggcatcaacaaccgcaacctgcacaccttcgaggtgagcctggaaaccaccctcgacctgttgccggaaattccccgcgaccgcctggtggtcaccgagagcggtattctcaaccgggccgacgtggagctgatggaagtcagcgaggtctacgccttcctggttggcgaggcgttcatgcgggccgacgatcctggcctggagttgaagcgcctgttcttccaggagcgtggcggcgtggtgctgggcgccgatcctgactga

SEQ ID NO: 320087 - DNA, 1050 bp, Pseudomonas aeruginosa
atggatatcaagggagccctcaatcgcatcgtcaaccagctcgacctgaccaccgaggaaatgcaggcggtcatgcgccagatcatgaccgggcagtgcactgacgcgcagatcggcgccttcctgatgggcatgcggatgaagagcgaaaccatcgacgagatcgtcggcgcggtggcggtgatgcgcgaactggccgacggcgtgcagttgcctacgctgaagcatgtggtcgacgtggtcggcaccggcggcgatggcgcgaacatcttcaacgtgtcctcggcggcgtccttcgtggtcgccgccgctggcggcaaggtcgccaaacacggtaaccgcgcggtctccggcaagagcggcagcgccgacttgctggaagccgccggcatctacctggaactgacctccgaacaggtggcgcgttgcatcgacaccgtcggcgtcgggttcatgttcgcccaggtccaccacaaggcgatgaagtacgccgccggtccgcgccgcgagctgggcttgcggactctgttcaacatgcttggcccactgaccaacccggcgggagtcaggcaccaggtggtcggggtgttcacccaggaactgtgcaagccgctggctgaagtgctcaagcgtctcggcagcgagcatgtgctggtggtgcattcgcgcgacgggctggacgagttcagtctggccgcggcgacccacattgccgagttgaaggacggcgaggtacgcgagtacgaagtgcgtcccgaggacttcgggatcaagagccagaccctgatggggctggaggtcgacagtccgcaggcctcgctggaactgatccgcgacgctttggggcggcgcaagaccgaggctgggcagaaggccgccgagctgatcgtgatgaatgccggcccggcactgtacgctgccgatctggcgaccagcctgcacgagggcattcaactcgcccacgatgccctgcacaccgggctggcacgggagaagatggacgaactggtggccttcaccgccgtttacagagaggagaacgcacagtga

SEQ ID NO: 320088 - DNA, 606 bp, Pseudomonas aeruginosa
atgctgctgatgatcgataactacgactccttcacctacaacctggtgcagtacttcggcgagctcaaggccgaggtcaaggtggtgcgcaacgacgaactgagcgtggaacagatcgaggccctggcgcccgagcgcatcgtcctttcccccggtccctgcacccccaacgaggccggcgtctcgctggccgtgatcgagcgcttcgccggcaagctgccattgctcggtgtctgtcttggccaccagagcatcggccaggccttcggcggcgaagtggtgcgggcgcggcaggtgatgcatggcaagaccagcccgatccaccacaaggacctcggcgtgttcgccggcctggccaatcccctgacggtgacgcgctaccactcgctggtggtgaagcgagagagcctgccggagtgcctggagatcaccgcctggacccaacatgccgacggatcgctcgacgagatcatgggtgtacgccacaagaccctgaatgtcgagggcgtgcagttccatcccgagtccatcctcaccgagcagggccacgagttgctggccaacttcctccgccagcagggcggcgtgcgtggggagggcaactga

SEQ ID NO: 320089 - DNA, 225 bp, Pseudomonas aeruginosa
atgatcgattggagcaaggtaaagaccgccgaacagcaggcgcaggagcgcaggcaggctgagtacgatgccgcagccgcggcgcgggcaaatgcctaccgcctggagagtgacccgctcaagaccgaggctgagttcgatgcgatcaaggccggcaccgagccggactactctgactggatcgccaaggtagaagagatcaaggggcgatatccacttccttga

SEQ ID NO: 320090 - DNA, 303 bp, Pseudomonas aeruginosa
atgatcatcactctttctccgtatttaccgctccctgaaagcgacgagcacctgtcgctgagcaggactggcgatgtgctcaccgtgaacggtcagccgttcgacttcacaccgctaccggagggcggtgaactgccggctgaggcgattggatcggagtggttcgctggttccgtagtgcgacgcgccggccgcatccaactgatcctgcggttcccgcttgccgtcgatgccagtgccgccgctcgcttccctgaaccgttgctgatcaaggccgatggcccggtggagttgccgcgatga

SEQ ID NO: 320091 - DNA, 1077 bp, Pseudomonas aeruginosa
atgtcttggtactccgctggcaccgtagcggtgaccgcaaatagcccgaccgttaccggtactggcacacagttctcgtccaatgcccgggtcggcgatgcatttcgtggccccgatggttgttggtacgaggtcacaaacgtcgccagttcgacggtcatctcgatcaaacccaactaccagggcagcacggccagcggccagccctatgcagtggcgccgatcctgggctacgacaaggacctatcagatcgtttcaaccagatcgcgatggactggggggcgacccttgcgggcataaagccgtgggccctgtccaataccggcacgcaagcgcaggcggacatgggaatgacggcggtggggcggggactcaacgccgcagcgactgctgagaatgccctgagctttattggtggcatgccgaagtcgatgtccaatctgcgggctgtcagcgacgccaataatgtcccgaacgaatgcgggttctacggtatcagcgtcggcccttgggcgaacctgccgccgggcattgattcgctgaacccggttggctcgatgctctaccaccaaccctacgatgcaagtaccgctgtgcaaatgttcatcccgcgcacgtcggatctcgcatatttccgccggaaggctgccggtacgtggtccacctggatgcggttcttgaccgataggcagctctccgggaccgtgagcaatgacggaagtggagtgccaaacggcgcaatcatccagcgcgggagtaacgtgaacggagagtacgcccggttcgcggatggtacgcaaatctgctggcgccggtacgctgctgcgttagacgtaatcaaccaatccggaagcctgttcataactccaggcggcacgactctgacgttcccggccgcgttcgttagcgcgcccgtagtctccgacgctacgatcagaaataccggatactctgggcgtggttggggagctgtgtactcggtagatgcgacaagctgtgcgtggtacggattttcgacaacatctgcgcttgcggcattgctgccgggctttatcgctacggggaggtggttctga

SEQ ID NO: 320092 - DNA, 711 bp, Pseudomonas aeruginosa
atgttccagtgcttcaatgaaaacggaaacatccagttcgatgctaacctgatgtcttatggcttcagggaaaagcatgaggttctaggtgtagccgatcctcatactggctttctgaccttcactgtggatgtgttttccccggtagctccgatgctcttcgtgcaccgttcggacaacgacccgtacacgaaagagtttgcctattctcgtgtagagtatttgactggtttgtggaggttccaatactactgtgcctggattccgagcatgactcgtaagttgatggtttacatctttgaccgcatgcaggttggtggtaattttggcctgcaaactttcgacacagcaggcaatataaccttcaacacgaaccagatacctctacgtattgcaggcatgtacagccctccggctattgtaaatagtaacggtagtgcgcaactgccgacaactacttgggctcttcctcctgggcggacttatgcagttaataccgcgagtctacgtatggggctcgatgtacaggaatatcctgctggtggttccccacactcatctcttctggaagagatggtttctattgacggcaacatactgaaggtggcgttcttcttcgcctctgatggcctggaactgggcaatgctcccggacggtattaccagggtggtcgtcctctattgaccgtagctgacgtaactggcttgtag

SEQ ID NO: 320093 - DNA, 3660 bp, Pseudomonas aeruginosa
atgaacaagaccatcacgggccacaagggtggcagcaagaagccgcgccagccggtggagatgccggactcggtgcgctcgatcgcgcgggcgaagattctcctggcactgggcgaaggcgagtttgacggtggcgtcgacggccgttcgatctacctggacgatacgccgctgctggcggcggacggctcggtgaacttccccggagtgacctgggagttccgtccgggctcggtggaccaggaacacattgccggtgtgcccgccgtggaaaacgaactggcggtcggcgtcgagctcaagagtgacgcgccctgggtccgcgcggtaagcaacacccagctctcggcggtgcgcctgcgcctgtcctggccggccatccagcgccagcaggaaaacggtgacgtggtcggctaccgcatcgactacgcgatcgacatcgccgtcgacggcggtgcctggcaggaagcgctgaaggcttcgctggacgacaagtccaccagccgctacgagcgctcccaccgtgtcgacctgccggaggcgcggagcggctggcaggtgcgcgtgcgccgcctgacgccgaaccagaacaacaaccgcgtcgccgacaccatgcgggtcgaggcgatcaccgaggtgatcgacgccaagctgcgctacccgaacaccgcgctgctgttcgtcgagttcgatgccagccagttccagagcattccgcagatatcggtggaagcgcgcggccggcgggtgcgggtgccgagcaactacgatccgcagacccgtagctacagcggcacctgggacggctcgttcaagtcggcctggaccagcaacccggcctggcactggtacgacatcgtgttgcacaagcgcttcggcctcggtcggcggatcgacgcgagcatggtcgacaagtggtcgctgtaccgcatcgcccagtactgcgaccagtcggtgcccgacggcaagggcggccaggagccgcgcttcagctgcaacctgtacctgcagagtcgcgccgaagcctggacagtactgcgcgacctggcagcgatcttccgcggcatgtcctactggtccggcgcggaaatggtggcggtctccgacatgccggaggacgaggcctacaccttctcgccgtcgaacaccgtgcgtggcgacgacggcagccacttcaactacagcagcagccgccagcgcgatcgccacaccctggccctggtcaactacgacaatccgggcaacggctaccagagccagccggtagcggtgaacaatgatcgcgcgcagcgccgctacggcatcagccagttggagatcaccgcgatcggctgcacctccgagggcgaggcgcagcggcgtggccagtgggcgctgctgaccgaggagctggagcaggacgcggtgaccttccgcaccggcatggatggccgtgggctggcgccggggaagatcatcgccgtagccgacccggtcaagtccggcaagcagatcggcggacgcctgagcgcggtggatggccgcgcgctgaccctcgaccgcgacgtcgaggcccgacccggcgatcgcctgctggtcaacctgccgaacggcaaggccgaggcgcgcagcgtccagtcggtggtaggccgcgtgctgagcgtgaccgccgcctattcggagacgcctcggccccaggggcagtgggcgctgcagagcaacagcctgaccacccagcgcttccgcatcatgagcatcacccggccggaggacaatcttttcgagatcaccgcgctgcaacacaacgcgagcaagttcgacgccatcgacaacggcgcgcgcatcgagctgccgccggtcaccagcattccgccgggcgtgcaggcgccgccgcagaacgtgcggatcaaggctttcaccaaggtcgaccagggggtggcggtgaccagcctgtcggcctcctgggatgccgcgccgaacgcggtggcctacgaggccgaatggcgcaaggactcgggcaactgggtgcgggtgccgcgaacctcggcgctcggtttcgacgtgccgggcatctatgccggtcgctacttggtgcgggtacgcgccttgaacgtgatggaggtcggttcggtctacgccagcagtgtggaaaccgctctcgagggcaagaccacaccgccgccggcgctggcctacctgcgctgcgtggccggcccctggcgcatcggcctggagtgggggtttccggccagcggcgcggcggacaccgcttacaccgagatccagcagtccgccacgcccggcggcagcgaggagaccgcacgggcgctgggcctgttcgcctacccaggcaatacccacctggtatcgccgataccggccggcgaacggctggcgttccgcggtcgcttgatcgaccgtagcggcaacgtcggcgcctggtcgaactgggtcaccggcaccagctccagcgacgccagcgaatacaaccagttgatcacccaggagtacgtcgagtcggcgctgggccagcaattcttctccgatatcgagcggatgcaggtggatatcgggggcttgcagaagcaggtcggcgacctcgccgacattctgctgtacgacccgaccaaggtctacgcgaagaacgacatggtgcgacaggggcagcggttgtaccaggcactgaaggctgtgccggcgaagacggcgccgccgaacgcggcctactggtccgatatcggccagtcgctggaaaccgccaacgggctggcgcagcaggtggcgagccataccgctgaaatcagcgaactcgacggcaggatcgaagcagcggcatcgaatctggatgcgctgcaagctgccgcccgcggggaaccggcgaccggagagaaggcggatgcgctgaagggctgggacaccattgctcgagctgccaccgaagtcaccgtgcgggcgaacgaggacgaagcgcaggcgaagcggacgagcttgcttgaggcgtggaccgggacggcggagggcaggatcgccaccgtcgagtcggtcgttgcgtcgaacaatgccgtaaccgtccagcgcctggatcagctatccggacaggttgcgagcaatgcctcggccatcagcaccgaacagaccgtccgcgccaacgcggacagcgccctgggacagcgggtggataccgtcagcgcacgcaccgataccaacgaggcgaacatccagaccacatctcaagcggttacctcgctggatggcaacgtgaaggcgctctacagcgtgaagctccaggcgcatgccaacgggcagaagtacgccgctggctggcaactgggcttcgacagcggtacgagtgtgacgaccatggcgttccaggctgatcggttcctctggttcaacagttccagcgggcagaccgtggcgccggtttcgatcgttggcggccagatgttcatcaacaacgcgatgattcaggatgggtcaatcactaatgccaaaattggtagttcaattcagtcagacaactatgttgcgggtcagactggttggaggctgacgaagtcagggcagtttgaaattaatggaactgtccctgggcaggggcgaattactataactaaccagctggttcaggtttatgacggtgatagtgttcttagaattagacttggaatttggtcttga

SEQ ID NO: 320094 - DNA, 603 bp, Pseudomonas aeruginosa
atgaatgacaccctgagtcagggcctcaccaccatccgtctgtacggggttctgggcaagcgcttcggccgcatgcacggccggttgttggaaagcggcacggtacgcgaggcgatgagcgccctgaagcacaccatggagggattcgagacgttcatgcgcgaggcggaatcgaaagggctgaccttcgccgtgttccgtgggcgtaccaacctgtccggcgagcaactggacatgcgcggacgcgaggatatccgcatcgtgccgttggtgatcgggagcaagcagtccggattgtttcagacggtattaggagctgcactcattgccgtaggtgtcttcgcaacgagtcttacgctcgggacaagcacgtttctgatctctgccggcgccagcatgatgctcggtggcgtcatgcagatgctcagcccccaacccaagggcctgaagggccgagaggcccccgagaacgcccccagctatgccttcggcggcccggtcaacaccatcgcccagggccatccggtcggcgtgctctacggcaagcgccgcatcggcggcgcggtgatcagcgccggcatctatgccgaggaccggctgtag

SEQ ID NO: 320095 - DNA, 771 bp, Pseudomonas aeruginosa
atggaactgagccgcagcctgcagcgggccatcgccgcacacgccgcccgcgagcatccgcgcgaatgctgcgggctgatcgttcgcggtgcgcgtcaacgccgctacgtggcctgtcgcaacgcagccggatcgcccagcgagcacttcgtgatcgatcaccaggactggtgcgccgccgaggaccagggcgaggtcctggccatcgtccacagccacccggacgttccggccacgccgagcatggccgatcgggtcagttgcgaactgcatggtctgccctgggtgatcctgtcctggccggaaggcgatgtcgcgcatctagcgccggagggctatcgggcgccgctgctcggccgcgagttcgcccacggcgtgctcgactgctggagcctctgtcgcgactggtaccgccgcgaggcaggtctggagcttccggactatccgcgccgcgacggttggtgggaaaccggcgagagcctctacgagcagcactatgcggcggctggattccggccggtgccgctggccggaatccgccgcggcgacatgctggtgatgcaggtcgggagggcgctgcacccgaaccacgcgggcatctacctgggcaatgactggcgtctggacagcgagccggtccaggcgctcggcggcgacggaccgttcctgctgcaccacctgtacggacggctgtcgacccgagacgtgttcggcggaccctggatcgaacgcacgcgcctggtcttgcggcacacgcggatgccgcagtga

SEQ ID NO: 320096 - DNA, 696 bp, Pseudomonas aeruginosa
atgaccatcacagccgatgaccaggccctcgagcctggggcgctggtgcgcctgttcgacctggattgcaccgggttcggcggcgagatgctgcgcttccacggccacctgcagcaggggccgatccactggcagggcaacgcctaccaagcttggccgctggaggcgcgcggcttcgagcagcgcggcgacggccgggccagttcgccgacccttagcgtgggcaacatcgacggcagcatcagcgcgctctgcctgttcttcgatggcctggtaggcgcgcgcctgaccgtgcgcgagacctatgcgcactacctggatgcggccaacttcgccgaaggcaacccgcaggccgacccctcccaggagcgcctgaacatctggttcctcgagcagaagaccgccgagaacagcgtccaggtgacctgggagctgtccgctccgccggacttccagggccagcagatcccggcgcgccagatcacctcgctgtgccactggtgcatcaccaacgagtaccgcgggcaggactgcaactacaccggcacggcgatgttcgatgccgacggcaatccggtggacgatccggcgctggaccgctgtggcggccgggtcagcgattgcaagctgcgcttcggcgcggacaacccgctgtcccacggcggcttcgccggcgccggcctggtcaggatgtga

SEQ ID NO: 320097 - DNA, 342 bp, Pseudomonas aeruginosa
atggctgatctggaacgctttacctgggacatctcgatcgattccgccggccaggcgaaccaactggtacgccaggtgcagtacggcggcggctacagccaggcgctcggtgacgggctgaacaacctcagcgagacctggcaggtttcgcgtaccggcgatctcgcgctgatcggcccgatccgcgatttcctcaagcgccacggcggctaccgctcgttcctctggaccttgcccactggcgaaccggtacgggtgcgcgcccagggctggcaattgcggccgcgcggcaacggcgtgttcaccctgaacaccaccttccagcaagtcttcaatccgtga

SEQ ID NO: 320098 - DNA, 1839 bp, Pseudomonas aeruginosa
atggccacgaataccgacggcagcctgacgctcgacctggtccttcgcagcgaagggtacagggccgggatggacaaggttggcaggatcaacgatcagaaaatgcgcgccatggaggcgcgcgcggaaaaggctggcaaggctatcggcaaaagcctggacagttcggcactgattgccagcagcgtgctggaccaggcgctggacatgctgggcaggaccagtcgccaggtggggcaggccaagaagcctgtgcagagcgcccaggacaaggtactggccgagtggaagacccggcagaaggagctgggcgaagcctggaagagctatcgcgaaccactccaggatctgtccaagctcaacgaagcactactgaagaactcttccgacaagctcgacaaggcgctgctcaatctcagcgagaccggcaagctgtcgcttgccaacgtgggcaaggccgcctacgccgatgccgcgcgcctcgcctcgcggcagatgaccctgatgctgctggacgggctgtttggctgggtcgccagcgtcggtaccgagaagcccaaggtcgacgacaaggcgggcaagggacaggcgaaggctggcgacgacgagaaggaacagccgtcgctccagtcgcaggtcttcaagcagtggctgttgcagatgaacagtgtctggggcgcctaccgcgcgccgctgcaggatatctccgggatgaccgacgagctgttcaggaatgcgtcggagaagctcgagaagtcgctgttcaatttcgccactagcggaaagctgtccttgagcaacttcgccaagacggtgatcgacgatgtcgcccggatcgccgcgcggcagctttcaatgctcgccctggacggattgttcggctggatgaatggcaaggccggcatcaccgaggcgcaactggccagccagaagccctatacctcgctactggaaaaggcccgagcagatgcgggacaagcggctgcgggcgctcccgcggcccagggtgccgcgccaatgccggcagcggcgatggatgtcggcgcgatggtggccactgcttccgggcagaccggggacggttccaaggtatcggctggaggggcttcggcgagcgctggcaagccggtgggcagttgggtcgaacagatggacgcctcctgggcgagcctgcgcgaccaggcgcaggacgtctcgggaatgatggacatgctgtttaccaacgccttcaccaatatggagaacgccctgttcacctttgccaccacgggcaagctgtcgttcaaggatttcgccgactcggtgatccaggatatggcgcggatcgccgcgcggcaggcgacgctgcagatcatcggcggcatcgtcggtgcggtcagcgggttcttcggtagcggcgcaacggcgggctcgcggatttccgactataccggctcggacatggccaattgggtcagcaagcaacgcgccggaggcatgcctgggttcgccaggggcggtgccttcaacgatggcatccagagcgcgccggcgctgttcagcatggccggcggtcgtccggcgctgatcggcgagcgtgggccggaagccatcatgccgctgagtcgcggttccgatggcgtgctcggcgtgcgcgcgctcggcggcggcgagggtggcaacgtcttcaatttctccaccagcgtcagcctgggcggcggccgcgagggcgcggcgacggccagcggcgacgacggtacgggacagcagctggcgggaatgatcaacgatgccgcgcgcaacgtggtggcgcaggagctgcgccccggcggcctggtatggaggatggtgaatggctga

SEQ ID NO: 320099 - DNA, 255 bp, Pseudomonas aeruginosa
gtgctgaacggcgtcggcgggtcgaccattgccgaggccaaggagcggctcagctacgccgagtaccgcgcctgggtcgcctatctgaacaagcgcggctcgctccatccgggacaccggctggagcttgcgctggctcggatcgctgcgttgctcgggcatgcgctgggagcggacgccgatcccgacgcgttccgtccgcatatggctctccagcccctttcgctgcaccaggcgatggatcaatgggcatga

SEQ ID NO: 320100 - DNA, 348 bp, Pseudomonas aeruginosa
atgaatctcaacgaacttcgtgcggcgggcggtttcatcgagtcggcgctggtgcgcaaggagattacctggacccgcgttcccgccggcaggaagaaggcggtcagcgacaccttccaggtgttcgtccgacgcaacagttttggcgcggtggagcgcctgttctccgccgaaggcgaccagcagagccgcaacgcgcgctacctcgccgaatgcattcgcctgggcgagacgggagaggaaagcctgacctacgaacaggcctacgacctcgacccggcgctgggcttcctgctgctgcaggcggtcggtgaggtcaaccgggtcgaggacgcggaaaaaaactga

SEQ ID NO: 320101 - DNA, 495 bp, Pseudomonas aeruginosa
atgtccatcctgactcaaggtacccagatctacgccctggttccgccggtatccggtaccggtgccgctaccgtcctggagatcgaaggcgtgacttcgttcaacccgggcggcaatccggccgaccagatcgaagacccgtgcctgagcgacacttcgcgcaagtacaagaaaggcctgcgcacccctggccaggcgaccctcggcatcaacgccgatccacgcctggccagtcacgttcggttgttccaactgtccgagaaagatggcgagacgagcgtcaagtgggccatcggctggtccgacggaatcgacgtaaagccgaccgtcagcaccgaaggcgacgatttcgtgctgccgccggcgcgcacctggttcaccttcgaaggctacgtcagcgacttccccttcgatttcgccagcaacacgctggtcgctacccaggccaccatccagcgttccggcgccggcaagtggacgccgaagtcggcttga

SEQ ID NO: 320102 - DNA, 258 bp, Pseudomonas aeruginosa
atgactcgtctcctgctggggctttgtctgcttttcgcgggctgcgcagcctcgccgacgacacctcgccccgtgcgcgtcgaggttcccctcgcagtgccctgccgtgtacctgacgtgcgcccgccgagctgggccggcgccacgctgaaggccggcgattcgctgcaggccaaggttcgcgcattgctcgccgagcgccgccagcggcagggctacgaactcgaattgcaggcggcattgcgtgcctgccgctga

SEQ ID NO: 320103 - DNA, 363 bp, Pseudomonas aeruginosa
atgagccggctcgctctgctcctgccggccgtgttgctggtcctgctggccggcgccttgctcggcggcggcctggttgcccgccactatcgtccgcaactggaggaggccctgggccaactcactgccagccgcgtcgccagcggccagctcgaggctttgctcgatgagcagcagcgagcgctggcggcggtgcgggcgagcgccgagaggcgcgcgaaggacgtcgagcaggcactcggcgaggccagggcgcaggccgcggagcagtatgccgcggccgtgcgtctgctccaggaacccgacattggtgtggactgccaggcggcaggtgcggcgatcgaccgggagctgggactatga

SEQ ID NO: 320104 - DNA, 630 bp, Pseudomonas aeruginosa
atgaaactgaccgagcagcaattgctgcgcatttttcccaacgcccgcctcgtcgcgggcgttttcgttgcggcgttgcaacgggccatggacgagagggagatcgacacaccggcgcggcgtgccgcgtttctcgcccaggtcggccacgaaagcagccagttgaaccggctggtggagaacctcaactacagtgcccaaggcttggcggcgacctggccgagccgctatctcggccccgacgggcagcccaacgcgttggcctggcggctggcgcgcaatccgcaggcgattgccgacaacacctacgccacgcgcaacggcaatggcgacgaagcgtccggcgatggctggcgcttccgtgggcgtggcttgctacagatcaccgggcgtgccaactaccggttggtcggcgaggccctcggcgagccgctggaagccgagccctggcgcctggagcagcccgtgccggcggcccgcagcgccgcctggtggtgggccggtcacgggctcaacgagttggccgaccgcggcgagttcgctgccatcacccgccgcatcaacggcggcctgaatgggcaggcggagcgcctggcgttgtggcagcgggccagggcggtgctgtcatga

SEQ ID NO: 320105 - DNA, 348 bp, Pseudomonas aeruginosa
atgggcaacgaaccgcagacactgacggaaatgccgctctgggtactgatcctgctcgccgcgctgggcggcgtcagcggcgagatgtggcgtgccgacaaggccggtctcggcggctgggccttgttgcggcgcctggcgctgcgctccggcgcgtcgattgtctgcagcgtggcggtgatgctgctggcattggcttgcggcgccgcgctgctgttcgccgcggcgctgggcagcctgaccgccgcggccggcgcggagatcgccgtcggtctctacgaacgctgggccgcccggcgcctgggggtttgcgagctgcccgaggaggagccgcatgagcggacataa

SEQ ID NO: 320106 - DNA, 360 bp, Pseudomonas aeruginosa
gtgatcaaagccatcgatgaaatgctcaagctctgggccgaggaaatgcacgcgccaggcagcaacggaggcggctacgccggcggcaacctgatcgccatgctgatcgccagcaagggcgaggtggtccgcggccaccgtggcagccgggtgatcctcgaccgtgtggcggaggtcgatcgcctggtaaatcgcctacccgaggaactgaagaacgtggtggtggagcactatctcaatcgcgacagcttccccgagcagaagtaccgccactgcggttgcagccgcaacaccttctatctgcgcctgcatgtggcgcaccagggtatccaggacggcctgctgcggcgggtggcctga

SEQ ID NO: 320107 - DNA, 201 bp, Pseudomonas aeruginosa
atggctgaccttgccgatcacgccaacgaactggtcctggctcgcctcgacggcctcctggcggcgcgcccggcgctggccatccgcgagtccgcggaagactgcgaggactgcggcgagcccattccccaggcgcgccgccgggcggcaccgggctgcagtcgctgcatcgactgccaggaccgccacgagcgccgttga

SEQ ID NO: 320108 - DNA, 171 bp, Pseudomonas aeruginosa
atggacggcgctccggccctccaggtgccggagcgctttcccatggccccggcacccaagcagtcggcacctgcatcgtcggtcgccgacaaccgggtgcgtccctgcacccatgtgaaatctctgaaaggcgggtgggaagttgtggaactcaccccttccgctttctga

SEQ ID NO: 320109 - DNA, 771 bp, Pseudomonas aeruginosa
atggacaagagcacccagatcccgcccgacagcttcgccgctcgcctcaagcaggccatggcgatgcgcaacctgaagcaggaaaccctcgccgaagcggcaggggtttcgcagaacaccattcacaagctgacctcgggcaaggcccagagcacccgcaagctgatcgagatcgcggcggccctgggcgtctcgccggtctggctgcagaccggcgaaggcgctccagccgcgcgcagtgccgtgtccgtggccgatggcagcccattggtgctggaaccgctgcatccgtgggacagcgacacaccgctggacgaagacgaagtggaactgccgctgtacaaggaagtggagatgtccgccggcgccggacgcactgcggtacgcgagatagaggggcgcaagctgcgtttttcctatgccacgctgcgtgcctcgggcgtcgatccgtcggcggcgatctgcgcccaactcaccggcaacagcatggaaccgctgatcatggatggctccaccatcggcgtggacaccgccaccacccatatcaccgatggcgagatctacgccctcgaacatgacggcatgctgcgggtgaagttcgtctatcgcctgcccggcggcggcattcgcctgcgcagcttcaaccgcgaggaatatccggacgaggagtactcgccggaggacatgcgcagccgccagatcagcatgatcggttgggtcttctggtggtccaccgtacgccaccggcgcggcccgtccctggtgcggtga

SEQ ID NO: 320110 - DNA, 315 bp, Pseudomonas aeruginosa
atgcagccatccatcgcccctagcactccgattccacgccaggaaaccgtggaattggtctaccgcatcttcggcgacgtcctggtgccgctggagcaggttcgcgaacgctggtttcgcaacctgaacaaggaaaacttcagcaaggccctggcatgcgggcggatcgccctgccggtgacgaccctcgacgatagccacaaggccatgcagttcgtggccctcgatcacctcgccgcctacgtcgaccagcgcgcgaaccaagccggaggcgcccgtcgagcacagccgggcgctgacagcatcgcatcctga

SEQ ID NO: 320111 - DNA, 1479 bp, Pseudomonas aeruginosa
atgaatcgcgaagaattcctgcggctggccgccgatggctacaaccgcatcccgctgtccttcgagacccttgccgacttcgacacgccgctgtcgatctacctgaagctggccgacgcgccgaactcctacctgctggagtcggtgcagggcggcgagaaatgggggcgctattcgatcatcggcctgccgtgccgcacggtgctgcgggtctacgaccatcaagtgcggatcagcatcgatggcatggaaaccgagcgcttcgattgcgccgacccgctggctttcgtcgaggagttcaaggcgcgctaccaggtgcccaccgtgcccggcttgccacgtttcgatggaggcctggtcggctacttcggttacgactgcgtgcgctacgtggaaaaacgcctggccacctgtccgaacccggacccgctgggcaacccggatatcctgttgatggtgtccgatgccgtagtggtattcgacaacctggccgggaagatccacgccatcgtcctcgccgatccctccgaggaaaatgcctacgagcgcggccaggcacgtctggaggagctgctggagcgtctacgccagccgatcaccccgcgtcgcggcctcgacctcgaggcggcccagggtcgtgagccggcgtttcgtgccagcttcacccgcgaggactatgaaaacgcggtaggaaggatcaaggactacatcctggccggcgactgcatgcaggtggtgccgtcgcagcgcatgtccatcgaattcaaggcggcgcccatcgacctgtaccgcgcgctgcgctgtttcaatccgacgccctacatgtacttcttcaacttcggcgacttccatgtcgtgggcagctcgccggaggtgctggtacgggtcgaggatggcctggtgacggtgcgcccgatcgccggtacccgtccgcgcgggatcaacgaagaggccgacctggcactggagcaggatctgctgtcggacgccaaggagatcgccgagcacctgatgctgatcgacctggggcgcaacgacgtggggcgggtgtccgatatcggcgcggtgaaggtcaccgaaaaaatggtgatcgaacgttactccaacgtcatgcacatcgtgtccaacgtcaccgggcaattgcgcgaggggctcagcgcgatggacgcgctgcgggcgatcctgccggcgggcactctatccggcgcgccgaagatccgcgccatggagatcatcgacgagctggagccggtcaagcgtggagtctacggcggcgcggtcggctacctggcatggaacggcaacatggacaccgccattgccatccgcaccgcggtgatcaagaacggtgaactccacgtgcaggccggcggcggtatcgttgccgactcggtgcccgcgctggagtgggaagaaaccatcaacaagcgccgggcgatgttccgcgccgtggcgctggccgagcagagcgtcgaataa

SEQ ID NO: 320112 - DNA, 819 bp, Pseudomonas aeruginosa
atgagcgctgcggagccgttcttcgccacgcgcctgccgcgtctggtgatgttcgacctggatggcacgctggtcgattccgttcccgacctcaccgccgcggtcgacagcatgctcgccagcctcgggcggccgccggcgggcatcgagaaggtccgccagtggatcggtaacggcgcacgcgtcctggtgcgtcgcgccctggccggaagcatcgagcacgacggcatcggtgaggaggaaaccgaagccgcgctggcgttgttcatggaggcctatgccgacagtcatgcgctcaccgaggtctaccccggcgtcgtcgacaccctcaagtggctcaagcgcaacggcgtggaaatggcgctgatcaccaacaagccggagcgcttcgtcgctccgctgctggatgagatgaagctgggtcgctattttcgctggatcatcggcggcgacaccctgccgcagcagaagcccgacccggcggcgctgctgttcgtgatgaagatggccggcatcgagcccgaagatgcgttgttcgtcggtgactcgcgcaacgacgtgctcgccgccaaagctgccggcgtgcgctgcgcggcgctgacctatggctacaaccacggccggccgatcgccgaggaagcgcccaccctggtcatcgacaacctgcgcgacctgctgccttgcgccgaccaggccgctgagatagtgttgccggacgactccctttccccctccgaccagcgagatcaagccgtggcggtcagcaaactctggatgaaggtcatcaaggccctggcgcgttggcgctggcgcgcctga

SEQ ID NO: 320113 - DNA, 675 bp, Pseudomonas aeruginosa
atgcaacccttcgccatcgctccgtcgatcctttccgccgatttcgcccgcctgggcgaggacgtggacaaggtgctcgccgccggtgccgacatcgttcacttcgacgtgatggacaaccactacgtgccgaacctgaccatcggcccgatggtctgctcggcgctgcgcaagtacggcgtgagcgcgccgatcgacgtgcacctgatggtgtccccggtggatcgcatcatcggcgacttcatcgaagctggcgccacctacatcaccttccatccggaagcttcccagcacatcgaccgttccctgcaactgatccgcgacggcggttgcaaggcgggcctggtgttcaacccggccactccgctggaggtgctgaagtacgtgatggacaaggtcgacatggtcctgctgatgagcgtcaaccccggcttcggcgggcagaaattcatccccggtaccctcgacaagttgcgcgaggcacgcgccctgatcgatgcctccggtcgcgagatccgcctggagatcgatggcggcgtcaacgtcaagaacatccgtgagatcgccgcggcgggcgctgataccttcgtcgccggctcggccatcttcaacgccccggactacgccgaggtcatccgcgccatgcatgccgaactggcccaggcgcaccagtaa

SEQ ID NO: 320114 - DNA, 831 bp, Pseudomonas aeruginosa
atgctgagtccctacatgtccccggtcgagcgcctgtggttctactccctgcgcatcctctgcggcctggtactgctgttcctggtactgccggtgctggtcatcgtgccgctgtcgttcaactccggcaccttcctggtctacccgctgcaagggttctccctgcgctggtacgccgacttcttccagtccgccgagtggatgcgctcgttgaccaacagcatgatcgtcgctccggcggcgaccctgctggcgatggtcttcggcactctggccgcgatcggcctgacccgcggcgagttccgcggcaaggcactggtgatgagcctgatgatttcgccgatggtggtgccggtggtgatcatcggcgtggccagctacctgttcttcgctccgctggggctcggcaacagctacctgtcgctgatcgtggtgcatgcggtgctcggcgtgccgttcgtgatcatcaccgtctccgcgaccctgcaggggttcaactacaacctggtgcgcgccgccgccagcctcggcgcgccgccgctgaccaccttcttccgggtgaccctgccgctgatcgctccgggagtgatttccggcgcgctgttcgccttcgccacctcgttcgacgaagtggtagtgaccctcttcctcgccggtcccgagcaggccaccctgccgcggcagatgttcagcggcattcgcgagaacctgagccccaccattgccgccgcggcgaccttgctgatcggtttctccgtactgctgttgctgaccctggaatggctgcgcgggcgcagcgagaagatgcgtaccgcacaacccggcggctga

SEQ ID NO: 320115 - DNA, 1248 bp, Pseudomonas aeruginosa
atggccacagctgtgcccatgtcccaggccgccggcagcaccctcaagcaacgcctggcgcgcgccgagcggatgaaccgcctgaagtcccaggcgctgatcctgcccctgctggccttcctggtcctgaccttcctggtgccgatcgccgccctgctctacaagagcgtgtccaacccggaagtggttcgctcgttgccgctgacggtagaagccatctccgcctgggacggcaagtcgctgccggccgacgccgtctacaaggcgctcagccaggatctcgccgaggctcgtcgcaaccagaccatcggcgatctctccaagcgcctgaacatggaactggcaggttatcgcagcctgatggcgaagaccgcgcgcaagctgccgttcaaggaggagcccgcttcctacaaggacgccatggagcagctcgacgagcgctggggcgaccccgcctactggcaggtgatccgccgcaacgccagcagctatacgccctattacctgctcgcggccctcgaccaccggatcgacgatctcggcgaagtggcgcgcgccaccccggaccaggccatctacctggacatcttcgcccgcaccttctggatgggtgcggtgatcaccatcatctgcctgctgctggcctacccgctggcctacctgctggccaacctgccgacgcgcaagagcaacctgctgatgatcctggtcctgctgccgttctggacctcgatcctggtacgtgtcgctgcttggattgtcctgctgcaatcgggtggcctgatcaacggcgcgctgctcaagcttggcctgatcgaccagccgctgcaactggtgttcaaccgcaccggcgtatacatcgcgatggtgcacatcatgctgccgttcatgatcctgccgatctacagcgtgatgaaaggcatttcgccgagctacatgcgcgccgcgatttccctcggctgccacccgttcgccagcttctggcgggtgtatttcccacagaccgtcgcgggcgtcggcgccggttgcctgctggtgttcatcctgtccatcggctactacatcaccccggcgctgctgggcagcccgaacgaccagatggtcagctacttcgtcgccttctataccaacagcaccatcaactggggcatggccaccgccctcggcggcctgctgctgctcgctaccctggtgctctacgtcgtctacagctggctggtgggcgccagccgcctgcgcctgggatag

SEQ ID NO: 320116 - DNA, 1047 bp, Pseudomonas aeruginosa
atgtcgaaatccctgaaagcggccagcctgaagttcgccaccctggcggccggcctggcctgcgcggcccaggccatggcggtggacctgaccgcggtgtccttcggcggggccaacaagagcgcccagatcaaggcgttctacgagccctaccagaaagccaccggcaacaggatcgtcgccggcgaatacaacggcgagatggccaaggtcaaggccatggtcgataccaacagcgtgtcctgggacctggtggaagtggagtcgccggagctgtcgcgcggctgcgacgaaggcctgttcgaggaactcgacccggcgcagttcggtaagaccgaggacttcgtgcccggcgccatccaaccgtgcggcgtgggtttcttcgtctggtccacggtgctcgcctacaacgccgacaagctgaaaagcgcgccgaccagttgggcggacttctgggacatcaagaaattccccggcaagcgcggcctgcgcaagggcgccaagtacaccctcgaattcgccctgatggccgatggcgtggcgccgaaggacgtctacggcgtgctcgccaccaaggaaggccaggatcgtgccttcaagaagctcgacgagatcaagtcgagcatccagtggtgggaggcgggcgcccagccgccgcagtacctggcttccggcgatgtggtgatgagttctgcctacaacggtcggatcgccgcggtgcagaaggaaagcaacctgaaggtggtatggaacggcggcatctacgatttcgacgcctgggccatcccgaagggggcgaagaaacgggaagagaccctgaagttcatcgccttctcggtgcagccccagcagcagaagacttactcggaaaacatcgcctacggtccggccaacaagcaggcggtgccgctgctggacaaggccctgctgaaggacatgccgaccactccggaaaacatccagaaccaggtggcaatggacgtgaccttctgggccgactacggcgaacaactggaacagcgcttcaacgcctgggcggccaggtaa

SEQ ID NO: 320117 - DNA, 1110 bp, Pseudomonas aeruginosa
atggccgagactcaaggcggcgatgtgctggtcagcttccgtggcgtgcagaagagctacgacggcgagaccctcatcgtgaaggatctcaacctggacattcgcaagggcgaattcctcaccctgctcggcccctccgggtccggcaagaccaccagcctgatgatgctggccggtttcgaaacccccaccgccggcgaaatcctcctggctggtcgctcgatcaacaatgtccctccgcacaagcgcgacatcggcatggtgttccagaactatgcgctgttcccgcacatgaccgtggccgagaacctggcctttcccctcagcgtccgcggcatgagcaagaccgacgtgaaggaaagggtcaagcgcgcgttgtcgatggtccagctcgacgccttcgccgggcgttatccggcgcagctttccggtggccagcagcagcgcgtggcgctggcccgcgcgctggtcttcgagccgcaactggtgctgatggacgagcccctgggagcgctggacaagcaacttcgcgagcacatgcagatggaaatcaagcatctgcaccagcgcctcggcgtcaccgtggtctacgtcacccacgaccagggcgaggcgctgaccatgtccgaccgggtggcggtgttccaccagggcgaaatccagcagatcgagccgccgcgcaatctctacgagcagccgcgcaacaccttcgtggccaacttcatcggcgagaacaaccgtctatccgggcagcttctcagttgcgacggcgagcgctgcgtggtcggactgccgcgcggcgagaaggtcgaggcgctggcggtcaacgtcggccagccgggcgagccggtgaccttgtcgatccgccccgagcgggtgcgcctgaacggtgccagcgagtcttgcgtcaaccgtttctccggccgcgtggccgaattcgtctacctgggcgaccacgtgcgtgtgcgcctggaggtttgcggccgcgacgacttcttcgtcaagcagccgatcgccgagctggacccgacgctgagcgtcggtgatgtggttccgctgggctggcaggtcgagcatgtgagggcgctcgaccctctgccggcggcgtga

SEQ ID NO: 320118 - DNA, 1035 bp, Pseudomonas aeruginosa
atgttgccagccatgaggacgggcctgttgtgcgcccttctcggagttaccgcgcccgcctgggcggaatacgtgaccgtgatttccttcggcggcgccaacaaggaagcccaggaaaccgcgttctacaaacccttcaagagcgccaccggcaatcgcgtggtgcatggctcctacaatggcgacctggccaagctcaagcgcatggtggagatcagccacgtctcctgggacgtggtggaagtcgaggcgccggagctggcgcgcggttgcgaggaaggtctgttcgagaagctggacatggcgaaggtcggcgatcccgcggatttcgttcccggcgcggtgcagccctgcggagtcggcatcttcgtctggaccacgctgcttgcctacaaccccggcaaggttgcgggcagcccgcagggctgggcggatttctgggacgtgaagaagtttcccggcaagcgcggcctgcgctggggcgccaagtacagcctggagttcgccctgatggccgatggcgtgccgccgaaggacgtctaccagacgctggcgacgcccgccggcgtcgagcgggcattccgcaagctcgacgagctgaagccctatatccattggtggaagtccgggcaggaccctgtgcgcgacctggccgatggcacggtggtgatgagttcggcctacaacgggcggatcgccgcggcgcaggccgagaagcagcgcctggcaatggtctggagcggcggcgtctacgatttcgacttctgggcgctgccggtcggggtttggaagaagcagttggccgaggagttcatccgtttcgccagccagccggagcagcagaaggctttcgccgagaacatcgcctacggcccggccaaccgcaaggcggtaggcctgctcgatccgcaagtggctgccaacctgccgaccgcgccgcagaacatgcagaacgcggtgggtatgaacgtggccttctgggcggagcacggcgaggccctggagcagcgtttccagaactgggccaagcgctga

SEQ ID NO: 320119 - DNA, 633 bp, Pseudomonas aeruginosa
gtggtgatccgagtcctggtcgctgaagaccacacgatcgtcagggaaggcatcaagcaactgattggcatggccaaggacctgcaggtggtcggcgaggccaccaatggcgagcagttgctggaaacactgcgcggaacgccttgcgaggtggtcctgctggatatctccatgcccggcgtcaatggcctcgaggcgattccgcggattcgcgcgctgaacgagccgccggcgatcctggtgctgtcgatgcacgacgaggcgcagatggccgcccgcgccctgaagataggtgctgccggctatgccaccaaggacagcgatccggcattgctgctcaccgcgatccgcagggtcgccggcggcggacgctacatcgacccggaccttgccgatcggatggtcttcgaggtcggcctgaccgattcgcgtccgccccatgcgctgctttccgagcgcgagttctcggtgttcgagcggctggtgcagggcgccaacgtcaacgagatcgcccagcaactggcggtcagcaacaagaccatcagtacccacaaggcacgcctgatgcagaagctcaacgcgcattcggtagccgacctggtgcgctacgcgatggagcaccgcctgctctga

SEQ ID NO: 320120 - DNA, 2394 bp, Pseudomonas aeruginosa
atgttgcgtcgttgctgtctgctcttcttctgtctgctgttgagcctgcccgtgcgagcggaggagtcggtcgccttgccgctggcggcggagttacggacctggctggcggagcatcgggaattgcgcgtcggggtggtcaccgaagcgccctatgcccagtacgaccgccgcctgcaacagtattccggggccaacgtggagctgatgggctggctggccacggcaatgcaggtgaccttgcggtggcagggctatcccgaccaggcggcgctcgacgatgccctgcgcgctgggcgcgtggatatcgctcccggcctcagccagaccccagccgggctgcgcttgtggctgttctccgatccctacctgcgggtttcccggctggtggtggggaagcgcgatggcagcggcagcgtcgaattggagcaactggagcgcgatacccgggttgccgtgcgggccggcagttcggtagctgactacctcagcagcacctatagcggcctgcaatgggtgtcggccgattccgaacgcgaggtgctgcgcgccgtgctcgccggacaggcacgctacgcggtgatcgacgaagcgcaactcagccgcctgacccgcgagccggagttcgccgagctagcggtggttggcgacatcggctatccgcaactgctacggttggcgacccgccgcgattggccggaactggcgatggtggtcgaccaggcgttgcgttcgctgccgcgcaagtccctggaccagttgcacgagcgctggttgcaacccaagtatccgcgcctcggcgagtcgccggggttctggcagaacctgtcgatcctcctcggcctgctgctggccggcgcgctggcggcggtgttcctccagcggcgccagcagcatgcgctggaagcccggctgtacggcgcccgccgcgacctggagctgcgccaggcggccgaggaggcgctgcgcctgacccagttctccatcgacaacagcaccctgggcatcctctgggtcaactgggacagccgcgtacgctacgccaaccgcgccgccgaacagatgctcggccatgccgacggtcaactcgtggaccgtccgctggccgacttcgagcccggcctggacatggaccgctggttgaatctttggcgtcgtgcgcgcaatagcgaggagggcccgctcagcttcgagacccgctgcctgcgcgccgacggcagttggctgccggccgacgtctcgcttagcttcctgcgcttcggcacgtccgagtatctggtggtgttcctcagcgacgtcaccgagcgccgccgtgcccgcgaggcattgcaggaaagcgaggcgcggatgaagggcatcgcctccaacgtgccgggcatggtcttccgcctggagcgcccgcgggccggcgcgttttccgacttcgcctatatcagcgagggcagcgaggcgctggtcggctacagcgctcgcgaactgatcgaaagcggccgcggcattcgtggcctggtccatcccgacgaccgcgagcgctactggtcgagccagatggctgccctcgacgagaatcgcgactggcattggcagggccgcatcctcacccgccagggcgaattgcgctgggccgacatcaaggcttcggcgcgctgtttcgaggatggtcgtgcggtctgggacggggtggtctgggacatcaccgcgaacaagcagatcgaactcgaactcggcgagtcgcgcgcccagctccgcgagctgtcggcgcacctggagtcggtgcgggaggaggagaaggcgcgtatcgcccgcgaggtccatgatgagctgggccaggtgctgacggtgctgaagctggaaacctcgatgtgcgagctggcctatgccgatgcccaggagggcctgcgcgaacgcctgggcaacatgaaaaagctgatcgcccagttgttccagctggtgcgcgacgtggctaccgcactgcgcccgccgatcctcgacgccggaatcggctcggcggtggagtggcaggcgcggcgcttcgaggcgcgcacgcagattccctgcctggtggaggtgccggagaactcgccgcagttggtcgacgccaaggctatcggcctgttccgcatcctccaggaggcgttgaccaatgtcatgcggcatgccgaggcgcatactgtgcaactgcgtctgctgcgcgagggcgacgagctgtgcctgagcgtcagcgacgacggtcgcgggttcgatgttgccacggtggggcgtggcagttccttcggcctggtcggcatgcgtgagcgggtgctgatgatgggcggtacgctggacatcgacagtgcccccggcgagggcaccacgctcagcgtgaggattccgctgggcgtcgcgggcccgtga

SEQ ID NO: 320121 - DNA, 1062 bp, Pseudomonas aeruginosa
atgccggccttctctctactgccgaagccctccgccctgctgccgctgctattggccgccgctttcctgccgccggctttcgttcatgccgaagaggaggccgccaaggaccagccgcaggcccccgtggaacgcccggcggtcagcgagcgcagccaggacgaggccaaggggctggagcgccagttgccggaggacggccagcagatcctcaaggccggcgacgaaagcttcctcaccctctggttgccagccaacaccgccgaggccgaaggtgtggtgatcctggttcccggtgatggcgaaagtccggactggccgcaagccatcggcccgctaaggcgcaaactgccggatgccggctggcagaccctgagcctggccctgcccgacccgcagagcaccgcgccggttacccgccctgcggaatccgccgccagcgccagcgccgacaaggacgccagcgccgcggacagcgcaagcaagcctgacgtgaaaggcgaaagcggccacgcgccggcgccggaaagcaccgccgaagccggcagcggcgaaccggcgcagagcgaggaccaggcccctcccccagccatcgatccggtcgagcagcgcaaggcgcacgccgaacgggtcatggcgcgcctgcaggcgagcatcgacctggccctgcagcacgaaccgaaaagcgtcgtcctgctcggtcatggcacgggcgcctattgggcggcacgctacctggcggagaaggagcctgcggaaatccacaacctgctgctggttgccgcggaggtaccgcgcgattttcgcccggcgctggaagatatggtgccgaagctgaaactggcgaccggcgacttctattaccgcgacgcccgcgccgaccgcgaggcggccaggctgcgcatgcaggccggcaagcggcagaaacacccggcctacgtacaaatcgcgatgcaggcgctaccggccgaccccaaggcggagcaggagcaactgtaccgacgaatccgcggctggctcagccttcacctgcaggccgatgcgcagaaacctgcggagtga

SEQ ID NO: 320122 - DNA, 759 bp, Pseudomonas aeruginosa
atgctctggcccgctacgctgatcggagccggagccggctgggccctggccagcatccccggcgccctgctcggcggcctgctggggcaactgctggaccgcaggttgcgcctggagtcctggcgcggcctgctggcgcgcttgcgcgggcgggcggtgaacgatgaggacgacctgctgttccagttgctcggctatctggccaagagcggcgggcgggtggaggagatgcatatccgccaggcgcgcgaggagatggcgttgcgcaagctcgataggcgagcccagcggcgtgccatcgcgtccttcggcaagggcaaggccggcatcgcccatctgcaggcggaggtcgcgcgtctgaagggcgaacgtgcggaggcagtattgctcgcctgctggcggatggcctgggctggcggcgtgctcagccagtcggcgcgacaactggtgttgcaatgggggcgctggctgggttggtcggcggagcgaacggaacgcttgtcggcgcgggtcatgccgaagcccacgcgcgctgtcgcccgggatagctaccgtgaggccctgctgctgctcggcgtggaggccggaagcgagccggcgctgatcaaacgcgcctatcgcaagctgatcagccagcaccatccggacaaactggcgggagccggcgccagcgtcgagcgcgtgcgtgcggctaccgagaaaacccgtgaattgcaggcggcctacgccctggtccgagagcgtgaggggttccgctga

SEQ ID NO: 320123 - DNA, 675 bp, Pseudomonas aeruginosa
atgaaggcgatgatcctcgccgccgggcgtggcgagcgcatgcggccgaccaccctgcacacgcccaagccgctgatcgaggccgccggcgtgccattgatcgagcgtcagttgctggcgctgcgccaggccggagtcgacgactgggtgatcaaccatgcctggcttggcgagcagatcgaggcctatctcggcgacggttcgcgcctgggcgggcggatcgcctattccccggagggtgaaccgctggaaaccggtggcggaatcttccgcgccctgccgttgctcggcgagcagccgttcctgttgctcaacggcgatgtctggagcgacttcgactactctcggctgcatcttgccgacggcgacctggcgcatctggtgctggtcgacaacccggcgcaccatcccgccggcgatttccacctggatgccggcggacgggtgggcgagacccgcgaagcgggcggcaacctgacctacagcgggatcgccgtactgcatcccgcgctgttcgagggctgccagccgggcgccttcaagctggcgccgctattgcgcaaggccatcgccgcggggcgggtcagcggcgaacaccatcgtgggcagtgggtcgacgtcggtacccacgagcgcctggcggaagtcgagcgattgctggcggagcacgcctga

SEQ ID NO: 320124 - DNA, 1017 bp, Pseudomonas aeruginosa
atgtctgatgatgcccgtttccagcagctgaatcgctggttggactcttgtttgcccgagttgttcgttgccgaaggttggggggaagtgccccccgccgaactgatcccggccagtagcgacgccagcttccgtcgttatttccgctggcagggaggggaccgcagcctggtggtgatggacgcgccgccgccccaggaagactgccgaccgttcgtcaaggtcgccggactgctcgccggagccggcgtgcatgtgccgaggattctcgcccaggatctggagaacggtttcctgctgctcagtgacctgggccggcagacctacctcgacgtgcttcatcccgggaatgccgacgagctgttcgaaccggccctggatgcgctgatcgccttccagaaggtcgatgtcgccggtgtcctgcctgcctacgacgaagcggtgctgcgccgcgagctgcagctgttccccgactggtacctggcccgccacctcggcgtggagctggagggcgagacgctggcccgctggaaacggatctgcgacctgctggtacgcagcgcgctggagcaaccgcgggtgttcgtccatcgcgactatatgccgcgcaatctgatgctcagcgagcccaacccgggcgtcctcgacttccaggacgccctgcacggcccggtcacctacgatgtcacctgcctgtacaaggacgccttcgtcagttggccggagccgcgcgtgcatgccgcgctgaaccgttactggaagaaggcgacctgggccggcatcccgctgccgccaagcttcgaagacttcctccgtgccagcgacctgatgggcgtgcagcgccacctgaaggtgattggcatcttcgcccgtatctgtcaccgcgacggcaagccgcgctacctgggtgacgtgccgcgcttcttccgttatctggaaaccgccgtggcgcgccgtcccgagctggccgaactgggcgagctgctggcctcgctgccgcagggagccgaggcatga

SEQ ID NO: 320125 - DNA, 2793 bp, Pseudomonas aeruginosa
atggcagtgaaatccctcgtgtttcgaagaaagtttcccctgctggtcaccggcagcctgctggctctgcagccggtcgcagcattgactgtacaggccgccgatcagttcgactgcaaggtgtcggccaccggcggctgggattgctccccgctgcagaacgccaatgccaacctgccaccgcgcccggcgcataccgcgacctcggtcagcaccgccgcggcgggcagcagcgtgtccggcagcggaggcgaaaccgtcgaggcagagccgacccagcgcctggtcaccgagtccggcggtcgcgcgctgaaatcccgcagtgcggactattcgcacctcgactggattcctcgggaaaaactgaccgccgcccagttggcggaaatcggcccctattgcggcggctcctacatcgagccggtgcgtccgggcatggatgacggcgcgcccagcgacgagagcccgacctacgtatccgccaaggcttcgcgctacgagcaggaaaaacagatcgccaccctcgccggtgacgtggtcctgcgccagggaagcatgcaggtggaaggcgacgaggccaacctgcaccagctggaaaaccgcggcgaactggtcggcaacgtcaagctgcgcgacaagggcatgctggtggtcggcgaccacgcccaggtccagttggacaacggcgaagcccaggtcgacaacgccgagtacgtgatccacaaggcccatgcccgcggcagcgcgctctacgccaagcgcagcgagaacgccatcatcatgctcaaggatggcacctacacccgctgcgaaccgagcagcaacgcctggaccctgaagggcaacaacgtcaagctgaacccggccaccggcttcggcaccgcgaccaacgcgaccctgcgggtcaaagacttcccggtgttctacaccccgtacatctatttcccgatcgacgaccgccgccagtccggcttcctgccgccgagcttcagcagcaccagcgacaccggcttcaccctggtcaccccgtactacttcaacctggcgccgaactacgacgccacgttgtacccgcgctacatggccaagcgcggcatgatgctggaaggcgagttccgctacctgacccacagcagcgaaggcaccgtcaacgccgcctacctgaacgacaaggacgatcaccgcgagaacttcccggactacagcaaggaccgctggctgtacggcctcaagaacaccaccggcctcgattcgcgctggctggccgaggtcgactacacgcggatcagcgatccctattacttccaggacctggatactgacctgggtgtaggcagtaccacctatgtcaatcagcgcggcagcgtgacctaccggggcgatacctttaccggtcgcctgaacctgcaaggttatcaactggcgaccaccaccgacgtgacgccttacaaccgtctgccgcaggtcaccttcgacggtttcttgccatacaatccgggcggcctgaaattcgactacaaaaccgaattcgtccgcttcgacagagacctcgatgacggatactacatcgcggacgagaacgaccctatcggttcccgagtaccccgtgtcgacaacaacctgaagggtctggcccgggccaatggcgaccgggcacacctggaacccggcatgagtctgccgatgacccggagttggggttatctgaccccgaccctgaagttcctctatacgaagtacgatctggatctggacagccagggcaagcaaacccttactgcatatgacgaaacattcgatagcagtcaggatcgctcgcttccgttggccaaggttgacagtggcctgtattttgaccgtgatatgacctttgccggcacgcagtttcggcaaaccctggaaccaagagcgatgtatctgtacgttccgtacaaggaccaggacaatattccagtattcgacaccagcgaaccgtcgttcagctatgactccctctggcgagagaatcggttctccggccgtgaccgtatcggagacgccaaccaattgtcgctcggcgtgactacccgcttcatcgaacccaatggattcgagcgcgccagcttgagtgctggacagatttactacttccgtgatcgtcgtgtacaactgcccggcctgaccgaaaaagatttggatcgtctgcgtgcgaccaatcctgatctgaaagatccggataccgatagctggcgttctccatatgcactgatggggcaataccgcttcaaccgcgactggagggtcagctccgacttcaactggaatcccaacaccagtcgtacagaatctggcagcgccatgttccactatcagccagaagacaatccaaacaaggtggtcaatgctggctatcgctaccgcgaagatgctcgccgcttcaacagctccacgggacggttcatgtacggccgcgaggacgacatcatcaaacagcacgacttctcggtcatctggccgatggtgccgcagtggtccgtgctcgcccgctggcagtacgactacaacaagaaccgcaccctcgaagccttcggtggcttcgaatacgacagctgctgctggaagctgcgtctgatcaaccgttattggctggatgtggacgacgatgccttccttacgcagaacgcaaaggccgaccgcggcgtcttcctgcagatcgtcctgaagggcctcggcggcatcgtaggcaacaagacggaaatgttcctcgacaaaggcatccaaggttatcgtcaacgtgaagatcaagctatgtaa

SEQ ID NO: 320126 - DNA, 1293 bp, Pseudomonas aeruginosa
gtgaagatcaagctatgtaatcggctgcgcccccttgcattgggcgcagcactcctttgctccttcgcgcatgccgaagtggtaccactggaccgggtcgtcgccatcgtcgacaacgatgtgatcatgcagagccagctcgaccagcgcctgcgtgaagtgcaccagacgctgctcaagcgcggcgcgccgctgccgcccgagcacgtgctgacccagcaggtgctggaacgcctgatcatcgagaacatccagcagcagatcggcgaccgctccggcatccgtatctccgacgaggagctgaaccaggcgatgggcaccatcgcccagcgcaacggcatgagcctggagcagttccaggccgccctcacccgcgacggcctgtcctacgccgacgcccgcgagcaagtccgtcgcgagatggtgatcagccgtgtgcgtcagcgccgggtcgccgagcgcatccaggtcagcgagcaggaggtgaagaacttccttgcctcggacatgggcaagatccagctttccgaagagtaccgcctggccaatatcctgatcccggtgccggaagccgcgtcctcggacgtgatccaggccgccgcaaggcaggcccaggagctctaccagcagctcaagcagggcgccgacttcggccaactggcgatttcccgctcggccggcgacaacgccctggaaggcggcgagatcggctggcgcaaggctgcccagttgccgcagccgttcgacagcatgatcggctccctggccgtcggcgacgtcaccgagcctgtccgcacccccggcggcttcatcatcctcaagctggaagagaagcgcggcggcagcaagatggtccgtgacgaggtgcatgtccgccatatcctgctcaagcccagcgaaatccgcagcgaagcggagaccgagaagctggcgcagaagctgtacgagcgcatccagtccggggaagacttcggcgaactggcgaagagcttctccgaagatccgggttccgccctcaacggcggcgacctgaactggatcgatccggaagccctggtgcccgagttccgtcaggtgatgaacgataccccgcagggcgagctgtccaaaccgttccgctcgcagttcggctggcacatcctgcaggtcctcggccgtcgcgccaccgacagcagcgagaagttccgcgagcagcaggcggtaagcgtactgcgcaaccgcaagtatgacgaggaactgcaagtctggctgcggcagatccgcgacgaggcctacgtggaaatcaagcagtga

SEQ ID NO: 320127 - DNA, 987 bp, Pseudomonas aeruginosa
gtgagcctgcgcttcgcgctcactcccggcgagccggcaggtatcggacccgatctgtgcctgctgctcacccgctccgcccagccccaccccctgatcgccatcgccagccgcacgctcctgcaagagcgcgccggccaactgggcctggcgatcgacctcaaggacgtttccccggccgcctggccagagcgaccggccaaggccggccaactgtacatatgggatacgcccctggccgccccggtccggcccgggcaattggaccgagccaacgccgcctacgtcctggaaaccctgacccgcgccggccagggctgcctcgacgggcacttcgccgggatgatcaccgcaccggtgcacaagggcgtgatcaacgaagccggcatccccttttccggccataccgaattcctcgccgacctcacccacaccgcccaggtggtgatgatgctggccactcgcggcctgcgcgtggccctggcgaccacccacctgccgctgcgcgaggtcgccgacgccattagcgacgagcgcctgtcccgggtcgcgcgcatcctccacgccgacctgcgcgacaagttcggcatcgcccatccgcgcatcctggtctgcggactcaacccgcacgccggcgaaggcggtcacctgggccgggaagagatcgaggtgatcgaaccctgcctcgagcgcctgcgtggcgaaggcctcgacctgatcggcccgctgccggccgacaccctgttcactcccaagcacctggagcattgcgacgcggtgctggcgatgtaccacgaccagggtctccccgtgctcaagtacaagggcttcggtgccgccgtgaacgtgaccctcggcctgccgatcatccgcacctctgtcgaccacggtaccgcgctcgacctggccggaagcggccgcatcgatagcggcagcctgcaggtcgccctggaaaccgcctaccagatggcggccagccgctgctga

SEQ ID NO: 320128 - DNA, 807 bp, Pseudomonas aeruginosa
atgtccgagctttaccaacaccgcgcgcgcaagcgcttcggccagaacttcctgcacgatgccggggtgattcaccgcatcctccgtgccatccatgcccgcgagggtcagcgcctgctggagatcggcccgggccagggcgccctgaccgagggactgctgggcagcggcgcacgcctggacgtgatcgagctcgaccaggacctgatccccctgttgaagctgaaattcggcctcgagtcgcgcttcagcctgcaccagggcgacgccctcaagttcgatttcgcctcgctggtggagagcggcgagaagctgcgagtggtcggcaacctgccctacaacatctccacgccactgatcttccatctgctggagtacgcgccggtgatcgaggacatgcacttcatgctgcaaaaggaagtggtggagcgcctggcggccacgccgggcggcggagactggggccggctctcgatcatggtccagtatcactgtcgggtggagcacctgttcaacgtcggccccggcgcgttcaacccgccgcccaaggtcgactcggccatcgtccgtctcacccccttcgccgagccgccccatccggcacgcgatccgaaactgctcgagcgggtggtccgcgaggccttcaaccagcgccgcaagaccctgcgcaacaccctcaagcctctcctgagcgtcgaggacatcgaggccgcagaggtcgatccgaccctccgtcccgaacaactcgacctggccgcattcgtccgcctggccaaccggctggccgagctgccaggcaatcgttag

SEQ ID NO: 320129 - DNA, 381 bp, Pseudomonas aeruginosa
atgagcgatacccagcaccaggtcaacgtcagggtcgacacccgctaccttccggaacagtccgccccggagcagaaccgtttcgccttcgcctacacggtgaccatcgagaaccagggcgaggttccggcccaactgctgtcgcgccactggatcatcaccgacggcgacggccgtacccaggaagttcgcggcgccggcgtggtcggcgagcaaccgctgatcgcccccggcgcgcaacacacctacaccagcggcacggtgctggcgacccgggtcggcagcatgcgcggcagctaccagatgctcggcagcgacggaatcgccttcgacgccgcgatcccggtgtttcgcctggccgtaccgggagcgctgcactga

SEQ ID NO: 320130 - DNA, 852 bp, Pseudomonas aeruginosa
atggcggtctacgcggtaggcgacctgcagggttgcctggatcccctgaaatgcctgctggagcgcgtcgccttcgacccggccaaggaccgcctgtggctggtcggcgacctggtcaaccgcggcccgcagtccctggagacgctgcgcttcctctatgccatgcgcgagtcggtggtcagcgtcctgggcaaccacgacctgcacctgctggcggtggcgcacaagtccgagcgcctgaagaagtccgacacgctgcgggaaatcctcgaggcgccggaccgcgagccactgctcgactggctgcgtcgcctgccgctgctgcactacgacgaacaacgcaaggtcgccctggtgcatgccggcatccccccgcagtggagcctggaaaaagcccgcctgcgcgcagccgaggtggagcaagcattgcgcgacgaccagcgcctgccgctgttcctcgacggcatgtacggcaacgagccggccaagtgggacaagaagctgcatggcatcgaccgcctgagggtgatcaccaactacttcacccgcatgcgtttctgcaccgaagatggcaagctcgacctgaagagcaaggaaggcctcgacaccgcgccgcccggctacgccccctggttcagcttcccttcgcgcaagacccgcggtgagaagatcatcttcggccactgggcggccctcgaaggccactgcgacgagcccggcctgttcgccctggacaccggctgcgtctggggcgcgcggatgaccctgttgaacgtcgacagcggcgaacgcctgagctgcgattgcgccgaacagcgcgcgtcggccagacccgccgccacgcccgcatga

SEQ ID NO: 320131 - DNA, 333 bp, Pseudomonas aeruginosa
atgagcgacaccttccagcgcatcgcccccgaacaggcccgccagctccgtgaaaacggcgcccaggtggtcgacatccgcgacccgcagagcttcgctgtcggccacatcagcggctcgcggcacatcgacaaccactcggtggcggacttcatcgccgccgccgacctcgacgctccgctggtggtggtctgctaccacggcaactccagccagagcgccgccgcctatttcatccagcagggcttcagcgacgtctacagcctcgacggcggcttcgagctatggcgcagcgtctatcccgcggataccagcagcggcgaagcggagtag

SEQ ID NO: 320132 - DNA, 1923 bp, Pseudomonas aeruginosa
atgagcattttcagtcacttccaggaacgcttcgaagcgacccgccaagaggaatattccctccaggaatatctcgacctctgcaagcaagacaagacagcctatgcctccgccgccgagcgcctgctgatggcgatcggcgagccagagttgctggacacctcggtggactccaggctgtcgcggatcttctccaacaaggtgattcgccgctacccggcgttcgccgacttccacggcatggaggaatgcatcgaccagatcgtcgcgttcttccgccacgcggcccagggcctggaggagaagaagcagatcctttacctgctcggcccggtcggcggcggtaaatcctccctggcggaaaaactcaagcaactgatggagaaggtgcccttctacgcgatcaagggctcaccggtcttcgagtcgccgctgggcttgttcaaccccgacgaagacggcgccatcctcgaggaggactacggcatcccgaggcgctacctgcgctcgatcatgtcgccctgggcaaccaagcgcctcaacgaattcggcggcgacatcagccagttccgcgtggtcaagctgtacccctcgatcctcaaccagatcgccatcgccaagaccgaacccggcgacgagaacaaccaggatatatccgcgctggtcggcaaggtcgacatccgcaagctggaggaatacccgcagaacgacgcggacgcctacagctattcgggcgccctctgccgggccaaccagggcctgatggaattcgtcgagatgttcaaggccccgatcaaggtcctgcacccgctgctgaccgcgacccaggaaggcaactacaacagcaccgaaggtctcggcgccctgccctacagcggcatcatcctggctcactccaacgaatcggaatggcacagtttccgcaacaacaagaacaacgaggccttcatcgaccgcatctacatcgtcaaggtgccgtactgcctgcgcgtggcggacgagatcaagatctacgacaagttgctggtcaacagctcgctggcgcatgcccactgcgcgccggacaccctgaagatgctctcgcagttctccgtgctgtcgaggctgaaagagccggaaaactcgaatatctactcgaagatgcgggtatatgacggcgaaaacctgaaagataccgatcccaaggccaagtcgatccaggaataccgcgactcggccggggtcgacgaaggcatggccgggctttccacccgcttcgccttcaagatcctctccaaggtattcaacttcgacccgcacgaggtagcggccaacccggtgcacctgctctacgtcctcgaacagcagatcgagcaggaacagttccagccggaaacccgcgagcgctacctgcgcttcatcaaggaatacctggcgccgcgctacgtcgaattcatcggcaaggaaatccagaccgcctacctggagtcctacagcgaatacggtcagaacatcttcgaccgctatgtgctgtacgccgacttctggatccaggaccaggaataccgcgacccggaaaccggcgagatcctcaaccgcgccgccctcaacgaggaactggagaagatcgagaaacccgccggcatcagcaacccgaaggacttccgcaacgagatcgtcaacttcgtgctgcgcgcccgcgccggcaacaacggcaagaacccgagttggctgtcctacgagaagctgcgcgtagtgatcgagaagaagatgttctccaacaccgaggacctgcttccggtcatcagcttcaacgccaaggccagcaaggaggaccagcagaagcacaacgacttcgtcaaacgcatggtcgagcgcggctacaccgagaagcaggtccgcctgctgtcggaatggtacctgcgggttcgcaagtcgcagtag

SEQ ID NO: 320133 - DNA, 1272 bp, Pseudomonas aeruginosa
atgagctacgtcatcgaccggcgtctgaacggcaagaacaagagcacggtgaaccgccagcgcttcctgaggcgctaccgtgaacacatcaagaaggccgtcgaggaggccgtcagccggcgttccattaccgacatggagcacggcgagcagatcagcattcccgggcgcgatatcgacgaaccggtgctgcaccatggccgcggcgggcggcagaccgtcgtccaccccggcaacaaggaattcaccgccggcgagcacatcgcccgcccatccggcggcgggggcggccgcggcggcggcaaggccagcaacagcggcgaaggcatggacgacttcgtcttccagatcacccaggaggaattcctcgacttcatgttcgaggacctggagctgcccaacctggtcaagcgccacatcaccggcaccgacaccttcaagaccgtccgcgccggcatcagcaacgacggcaacccgtcgcgcatcaacatcgtccgcaccctgcgctcggcccatgcgcggcgcatcgcgctgtccggcggcagccgggccaagctgcgcgcggcgctgaaggaactggagcggatcaagcgcgaagagccggacaacctcggcgatatccaggaactcgagctggaaatcgccaagctccgcgcgcgcatcgaccgggtgccgttcctcgataccttcgatctcaagtacaacctgctggtcaagcagcccaaccccacctccaaggcggtgatgttctgcctgatggacgtctccggctcgatgacccaggcgaccaaggacatcgccaagcgcttcttcatcctgctctacctgttcctcaagcggaactacgagaagatcgaagtggtgttcatccgccaccacaccagcgcccgcgaggtcgacgaggaggagttcttctactcccgcgagaccggcggcaccatcgtctccagcgcgctgaagatgatgcaggagatcatggccgagcgttatccgacccatgagtggaacatctacgccgcccaggcctcggacggcgacaactggaacgacgactcgccggtgtgccgggacatcctcctcaagcagatcatgccgttcgtccagtactacacctacgtcgagatcaccccgcgcgaacaccaggccctgtggttcgagtacgagcgcgtgcgcgaagccttcgaagacagcttcgcccagcagcagatcgtctcggcatcggacatctacccggtgttccgcgagctgttccagaggaggctcgtcgcatga

SEQ ID NO: 320134 - DNA, 1554 bp, Pseudomonas aeruginosa
atgagcaagcgccagcccatcgccaccggctcggaatggaccttcgagctgatccagcagtacgaccgggaaatcagcaggatcgccgagcgctatgccctggatacctatccgaaccagatcgaggtgatcaccgccgagcagatgatggacgcctacgcctcggtgggcatgccgatcggctataaccactggtcctacggcaagcacttcctcagtacggaaaagaactacaagcgtggccagatgggcctggcctacgagatcgtgatcaactccgatccctgcatcgcctacctgatggaggaaaacacccagtgcatgcaggcgctggtcatcgcccacgcctgctacgggcacaacagtttcttcaagggcaactacctgttccgcacctggaccgatgccagttcgatcatcgattacctggtgttcgccaagcagtacatcatgcagtgcgaggagcgctacgggatcgacgcggtggaagacctgctcgactcctgccacgccctgatgaactacggtgtcgaccgctacaagcgtccctacccgatttccgcggaagaggagcggcagcggcagaaggagcgcgaggaactgatccagcgccaggtcaacgacctctggcggaccatcccgcgcgtcggcggcaaggacaaggaacaatccatggcgcgctatccgagcgagccgcaggagaacatcctctacttcatcgagaagaacgcgccgcttctggagccctggcagcgcgaggtgatccgcatcgtgcgcaagatcgcccagtatttctacccgcaacgccagacccaggtgatgaacgaaggctgggcgaccttctggcactacacgctgctcaacgacctctacgacgaaggcctggtcaacgacggcttcatgatggagttcctgcaataccacaccagcgtggtctaccagccgtccttcgacagcccctactacagcggcatcaacccctacgccctgggcttcgccatgtaccgcgacatccgccgcatctgcgaggaacctaccgacgaggaccgccgctggttcccggatatcgccggcagcgactggctggccacgctgaagttcgccatgaagagcttcaaggacgaaagcttcatcctgcagttcctctcgcccaaggtgattcgcgacctgaagctgttcagcattctcgacgacgaccagaaggacgacctgctggtcgcggcgatccacgacgaagccggctaccgcaccatccgcgagaccctggcggcgcagtacaacctcggcaaccgcgagccgaacatccagatctggaacgtcgaccgtcgcggcgaccgctcgctgaccctgcgccaccagcagttcgaccgccagccactgagcgactccaccgccgacgtgctcaagcacctgcatcgcttgtggggcttcgatatccacctggagaccctgcagggcgaccagctcgtgcagacccaccacatgccgcccaagggcgccagcgagggcgaggaaggctacccgcgtttggacctgatcatcccgcccatttga

SEQ ID NO: 320135 - DNA, 507 bp, Pseudomonas aeruginosa
atgcgcctgttcgccatcgtcctgctctgcctcgtcctggccacctgcgccagccacatccccagcgcccgggtgacccatccggccaacgccggactgcccggcctgcaaggtttccagttgatgccgccggaacaggcggtcgacgccctgccctaccgcaaccgctatccgctgataaacgcagagctgcgccagggactggcggcccacggctaccacgagagcgccaccccgcaattccgcgtctactactggctggcgctgcgcgacgcaccgctggaattccgccccgaccttccgcccacctccggcatggggccttatctggcgatccaccgcctgcgcgacgaaaccgggacattgcgcgtgcgcctggtcgacctggaggagcgcgttctctgggaaggtatggtaagcaccggcctcagccccgccagggccaatccggaacagctcgaactggcggtcggcgccctgctccggctgcttccacgcgcccgctag

SEQ ID NO: 320136 - DNA, 1233 bp, Pseudomonas aeruginosa
atgcagatttacaaggtcggcggcgccgtgcgcgatcgccttctcggccgtccggtcaccgatatcgactgggtggtggtcggtgccagcagcgacgagatgctcgcccgcggctaccgcccggtgggcgccgacttcccggtcttccttcatccgcagagcggcgaggaatacgccctggcgcgcaccgagcgaaagagcgggcgcggctacggcggcttcaccttccatgccagccccgaggtgaccctggaggaagacctgactcgccgtgacctgaccatcaacgccatggccgaggacgaacagggccgggtaatagacccctacggcggccaggccgacctcgaggcgcgcctgctgcgccacgtttccccggcgttcgccgaggatcccctgcgggtcctgcgcgtagcgcgcttcgccgcccgctacgccggcctgggcttccgggtcgccgccgaaaccctcgccctgatgcgccaactggcggaatccggcgagttgcaggcgttgaccccggagcgcagttggaaggaaatttcccgagccctgatggaacccaaccccgaggtcttcatccaggtcttgcacgactgcggcgccctggccgaactgatcccggaagtcgaggcgctattcggcgtaccgcagccggcggcccaccatccggaaatcgataccggcgtccatgtcctgtcggtattgcagcaatgcgcccgccaccggcagccgctcagcgtacgctgggcctgcctgctgcacgacctgggcaagggactcaccagcgaagcggactggccccgccatatcgcccacgaggctcgcggcgtgccgttgatcgatgcggtgaaccagcgcttcagggtgccgcgcgactgccaggaactggcgcgcctggtgggcgagtaccacacccacgcccatcgggcgctggagctgcgcccgaatacactgctggagctgttgcagagcttcgacgtgtatcgccgcccgcagcgtttcgaggagttcgtcgccgccagcgagatggacgcgcgcggccgcctcggcctggaacagcgggactatccgcaggccgcctacctgctcggcgcggcgcaggcagcgcgggcagtcagcgtgaagccgctggtggaaaagggcttgaagggcgcggaactgggcgaggcgctgaagcgtgcgcgcctcgccgcactcaaggcctacaaggaagaacgcggaaaggcctga

SEQ ID NO: 320137 - DNA, 543 bp, Pseudomonas aeruginosa
atgtcgctgatcccggtctacctcggcctcggcagcaatgtcgagcgtgagcgccatctgcatgccggcctcgatgcgctggccgctttccttcatgacctgcgttgttcgccggtattcgagagcgagccggtgggtatcaagagcgggccgttcttcaacctggtggtgtctgcccgcaccgatctgccgctggccgaactgagcctgcgactcaagcacatcgaggccgacaatggccgctatgcgccagagcgcaaggggctgccgctggatatcgacgtgctgttctacggcgacctggtgggcgatttcgatggcctggtgctgccgcgcgccgaagtgctgaagaacgctttcgtgctctggcccttgtccgagctggcgccgaacctggagcatccggtcgcccgccagccgctgggcgatctctggcgcgaggcgaggatccagcagaagctctggccggcgccattcgaatggcgtggccaggcgttgactcccgaagcgctgcttcaggcctttccgcgttcttccttgtag

SEQ ID NO: 320138 - DNA, 417 bp, Pseudomonas aeruginosa
atgtcctcgattctaacggggcggcgcacgcttgtcgtggcatcccttggagcgggtagcgaagtggacagagtttttatcgaaggcttggaggtcgataccgtcatcggcgtgtacgactgggagcgcggcatccgtcagtgcctgcgcctggacctgaccctgggctgggacaaccgaccggccgccgcgggcgacgatctcgccctggcgctggactatgccgcgttgtccgagcgggtgcaggagttcgcccgggaatcgcatttccagttggtggaaaccttcgccgagcgcctcgccgaggtactgatgggcgagcgcggcattccctggctgcgcatccgcgtgaccaagcccggcgcggtgccggcggcccgtggcgttggcgtggagatcgaacgcggatgtcgctga

SEQ ID NO: 320139 - DNA, 570 bp, Pseudomonas aeruginosa
atggtctggctactggcgatcctcgcctacctgctcggttccctctccttcgccgtcctgctcagccgctggttcggcacccaggacccgcgcgccagcggttccggcaaccccggcgcgaccaacatgctgcgcgtcgccgggaagaaactcgccatcctgaccctgctcggcgacgtcggcaaaggcctgctgccggtgctggtcgcccgctggctggggctcggcgtgatggaggaggcctgggtcggcatcgccgccgtgatcggccacctgtacccgctgtacttcaacttccgcggcggcaagggtgtcgccaccgccgcgggcatgctcctcggcctctatccgccggccgtactgctggccgcggcggcctggctgctgaccttcaagctgtcgcgcaccagctcgctcgcctcgctggtggccaccccgctgaccctgccgttgctggcctggcagcagcccggagcgctgctgccgatgaccgtgctgaccggcctgatcgtctggcggcaccgcgccaacttacgcgatctgttcgccggccgcgaacggcatttctaa

SEQ ID NO: 320140 - DNA, 1026 bp, Pseudomonas aeruginosa
atgcgcgtgctgggactggaaacgtcctgcgacgaaaccggcgtcgccctttacgacagcgaacgcggcctgctggccgacgcgctgttcagtcagatcgacctccatcgcgtctacggcggcgtcgtgcccgagctggcctcgcgcgaccacgtcaagcgcatgctgccgctgatccgccaggtgctcgacgagtccggctgcacgccggcggatatcgacgcgatcgcctataccgccggtcccggcctggtcggcgccctgctggtgggggcttcctgtgcccaggcgatggccttcgcctggggcgtgccggcggtcggcgtgcaccacatggaagggcacctgctggcgccgatgctggaagagcagccgccgcggttcccgttcgtcgccttgctggtttccggcggtcacacccagttggtgcgggtggacggcatcggtcgctaccagttgcttggcgaatcgatggacgacgccgccggcgaagccttcgacaagaccgccaagctgatcggcctgggctatcccggcggtccggaaatcgcccgcctggcggagctcggcactcctggccgcttcgtgttcccgcggccgatgaccgatcgccccggcctggacttcagcttcagcgggctcaagacctttaccctgaacacctggcagcgttgcgtcgaggccggcgacgacagcgagcagacccgctgtgacatcgccctggcgttccagaccgcggtggtcgagaccctgctgatcaagtgccgtcgcgccttgaagcagaccggcctgaagaacctggtgatcgccggcggcgtcagcgccaaccaggcgctgcgcagcggcctggaaaagatgctcggcgaaatgaaggggcaggtgttctacgcccgcccgcgcttctgcaccgacaatggcgcgatgatcgcctacgccggctgccagcgcctgctcgccggccagcatgacggcccggcgatcagcgtccagccgcgctggccgatggagtcgctgccggcggtctga

SEQ ID NO: 320141 - DNA, 216 bp, Pseudomonas aeruginosa
atgccagccgtcaaagtaaaagagaacgaacccttcgacgtagccctgcgtcgtttcaagcgctcctgcgaaaaagcaggtgtactggctgaagttcgcagccgcgagttctacgagaagcccactgccgagcgcaagcgcaaggccgctgccgcagtgaagcgccacgcgaagaaagtacagcgcgaacagcgccgtcgcgagcgcctgtactga

SEQ ID NO: 320142 - DNA, 450 bp, Pseudomonas aeruginosa
atgagcgaaatcaaatcccgcctcctcgacgccgtcaaggtcgccatgcgcgcccaggacaagccgcggctgaccacgttgcgcctggccctcgcggacatcaagcgcgtcgaagtcgacgaacgcatcgaggtggatgacgcccgagccctgctgatcctcgaccggatgatcaagcagcgccgcgacgcccagcgccagttcagcgacgccggccgccaggacctcgccgaggtcgaggctgccgagatcctcgtgctccaggacttcatgcccaagcccctggacgaccatgagatcgacgccctgatcgagcgcagcatcgtcgacagcggcgcccagggtccgcaggacatgggcaaggcgatgaacctgctgcgaccgcaggtccagggtcgcgtcgacatggcacaggtcagccagcgcctgaaggcgcgcctctcctcctga

SEQ ID NO: 320143 - DNA, 1995 bp, Pseudomonas aeruginosa
atggccggcctgataccgcaaagcttcatcgatgacctgctgaaccgcaccgacatcgtcgaggtggtgagttcacgcatccaactgaagaaaaccggcaagaactacagcgcctgctgcccgttccacaaggaaaagactccctcgttcaccgtcagcccggacaagcagttctactactgcttcggctgcggcgccggcggcaacgcgctcggcttcgtcatggaccacgaccagctggagttcccccaggcggtcgaggaactggccaagcgcgccggcatggacgtgccgcgcgaggaacgcggcggacgcgggcacacgccgcgccagccgaccgactcgccgctctacccgctgctcagcgccgccgccgagttctacaagcaggcgctgaaaagccacccggcgcgcaaggccgcggtgaactacctgaagggccgcggcctgaccggcgagatcgcccgcgacttcggcctcggtttcgccccgcccggctgggacaacctgctcaagcacctgggtggcgacaacctgcaactcaaggccatgctcgacgccggcctgctggtggagaacagcgacaccggcaagcgctacgaccgcttccgcgatcgcgtgatgttcccgatccgcgacagccgcgggcggatcatcgccttcggcggccgggtgctcggcgacgacaagccgaagtacctgaactccccggagactccggtcttccacaagggccaggaactctacggactctacgaggcccggcagaagaatcgcgacctcgacgagatcatggtggtcgagggctacatggatgtcatcgccctggcccagcaaggcatccgcaacgcggtggcgaccctcggcacggcgaccagcgaggaacacatcaagcgcctgttccgcctggtgccgagcatcctgttctgtttcgacggcgaccaggccgggcgcaaggcggcctggcgcgccctggagtcggtgctgccgaacctgcaggacggcaagcgcgtgcgcttcctgttcctccccgagggcgaggacccggacagcctggtacgcgccgagggcgaggatgccttccgcgcacgcatcacccagcaggcccagccgctggcggagtacttcttccaacaactgatgctggaggccgaccccgccaccctggaaggcaaggcccacctggcgaccctcgccgcgccgctgctggagaagattcccgggaacaacctgcgcctgctgatgcggcaacgtctgtcggaaatcaccggcctgtccggcgaaaacatcggacaactggcgcaccacagcccgccgccgtcgtccatggaccacggagcgagcggcgtcttggacggcgacgactatttcgccgccagcgcctactacgagaacgagccctcccatgcgccgttcgacgctgcgccaggctatgtcgaggcgcaaccgcgcaagagctggaacaaggacaagaagccctgggacggcaagaagtgggatggcaagaagaagtgggacaaaggcggccgcggcgacttcaaggctccgcaacgaacgccggtcagcgtggagtccaccaccctcaacgccctgcgcaccttgctgcatcatccgcagttggccttgaaggtcgacgatgcgggcaccctcgccagggagcaggatacctacgcccagttgctggtgtccctgctggaagccctgcagaagaacccgcggcagagctcgatgcaactcatcgcgcgctggcacggcacgccccagggccgcctgctgcaggccctgggcgagaaggagtggctgatcgtccaggagaaccttgaaaagcagttcttcgacaccattactaaactctccgagagccagcgtttcggcgagcgggaggagcgtttacgcagcgtcatgcagaagagctacagtgaactgaccgatgaagagaaagccttgctcagagagcactacagtgttgccgcttcatcgccttcccagagctga

SEQ ID NO: 320144 - DNA, 1854 bp, Pseudomonas aeruginosa
atgtccggaaaagcgcaacagcaatctcgtctgaaagagttgatcgcccgaggccgtgagcagggatacctgacttacgcggaggtcaacgaccacctgccggaggatatttccgatccggaacaggtggaagacatcatccgcatgatcaacgacatggggatcaacgtattcgagacagccccggatgcggatgccctgttgctggccgaggcggataccgacgaagccgcagcggaagaagccgcagcggccctggccgcggtggaaagcgacatcggtcgcaccaccgacccggtgcgcatgtacatgcgtgaaatgggtaccgtggaactgctgacccgcgaaggcgagatcgaaatcgccaagcgcatcgaggaaggcatccgcgaagtgatgagcgccatcgcccagttcccgggcacggtggacagcatcctggccgactacaatcgcatcgtcgccgaaggcggtcgcctctccgacgtcctcagcggctatatcgatcccgatgacggcagcctgcccgccgaagaggtggagccggtcaacctgaaggacgattccgccgactcgaaagagaaggacgacgaggaagaagaaagcgacgacagcagcgacagcgacgacgaaggcgacggcggtccggatccggaagaagcccgcctgcgtttcaccgcggtctccgagcagctcgacaaggccaagaaggccctgaagaagcacggtcgcggcagcaagcaggccaccgccgaactcaccggcctggccgagctgttcatgccgatcaagctggtgcccaagcagttcgacgccctggtcgcccgcgtgcgctccgccctggaaggcgtgcgcgcccaggaacgcgccatcatgcagctctgcgtgcgtgacgcgcgcatgccgcgtgccgacttcctgcgcctgttcccgaaccacgagaccgacgagaagtgggtcgacagcgtcctgaagagcaagccgaagtacgccgaggccatcgagcgcctgcgcgacgacatcctgcgcaaccagcagaagctggcgaccctggaaagcgaggtcgagctgaccgtcgccgagatcaaggaaatcaaccgcgcgatgtcgatcggcgaagccaaggctcgccgggcgaagaaggaaatggtcgaggccaacctgcgcctggtgatttccatcgccaagaagtacaccaaccgcggcctgcaattcctcgacctgatccaggaaggcaacatcggcctgatgaaggcggtggacaagttcgaataccgtcgcggctacaagttctccacctacgccacctggtggattcgccaggcgatcacccgttcgatcgccgaccaggcacgcaccatccgcatcccggtgcacatgatcgagacgatcaacaagctcaaccgcatctcccgccagatgctccaggaaatgggtcgcgagcccaccccggaagagcttggcgagcgcatggacatgcctgaggacaagatccgcaaggtactgaagatcgccaaagagccgatctccatggaaaccccgatcggtgacgacgaagattcgcacctgggcgatttcatcgaggactccaccatgcagtcgccgatcgagatggcgaccagcgagagcctcaaggaatccacccgcgaagtcctcgccggcctcactgcccgggaagccaaggtgctgcgcatgcgcttcggcatcgacatgaacaccgaccacaccctcgaggaagtcggcaagcagttcgatgtgacccgcgagcggatccgccagatcgaagccaaggcgctgcgcaagctgcgccatccgtcgcgaagcgagcaccttcgctccttcctcgacgagtga

SEQ ID NO: 320145 - DNA, 3738 bp, Pseudomonas aeruginosa
atgcagcgtctgcaggccgtgcttctcctgtgtctggcctgctgctggccggggctggccggcgccctcacgctcacgcccgaggaacgggcctggctggccgagcacccgagcatccgcctgggcatggacacctcctggccgccattcgaataccgcgacgaacagggccgctaccagggactcgccgccggctacatcggcctgctacaggaacgcctaagcgtcagcctgacgcctgtcgaaccgaagacctggacgcaggtcctggagcaggccaaggacggtcggctggacctgctgcccggcatcatggctaccccggagcgccaggagtacctgagcttcacccggccctacctggatttcccgatcatcatcctggcacgcaagaacggcccgatgccgaagcgcatcgacgagctctacgggctcaaggtcgcggtagtcgaccactatgctcctcacgaactgctgatcgcccagcatcccgacctcaccctgctgccgctgccttcggtagcggcagccctgcaggcgctggccaccggccaggccgacgccttcgtcggcgacttcgcctccagcgtatggaacctccgccagctcaagctcaacggcctggagatcagcggcgagacgccataccgctaccaactggcgatggccgtgccgcgcggacaaccgatcctcgccgggatcgtcgacaaggtcctcgccgacctcagcgccgaggagatcgagcgactccaggccccctgggtcggcggcctgctcgaccgacgtccggcctggcgcgagatggcgacctacggtcttcccatcgtcctgctgatcctggtctcggtcgccatactgctggccatgaaccgccgcctgcgccgcgaggtgagtcgccggcggcaattggagcgcgaactgcgcgacagcgaacagcactaccggggactggtggaaagcctgaatgccatcgcctgggaaatgcgcctcgaggagaaccgcttcacctacgtctcgccccacgccgaacgcctgctcggctatcccctcggcgaatggctgcagccgggcttctggcagcggaccctgcaccccatggacgccgagtacgccatccactactgcatgagcgaaagccaggccggacgcgaccacagcttcgactaccggatgctcgccgccgacggccgggtagtctggattcgcgatttggtcaccccgatcacgcaaggccgggacctgctcctgcgcggtctgatgatcgacatcaccgaggccaagctcaccgagcaggccatgcgcctgtccgaacagaagttcgcttcggtgttccaccactgcccggacatggtggtactggccaacggcgccgacggccgcttcctcgcggtgaacagcaccttcgagcagcagatcggcatcgccgccgacgacgccatcggcaagaccgccaccgagctgggcatctgggcactccccggcctgggcccgcaggtcctggaaaagctcggccacggcaacctgaccaacctcgaggtgcccctgcggcgccgcaatggcagtaccttcagcgcgctgctcagcgcccagcacgtggccctcgaccagaccccggcgctggtggtggtgatccgcgacatcacccacctggtggagacccaggaactgctgcggatctccgaggagaagttcgccaacgccttccatgcctaccccgacggtctgctgatcagcagcctcgaagacggcacgctgatcgacgtgaacgaaggcttcacccgtctcaccggctaccgccgcgacgaggtcatctcccgctccacgctcgaactcggcctgtgggtcgacaccgaggaccgcaagcgcctgatctcgctggtacgccaccacaccctgacccagggcttcaccgcccctgtacgggaccgcaacggtggcatccgccagtgcgagatgtccgcccaccggatcagcatcgatggcgaggactgcgtgctgaccatcgcccgcgatatcaccgagcgccagctcatgcaggagaagctgcagcaggccgccaccgtcttcgaaagcaccgccgaaggcgtgatgatcaccgatacccgccaacgcatcaccgcggtcaaccgcgccttcagcgagatcaccggctacagcgagcaggaggcgctgggacgctcgcccagcctgctctcctccggacaacacgactccagcttctacctcgccatgtggaaccagctggagcgcgacgggcactggcagggcgagatctggaaccgacgcaagaccggcgagctgtaccccgaatggctgaccatcagcgcggtacacaatccgcagggcgagatcacccacttcgtcggcgtcttcgccgatatctccaccctcaaatacgcccaggcccggctcgactaccaggcccaccacgatccgctcaccggcctgcccaatcgcctgctgttcgagagccggctcaatcacgccctcgacgaggcccgcgaagagagtcgtcccggcgccgtgctgttcatcgacctggaccgcttcaagcacatcaacgacagcctcggccatcccatcggcgacctgctgctcaaggccatcgccgaacgcctgcgcgaccagttgcgcgacgtcgataccgtggcccgcctggggggcgacgaattcatcatcctgctccccggcctgcaccaggaaagcgacgccgagcacgtcgcgcgcaagctgctgaatgccttcaccgcgccgttccaggccgacggtcatgaattcttcgtcagcgccagcgtcggcatcgccctgttccccaaggacggcgacgacgccccgaccctggtgaagaacgccgacgccgccatgtaccgcgccaagtcgcggggccgcagccgcatcgagtactacacccgcgaactgacctacctggccaccgagcgcatggcgctggaaaccgaactgcgccgcgccctcgagcgcgacgagttgcagctctactaccaacccaagctgagcctggagagcggcttgctggtcggcgccgaggcactggtgcgctggtaccatccgctgttcggggaaatttccccggagcgcttcatccccctcgccgaggattgcggcctgatcctgcccctcggcgactgggtgctggaacacgcctgccagcagatgggcgaatggcaaaagctgcacgcgccgttcggcccgctgtcggtcaacctcgccggcgcccagctcggccagccgcaactgatcgaacgcctcgagcaactgctggagcagtccggcctggaaccgtcgcggctgcaactggaaatcaccgagagcttcatcatgaaccagaccgaggaggccctcgccgtcctccacggcctcaagcgcctcggcgtacagctggcgatcgacgacttcggcaccggctactcctcgctcagctacctcaagcgcctgccgctggacatcctgaagatcgacaagtcgttcatccgcggccttcccgacgatccccacgatgccgccatcacccgcgccatcatcgccctcggccgcagcatgcagctcacggtgatcgccgaaggcgtggaaaccgaaggtcagcagagcttcctcacccacgaaggctgcgagcagatccagggcttcgtcctcagtccgccgctgcccgccgagctgttcgccagcaaattcctcaaaccgcgccagccgattggcgctccccgagaagcgccggtataa

SEQ ID NO: 320146 - DNA, 1122 bp, Pseudomonas aeruginosa
atgaacgacccactctggatctggcagcagcccgactggccgcagttcaactggcaagccgaagcgcttgcaccactgctgcgctcctgtagccaggctcagggtcgtttgttaggaatgctcggtgccgtggggagtgacaccgaagtgcagagcagcctggatgccatgctgcagaacatcgtcacctcttcagccattgagggagagcaactgaatgtcggttcggtgcgctcatcactggcacggcgactgggattgcacgaagaaggtcgaaccacctctcgctccgaaggcctggcggaactgctgctcgatgccacccacgcacatcaagagccgctagacgaacagcgactgttcacctggcaccgttggttattccccaccgatgagcaactgctgactcgaccgctacacatcggtgcactgcgtggcgaagagcccatgcaggtggtttccggtcgcatcgaccgcccgacagtccatttcgaagcccctccccgcgcggggctggaagcgcaactggcggactttctcgcctggttcgagagcagccgccgcgatgccagcctcgatccctttctgcgcgccggcatcgcacatttctggttcgtgaccctgcaccccttcgacgacggcaacggtcgcctcacccgcgctatcaccgatctggcattggctcagggtgagcagcaagccattcgcttctacgccatgtctgcgagcatcctcgacgaccgcgccggttactaccgcattctcgaagcaagtcagaaaagcacgctggatatcaccaactggctgcaatggtttctcgcgacgttgctcaacagcctggagcaggctcttgctcgtatcgaccgcgtgctggtcaaggcgcgcttctggcaggcacaccgcagccaaaccctatcggcggagcaagtcaaagtgcttaaccgcctgctcgatggcggcgaaagggggttcgaggagggcatcagtgcggcgcaataccaagctgtggccaaggtttccaaagccaccgcgacccgccacctgagcgacctgctggaaaagggctgcatcgagcgactgcccggcagagggcgtagcacccgttaccagatagcacgctga

SEQ ID NO: 320147 - DNA, 372 bp, Pseudomonas aeruginosa
gtggattacagcccgatagtcgcccaggtctggggcatgctgacctggtttatcccggcagccctgctgatcggcctgctcaaatcgccttgggccaaggggcagatcggtgaactgctggtgcgcctgttcgcccattggcaactggacaggcacacctaccgccgcctgcacaacgtcaccctgaacacgccggacggcacgacacagatcgaccacgtatttctctcaccctacggcatcttcgtgctggaaacggcaggtttccagcacctgccgataggtctctaccgttgcaccggagagccgtgctgcaggtcacaggcttcggtgtcaatcgccacccactgcgcgatcaatcgcagggtgtag

SEQ ID NO: 320148 - DNA, 2727 bp, Pseudomonas aeruginosa
atgagtcgctcacccatccctcgccaccgagcgttgctggccggtttctgcctggctggcgcgctgtccgcccaggcggccacccaggaagaaatcctcgatgcggcactggtcagcgggaattcctcgcaactgaccgacagccacctggtcgccctgcgcctgcagcagcaggtcgagcgcatccgccagacccgcacccagttgctcgacggtctctaccagaacctcagccaagcctatgatcctggcgccgccagcatgtgggtcctgccggcaaacccggacaataccctgcccttcctcattggcgacaaggggcgcgtgctcgccagcctgagcctggaggccggcggccgcgggctggcctatggcaccaacgtgctcacccagttgagcggggccaatgccgcccacgcaccgctgctgaagcgggcggtgcagtggctggtgaacggcgacccgggcgcggctactgcgaaggacttcaaggtcagcgtggtcggggtggacaagaccgccactctcaacggcctgaagagcgccggcctgcaaccggcggacgccgcctgcaacgcgctgaccgacgccagttgcgccagcaccagcaaattgctggtactgggcaacggcgccagcgccgctagcctgagcgccacggtgcgcgcacggctacaggccgggctgccgatcctcttcgtgcacaccaatggctggaaccagagcagcaccggccagcagatcctcgccggcctgggcctgcaggaaggcccctacggcggcaactactgggacaaggacagggtgccatccagccgcacccggacgcgttcggtcgagctgggcggcgcctatggccaggacccggcgctggtgcagcagatcgtcgacggtagctggcgcacggactacgactggtcgaaatgcacctcctacgtcggtcgcaccacctgcgacgacgtgccgggactgagcgacttcagcaagcgcgtcgatgtattgaaaggcgccctcgacgcctacaaccagaaggcgcagaacctcttcgccctgcccggcaccacctcgctgcggctctggctgctgtgggccgacgcggtgcggcagaacatccgctacccgatggacaaggccgccgacacggcgcgcttccaggaaaccttcgtcgccgacgccatcgtcggctacgtgcgcgaggccggcgcggcgcagaaggaactgggcagctacgccggccagcgccaacagtcgatgccggtatcgggctcggaggaaaccctgaccctcaccttgccgtcggcccagggcttcaccgccatcggccgcatggcggcgccgggcaagcgcctgagcattcgcatcgaagacgctggccaggccagcctggcggtcggcctgaacacccagcgcatcggctcgacgcggctgtggaatacccgccagtatgaccgcccgcgcttcctcaagagcccggacatcaagctccaggcaaaccagtcggtggcgctggtatcgccctacggcggcctgttgcaactggtctacagcggcgccacgccgggtcagacggtaaccgtcaaggtaaccggcgcggccagccagccgttcctcgacatccagccgggcgaggacagcagccaggcgattgccgacttcatccaggcgctggacgccgacaaggccgactggctggagatccgcagcggctcggtggaggtccacgccaaggtggagaaggtccgtggctcgatcgacaaggactatggcggcgacgtccagcgcttcatccgtgagttgaacgaggtgttcatcgacgacgcctacaccctggccggcttcgccattcccaaccaggcgaagactccggcaatccagcaggaatgcgcggcgcgcggctgggactgcgacagcgagaccctgcacaagctgcccggcacccagcacatcaacgtcgaccagtacgcccagtgcggcggcggttgcagcggcaacccctacgaccagacctggggcctgaacccgcgtggctggggcgaaagccatgagctgggccacaacctgcaagtgaatcgactgaaggtctacggcgggcgctcgggcgagatctccaaccagatattcccgttgcacaaggactggcgcgtgctccgcgagttcgggcagaacctcgacgatacgcgggtcaactaccgcaacgcctacaacctgatcgtcgccggacgcgccgaggccgatccgctggcaggcgtatacaagcgcctgtgggaagacccgggcacctacgcgctgaacggcgagcggatggccttctatacccagtgggtgcactactgggccgacctgaagaacgatccgctgcagggttgggacatctggaccctgctctacctgcaccagcgccaggtggacaagtccgactgggacgccaacaaggccgctctcggctacggcacctacgcccagcgcccgggaaacagcggcgatgccagcagcacggacggcaacgacaacctgttgctcggcctgtcctggctgacccagcgcgaccagcggccaaccttcgcgctatggggcatccgtacctcggcagcggcccaggcgcaggtggcggcctacggtttcgccgagcagccggcgttcttctatgccaacaaccggaccaacgaatacagcacggtgaagcttctggacatgagccaggggtcgccggcgtggccgtttccgtga

SEQ ID NO: 320149 - DNA, 615 bp, Pseudomonas aeruginosa
atgaccgaccgccttccctgccgcgcctgcggccatctcatcctcccaaccacggcggcgaggaacgacggactgtgcatgccctgcaagggcggctaccggcagaacatcgaggatggcaagcgcttccacgcggagcgacggcgctacctggcgagtccgcaggcgctgtactggagcgcgctggtgaatcgcgtctacgatggccgcgagggattcgccgggctgtcgccggccgaacggagctactacgcagtgagcgtgctcagcggcgaagtgcacaacggcggcttcgaccagtacttcggcaactcctccggcgaccagtaccaggcggcgcgcgcgggtcttcgcgaattggaggcggaggacgccctggccctgctggagcgagccgccgccctgctgttcggcgacggtccggtgccagtctcccaggccgaacgccaattgcgcatgccgacctgggccgatgaacccgaccgcgactgcgaagcggccctggatgcgctggacacgcgcttctacgccctggccgacgcgctgggcgaacgcctgctggcccatgcccgccaccatgcattgttcgccctggacgagcccgatgaagcctga

SEQ ID NO: 320150 - DNA, 348 bp, Pseudomonas aeruginosa
atgaagcctgaattggatgccctagaggcctggctcggacgaccgctgccggctgccttcgtcgccgctctggagcagcacggcggccgcctcgtcgagccgggcctgctgctctacgccgccgacgagttgctggaacgcaaccgggccttcgaaacctctctctactgccccggctacctggccataggcgacgacagcggcggccgcgccgtggtgatggccctggacgatcaccggcaggcgctgttcctggtcgaccatggcgcgatgaccccggactgcttcgaacccctggcacccagcctggaggcctggctggaagccgggccctgcctgcccgaatga

SEQ ID NO: 320151 - DNA, 471 bp, Pseudomonas aeruginosa
atgattcctttcggcctcagcaccgaacaattccgcgagcgctaccgccgcgacctgcaacgcgccgcgccaggcgtgatccagcgcctgcgcgagctgctccggcaacccttggaggaaggactgcgcgacggcgagatccaactgttcctcggcgaggacggacgcgacgcagcggaagcgtggttgtacctgaatggcgccagcaaccgggtggacgccagcgacccgcgcctgtttcccggcaaggcgctggacctggcgctcggcctgggacatgccccggatttcgacgaagcctatttcgccgacggcttcggcggcgtcgatctgctcgccgatacgctgcaagcctggttcgccgagtgctggtggaaggccggcggctgggcctggccgatcccgctgtggctgcacgtacacgatggcttcggcgacggccgcggcatcgccctcaccgaacgctgctga

SEQ ID NO: 320152 - DNA, 459 bp, Pseudomonas aeruginosa
atggaactgatccgcaacctggacgatgcgaacatgggcgaagtgtattggcgcctgtaccggcgctacatcagcctgttcatcgagaacgaggccgacgacgcctacgcctggcgctgcgcccgagccctcgacgaactggatgacgccgtggtcgagcggctttgtgccgccagcctgcgctaccgcgccgcgcgcctggagcggctgggcgagtctgcggaggaagtcgcgccggcgcgcggggtgctggaacggatcgaaccgggcgagctgatcgtgcccgacccggaacagggcgacgaagcggtgatccacctgtcgctgaactgcgaatgggaccgcgaacacggtatggaatggatcgtccggggcggggaggtgctctatgtcggccccttccacggcgaagacccgtggcgggacttcaccgtgaaggaaccatggaactacgcctga

SEQ ID NO: 320153 - DNA, 159 bp, Pseudomonas aeruginosa
atggacctgatccgcatcctcatcgccatcctcctgccgccgctgggcgtgttcctgcaagtcggcttcggcggcgccttctggctgaacatcctgctcaccctgctcggctacatcccgggcatcgtccacgcggtgtacatcatcgccaagcgttga

SEQ ID NO: 320154 - DNA, 516 bp, Pseudomonas aeruginosa
atgtccgacctgcccccgcgtcccgccttctggccgtacctgccgggctacgccctgttgctgctttcggtgctgctctgcgccagcggcagctaccgtttcgtcaccccgatggcgctcgccgacggcgtcgacctggtctacctcagccagggcctggcgctgctaccgctgggtaccgggctggtcggcctgctcgcgggcttcctcctgcatgtccgcgggcgctggctcggcgcgctgctggcgctgctgccggcgacgctgatctgcgcctggaacctgtacaactatgccgcccacggcgacgaggcgttgtcgccgagtttcgcccagtacacccaggcgctgctcggcctgctgctgctcggcggcgtgctgagcctggtcgacctgctccacggcaggccctcgacgctgctgcgcaagggcctgctggggctgggctggctggccctggtggcctggctggggttgctgttctacctgcagcgcctgtacggcctcactttttga

SEQ ID NO: 320155 - DNA, 339 bp, Pseudomonas aeruginosa
atgctgaacaactggaccgagttcgtccccgccgtgaaaaaagccttcggtgccctgggcaagcaacacccgaagatgctcgccgcctatggcgcgctggaggaagccagcgccgagggcgccctggatgccaagacccgcgaactgatttccatcgccgtggccattaccacccgttgcgacggttgcatcggcgtgcacaccgaggccgcgctgaaggccggcgccagcgaggcggaaatcgcccagaccctggctaccgccatctccctgaatgccggcgccgcctatgtctattcgctgcgcgcgctggaagcctacgaccagttcaaaaagtga

SEQ ID NO: 320156 - DNA, 912 bp, Pseudomonas aeruginosa
atggacccactcgaccggctcatccagctcgccaacctgcagggccgcctcgaccagcgctgccagctacagggcagctgggcgctggagcacccgcaagcggtgcccggcgaggcgaccttccatatcgtcatggccggcacctgctattgcgaattcctcgatggcgctcgcctcgacctgcatcccggcgacctgattctgttgccacgcggcaccccgcacctcctgcgcagcgacagcccggcgcaaccctgcgaacccaccgtagagcaccgcggcagcatcccgctgtaccagttgaacggccccggcgaggccctcgacatgctttgcggcagctaccgctatcacgccggtgccagcctgttcggcgcgctccccgagcgcctgctggtgcatatggacgagtcgacccagcagcccctgcgcgcgctgatcgggttgatgcgcgaggaagccgagagcacccgcagcggcgcccgctcgatcatcgacgcgctggccaccgcgctgttcgccctggccctgcgcgcctacctggaccgccaaccgctgggcgacggcctgttcggcctgctgggcgacgcccgcctgggacgagccctgcgggccatgctggaacgcccggagcatgcctggaccctggaacagcttgcccagcaggcggcgatgtcgcgggccagtttcgtccgcgccttctccgccctcggcgggacctcgccgtggaacctgctgacccgcatccgcatggagaaggcccgcggcctgctgcgacaaacgcagaagagcctgctggatatcgccgccgagaccggctaccagtcggaggcggcgttttcccgcaatttccgccaggccttcggcgaatcgccgggccgtttccgccgccaggccgactccgctcgctga

SEQ ID NO: 320157 - DNA, 354 bp, Pseudomonas aeruginosa
atggaatggtttctgaaatgcgtgaaggaacactacttcgacttcaacgggcgtgcccgtcgcaaggaatactggatgttcaccctggtgaacatcatcatctccgtcgcgctgagcgtcgtgctcggcctgatcagtgaaaagctcctgccgatcgccaatctctactcgctcgccgtgctgctgccggccctgggcgtcaccgcccggcgtctgcacgacatcaacaagagcggctggtggatgctgatcgcgctgatcccgatcgtcggcctgtacctgatctacctgctggccaaggacagcgacgccggccagaaccagtacggccagaacccgaagggcatcgcctga

SEQ ID NO: 320158 - DNA, 696 bp, Pseudomonas aeruginosa
atgccccatcccatcgacgcactgatttccgactgcgacggcgtcctggtcgacagcgaggtcatcgccgagcgcgtgatgtacgaggcgctcagcgcctacgcgccgctggaggagctgcagcgcctgctggaaggcaccttcggcctgaccagccgcgacatcctcgatcgcgtcgagaagcacttcggcctgcgcatccccgacagcttcaaccgcgaggtgcgccagcgcagcgaggagatggtcgcccaggtccaacccattcccggcgcacgcgaggcgctgctggccctggacctgcccgtcgcggtggcctccaacagccgccgccacagcctggagcgctcgctggcgcgcgccgggctcagcgaactgatcggcgaacgcctggccagcgccgatatggtcgccctgcccaagcccgcacccgacgtctacctgcacgccgccagcctgctcggcgtcgcccccgagcgttgcctggtggtggaagacagcagcaccggcacccgcgccgccctcgccgcggggatgcgggtgatcggcttcgtcggcgccgggcacattcccgccgggcacgcccaggtactgcgcgagctgggcgccatcgccatcgtcgagcacatgcgcgaactgccggagaccgtggcgcgcctgcgccgcgagagccgagtggcgctgggaacgccgtaa

SEQ ID NO: 320159 - DNA, 489 bp, Pseudomonas aeruginosa
atgatccccctcaagtacctccaggcctatcccgcttcgctgcaggaccaggtccgccagctgatcgccgagaaccgcctgggcgagtacctcgagcgccgctacccggggcgtcacgatgtgcagagcgacaaggcgctgtacgcctacaccatgaacctcaagcaggaacacctgcgcaacgcgccgggcctggacaaggtgctctacgacaacaagctcgacgtggtccagcgtgccctcggcctgcacaccgcgatctcgcgggtgcagggcggcaagctcaaggcgaagaaggaaatccgcgtggcgtccctgttcaaggacgccgcccctgagttcctgcggatgatcgtcgtccacgaactcgcccacctgaaggaaagcgagcacaacaaggcgttctaccagctctgccagtacatgctgccggactatcaccaactggagttcgacctgcgggtgtacctgacctggaagagtctctga

SEQ ID NO: 320160 - DNA, 1179 bp, Pseudomonas aeruginosa
gtggcaagtacagatgtgctgatcgttggcgccggggcggccgggctgatgtgtgcgatgacggcggccggacgcgggcgccgcgtgcgggtgctcgaccacgccaacaaggccggcaagaagatcctcatgtccggcggcgggcgctgcaatttcaccaacctgtacaccgagccggccaacttcctttcgcgcaacccgcacttctgcaagtcggcgctggcccgctacacccagtgggacttcatcggcctggtggccaagcaccaggtgccgtaccacgagaagaaactcggccagctgttctgcgacaacaagtccagcgacatcctcgagatgctgctgcgcgaatgcgccgaggctggagcggaaatcctgctggacacctcgatcgaagagatcgcccgcgacgacgccggctaccacctgcgtaccagcgccggcgagatgcgctgcgagtcgctggtgatcgccagcggcggcctgtcgatcccgaccctcggcgccagcggtttcggctaccaggtggcgcgccagttcggccacgaggtgctgccgacccgcgccgggctggtgccgttcaccatcaccgaccagttgaaggagctgtgcgccgagctttccggcacctccgtggattgccgggtgagctgcaacggccaagtgttccgcgagaacctgctgttcacccatcgcggcctcagcggcccggcgatgttgcagatttcctcctactggcaaccgggcgataccctggaaatcgacctgctgccggaccacgacgccagcgaatggctggcgcagcaacagcgcgagcgtcccaacagcgagctgaagaccctgctcgccgagctgttcaccaagaagctcgccggactgctggccgaccgctggttcgtctccaagccgatgaaacagtacaccccggccgaactggcgggtatcgccgggcagctttcggcctggcgggtcacgccctcgggcaccgagggctaccgcaccgcggaagtgaccctgggcggggtgagcaccgacgaagtgtcgtcgaagaccatggagtcgcagcgctcgccggggctgtatttcgtcggcgaagtactggacgtcagcggccacctcggcggcttcaacttccagtgggcctgggcctcgggttatgcggcggggcagtacgcctag

SEQ ID NO: 320161 - DNA, 768 bp, Pseudomonas aeruginosa
atgtcgtccgtacacagcgccgcccagcaaggtttcagcgccgaggcccagcgttacgcccagggccggcccgagtacccggaagcgctctccgactggctgcgcgatgcccttggcctgcgtccgcagaccgtcgcggtggacctcggcgccggcaccggcaagttcacccgcctgctggcccgtaccggcgcgcgagtggtcgcggtggaaccggtggatgcgatgcgcgcccagctcgccgaagccttgccgcaggtccaggcgctggccggtagcgcccagtcgattccgctggccaacggcttcgccgacgccctggtgtgcgcacaggcctttcattggttcgccaccgtggaggcgctggaggaaatgcgccgcgtgctgacggcggaaggcaggctggggctggtgtggaacgtgcgtgacgagtcgctggattgggtcgccgagatcacccgcatcatcaccccctacgaaggcgatgcgccgcgtttctacaagggcgactggcgtcggccgttcgagcgcgcgcccttcggaccgctgcgactttccaccttcgcctacgagcatgtcggcccgccggagcaggtgatcgtctcgcgcttcctttcggtgagcttcatcgccgccttgccggagacggaaaagaacgccgtggcggcgcaattgcgcgagctggtcgccagccatccggcgctcaaggggagggagcaggtagcgctgccctatcgcaccgaggcctatctggccgaggcgcgctag

SEQ ID NO: 320162 - DNA, 426 bp, Pseudomonas aeruginosa
atgagcagcgaagtcagcgccatccgccaattgatcgaagactggcgagccgccgtccgcgccagcgacgttccgcgcatcgtctcgtactacgcggaggacatcgtcgccttcgacgccatcctgcaattgcaattcaaggggcgcgacgcctaccagaagcactggcaggcctgcaccgagatgtgcaaaggaccgatgaccttcgatatcgccgaactgcagatccatgccgacccgcaggtcgccttcgcccactacctctgccactgcggcggcaccggcccggacggccagccgcactcctcgtggatgcgggtcagcgccggctaccgcaagcacggcgacggctggaaggtgatccacgagcatttctcggcgccgttcgacatggacggcaaggcgctgttcgacctgcagccctga

SEQ ID NO: 320163 - DNA, 483 bp, Pseudomonas aeruginosa
atgcgccgctggctcctgaccctgccgttcctgctgctggccggttgcgctggcctgcacgcgccgtcccgcgacgtcgaggaggccgcgtcgccgagcgtagcgcgcgatcccgccgacccgcaggattgcctggcgcgcagcgactgcacgaccaagacttcgcgcaccctgctgttcgtcttcgactatgcagaggccggcggcgaactggtggtgcgcgacggccgccgactggaaaccccgccggcgccgcaacgctccacctggccggcgttgcgcatccagctggccgagccggtcaacggtcgcttcgagttcgagagcccctgcctgcgcaagagcggcaagggttgccgctacagccaggctatgctgctgaaggtctaccgcagctacctggtcggcaagccttgctcgctgctcagtcctcgcgcagtgaaacgctgcgtcgacccggcggcgaccgccgcgcggcgctga

SEQ ID NO: 320164 - DNA, 1065 bp, Pseudomonas aeruginosa
atggcactcatcagcatgcgccagatgctggatcacgccgccgaattcggctacggcgtgccggccttcaacgtcaacaacctcgagcagatgcgcgccatcatggaagcggccgacaagaccgattcgcccgtgatcgtccaggcttccgccggtgctcgcaaatacgccggcgcgcccttcctgcgccacctgatcctcgccgcgatcgaagaattcccgcacatcccggtggtcatgcaccaggatcacggcaccagtcccgacgtctgccagcgttccatccagctgggcttcagctcggtgatgatggacggctccctgcgtgaagacggcaagacccctgccgactacgactacaacgtccgcgtgacccagcagaccgtggcgttcgcccatgcctgcggcgtgtccgtggaaggcgagctgggctgcctgggttccctggaaaccggcatggccggcgaggaagacggcgtcggcgcggaaggcgtgctggaccacagccagttgctgaccgacccggaagaagccgccgacttcgtgaagaagaccaaggtcgacgccctggccatcgccatcggcaccagccacggcgcctacaagttcaccaagccgccgaccggggacaccctgtcgatccagcgcatcaaggaaatccacgcgcgcatcccggacacccacctggtgatgcacggctcttcctcggtaccgcaggactggctggcgatcatcaacgagtacggcggcgagatcaaagagacctacggcgtgccggtcgaggaaatcgtcgagggcatcaagtatggcgtgcgcaaggtgaacatcgacaccgacctgcgcctggcttccaccggtgccatccgccgcttcctggcgcagaacccgagcgagttcgacccgcgcaaatacttctccaagaccgtcgaggccatgcgcgacatctgcatcgctcgctacgaagccttcggcaccgccggcaacgcttccaagatcaagccgatctccctggaaggcatgttccagcgctacgctcgcggcgagctggatccgaaggtcaactaa

SEQ ID NO: 320165 - DNA, 342 bp, Pseudomonas aeruginosa
atgaactactcgcgtatcgccctgttcggcggcttcgccgccgcggcgctgctggccggctgctccgcttcctccggcaagccgggcggcaaggactggacccgctggacctgcgacagcaaggcggtgatcgaatggcgctatatcgacggcagcaagaacatcgtcgacctgcgcctgaaggacgaggacgacgtggtccaccacctggagcaggaacctgcggccgtcggcgctttctatagcgacggacgcctgggcttccacctggagaacgacgaaggcctggtgtactgggtcgaaaccgacgacctcatcggtcgcggttgcaaggcgcgctga

SEQ ID NO: 320166 - DNA, 201 bp, Pseudomonas aeruginosa
atgcgttccgtaaccttgccactcctgatgttctgcctgggcctggccgcctgtagcggcgatggcggtcgacgcccgagcacctgcgaggtgatcagtccgccggacgtgatggtgccgaccgagcagaaccgccagcgggtcgagcagcagagcagcggcgatccgaccgccggacaaaagccggtggaatgcccgtag

SEQ ID NO: 320167 - DNA, 1164 bp, Pseudomonas aeruginosa
atgaccgtgttgaagatgactgacctcgacctcaaaggtaagcgcgtgctgatccgcgaggacctcaacgtgcccgtgaaggacggccaggtgcagagcgatgcacggatcaaggccgccctgccgaccctcaagctggccctggagaagggcgcggcggtgatggtctgctcgcacctgggccgtccgaccgagggcgagttctccgccgagaacagcctgaagccggtggccgagtacctgtccaaggccctgggccgcgaagtgccgctgctggccgactacctcgacggcgtcgaggtcaaggcgggcgacctggtgctgttcgagaacgtgcgcttcaacaagggcgagaagaagaacgccgacgagctggcgcagaagtacgccgcgctgtgcgacgtgttcgtgatggatgccttcggtaccgcccaccgcgccgaggggtcgacccacggcgtggccaggttcgccaaggtcgccgccgccggcccgctgctggccgccgaactggacgcgctgggcaaggcgctggacaacccggcgcggccgatggcggcgatcgtcgccggctccaaggtttccaccaagctcgacgtgctgaacagcctggccggcatctgcgaccagctgatcgtcggcggcggcatcgccaacaccttcctcgccgcggccggacacaaggtcggcaagtcgctgtacgaggccgacctggtcgagaccgccaaggccatcgccgccaaggtcaaggtgccgctgccggtggacgtggtggtggccaaggaattcgccgagagcgccgtggcgaccgtcaaggccatcgccgaggtcgccgacgacgacatgatcctcgacatcggcccgcagaccgccgcgcagttcgccgagctgctgaagacctcgaagaccatcctgtggaacggtccggtcggggtgttcgagttcgaccagttcggcgagggcacccgtaccctggccaatgccatcgccgatagcgcggcgttctccatcgccggcggcggcgataccctggcggcgatcgacaagtacggcatcgccgagcggatctcctatatttccaccggtggcggcgcgttcctcgagttcgtcgagggcaaggtcctgccggccgtggaaatcctggagcagcgcgccaagggctga

SEQ ID NO: 320168 - DNA, 1062 bp, Pseudomonas aeruginosa
atgtccaccccgccttttcgcgtcgcgctcaatggctatggccgtatcggccgctgcgtcctgcgcgcgctgcacgagcgcccggagcaactgggcttcgagatcgtcgcgctgaacgacctggccgaccaggccagcgtcgagtacctgacccgcttcgactccacccatggccgctttcccggcgaagtgaaggtcgacggcgactgcctgcacatcaacggcgattgcgtgaaggtgctgcgcagcccgactccggaggccatcgactggcaggcgctgcgggtcgacctggtgctggaatgctccggccagtacaccaatcgcgcccaggccgagcgtttcctccgcgccggcgcgccgcgggtgctgttctcgcagccgatggcgagcgaggcggacatcgacgccaccatcgtctatggggtcaaccagcaggacctcagcggccgcgaaacgctggtctccaacgcctcctgcacgaccaattgcggggtgccgctgctcaagctgctgaacgaggcgatcggcctggaatacgtgtcgatcaccaccatccactcggcgatgaacgaccagccggtgatcgacgcctaccaccatgaggacctgcgccgtacccgttcggcgttccagtcggtgatcccggtgtccaccggtctggcgcgcggcatcgaacgcctgttgccggaacttgccgggcgcatccaggccaaagccatacgcgtgcccacggtgaacgtctcggcgctggacatcaccctgcagacttcccgcgacacctccgccgccgagatcaaccgggtgcttcgcgaggccgccgaaagcggcccgctgcgcggactgctggcttataccgagctgccgcacgccagttgcgatttcaaccacgacccccattcggccatcgtcgatggcagccagacccgcgtttccgggcctcgcctggtcaacctgctggcctggttcgacaacgaatggggattcgccaaccgtatgctcgacgtcgccggacactacctgcgcgccgccgtgcctgatcaacaagtacccaaggactga

SEQ ID NO: 320169 - DNA, 798 bp, Pseudomonas aeruginosa
atgccccgcttcgccgccaacctcagcatgctctacccccgccacgacttcctcgaacgcttcgccgccgccgcggcggacggcttcgagggcgtggagtacctgttcccctatgcctaccctgcggccgaactgaaggcccggctggacgaccacggcctgcgccaggtgctgttcaatgccgcacccggcgactgggacaagggcgagcgcggcctggccagcctgccggggcgcgaggccgaattccgccgcgccatcgcccaggccatcgactatgcccaggtcctcggcaaccgccacatccatgtcatggccggactgctgccggccggcgccgaccgcatccgccaccgcgagacctacctcgacaacctcgcccatgccgcccgcgaagccgccggcgccgggctgacggtgctcatagagccgatcaacaaccgcgacatgccgggcttcttcctcacccgccaggacgacgcccaggccatctgccgcgaggtcggcgcggacaacctgcaggtacagttcgactgctaccactgccagatcgtcgagggcgacctggccaccaccctgcgtcgcgacatcggcaatatcggccacgtccagatcgccggggtacccgaccgccacgagccggatgacgacaacgaagtgaactacccctacctgttcgagctactcgaccggctcggctaccagggctggatcggctgcgagtaccgtccgcgcggcgacacctcggcaggcctggaatggctgcggcgctggcgcgctactcgacgcgacggatga

SEQ ID NO: 320170 - DNA, 1065 bp, Pseudomonas aeruginosa
atgcacacgctctactggcgggacctcgaaagccccgccaatggcgaatggctgggcctcgcggtccaggtggagggcgcccatcgggcgccctctttccttcatctgcaatccggcggccaggcccgcattcgcctgatgcgtggcgatcagccgctgctctgggccacccagttgccgtaccacgatggcatctggctggtgaagagcctggtcgcggcgagcccggcgcaggccagcgtgccgcccatcgactcgccgaccctggaagcgttgcgcggcctgcgcggcgaggcccgctacaaggcctggagccgctatttcgtcgagaccctgcgtaccagcccgggcagttgcctggaggccgggcgctggttgctgcgcctgtcgctcgccgagcaggtgcccgcctggcagccaccgcagagccacgatccgcgcgaacgggtgctggaacgctggcgctaccgcagcgtcgggcgcgacgcactgttgccggactggcgcttctacagcctggagaaggtcctcggcgacgactgggtgcagtggctcgactggtgggggcgcgacaacgacgccctgatcgccctgcgccgggtcgaggatgacgaggggcgggtcaagtggtggcgcaagaaggcccgcgaaggcgagctgccgccggtgctggcgctgcgcctgaactgcctggatgcctgcgtgatcctcgatggccactgccggctgcgcgccggcctgctggagaacgtcgcgccggagatcctggtgctctgtgcctacgacgagcagccgatgccggtggatacggcgcagcgcgaacgggtgctgcaatctctggcgcagcgggtcgacgcgccggtgcgccgtggacgccggccgctggatagcgaacagctcaaccaggtgctgctgcgcctgttcgacgaccgtccctggccgcgagtgctgacccgtgcacgcgcggtgctgaaggaagaacagtggtgcgcggaagtgcgcgactggctggccgcccgcgagcgtctggacgcgctggagccgatcatccgtcgcgtcgagtag

SEQ ID NO: 320171 - DNA, 1998 bp, Pseudomonas aeruginosa
atgcccagccgtcgtgagcgagccaatgccatccgtgcactgagcatggatgccgtgcagaaagccaacagcggccacccgggcgccccgatgggcatggccgatatcgccgaggtcctctggcgcgactacatgcagcacaacccgagcaacccgcagtgggccaaccgcgaccgcttcgtgctgtccaacggccacggctcgatgctgatctactccctgctgcacctcaccgggtacgacctcggcatcgaggacctgaagaacttccgccagctcaactcgcgcaccccgggccacccggagtacggctacaccgccggcgtcgagaccaccaccggtccgctcggccagggcatcgccaatgcggtgggcatggcgctggcggagaaggtcctggccgcccagttcaaccgcgacggccacgcggtggtcgaccactacacctacgccttcctcggcgacggctgcatgatggaaggcatttcccatgaggtcgcctcgctggccggcaccctgcgcctgaacaagctgatcgccttctacgacgacaacggcatttccatcgacggcgaggtccacggctggttcaccgacgacaccccgaagcgcttcgaggcctatggctggcaagtgatccgcaacgtcgacgggcatgacgccgacgagatcaagaccgccatcgataccgcgcgcaagagcgaccagccgaccctgatctgctgcaagaccgtgatcggtttcggctcgccgaacaagcagggcaaggaagagtgccacggcgcgccgctgggcgccgacgagatcgccgcgacccgcgccgcgctgggctgggagcacgctccgttcgagatcccggcgcagatctacgccgagtgggacgccaaggaatccggcgccgcccaggaagccgagtggaacaagcgtttcgccgcctaccaggctgcccatccggaactggccgccgaattgctgcgccgcctgaagggcgagctgccggccgacttcgccgagaaggccgcggcctacgtcgccgatgttgccaacaagggtgagaccatcgccagccgcaaggccagccagaacgcgctgaacgccttcggcccgctgctgccggagctgctcggcggttccgccgacctggccggctccaacctgaccttgtggaagggctgcaagggcgtcagcgccgacgacgccgccggcaactacgtgttctacggcgtgcgcgaattcggcatgagcgcgatcatgaatggcgtcgccctgcacggcggtttcattccctacggtgcgaccttcctgatcttcatggaatacgcgcgcaacgccgtgcgcatgtccgcattgatgaagcagcgcgtgctctacgtgttcacccacgactccatcggcctcggcgaggacggcccgacccaccagccgatcgaacaactggccagcctgcgcctgaccccgaacctggacacctggcgcccggccgacgcggtcgagtcggcggtggcctggaagcatgccatcgagcgcgccgacggtccgtccgcgctgatcttctcccgccagaacctgccgcaccaggcgcgcgacgtcgcccaggtggccgacatcgcccgcggcggctacgtgctgaaggactgcgaaggcgagccggaactgatcctgatcgccaccggttcggaagtcggcctggccgtgcaggcctacgacaagctcagcgagcagggccgcaaggtccgcgtggtatcgatgccatgcaccagcgtctacgagcagcaggacgagtcctacaagcagtccgtgctgccggtggaagtcggcgcgcgcatcgccatcgaggccgcccatgccgactactggtacaagtacgtcggtctcgacgggcgcatcatcggcatgaccagcttcggcgagtcggcgccggccccggcgctgttcgagcacttcggcttcaccctggacaacgtcctggcggtggccgaggagctgctggaagactga

SEQ ID NO: 320172 - DNA, 1002 bp, Pseudomonas aeruginosa
atgagccttcgcgtgccttcgatacgaccagacgactacgacccgctcgccgcgctgtgcaaggcggctggcgactcgctgcgactgaatgtgttgcgcgccctggccaacgattcgttcggcgtgctggagctggcgcagatcttcgccatcggccagtcgggcatgagccaccacctcaaggtgctggcccaggccgggctggtggcgacgcgccgcgagggcaacgcgatcttctaccgacgttcgctgcccctggccgaacgcaccggcggcgcgctgcacgcggcgctgctggaggaagtggacgaacgggcgctacccgacgacgtgcgggcgcggatcgatgccgtgcacgcccagcgcgcggcggtcagccaggacttcttcgcccgcgcggcggacaagttccaggcccagcaggacctgatcgcaggactgccgcaataccgtgagagcgtgttggccttgctcgacgcactggccttcgcccccggcgccacggcgctggaggtcggcccgggggacggcggattcctgccggaactcgccaggcgtttccgccaggtcacggcgctggacaacagcgcggcgatgctggaactggcgcgccagcgctgcaaggaagaaggattgggcaacgtccgcctggaattggccgatgccctgcaggacgccgccgaaccggccgattgcgtggtgctgaacatggtcctgcaccacttcgccgcgccggcggaggcgctgaaacagttggcccgcctggtccatccgggcggcagcctgctggtgacggacttgtgccggcacaaccagggctgggccagggaggcctgcggcgacctctggttgggtttcgaacaggaggacctggcccagtgggccgacgccgcagggctcacgcccggcgagagtctttacattggtttacgcaatggcttccagatccaggtccggcacttcgccagggatgcatccgaaagccgcctcacccaccggtaa

SEQ ID NO: 320173 - DNA, 1191 bp, Pseudomonas aeruginosa
atgagcgaatattccgttttcacctccgagtccgtgtccgaaggccatccggacaagatcgcggaccagatctccgacgcggtgctggacgccatcatcgccaaggacaagtacgctcgcgtggcatgcgaaaccctggtcaagaccggcgtggcgatcatcgccggtgaagtcaccacctccgcctgggtcgacctggaagagctggtgcgcaaggtcatcatcgacatcggctacgacagctccgacgtcggcttcgatggtgccacctgcggcgtgctgaacatcatcggcaagcagtcggtggacatcaaccagggcgtcgaccgggccaagccggaagaccagggcgccggcgaccagggcctgatgttcggctacgccagcaacgagaccgacgtgctgatgccggcgccgatctgcttctcccaccgcctggtcgagcgccaggccgaggcgcgcaagtccggcctgctgccatggctgcgcccggacgccaagtcccaggtgacctgccgctacgaaggcggcaaggtggtcggcatcgatgcggtggtgctgtccacccagcacaacccggaagtctcctataacgacctgcgcgacggcgtgatggagctgatcatcaagcaggtgctgccggccgagctgctgcacaaggacacccagttccacatcaacccgaccggcaacttcgtgatcggcggcccggtcggcgactgcggcctgaccggacgcaagatcatcgtcgactcctacggcggcatggcccgccacggcggcggcgcgttctccggcaaggacccgtccaaggtcgaccgctccgccgcctacgccggccgctacgtggcgaagaacatcgtcgccgccggcctcgccgagcgttgcgagatccaggtttcctacgccatcggcgtggcccagccgacctcgatctcgatcaacaccttcggcaccggcaaggtcagcgacgagaagatcgtgcaactggtccgcgagcacttcgacctgcgcccgtacgcgatcaccaagatgctcgacctgctccacccgatgtaccagccgaccgcggcctacggccacttcggtcgtcatccgttcgagctgaccgtggacggcgataccttcaccgcgttcacctgggagaagaccgacaaggccgctctcctgcgcgacgccgccggcctctga

SEQ ID NO: 320174 - DNA, 1305 bp, Pseudomonas aeruginosa
atgaaactgttatggggagttctcgccgccgcgctggcggcctggggcctgacgctggccgtcgatccgccggcgagcctggatatctgggtggtgcgcaagcaggcgatcctgcttaccggggtagcgtccttcgccctgatgtcgttgatcatgctgctggcggtgcgtccggtctggctggagaagccgctggacgggctcgaccgcatgtaccgcctgcacaagtgggcgggcatcctggccatcgtcctcggcctgttgcactacctgctggagttggccggcccctggctggcgggtatcgtcggcaaaccggtgaaaggcccgcgggtggaaaccttcctcgacgtcttccgtggctcggccaaggagttgggtgaatggtcggcgtggattctcggcgggatgctgctgatcactctctggcagcgcttcccgtatcacctctggcgttatgtgcacaaggcgttggccctggtctacctggtactggccttccattccgtggtgctcgccccggccagctactggagccagccggccggttggctggtggcggcctgcgctctgctcggttcggcctgcgcactgttgtctctgagcgggcggatcggtcgcacgcgtcgccatgcgggcgtggtcaccgccgtcgagcggcacggcgaaagcctgctcgaggtgacctgccggctgcagggcgactggtcgcacagggccgggcagttcgcctttctcacctgcgaccgcctggagggtgcccatccgttcaccatcgccagcgccgaccgcggctgcggcgaggtgcgcttcagcatcaaggcgttgggcgactacacccggcgcctgcagggcaacctggaggtcggcgccagggtcgaggtggaggggccatacggctgcttcgacttccgccgtggcctggccgggcggcaggtctgggtcgccgccgggatcggcgtgacgccgttcatcgcctggctggagtcgctgcaggccgcgccgggaagcgcgccatcggtggagctgcactattgcgtgcgcaattcccaggaagcgctgttcgccgggcgcttgcgcgagctttgcgaacacctgcccagcgtgaccctgcacatccgctatagcgacgagcagggcaagccgaaggcggcgcaactgggcgtgctgaagagcgccgagggacgctggccgagcgtctggttctgcggtccgcaggggctggccgacagcctgcgccgcgatctgcgccggcagggcatgccgctgcggctgttccaccaggaagccttccgcatgcgctga

SEQ ID NO: 320175 - DNA, 744 bp, Pseudomonas aeruginosa
atgaagatccgcctgctgtccgacctccaccacgaacatttcgacgggcgacgccaactgccagaggtcgaggccgacgtggtggtgctggccggcgatatccacagccacctggaaggcctgcactgggcccgcgagaccttcgccgacagcgagatcgtctacgtcgccggcaaccatgagttctactcctcggaaatgaccgacctgacccaggcgatgcgcaatatcgcccgggcgctggagatccacttcctggaaaacgacgaagcgcggatcggcccggcgcgcttcctcggcgccaccctgtggaccgacttccagctctatggcgcggacggctatgcgcccgcccatgagctggccctgcaatcgatgccggacttcagctgcatcgactggttcggtggcgacttcacccccgagcagagcatcgccctgcaccaggcctcgcgcgactggctcgccgaacagctggcgcggccccacgacggcccgacgctggtggtcagccaccacgcgcccagtgcgctgtcgatcccgccgcagttcgtcggcaacccactgtcgccagccttcgcttccaacctcgacgaactggtggcgcaggccgactactggctgcacggtcacgtccacgacgccctcgactaccgcatcggccgggcacgggtgctggccaatccgggcggctatccccacgagaaaggcgggttccgtccggaattcgtcttcgaggtctga

SEQ ID NO: 320176 - DNA, 969 bp, Pseudomonas aeruginosa
atgcgtacgctgatccgcctggttcgcacgcttatcctgctgctggtcctggcgctgctcgccggcgcctggtggtggttgcaggacgaggccctgcgcccccccgcgctggccggccacagcgaggactcgagtctgaaggtcgcaggcctgcgccggcattacctgctctacgtgccgccgggcgtgtccgagggagcgccgttgctggtggtgctgcacggctcacggggcgacggcgcgcagatgcgccgcatcagcggctacggcttcgaccggctggcggcgcaagaaggtttcctggtggcctacccggacggcttcgagggccactggaacgattgccgcaaggccgccagctattcggcgcggctgcgtgacgtcgatgacgtggctttcctccgcgcgctggtggcgcggctggcccaggaataccgcgtcgattcgcagcgggtatatgtcgccggctactccaatggcggccagatggctttccgcctggccgccgaagcgccggggttgccggcggcgatcgcagcggtggcggcgagcctgccgaccacggggaacgatgcctgtcggccggtcgagcggccgaccgcggcgttgctgatcaacggcacgcgcgatccgatcaatccctatctcggcggcaaggtcagcctgttcggcttcggcgaccggggcgcggtacgctcgaccctggactcggcacgctggtgggccggcctgaacggcatcgcagcgccgccggacgtggcgccgctgacccgtcccggcccggtctggaccgagcgccagcgctggcaggaagacggccatccgccggtggagctgctcagcgtgcatggcggcggccacgtgctggcgcagccggactatcgcttcccgcggattctcggcaagagcgacccggaactggacgcgccagtggaaatctggcgcttcttcagccagttgccgcgctga

SEQ ID NO: 320177 - DNA, 420 bp, Pseudomonas aeruginosa
atgtccattcgtccttcactgccgctggccgggctgctgctcgccgtcgccctgccgctctctgccgcccagccgggcgccgccaaaggcgccccgctcagcggttgcgccgccaagcaggccgccatcgaggcgaagctggaaacggcccgctcgttcgccaacgaaggccaggtggccggcttggaaaaggccctctccgaggtcaaggaacactgcaccgaagccggcctgctgagggagaacaagcagaaggtgatcgacagcgagcgcgaggtcagcgaacgcgagaaggatttgcgcaaggccatgggcaagggcgatccggagaagatcgagaaacgcaaggccaagctggccgaggcccgcgccgaactggaagaggccaagaaaggcctggaacaggcccaggcgcagtag

SEQ ID NO: 320178 - DNA, 459 bp, Pseudomonas aeruginosa
atgaagctgaagtccctgctcgtcgtgctgctggccggcgtcgccctgagcggctgtcaccgtatggatcccaattcgcccgaggccaagcgccaggcgatcttcaaggaaatgctacggaccagcgaggacatgggcgggatgctccgcggacgcctgcccttcgacgcggagaagttccgtgccggatcggcgaagttgcaccaactggccgaccagccctggcagtacttccccagtcccaaggccggcgaggagggcgaggacacccgcgccaaggacgaggtctggcagcgccagcaggagttcaaggccgccacccaggtcttcatcgacgcgatgaaccgtctccaggacaacacccgccaggccacgccgaccccggatggcgtacgcaaggacttcgccgcggtggaagacgcctgcgaagcctgccacaagaaattccgcgcgctctga

SEQ ID NO: 320179 - DNA, 387 bp, Pseudomonas aeruginosa
atgaccatcgctttctggtgcgtgctgatcgcgatcttcctgccttacgtctgtacctccatcgccaagttcggcggggagggctacggcggtcgggccaacgccgacccgcgggcgttcctcggttcgctcgaaggctttcgccggcgtgccaacaacgcccagttgaacgctttcgaagtgaccccggcgttcgccgcggcggtgatcatcgcccatctggtcggcaacgcttcgcaggcgaccctggatagcctggccattgcctggatcaccagtcgcctgctctacgtcatctgctacctcgccgactgggggccgttgcgctcgctggtctggttcgtcggcatgctgctcatcgccgcgttcttcgtggtttccgcctga

SEQ ID NO: 320180 - DNA, 831 bp, Pseudomonas aeruginosa
atgctagccaccagcctggtgctatgcgccgccgttctccacgccacctggaacaccctggtcaagttcagcagcgaccgcttgctggtggtcgcctgcatggacgtggtcggcgtgctctgcgccatcctgctgttgcccttcgtcagcctgccgccggccgaagtctggccctggctgctcggcgccaccgtcctgcaactgctctaccgggtactgttgatcgaggcctacaaggtcggcgacctgggcctggtctatccgctgatgcgcgggctgtcgccgctggtggtgctgggcctgaccctggcgttcggcggcgagcagctcagcggccggcagatcctcggcatcctgttgatccccttcggcatgctttgcctgctctggggcggcggcggttcgcggctgccctggcggaccctgccggtggtgctgctgatcggcctgtgcatcggcggctacacctggagcgacggcaacgccttgaagcgctggccgttggcgcttgactacctggtctggctgacgctgctttccggcctgccgttcccgctgatcgccgttggcgcgcgaacccgcgccttcgcccgcttctgggcgctggagtggaagctcggcctggcggtcggggtctgcgtgctggccagctacggcctggtgctgtgggccatgcagctggggtcgatcgccgaagcggcagcgttgcgcgagaccagcgtgctgctggcggtgctgttcggcatgcgcttcctcaacgagccgttcggactgccacgcctgctggcgtgcggcctggtgctggccggaatgctgctgatgaagctctga

SEQ ID NO: 320181 - DNA, 582 bp, Pseudomonas aeruginosa
atggactaccatcggccagcgccgcacagtgccggcccggcctcccttatcaacgacacaggaatccctgccttgagcgctctcctcaagcccctcgacaaccgcttgttctggcccgcggtcgccatcggcggcctgctgatcctcgctttcgtcctctacctccagcacgtgcgcggcttcgcgccctgctcgctgtgcatcttcattcgcctggacgtgctcggcctggtgctcgccgggatcgtcggcagcctcgccccgcgttcgcggatcgccggcggcatcgccgcgctgggcatgctcgccgccagcctgggcgggatctaccacgcctggtcgctggtcgcggaagagaaactggctgcccagggcatgggcagttgcaagatgttcatgggcttccccgaatggataccgctggacacctggctgccgcaggtcttccagcccgaggggctgtgcggcgaagtggtctggaccctgctcggccagtccatggcggtctggtcgctggcgctgttcgtgttctgcctgctggccctggcggccaagctggcgttcggccgccgcaccgcctga

SEQ ID NO: 320182 - DNA, 609 bp, Pseudomonas aeruginosa
atgcctcgattcctcagaaatgccctccttcccgtcctcgccctgctgctcagcggctgcggctacaacgccatgcaggccggcgacgaacaggtgaaagccgcctggtcggaagtgctcaaccagtaccagcggcgcgccgacctggtgcccaacctggtcagcacggtgaagggctatgcctcccatgaggcgtcggtcctgacccaggtcaccgaggcccgggccaaggtcggcagcgtgcagctgaacgccgaccaactggacgacgagcaggccgtgcagcgcttccaaaaggcccagggcgaactgagctcggcgctttcgcgcctgctggtagtcaccgagaactacccgcaactgaaggccgacggcctgttcaaggacctgctgacccaactggaaggcaccgagaaccgcatcgccgtcgctcgcggccgctacgtcaagtcggtacaggaatacaacgtgctgctgcgccagttccccggcgtgatcaccgccaagctgttcggctacaagcccaaggcgaacttcagcgtggaaaacgaagcggccatctccaccgcgccgaaagtcgatttcggcaacccgcaaccggcgcagtaa

SEQ ID NO: 320183 - DNA, 1026 bp, Pseudomonas aeruginosa
atgcgccggctgctactgggcgccgggctgctgctcgccagcctggtcgcctgggccgatgtgccaccgatacccgcgctgacggcgcgggtcaccgacctcaccgcgaccctttccggcgaccagcgccagcacctggagcaacagctcgccgccctggaagccaagagcggcgcgcagctcgctgtgctgctggtcccgaccaccggcgacgattccatcgaggagtacgcggtgcgtaccttcgagaaatggaagctgggccagaagaaggtcgacgacggcgtcctgctgctggtggcgaagaacgaccgcaccctgcgcatcgaggtcggctacggcctggaaggggccatcaccgacgtccaggccggacggatcatcagcgagcggatcacgccgcagttccgccagggcaatttctatggcggaatccaggccggcgtggacagcctggtgcaactgatcgatgccgagaagaacccggaaagcgctaccgccagcgctcccgtcgacgccttgccggcggttcccgaggccacgccgccgcgggccctgccgccaccggtcgacgagggtgaggtgtatgacagcgccccgccggagccgaaaaagaagagcggcctgagcggacagctctggggcaacccggtctacctcggtgtctatgtggcggtcctgctcgccgtggccctgctcggacgcctgctgccgttgcagtggatgcggcggcgcagcatcggccgcttcctgctttgcagcgcggcggtcgccggcctggcctggctgttgagcatgggcctgtggcagaacgtcgaccgcgcggcggacgacagtctcggcgtactggcgccgaccctgttcatctacgccctgttcctgcttcccggcgaagtgctgatggccatcctcagcgccatcctcaatagtcgcggcggcggtgggggaggcggcagcggcggtggcagcatcttccgcggtggcggcggctccagcggcggcggcggcgcctccggacgctggtga

SEQ ID NO: 320184 - DNA, 555 bp, Pseudomonas aeruginosa
atgagcgaagtagccgacgacctggcggagatcgccagcctggtgcgcgaattgcgcaagcgcaagggcatcaccctgcaggcgctggccgacggcattcgccgttcggtgggcttcgtctcccaggtcgagcgcggcctttcgcggccggcggtggacgacctggtcgccatcagccaggtgctcggggtgccggcgacctacttcttctgctcgccgaagatccaggcctcgccctgggtgacccgcccgggcgagcgtcggaccctggcctacgctcgtggcgccagcgacaacctggtatcgccgcgtctcggcggcgccttcttcatgctcgaaacctgccttgaagcgggtgccgacagcggcgagcgcgacctgctggacagctcggagcagggcggctacgtgctcgaaggcgagctgaccctgtggctggaggacgaggagctgcgcctgcaggccggcgacggtttccagattcccagtcatatgcgcagccgctacgccaaccgcagccaggcgccggtcagggtgctctgggtatacgcctga

SEQ ID NO: 320185 - DNA, 1290 bp, Pseudomonas aeruginosa
atgttcctgcaatccaacgagcatgtcggcacttactacgccgccgtcaatcccgaactgatccagccgcgccaggccctggagggtgacctcgactgcgaggtgctggtggtcggcgccggtttcagcggcttgcacacggcgctgcggctggtcgaaggcggacgccaggtatgcgtcatcgaagccagccggatcgcctgggcggcctccgggcgcaatggtgggcaggcgctgcccggctggtccagcgacctgccgccgctggaggccgacctcggctacgaaggcgcacgccgtctctgggacggcatgctctgggcggctggcgagatgcgcgagttgccgcagcgacatggcttcgactgcgactaccgggtcggccacctatggacggcgatcctgccgcgccgggtcggcctgctctacgactggcaggccgaggccaaccgtcgctggggctacgaggggctacgcttcgtggcgaaggacgagttgcccgaatggatcgccagcgagcgctaccttgccggtctctacgatccccacgccgcacacctgaatccgctcaagctggcgttcggcctggccgccgccatcgagcgcgccggcgggcgtatccacgagcggacccgggccctgaactatcgcgaggagggcgacggctaccgggtccgtaccgagcacggcgagatccgctgcgcggcgctggtgctggcctgcaacgcctacatcgacgggctggacagcgagctgtcgcaacggatgctgccggtgggcacctatcaggtcgccactgagccgctcggcgaggaacgggcgaagtcgttgctgccgcgcaactgctgcgtgaccgacaaccagttcgtcctcgactacttccgcctgaccccggaccaccgcctgctgttcggcggcggctgcacctacctgggcggcatgcccagcgacatccgcgccgccacccggccctatctcgaaagggtgttcccgcagttgcgcggggtggcgctggagtacgcctggggcgggcatatcgactgcagcatgcggcgtaccccggacatcggctggcagggcaaccgctactggctgcaaggctactccggccacggcgtgctgccgagtctggcggcggccagggcggtcagcgacgcgctgctcggcgacgacgagaccctggcgctctaccagcgcctgcgcaatccgaagtttcccggcggccagcgcttcgccgcgccgctggaagccctgggcaaagcgtattaccgtttgcgcgacctgttctga

SEQ ID NO: 320186 - DNA, 1491 bp, Pseudomonas aeruginosa
atgaacgaccaggtactgcgtacccagaccgaccgccgccagttgcagcagatcatcgccggccttaccgaaggggtgatcctgatcgagccggaccagcgcatcctctgggccaacgaggcggccctggcgatgcacggcgtcgattcgctggaaggcctgggcgccgataccggcgagtatcgcgaacgctttcgcctgcgctaccgcaacaatcatccgctgcaggaggggcagtacccggccgagcgcctggtggctggcgagtgcttcagcgacgtggtggtggaagtgtttcccgccgccgacgaggacacccgctgggtgcaccgcgtgcgcgggttggtgctgaccacccccgaggacaagcccgactgcctggtgctgatcctccacgacgccaccgagtgggccagcgccgagcagcgcttcgagaagaccttcaatgccaacccggcgccggcggtgatctgccggctcagcgactaccgctacgtgaaggtcaatgtcggtttcctggaaatgaccggctatgcccgcgaccaggtgatcggccgttcggtgtacgagctggacgtactcgaccaggccgagcgccgcgaactggcggtggagcgcctgggcgccggcgagaccatcccgcagatggaggcgagcctgcgagtggcggagggcggacgcaagtgcgtggtggtcgccgggcagccgatagaggtcggcgaggaggcctgcatgctcttcactttcaccgatctcgaaccgcggaagaaggccgaggaggccctgcgcaagagcgaggagcgcttcgccaaggccttccgcatggcaccggtgccgagcctggtgctgtacggcgacgacctgcaggcgctggacatcaaccaggccttcagcgaaaccttcggctaccaggccgaggaactgctcggcgagtccaccgtcgcctgcgggttgtggcaggacggcggcgccgagcgcctgggcgagctgctggcgcagagcggcagcgtgcgcaacgtccagctgcgcctgcagcacaaggatcgcaacggcctggactgcctggtctcggccgaggcggtgagcctcaacgagcaggactgcgtgctggtggccttgctggacatcagcgaccggcggcgcaccgaaatggagctggtgcacgccatcgagacggtgatgcaggacgcttcctggttcagccgcaccctgatcgaaaagctcgccaacgtgcgccgcgccaacgcgccgggcaccggcgccgaactggccgacctgactgcgcgcgagcgcgaggtgttcgacctcatctgccagggcctggcggacaaggagatcgccaaggaactgggcctggcgccgaacaccgtgcgcaaccacgtggcgaccatctacgccaagctcgatgtccacagccgtggcgaggccatcgtctgggcacgcgaacgcggattcgcgccggagccgcgcaacggcaacgggcgcaaataa

SEQ ID NO: 320187 - DNA, 264 bp, Pseudomonas aeruginosa
atgagcaagaacaagcaccccgatctcggcgagatccagcgcagcctgaaccaggcgctggaaggctacgactgccagtgccggatgcactacgacggcaccgtcagtatcaatgtcgccgcccgagagcacgacgaaaccttcaccttcgtcggcatccagcccggcgagctggacaaccccacccgcctgcacctgttcgccgaaagcctgcgtcgcgacctggcactactggagccctggttgggaaagcacgcagcctag

SEQ ID NO: 320188 - DNA, 717 bp, Pseudomonas aeruginosa
atgcgcgccctggtattgcaacacgttcccttcgaaggcagcgcgcggatcggcgactggatcggccgccactgcgagcacgagcacgtctgctacctctacgccgacgcccacctgcctgcgctggacagcttcgacctgctggtggtgatgggcgggccgatgagcgtccacgacgaagcgcaatatccctggctggtggcggagaagcgtttgatccgcgcggcgctggatgccggcaagaaggtcctcggcatctgcctcggcgcgcagctgctggcccaggcgctgggggctgcggtacgcccgggacgccaggcggagatcggctggtggccgctgcacaggtacagccaggcgctgggctcgccgctgggcgagcgcctgccggaacggctgatggcgttccactggcacggcgagaccttcgacctgccggccggcagcgtgccgctctatggttcggctgcctgcgcaaaccagggcttcatctggaacgagcaggctatcggcctgcaatgtcacctggaaagcaccgcggagagcatcgaggcgctgctcgatgcctgcccgcaggacctgcaacgggaaggggcggtgcagagcgccgggaggatccgccagggtgtcgcgcattgccgcgaggtggcgccggtgctgttcctgttgctcgattacctggcgcatcggccggcggagatcgcacgccgggcctga

SEQ ID NO: 320189 - DNA, 1182 bp, Pseudomonas aeruginosa
atggctgatgcgctggatagcctgcgcctgatgcgcacccaggaacggcccgcacaggtgttcgtccgtggccagggctcgtggctgtgggacagcgacggacgcgccttcctcgacttcacccagggcctggcggtgaactgccttggccacagtcccagcgtgctggtccaggccctggcccggcaggcgcgggagctggtcagcgccggcccctgcctgctcaaccggccggtgctggcattggcgcagcgcctgtgcctggcgaccggcagcgaccaggcctacttcctcaccagcggcgccgaggccaacgaagcggccatcgccctggcgcgcaagtggggccgcctgcatcgcggcggcgcgcaacggatcgtcagcactgtcaacagcatccatggacgcaccccgggcaccctgacggcttgtggcaagccggcgcagcatggcctggagggatttgccagggtgccgttcaacgacctcgacgccatggccgcggccatcgacgaagagacggtggcggtgatgctggagccggtgcagggcgatgccggggtgatcccggcgaccctcgactacctgcgtggcatcgagcggctgtgccggcagcgtggcgtcctgttgatcctcgacgaggtgcagaccggcatcggccgctgcggcgcgctgctggcggaggaactgtacggggtacgcgccgacatcgttaccctcggcaagggcctcggcgccggggtgccgctgtcggcgctgctggcgcgtggcaacgcctgctgcttcgaaccgggcgaccagcttggcacccaccacggcaacgcgttgatgaccgctgccgggctggcggtactgaataccgtgctggagccgggtttcctggagcaggtgcgcgagcagggcacccacctgcgcgatggcctggcccgtgtcgcgcgtcgctatgggcatggtccgctgcgcggccagggactgttctgggggctgccgctgatcggccagcgcgcgccggcggtggttcgcgcggcgttcggcgaaggcctgctgatcaacgcgccgcagccgcactgcctgcgtttttccccggcgctgacggtgagccgggccaacgtcgacgaaatgctgcggcgactggaacgggccctggcccgggtcgccaaccgacacgaggaggtggcctga

SEQ ID NO: 320190 - DNA, 237 bp, Pseudomonas aeruginosa
ttgagcgactacctgatcaccctgagccagtccggccggctgttggccagcatgacggtgagcgccgcgcgctttgccgaggtgcgcgagctgatgcgccagcgcttccccgccggcgacggcttcgaactgcgcttcgaaacgcgccgggaaaagcgtcggctgctggagcaggggccacagggcgtgcgcctgctggcggtggagtacatgaccgaggaactgaaagatggctga

SEQ ID NO: 320191 - DNA, 702 bp, Pseudomonas aeruginosa
atggagcagatagtcgtaaacggtgttttcataggtaaagtcgaagaaacctggggcggattggtcagcgcgatcgacaagctgccggtcgagcaggagttctggctgggccacgatggcctgcccggcgacgaacaggccgacatccgccaccacggcggcctcgagcgcgctctccatcactatcccgccgagcactaccgctactggcgcaagcgccacccgctgaaccgctggcaactgccggcgttcggcgagaacatctcgacctacgggatcaccgaagccgaggtctgcatcggcgaccagttccattggggcgatgccctgctggaagtcagccagccgcgttcgccctgctatcgccagggccagcgctggaatcttcccgagctgcccgacgaattgcagagcggcggccgctgcggctggttctatcgggtcctgcgcagcggcatggtgactcccggggaccagctgaagctggtccagcggcattaccccgaactgaccgtcgcccgcctattgcagtggtatttcggcgatcccctggagcctctcgggttgcgccagatgatggcctgcgacgcgctctcccagcgttggcgcaagacagcggcgaaacgcctgtccagcggcgtggtggaagactgggggccgcgcctgcgcgggccgtcggattaccgggagcatgcctcttga

SEQ ID NO: 320192 - DNA, 879 bp, Pseudomonas aeruginosa
atggattttcgccaactccgctatttcgtcgcgctctacgaagaaggccacgtcggccgcgccgccgaacgcctggccctgtcgcaaccggccctctcgcagcagatccgccagttggagcagaacctcgacgtctcgctgttccagcgcagcggcaagcgcctgctgccgaccgtcgccgcccacaccctgtacaaccatgcggtaccgctgctggagggattggaaagggcccgcgaggcgatgcgcgtattccgcgggcagaccccgcgcagcctggcgatcggcgtgctgcagacggtcaacgccagcctggtgccgtacatggtcgaacgcctgcatgccgcgcagccgcacctgcgggtgcagatctacgaactgtcgggaatcgacatcgagcggcgcctgctcaccggtaacctggacatcggcatcggtttcctgccgccgcgccagccgggcctgcacagcgtcgagctgtacgaagacgaattgcagctggtgatccccgaggaacacccgttgaaggaattcaggaaggtgtccctggcccaggccgcggagttgccgatgctgctgctcggcgaggagttccgtgcgcgccagatctggcaggagcaactcgccgcgatcggccggcggccgcgggtgcaggcggaactgaaccacatgagcgggattctcgacagcctgccgcagacccgcttcgccaccgttctaccgggcaaggcacggcagatgcactcgaaccagcggctgctgtggaaaccgctcagcgaaccgcgcatcccgctgaaggtcggcctggtctaccgcgacgcgcaacgccagcacgccagcgtcgagctgctgcgctcgctgctggaaggcgtggtctga

SEQ ID NO: 320193 - DNA, 684 bp, Pseudomonas aeruginosa
atggaattccagcgcgtccaccagcagttgctgcaaagccaccacctgttcgaaccgctttctcccgtccagctccaggaactgctcgccagcagcgacctggtcaacctcgacaagggcgcctacgtgttccgccagggcgagccggcgcacgccttctactacctgatttccggctgcgtgaagatctaccggctgaccccggaaggccaggagaagattctcgaagtgaccaacgaacgcaacaccttcgccgaggcgatgatgttcatggacaccccgaactacgtggccaccgcccaggccgtggtgcccagccaactgttccgtttctccaacaaggcctacctgcgccagttgcaggacaacaccccgttggccctggccctgctggccaagctcagcacccgcctgcaccagcgcatcgacgagatcgagacgctttccctgaagaacgccacccaccgcgtggtgcgctacctgctgaccctcgccgcccacgcgccgggggagaactgccgggtggaaatcccggtggccaagcaactggtggccggtcacctgtcgatccagccggaaaccttctcgcgaatcatgcaccgcctcggcgacgagggcatcatccacctcgacggccgcgaaatcagcatcctcgaccgcgaacgcctggagtgcttcgagtga

SEQ ID NO: 320194 - DNA, 195 bp, Pseudomonas aeruginosa
atgcgccaatgcctgtattgcctccatgaaaccgaaggcgcggaaagcgcctgcgaacagtgcggcatgccgctgcccagcgcttcccagcaccagctccagggtcgccggcagcggcgcttcgcctggttctgcgtcgggctggcgctgttctgcctgggcatgatgctctggttgccgcgcgatgctccctga

SEQ ID NO: 320195 - DNA, 1839 bp, Pseudomonas aeruginosa
atggccttcgccgtcgagctggaggaatgggtcggcgcccactggcaccgcttcatcacccgccatgccagcggcgagttcgaggcggcgcgggtgaccctggagagcatgcggcgtccgctcggcatgctcttccgggcgctcggcggcgcaccgggggtagccctcgaggcgaccccggcgcgccgcctgctgctacgccgcacctggttgcagcgggtcgccgggacctgcgagcaggccccggtgtcctggttcaacggcgacagcctgcgcctgccggaatccctcgcggtctatccgcaggccgagctgaaccgcgaactgtatcgctggctggcgctgctggcggccagcgccgggccgctgcggcactgggcccaggacaaccagcgctgggcgcggcagttgctcgatgcctatccggcgctgcgcccgcgctacgcccggctggtcgccgcgcatctgcgccagcgcccgtcgctggacgattgcccggcggcagacgccgaactggaaatcgccctgcgccgcgcgcttgccgagccgggcagcgtcgagcgcttcccgcgagtcgagcgggcgccctggccggtgccgctgtggctgtatcccggcgagcgctggacgccttccgccagcccggaggacggcgaggaagcggccgccggcgccggcaagcgccaggtcgcccgcagcggagcgcgcaagcgcgccgagcgcgtcgaggagcgcgacagcgagcgcaacctgctgctgttccgcctggaaagcctgctcagttggtcggagcacctggccctggaccgctgtagcgacgacgaggacgacccggacggcgcgcgcgtcgccgaagacctcgactacctgtcgctgtcgcgccagcgcacgcagaagggcggcggcctgcgcctggatctcgacctgccggccgccgactacgatgacctgccgctcggccccgggctgaagctgcccgagtgggactatcggcagcagcgcctgctgagcgaccacgtgctgctgcaaccgatgcggccgcgcggcgcgaccagcgccagcctgccggcgcacctggagaagaccgcgctgcatctgcgccgccagttcgcctgcctgcgcgacggccgccaacgcctgcgccagcagccgcaaggcgacgagatcgacctcgatgcctggctcgacttccaggtcgagcggcgccgcggcggttccacccagccaggcctgttcctcgaacagcggccgcgccggcgcgacctcgcctgcctgttgctggcggacctgtcgatgtccaccgaagcctacctcgacgaccagcggcgagtgatcgacagcatcgtcgacagcctgctgctgttcggcgaggcgttgcaggcgctgggcgaccccttcgcgctgtacgggttttcctcggtgcgccggcagcaggtgcgctggcaggtgctgaaggacttcgacgaaggctacggcggcgaggtccgcggtcgcgtgctggcgctctcgccgggctactacacgcggatgggcgcggcgatccgccgggccagccaggtgctcggcgggcagccgcagaagcgtcgcctgctgttgctgttgagcgacggcaagcccaacgacctggaccgctacgagggccgctacggcatcgaggacacccgccaggcggtgatcgaggcgcgcagccagggactggtgcccttctgcatcaccatcgacaaggaggcggcggactacctgccctacctgttcggcgccgacggcttcgcgctggtcgagcgcgccgggcagttgcccgagcgcctgctccagctctatcggcgcctgcgccgctga

SEQ ID NO: 320196 - DNA, 1398 bp, Pseudomonas aeruginosa
atgatgtcgcccaatggctccctgaaattcgcctcgcaggcggtcgccaaaccctacttcgtgttcgccctgatcctcttcgtcgggcagatcctgttcggcctgatcatgggcctgcagtacgtggtcggcgacttcctgttcccggcgatccccttcaacgtcgcgcgcatggtgcacaccaacctgctgatcgtctggctgctgttcggcttcatgggcgctgcctactacctggtgccggaggagagcgactgcgagctgtacagcccgaagctggcctggatcctgttctgggtattcgccgccgccggcgtgctgaccatcctcggctacctgctggtgccctacgccggcctggccaggctcaccggcaacgaactgtggccgaccatgggccgcgagttcctcgaacagccgaccatcagcaaggcgggcatcgtgatcgtcgccctgggcttcctgttcaacgtcggcatgaccgtgctgcgcgggcgcaagaccgccatcagcatggtcctgatgaccggcctgatcggcctcgccctgctgttcctgttctccttctacaacccggaaaacctcacccgcgacaagttctactggtggtgggtggtgcacctgtgggtggaaggcgtgtgggaactgatcatgggtgcgatcctcgccttcgtgctggtgaagatcaccggggtcgaccgcgaggtgatcgagaagtggctctacgtgatcatcgccatggcgctgatcagcggcatcatcggcaccggccaccactacttctggatcggcgtgcccggctactggctgtggctcggctcggtattctcggcgctggagccgctgccgttcttcgccatggtgctgttcgccttcaacaccatcaaccgccgccgccgcgactatccgaaccgcgcggtcgcgctgtgggccatgggcaccacagtgatggccttcctcggcgcgggagtgtggggcttcatgcataccctggcgccggtcaactactacacccacggcacccagctcaccgccgcccacggccacatggccttctatggcgcctacgcgatgatcgtgatgaccatcatctcctacgccatgccgcgcctgcgcgggatcggcgaggcgatggacaaccgctcgcaggtcctggagatgtggggcttctggctgatgaccgtggcgatggtgttcatcaccctgttcctctccgcggccggggtgctgcaggtctggctgcaacggatgccggcggacggcgcggcgatgaccttcatggccacccaggaccagctggcgatcttctactggctgcgcgaaggcgccggggtggtgttcctcatcggcctggtcgcctacctgctgagcttccggcgcggcaaggcggccgcctga

SEQ ID NO: 320197 - DNA, 441 bp, Pseudomonas aeruginosa
atgtccgagacctttaccaaaggcatggccaggaacatctatttcggcgggagtgtgttcttcatcctgctgttcctggccctgacctaccacaccgagaagaccctgcccgagcgcaccaacgaggccgcgatgagcgccgcggtggtgcgcggcaagctggtctgggaacagaacaactgcgtcggctgccacaccctgctcggcgagggcgcctacttcgcgccggagctgggcaacgtggtcggacgccgtggcggcgaggagggcttcaacaccttcctccaggcctggatgaagatccagccgctgaacgtgccgggccgccgcgccatgccgcagttccatctcagcgagggccaggtcgacgacctggccgagttcctcaagtggagctcgaagatcgataccaaccaatggccgccgaacaaggagggttga

SEQ ID NO: 320198 - DNA, 258 bp, Pseudomonas aeruginosa
atgcgaaccctgaccctctgctggctggcgttgctggcgctggccgtgaccggtgtgctgctgggtggcgccggcgactctccctggctgctggcggcggtgctggcctgcgcggtggccaagggttggctgatcggcgagcgcttcatggagctggcccatgccccggcgctatggcgccgcctgctgctggcctggccgctgctgatggccctggcggtgggcgctgcgctgtacctggcgcggatgaataactga

SEQ ID NO: 320199 - DNA, 573 bp, Pseudomonas aeruginosa
atgtcgcctgataccgtcgagcggcgcctgcccggcgacctggcgatgtggttcttcatcctcgccgaactcagcgtgttcagcctgctgctgctggcgttcgccggcgcccaggcctggcagccggagctgttccgtgccggccgggagcaactggatagccgctggggcctgttgctgaccgtggccctgctcagctccggctggctcgccgcgctggcggtgcatgcggtgcgccgcggacggccgcgccaggcgagcggctggttgctggcggcgctgctgctggcgctggtctacgtcggcctgaagctgcacgagtacgggcggctcgccgatctcggcctggacatcgagcacgacactttcttcaccctctactggtgcctgaccggcttccatttcctccacgtcctgctcggcctgctgatcctcggctggctggcgcaggcctgctggcgccggtgttatacgccgcaggcttgctcgggactggagtcgggagtgctctactggcacatggtcgacctggtctgggtgctgctgttcccgctggtctacgtcctgcaatga

SEQ ID NO: 320200 - DNA, 783 bp, Pseudomonas aeruginosa
atgcgggacgcgacacccttctacgaggccaccggccatgagatcgaagtcttcgagcgcgcctggcggcacggcctgccggtattgctcaagggccccaccggttgcggcaagacccgcttcgtccagtacatggcgcggcgcctggaactgccgctgtacagcgtcgcctgccacgacgacctgggcgccgccgacctgctcggccgccatctgatcggcgccgacggcacctggtggcaggacggcccgctgacccgcgcggtgcgcgaaggcggtatctgctacctggacgaagtggtggaggcgcgccaggacaccacggtcgccatccacccgctggccgacgaccgccgcgagctgtacctggagcgcaccggcgagacgttgcaggcgccgccttcgttcatgctggtggtgtcctacaaccccggctaccagaacctgctcaagggcctgaagcccagcacccggcagcgtttcgtcgcgttgcgcttcgactacccggcggcgcagcaggaggcacgcatcctggtcggcgagagcggttgtgccgagaccctggcgcagcgcctggtgcagttgggccaggcgctgcggcggctggagcagcacgacctggaggaagtcgcctcgacccgcctgctgatcttcgccgcgcgcctcatcggcgacggcatggacccgcgcgaggcgtgccgggtggcgctggccgaaccgctctcggacgacccggcgacggtggcggcgctgatggacatcgtcgatctccatgtcgcctga

SEQ ID NO: 320201 - DNA, 1707 bp, Pseudomonas aeruginosa
atgccatttggcaagccactggtgggcaccttgctcgcctcgctgacgctgctgggcctggccaccgctcacgccaaggacgacatgaaagccgccgagcaataccagggtgccgcttccgccgtcgatcccgctcacgtggtgcgcaccaacggtgcccccgacatgagtgaaagcgagttcaacgaggccaagcagatctacttccaacgctgcgccggttgccacggcgtcctgcgcaagggcgccaccggcaagccgctgaccccggacatcacccagcaacgcggccagcaatacctggaagcgctgatcacctacggcaccccgctgggcatgccgaactggggcagctccggcgagctgagcaaggaacagatcagcctgatggccaagtacatccagcacaccccgccgcaaccgccggagtggggcatgccggagatgcgcgaatcgtggaaggtgctggtgaagccggaggaccggccgaagaaacagctcaacgacctcgacctgcccaacctgttctcggtgaccctgcgcgacgccgggcagatcgccctggtcgacggcgacagcaagaagatcgtcaaggtcatcgataccggctatgccgtgcatatctcgcggatgtccgcttccggccgctacctgctggtgatcggccgcgacgcgcggatcgacatgatcgacctgtgggccaaggagccgaccaaggtcgccgagatcaagatcggcatcgaggcgcgctcggtggaaagctccaagttcaagggctacgaggaccgctacaccatcgccggcgcctactggccgccgcagttcgcgatcatggacggcgagaccctggagccgaagcagatcgtctccacccgcggcatgaccgtagacacccagacctaccacccggaaccgcgcgtggcggcgatcatcgcctcccacgagcaccccgagttcatcgtcaacgtgaaggagaccggcaaggtcctgctggtcaactacaaggatatcgacaacctcaccgtcaccagcatcggtgcggcgccgttcctccacgacggcggctgggacagcagccaccgctacttcatgaccgccgccaacaactccaacaaggttgccgtgatcgactccaaggaccgtcgcctgtcggccctggtcgacgtcggcaagaccccgcacccggggcgtggcgccaacttcgtgcatcccaagtacggcccggtgtggagcaccagccacctgggcgacggcagcatctcgctgatcggcaccgatccgaagaaccatccgcagtacgcctggaagaaagtcgccgagctacagggccagggcggcggctcgctgttcatcaagacccatccgaagtcctcgcacctctacgtcgacaccaccttcaaccccgacgccaggatcagccagagcgtcgcggtgttcgacctgaagaacctcgacgccaagtaccaggtgctgccgatcgccgaatgggccgatctcggcgaaggcgccaagcgggtggtgcagcccgagtacaacaagcgcggcgatgaagtctggttctcggtgtggaacggcaagaacgacagctccgcgctggtggtggtggacgacaagaccctgaagctcaaggccgtggtcaaggacccgcggctgatcaccccgaccggcaagttcaacgtctacaacacccagcacgacgtgtactga

SEQ ID NO: 320202 - DNA, 315 bp, Pseudomonas aeruginosa
atgaaaccgtacgcactgctttcgctgctcgccaccggcaccctgctcgcccagggcgcctgggccgaagaccccgaagtgctgttcaagaacaagggctgcgtggcctgccatgccatcgacaccaagatggtcggcccggcctacaaggacgtcgccgccaagttcgccggccaggccggcgccgaagcggaactcgcgcagcggatcaagaacggcagccagggcgtctggggcccgatcccgatgccgccgaacgcggtcagcgacgacgaggcgcagaccctggcgaagtgggtcctgtcgcagaaatga

SEQ ID NO: 320203 - DNA, 360 bp, Pseudomonas aeruginosa
atgaacgcccctccggacttccggcgcgccgccagccacgccttgtggctggccctcgcgctgacgttcgcctgtcctcttccgggcctggccgacgagcatcccgatgcccgtcgccaggcccagttgcgtcacctgctgttgcaggactgcggctcctgccacggcctgcgcctgaccggcggcctcggtccggcgctgacccccgaggccctgcgcggcaagccgcgcgaatcgctggtcgccaccgtgctcatgggccgtccgcaaaccccgatgcccccctgggccggcctgctcagcgaagacgacgccggctggctggtggaccgcctgatcgaaggagagatcgccccatga

SEQ ID NO: 320204 - DNA, 1179 bp, Pseudomonas aeruginosa
atgaacctgcgtcccctcgcgccgcttttcctcgccctgctcgccggctgtagccagcagccgcccttgcgcggcagcggcgacctcggcgtgctgatcgaacgcgccgacggcagcgtgcagatcctcgacggcacggcgaagacctcgctggcgcgggtcgaaggcctcggcgacctgtcccacgcctccctggtgttctcccgcgaccagcgctacgcctacgtattcggtcgcgacggcggcctgaccaagctcgacctgctggcccagcgcatcgacaagcgcctgatccagggcggcaacagcatcggcggagcgatcagccaggacggtcggctggtcgcggtatccaactacgagccgggcggggtcaaggtgttcgacagccgcaccctggagctggtcgccgagattcccgccacccgcctccccggccaggacaggaactcccgggtggtcggcctggtcgacgcgcccgggcagcgcttcgtgttcagcctgttcgacagcggcgagatctggatcgccgacttcagccagggcgacacgccgcacctgacccgcttccgcgatatcggcaagcaaccctacgacgccctcatcagccccgacgggcgctactacatggccgggctgttcggcgaggacggcatggcccagctcgacctctggcacccggagcgcggcgtcaggcgcgtactcggcgactacggccgcggccaacgcaagctgccggtgtacaagatgccgcacctggagggctggaccatcgccagcgaccaggccttcgttccggcggtcggccatcaccaggtgctggtgctcgacgcgcgcgactggaagcagaccgacgccatcgacgtcgccggccagccggtgttcgtcatgactcgaccggacgaccggcagatctgggtcaacttcgcctacccggacaacgacaaggtgcaggtcatcgacagcgagacccacgaagtgatcgaaaccctgcgccctggccccggcgtactgcacatggaattcagcgggcgcggcgaccaggtctggatctcggtgcgcgacgccgaccagttgcaggtctgggacccgtaccgcctgaagcgcatcggcagccttccggcccgcagcccgagcggcatcttcttcagccaccgcgcccagcacatcggactctag

SEQ ID NO: 320205 - DNA, 453 bp, Pseudomonas aeruginosa
atggacgacctctcccgccgcctcctcgcccgataccagaaaggcctgccgatctgcgcggaaccctatcggcggatggccgagaccctgggttgcagcgaagccgaggtgctcgaacggctgcgtcgcctggaagccgacggcgcgttgtcgcgggtcggcccggtgctccgccaccaacgcgccggggccagcaccctggctgccctggcggtgcccgaggagcgtctgcaacgggtcgccgagcgcatcagccagtacgccgaggtcaaccacaactaccagcgcgaacaccgctacaacctgtggttcgtgctcaccgccggcgaccgcgcgcaactcgaccgggtactggcggagatcgccgccgacaccggcctgcaacccctcgacctgccgatgcaggaagcctactgcatcgacctcgcgtttcccctggaggccagccgatga

SEQ ID NO: 320206 - DNA, 525 bp, Pseudomonas aeruginosa
atgaaccccgtcgaacccctcgccgcgccgcagcggcaacacctgcgctacctgctggaacagggcctgccgctggccagccggccctaccgggtgctcgccgaacgcatcggcgccggcgaagacgaagtgctggaacaggtccgccgctgggacgaagacggcctgttccgccgcttcggagtgatcctccaccaccgcgccctgggctataccgccaacgccatgctggtgctggacgtcgccgacgcggaggtcgacgccgtcggccgcgccctcgcccacgaaacgatcgtctcgctctgttaccgccgcccgcgtcgcctgccgatgtggccatacaacctgttctgcatgatccacggccgcgagcgcggcgaagtggaacgccagatcgaggccctgctggagcgccacgccctgcgccagacaccgcaccgctggctgttcagcctgcgcgcctacaagcagtgcggcggccgctacaccgcgccgccggccgacctggagcgccgccatggatga

SEQ ID NO: 320207 - DNA, 444 bp, Pseudomonas aeruginosa
atggatgagttcgaccggcgcctgctgaaccgcctgcaacacggcctgccgctggagccgcatccctacgcgctgctcgccgccgagctggattgccgcgaggaagacatcctgcgccgcctggacgacctgctcgacgacggcaccctgacccgcttcggtccgctgttcgatatcgagcccctcggcggtgccttcaccctggccgccatgagcgtgccggaggcgcgtttcgaagagatcgccgcgctgctcgccggctggccgcaggtcgcccacaactaccgtcgcgagcacgccctgaacatgtggctggtggtcgcctgcgacagcccggcggaggtcgccgagactctcgcacggctggagcgcgagagcgggctggcggtactcgacctgcccaaggaggcgacctaccatgtcggcctgcatttccccctctga

SEQ ID NO: 320208 - DNA, 516 bp, Pseudomonas aeruginosa
atgtcggcctgcatttccccctctgacgccctgctcgcccgccgcctgatcgaactgacccaggccggcctgccgctggtcgccgacccttgggcgtggatcgccgcgcaactgcggctgagcgaggcggagaccctggcgctgctgaagcgcctgcgcgacgccggggtgatccggcgcatcgccgcggtgcccaaccactatcgccttggctaccggcacaacggcatgaccgtctgggacgtcgccgacgaacgcatcgaacgcctcggccggctggtcggcgggctgtccttcgtcagccattgctaccggcgcccgcgccatctgccgcagtggcgctacaacctgttcgccatggtccacggccgcagcgaagcggagatcgaaggctatcgccagcagatccgcctgctgctcggcgaggactgtcgcgccgacgagatgctggtgagcagccgcatcctgaagaagaccggcctgcgcctggcgcagaaggaggaacgtccatgctga

SEQ ID NO: 320209 - DNA, 1164 bp, Pseudomonas aeruginosa
atgctgaggatcagccattacctgcgcagcctcaccgaggacgcgccgacgccgcgccgcgccggcggcaggcgcgccccggtggtgatctggaacctgctgcggcgctgcaacctgacctgcaagcactgttactccacctccgccgacagcgacttccgtggcgagctggagaccgcggaaatccttcgcggcatcgacgacctgcgcgccgccggagtgcgcgtgctgatcctctccggcggcgagccgctgatgcacccggacctcttcgagatcgccgcccatgcgcgccaggccgggatgttcgtggcgctgtcgagcaacggtacgctgatcgacgaaggcaacatccagcgcgtcgccgaggcccgcttcgactacgtcggcatcagcctagacggcctgcgcgagacccacgaccgcttccgccagaagcagggcagcttcgacgccgcgctggcggccatgcgcctgtgccgcgaggcggatatccgcgtcggcatgcgcaccaccctgaccgaggagaacgccgcgcaactaccggcactgctcgacctgatgcgcgaactcgacgtgcagaagttctacctctcgcacctcaactacagtggccgcggccgccgcagccgcgccctcgacgcccaccaccggcgcacccgcgaggccctcgcgctgctcttcgaacgggccgacgaggacatccggcaggggcgcgacagcgacttcgtcaccggcaacaacgacgccgacgcgatccttctcctcgactggctcaagcgccgccgcccgcagcaactggcgcgtctctgcgagctgctgctggactggggcggcaacgcctcgggcgagggcatcgccaacatcgacaacaccggcgaggtgcatccggacagctactggtggcaccacagcgtcggcaacatccgccatcagcgcttcgccgacttctggttcgagcgccccgacccgctgctcctgcaactgcgccagcgcccgcgaccggtggtcgggcgctgcagccaatgccgctggctggacatctgcaacggcaacacccgcacccgcgcctgggccggcggagaactctggggcgaagaccccggctgctacctcagcgatcaggaaataggcctcgagcgcatcgcgctgcacgccgtctaa

SEQ ID NO: 320210 - DNA, 840 bp, Pseudomonas aeruginosa
atgaacactaccgtgattccgccgtccctcctcgatgtcgatttccctgccggcagcgtcgccctggtcggcgccggccccggcgatccgggcctgctcaccctgcgcgcctgggccctgctgcaacaggccgaggtggtggtctacgaccgcctggtcgcccgcgagctgatcgcccttctgccggaaagctgccagcgcatctacgtcggcaagcgctgcggccaccacagcctgccgcaggaagaaatcaacgagctgctggtgcgcctggcccggcagcaacgccgggtggtccgcctgaaaggcggcgacccgttcatcttcggtcgcggcgccgaggagctggagcgcctgctcgaagccggcgtcgactgccaggtggtccccggcgtcaccgccgcctccggttgcagtacctacgccggcatcccgctgacccaccgcgacctcgcccagtcctgcaccttcgtcaccggccacctgcagaacgacggccgcctcgacctcgactgggccggcctggcgcgtggcaagcagaccctggtgttctacatgggcctgggcaacctcgccgagatcgccgcgcgcctggtcgagcacggcctcgccagcgacaccccggcggcgctggtcagccagggcacccaggcgggccagcaggtgacccgcggcgcccttgccgagctgccggcgctggcgcgacgctaccagttgaagccgccgacgctgatcgtcgtcggccaggtggtcgcgctcttcgccgagcgcgcgatggtgcatccgtcatacctgggcgccggctcgccggtcagccgcgaggccgtcgcatgcgcctga

SEQ ID NO: 320211 - DNA, 1482 bp, Pseudomonas aeruginosa
atgcgcctgatcggcctcgccctcggcctgctcctcggcgccctcgcacaggccggcgaagcgccgggggaagcgctctaccgccagcactgccaggcctgccacggcgccgggcggctcggcggcagcggcccgaccctgctcccggaaagcctttcgcggctgaagccggcgcaggcccgcgaggtgatcctgcacggtcgcccggcaacccagatggccggctttgccggtcaattggacgacgccgcggcggacgccctggtcgcctatctctaccaggcgccgccgcgcgaaccgcagtggagcgccgaggacatccgggccagccaggttcagccgcatcccctcgccaccctgccgtccaggccccgcttcgaggccgacccgctgaacctgttcgtggtggtggagtccggcgaccaccacgtgaccatcctcgacggcgatcgcttcgagcccatcgcccgcttcccctcgcgctacgccctgcacggaggtccgaagttctccccggacgggcgcctggtgtacttcgcctcgcgcgacggctgggtaaccctctacgacctgtacaacctgaaggtggtcgccgaggtccgcgccggcctcaacacgcgcaacctggcggtcagcgacgacgggcgctgggtcctggtgggcaactacctgcccggcaacctggtgctgctggacgcccgcgacctgtccctggtgcaggtcatcccggcggccgacgcccagggccaggcctcgcgggtcagcgcggtatacacggcaccgccgcggcacagcttcgtggtcgccctgaaggacgtccacgagctgtgggagctgccctatgccgacggcaagccggtcgcgccgaaacggctggcggtcgccgactacctcgacgacttctccttcagccccgactaccgctacctgctgggcagctcgcggcaggccaggggcggcgaggtgatcgagctggacagcggcgcgcgggtcgcctcgatcccgctgtcgggcatgccgcacctcggctcgggcatctactggaagcgcgacgggcgctgggtgttcgccacgccgaacatcagccgcggggtgatctcggtgatcgacctgcaaaactggaagccgttgaaggaaatcgccaccgacggccccggcttcttcatgcgtagccatgccgactcgccctacgcctggaccgataccttccttggcaagaaacacgacgagatcctgctgatcgacaagcagaccctggaaatcgcccatcgcctgcgccccagcccgggcaaggtggccggccacgtcgagttcacccgcgacggccgctacgccctgctcagcgtctgggaccgcgacggcgcgctggtggtctacgacgcgcacagcctggaggaagtgaagcgactgccgatgaacaagccgtcgggcaagtacaacgtcggcaacaagatcggctatgcggagggaacctcgcactga

SEQ ID NO: 320212 - DNA, 1449 bp, Pseudomonas aeruginosa
atgtccctcgaacaaaccggccatgcgcccgcaacttccggggtcgacttcgaaagcgtcgacgccgactacttccaacaccgtcaactgaagaaaggcgccgccggctgggtcctgctggtcgggctcggcgtcgcctacgtgatctccggcgactacgccggctggaacttcggcctggcccagggcggctggggcgggatgttcctcgccaccctgctgatggccaccatgtacctgtgcatgtgcttctcgctcgccgagctgtcttcgatgatccctaccgccggcggcggctacggcttcgcccgcagcgccttcgggccctggggcggcttcctcaccggcaccgcgatcctcatcgaatacgccatcgccccggcggccatcgcctgcttcatcggcgcctactgcgagtcgctgttcggcgtcggcggctggctgatctacctggtgttctacatcgtattcatcggcatccacatcctcggcgccggcgaggcgctgaagctgatgttcgtcatcaccgcggtggcggccatcgccctcggcgtgttcattgtcgcgatggttccgcacttcgactcggccaacctgttcaacatcccgcagaccgcggcgaccggcgccagcagcttcctgccgttcggctatgtcggggtctgggcggcgatcccctacgcgatctggttcttcctcgccgtcgaaggcgtgccgctggccgccgaggaaaccaagaaccccaagcgcgacctgccgcgcggactgatcggcgccatgttggtgcttctcgccttcgccgcactgattctggtcgtcggtcccggggccgccggagccaaggagctgatgggctcgggcaatcccctggtggaagcgctggagtcggcctacaagggttcgacctggatgagccagttcgtcaacctggtcggcctggccgggctgatcgccagcttcttctcgatcatctatgcctactcgcggcagatcttcgccctctcccgcgccggctacctgccgcgcagcctctcgctgaccaaccgcaagaaggcgccggtactggccctggtggtgccgggggtgatcggcttcggcctgtcgctgaccggccagggtgacctgctgatcctggtcgcggtgttcggcgcgaccatctcctacgtgctgatgatggccgcgcacatcaccctgcgcatccgccgcccggacatgcagcgcccctaccgcacccctggcggcatcctcacctccggcgtagccctggcgctggcctgcgtcgcggtggtcgccggcttcctggtcgacccgcgggtcgtggtcggcgcggtggcgatctacgctgtactgatcggctacttcgccctgtacagtcggcatcacctggtgtccggcaccccggaagaagagttcgccgcgatccaggcggcggaacaggacctgcgctga

SEQ ID NO: 320213 - DNA, 1395 bp, Pseudomonas aeruginosa
atggcacgtttcacccatagcgtcggcggcgaaacctaccgcttcgacagcctcaaggacgtgatggccaaggccagccccgcgcgctccggcgatttcctcgccggcgtcgcggcgagcaacgacggcgagcgggtcgccgcgcagatggccctggccgacatcccgctcaaacacttcctcgacgaggcgctgattccctacgaggacgacgaggtcacccgcctgatcatcgacacccaccagcgcgacgccttcgccccggtgtcccatctcaccgtcggcggcttccgcgactggctgctcggcgacgccgccgacgaggccagcctgcgcgccctggctccgggcctgacgccggaaatggcagcggcggtatcgaagatcatgcgtgtccaggatctggtcctggtggcgcagaagatccgcgtggtcacccgcttccgcaacaccctcggccttcgcggccggctctccacccgcctgcaaccgaaccacccgaccgacgacccggccggaatcgccgcgagcatcctcgacggcctgctgttcggcaatggcgacgcgatgctcgggatcaatcctgccaccgacagcatggcctcgatctgcgccctgctggagatgctcgacgcgatcatccagcgctacgagattcctacccaggcctgcgtgctgacccacgtcaccagctccatcgaggcgatcaaccgcggcgtgccgctggacctggtgttccagtcgatcgccggcaccgaggcggccaatgccagcttcggcatcagcctgaagatcctccaggaaggctacgaggccgggctcagccagaagcgcggcaccctaggcaacaacctgatgtacttcgagaccggccagggcagcgcgctctcggccaacgcccaccacggcgtcgaccagcagacctgcgagacccgcgcctatgcggtggctcgtcacttcaagccgttcctggtgaacaccgtggtcggcttcatcggtcccgagtacctgtacaacggcaagcagatcatccgcgccggcctggaagaccacttctgcggcaagctgctcggcgtgccgatgggttgcgacatctgctacaccaaccatgccgaggccgaccaggacgacatggacatgctcctgaccctgctgggcgtcgccgggatcaacttcatcatgggcattcccggctccgacgacgtgatgctcaactaccagaccacctccttccacgacgccctctatgcgcgccagacgctgggcctgaagccggcgccggaattcgaggactggttgcagcggatgggaatcttcacccaggccgacgggcgcatccgcttcggtgacgagttaccgccggcgttccgccaggccctggcgcaactggcctga

SEQ ID NO: 320214 - DNA, 822 bp, Pseudomonas aeruginosa
atgaacgacaagcacctgcccgacgccagcgccgagaacccctggctgccgctgcgccagctgacccccgcgcggatcgccctgggccgcaccggcaccagcctgccgacccgcccgcaactggacttccagtacgcccacgcccaggcgcgcgacgccgtgcacctgcccttcgaccatgcggccatcagcgacggcctgcgccagcgcggccgcgacagcctgctgctgcacagcgccgccgccgaccgccacgtctacctgcaacgcccggacctcggccggcgcctcgacgaggcctcggtgcaacgcctgcgcgaacacgccgccggctacgacgggcagatcgacctggccatcgtggtcgccgacggcctctccgcgctggccgtgcagcgtcacaccctgcccttcctcgaacgcctggaggaacaggcgctggccgaaggctggtcgctgtcgccggtggtcctggtggaacagggacgggtggcggtggccgacgagatcggtgaattgctgcgggcgaagatgagcgtgatcctgatcggcgagcgtcccggcctcagctcgccggacagcctcggcctgtacttcacctgggccccgcgggtcggcctcaccgacgcctatcgcaactgcatctccaacgtccgcctggaaggcctcagctacggcatggccgcgcaccgcctgctctacctgatgcgcgaggcctgccggcggcagctttccggggtcaacctgaaggacgaggcggaggtccaggcgctggacggcgaggctccgcgcaccggcaacttcctcctggcgagggactga

SEQ ID NO: 320215 - DNA, 462 bp, Pseudomonas aeruginosa
atgcgaatcgtgcaagccaccctcgaacacctcgacctgctggcgccgctgttcgtcaagtaccgcgaattctacggcatgctctcctaccccgagtcctcgcggaaattcctcgagaaacgcctgcgccgcaaggagtcggtgatctacctggcgctggccgacgaagaagaccgcctgctcggtttctgccagctctatccgagcttctcctcgctgtcgctcaagcgcgtctggatcctcaacgacatctacgtcgccgaggaggcgcgccggcaactggtcgccgaccacctgctgcaacacgccaagcagatggcccgggaaacccatgcggtgcgcatgcgtgtctccaccagcgtcgacaacgaggtagcgcagaaagtctacgagtcgatcggcttccgcgaagaccaggagttcaagaactacaccctgccgatcagcgacgaactaagctga

SEQ ID NO: 320216 - DNA, 894 bp, Pseudomonas aeruginosa
atgggttcgcgcacctggcactggcccggcgtcctgctcggcctgctcctcgccacggccggcgcgcaggccgacaccctgcgcgtggcgaccctcgactgggcgccctacgtcggccccgacctgccgggcaagggcctcgccagccgcatcctcgacgaagccctggccctcgacgggcaccgcgccgaactggtgttcctgccctggcaacgtgccctgaaagaagccgccgaggggcgcttcgacgctctcatgccggcctacctgtcgcccgagcggcgcgaactgttccacgccaccatccccctgctcgactcgcaactgggcttcttccgccagcgcgagcgcctgctgccggtcaatcccgcgcatctggaaagcctgcgtccgtaccgcatcggcgtggtccgcggctacgtcaaccgggaggatttcgacgccgaccgcagcctgaccaaggacgcggtgaccaacgactggcagaacctcgagaagctcctgcgcgggcgtatcgacctggccgtggtcgatcgctacaccggctaccacctgctggcgcgcaacgtgccggcgctgaaggatcgcctggtgttcatcgaaccgccgctggaggtcaagccgctctatgtactggtgccgaaaagacacgcccgcggcgccgcccttgccgccagcctcgaccgcaacctgcgcctgatgcgtcgcagcggccggctggaacaactgatcgccgaagcgcacctcgaacgcagcgggcagacccgcacgctggccgtcgatccgttaaccggccaggccgaccagcagcgcagccccggccaggagcaggaccagggccagcacgccccgttgcaaccggcgtggcgcgaagacccgctggggatgcgctag

SEQ ID NO: 320217 - DNA, 1584 bp, Pseudomonas aeruginosa
atgacactccagccttttgcccagccaccgctcagtctcgccctgggcgccgggcgcgacctcccggggcaggccgcgcgggttcgcgccgaatggctcgcgcctcgccccggacgggctccggcgtttctcctggcgctgctctggggacgcggttgcgccaacgtggtgcaggccatcgaaggccatctcgacgccctgttcgccgactacgcctgtacccccgagggttggccggaagctcaggcggcgcggcaggtcctggcttcgctgaacatgcagctctatcgccggcgccgcgaaggcgagccgggcgtgctcgagctggcggtggggttgctgctggtccatgccggaggcgtgcactttctccagtgcggcgccgtcggcctgctgcgttatcgccagggcagcctgcagcgcctgggagggagcggccagccgctgggtagcagcgcggagctggcgctggtccagcacaacctgacccaggtggccggcgagcccttgttgctggcgccccagccgctgctcgaagtggccgacctgcgcgccctcggagagcgttgtgcggggctggccacggggcgcctggagggcgtgctgcagccgttgctgcatgcgccgggggcggtggcgctggtcttgccgggggcgctcgagcgcgccccggcggcgccacggcataccggctggccagcgctgggcgcggcgtgccccggcgactgcgtggatggctggaccttgcaggcagcttgcgcgttcggcccgcccgggcggctattccgcgcctgcgacgagcaaggatgcgaggcgttgctgctgctcgcggcggtcgatgccgacgaagcgttctggcagcgcgaatgggcattgcggcgctgccgtgcggagagcctgccgcgagtattgtcgtcgccccggttgcgtcgtcatgccttccagttgttcgctccgccgcgctggccgatgcgcagcctgctggattgggcgccagcgcacctgccgctggaaccgcaatgcgcgctggtcctcctggagcaacttatcgatgcggttcgcgccttgcagcggcgcggcgtacagggcttgtggctggcgccgcggcagatcctgctggacgagggcgggcgcctgctgttcctccccgaggcggcggcgatcctgccgggggtggcgcgccaggcgctgcctgcggacagcgtgccgctggcgccggagttgcgtcgcggcgaggcgctcgatggccgggccgaccagttcgccctggcggcgctgttctattggctgctctgtggtcgctggccgtcgatcgcctgcccggagagcgacggcggatgccgctacgagcccctgggcgagcgtcaggcggacctgccggtcggctgggatggggtattggcgcgggccctggcgccgcgtccggaggcgcgcttcgaagcgttgtcggaattctggctggccttgcagaagccgctagcgcatccccagcgggtcttcgcgccacgccggttgcaacggggcgtgctggccctggtcctgctcctggccggggctgcgctgctggtcggcctggccggttaa

SEQ ID NO: 320218 - DNA, 666 bp, Pseudomonas aeruginosa
atggacttcaacccaatcgatctgattctccacctggatacctacctggccatgctggtcagcaactatggcgtctggatctacgccatcctgttcctggtgatcttctgtgaaaccggcctggtggtgactccgttcctccccggcgactcgctgctgttcatcgccggcgccatctgcgccaccggcggcatggacccatggctgctcggcgggctgctgatggtcgcggcgatcaccggcgacagcaccaactacgtgatcggccggaccctcggcaagcggctgttcagcaaccccgactcgaaggtattccgccgcgactacctcgaccgcacccatgagttctacgaacgccacggcggcaagaccgtgaccctggcgcgcttcctgcccatcgtgcggaccttcgcgcccttcgtcgccggcatggcgaagatgcactacccgcgcttcgtcatgttcagcgtggtgggcaccgtggcctgggtcggcggcctggtgaccctgggctacttcttcggcaacgtgccgttcatcaagaagaacctgtcgctgctggtgatcggcatcatcctgctgtcgctgctgccgatgatcctcggcttcattcgccatcgcctgcaggcgagcgccgccaaacaggccaaggcccagagcgactga

SEQ ID NO: 320219 - DNA, 831 bp, Pseudomonas aeruginosa
atgtggtcgttccgcgcctggcggcgccggcgcctgctggcacgccacccggtggccgaagagctctggcagcgggtacgccggcacctgccgatcctcgacggcctggacgccgacgaggaccgccgcctgcgcgagcgggccgtgctgtttctcgccgacaagcacctgaccgcactcgccggcgtcgatctcgacgacttcggccgcctgctgctggcggcgcaggcgcaactgccgctgttgcacctgccggagctgaactggtaccagggcttccacgagctggtgctgtatcccgatgatttcgtcagcccgcagaaacaccgcgacgccagcggcgtagtccatgagttcgacgacgaacgcagcggcgagacgtccctgcaagggccggtggtcctggcctggcccggcgtcgtcggcgggggtggctgggatgcctacaacctggtgatccacgaactggcgcacaagctggacatgctcaacggcgacgccaacggcctgccgccgctgcacgccggcatgcgcatcggcgactgggcgagcgccatgcaggccgcctacgacgagatgaacgccctgctcgaccgcgaccccgacgcgcagaccgccatcgacccctatgcggcggaagatccggcggagttcttcgccgttaccagcgagtatttcttcaccgccccggatctcctccacgaggcctatccggcggtataccggcagctccagttgttctaccgccaggacccgctgcaacgcctgcgccgcctgcaggccgagcatccggactaccgcgaggcggcgggcgacacgactaacggctga

SEQ ID NO: 320220 - DNA, 528 bp, Pseudomonas aeruginosa
atgagctacagcaagatcccggccggcaaggacctgccgaacgacatctacgtcgctatcgagattccggccaaccatgcgccgatcaagtacgagatcgacaaggacaccgactgcctgttcgtcgaccgtttcatggccaccccgatgttctacccggccaactacggcttcatcccgaacactctggccgacgacggcgacccgctggacgtgctggtggtgaccccctatccggtcgctcccggttcggtgatccgcgcgcgcccggttggcgtcctgcacatgaccgacgaggcaggcggcgacgccaagctgatcgccgtgccgcacgacaagctgagcgtcctgtacaaggacgtgaaggaatacaccgacctgccggccctgctgctggaacagatcaagcacttcttcgagaactacaaggatctcgagaaaggcaagtgggtcaaggtcgaaggctggggcaacgccgacgccgcccgcgccgagatcaccaaggccgtggccgcgttccagaagtaa

SEQ ID NO: 320221 - DNA, 717 bp, Pseudomonas aeruginosa
atgcgtgtcgcgatactggacgacgagtcggccgaactggaccgggtcgagcagaccttgcagcagatacccgcgcagggcgaacaggcctggacggtgcaccgtttcgcccgtggcgaggacctgctcaagcagctcaagcgggaaaccttcgacctgctgatcctcgactggcagttgccggacctcagcggcctgcaattgctgcgctggagccgcgagcatctggatgcgccgccgccggcgatcatgctgaccagccgtgacgccgaacaggacatcgtgcaggcgttgaacagcggcgccgacgactatgtcagcaagccgttccggcccaacgaactgaaggcgcggatagccgccgtgctgcgtcgccacgggggaacgcgtcccgcgcagcatgaggtgcagactttcaacgacctcagtttcgacgatgccgagctgaccgtgacccgggccggcgcgccgatcagcctgaccgaacgcgaataccgcctggcccgctgcctcttcgccaacctgggacggccgttgtcgcgggaatatctctacgagcgcttctggccccacgaggaagtgttgtcctcgcggccgctggatacccacatctatcgcctgcgcaacaagcttggcctgaccgccgagcgcggttggcagttgctgaccatctacggctacggatatcggttggagagcgtggcgacggtcgactga

SEQ ID NO: 320222 - DNA, 270 bp, Pseudomonas aeruginosa
atgggtttccggccagttagccaacgtttgcgtgacatcaacctgcaggccctcggcaagttttcctgccttgccctggtcctcggcctggaatcggtaagccatccggccggcccggtccaggccccgtcgttcagccagggcaccgccagcccgtccttcgctactccgctcggcctcgacggcccggcccgcgccagggccgagatgtggaacgtcggcctgtccggcgccgtcagcgtgcgtgacgagttgcgctgggtgttttga

SEQ ID NO: 320223 - DNA, 690 bp, Pseudomonas aeruginosa
atgaagcaatacggagcagagttcttcggcaccttctggctggtattgggcggctgcggcagcgcagtactcgctgccggcgtaccggaactgggaatcggctacctaggcgtggccctggcgttcggcctcagcgtgctgaccatggcctatgccatcggcccgatctccggcgcccatctgaaccccgcggtatcggtaggcctgtgggtcggcgggcgcttcccggccagccaactgctgccctatgtcgtcgcccaggtcctcggtggcctcgccgccggcggcgtgctgtacctgatcgccagcggcaaggccggcttcgacctggccgccggcttcgcctccaatggctacggcgaacactcgccgggcggctactcgttgcaagccgcgctggtcagcgaagtggtacttaccggcatgttcctgctgatcatcctcggcgccacctccaagcgcgcgccgcagggcttcgcgccgatcgccatcggcctgaccctgaccctgatccacctgatcagcatcccggtcaccaacacctcggtgaacccggcgcgcagcaccgcggtcgccctgtacgtcggcgactgggcggtttcccagctgtggctgttctgggtcgcgccgattctcggtgcggtactcggcgccctggcctatcgcctgatcggcgacaagaacgactga

SEQ ID NO: 320224 - DNA, 1002 bp, Pseudomonas aeruginosa
atgacagccctcgcccttacttcccgatccctctttccggcttgcgccgccctggcgctgggcggactgttgacgctgctcgccggctccgtcgcggccgcgccggccaagacgaaacggccgccgttcatcgagcagggcgaaacgtgcctgccccagccgctccccgccagcgtgctctatctcgccggcgacgcctggaagctcgacgccaagggcaaccagacgcccctggaagaaggcatggacatcgacgaactggaaggcgtcaagacctctccgaccgccttcgtcagcctgctgctcggcgacggcagccgcatcgtcctgccctccagttcggaagtcaccctgcacctcgacgaggacaccggcattccgcagatcgccctgcgcgcggggcaggtcgagtcctatgtcctgaagagaaagagcgatcacgaccgcttccaggtgctgaccccggtcggcgtactgggcgtgcgcggtacccacttccgcgcccgcaccgaagacggccaggcgctgaccgaagtgctcgacgggcgcgtcgcggtgaaccgcgagctgaccagcgacgacctgccgctcaacggcaggcgcccggcccgcaaggcggcgcaggccgagccggacgaggacgtgctggtcgacgcccgccgcggcctgaaggtcaagccgcagggcaagctgacgccggtggacctgctacccgccccgcaattgcgcggccagggcggcgagcacggcgagtctccggtttggaagctctatcttgccccgctgcacggcgccaagcgctaccgtgcccaggtagccagcgatccggacttcctgcgcatccagcaggagcgtttctcgagcaccccggaagtcagtttcagcggactcaaggcggccttctaccacgtccgcctctcggccttcgacaacgacggcctggagggcgagaccagcgtatacgacattctctactacccgcgaggcggcagtgcccgatag

SEQ ID NO: 320225 - DNA, 2301 bp, Pseudomonas aeruginosa
atgaaggcgctcgaccgccaggacgagcccagccaggcgcagcggctgttccgcggcctggtgcgcgaatggctgctggtcagcctgctgctccttccgctcaccgccctgctttcgctgagcagcggcctgccgctgaacaacctgctctacgaccgcctgcgcaacctcgccccgctggccgtcgatccgcgcatcctcgtcgtcgccatcgacgaccgtagcctggaaagcctcggtcgctggccctggccgcgcagcgtccacgccgagctgctggatcgcctggccgccgccggcgcacgcagcgtactgctcgacgtgatcttcagcgaaccctcctccaatccggacagcgaccgccagttggcaagatcgctgtgccgggccggcaacgtcctcctgccactgctgcgcgaaagcgtgccgcgctacggcgaaccgccacgggagataccgccgaccgcgccgctggccggctgcgccgccggcatcgggcatatcaacgtcgaagcggacagcgacggcacggtgcgcagcgtctacctgcgcgaaggaccgctcggccagccgcgcccgctgctcgcctggcaagcattcgccgatgccggcgccatgcccatgcccggcctcgacgacatgcgcaacctgcccggctggcagcgtgaccacgccatccgcattcccttcatcggtgccgacgcgggcttccccagcgtgccctacgtcagcgtgttgcgcggcgaggtgccagacagcctgctgcgcgaccgcttggtcctggtcggcgccaccgcgccgggcctcggcgaccgctatgtcaccccgctgtcggccagcctcggcaccacgccgggggtggagatccaggccaacattctcaacggcctgttgcagcagcgcaccgccgtcgacctgcaaccctggctcgccgccctgctctccgccgccagcgtagcgctgctgctcggcctgatgctgttccgctcgcgccacgccttgctcctcaccctggcctgcgcggccctggccctgggtctttcctgggcgctgctgctcaacggctggtggtggtcgccgctggccagcctggtcggcctgctgctggcctacctgatctggagctggcgccggctgaacgcggtgctcgcctacttcggctgggaactggcgcgcctcgaccacgagcccaaggtgctgcccgagcgggccagccccccgcgcgccggcaacgatccattgcagaaccgcatcgccgccctggagcaggcggtcagccgcacccgcgacagccggcggttcatggccgacggcctggaaggcctgccggtggcgaccctgatctgcgacccgcaggggcagatcctgctggccaaccgcaaggcacgcgacctgttcggcggcgagctgcgcggcgccgaactgcgccagcgcctggccggactcggccatccgagcctcgccggtggcgcccgcccaacgctggaaaccctggaagccatcgagttccgcgaccaccgggaacgcgacctgcgcctcgacctggcgcgcctgctgccggtcgaaagcgaaaccgccatcggctggctggtgagcctgatcgacctgagcgccgaacgcgatgccgagcgccagcgcgccaccctcctgcgcttcctctcccatgacctgcgcgcgccgcactcggcgatcctcgccctgctcgacgtccgccccgccgaggacgaagccggccagcaggtctaccgacagatagagcagcaggtccgtcgcgccctgggcctgaccgacgccttcgtgcaactggccaaggccgaatccgacgcctaccgcttcgaagcgtgcatgttcaccatgttggcgatggacgccgccgaccagctctggcccctcgcgcaacagaaagacatcgacctgcggcgcgactgggacgacgagcaggaaccgatggtctgggccgaccccggcctgctcacgcgcgcgctgttcaacctgctggagaatgcggtcaagtacagcccggcggggaccgtcgtcagcctgagcatccgcctcgaaggcgactggctgagctgccggatcgtcgaccagggcaaaggtatcgcggccgccgaactaccgcgcctgttcagccagtaccagcgcttcgcttccgccgagggcagcgccggcctgggcctggggctggccatggtcaagacggtgatcgaccggcacggcggcaggatcggttgccagagccaggttggccagggcaccactttcgagattcgccttccgctgctgaaaggcgaggaataa

SEQ ID NO: 320226 - DNA, 927 bp, Pseudomonas aeruginosa
atgatcgacatagacagactgagcaaacgcttttccggccggacggtggtaaacgacttgagcttccgcatcgaccggggagagatcgtcggtctcctcggccccaacggagcgggcaagtcgaccaccctgaagatgctttccggcttcctcgcgccgagcgccggcagcgtacgcatcttcggcttcgacatgcaggacaaggcgcgccaggcacagaagctgatcggctacctgccggagaacgctcccagctacggagaaatgacggtcgagggctttctcgccttcgtcgcgtccatccgcgactacagcggacgggaaaaacgtcggcgcatcgacagcgccatggactgcatggagctgcgggatgagcgcaggagcatcatcgaaaccctgtccaagggcttcaagcgccgcgtcgcgctggcccaggcgatcctccacgatcccgagctgctcctgctcgacgagcccaccgacggcctcgacccgaatcagaagcaccaggtccggcaactggtgaagaacctctcggaaagcaagatcgtggtgatttccacgcacatcctcgaggaagtctcgttcatgtgcagccgcgccctggtgatcaacggcggccgcctgctggccgacaacaccccgggcgaactcaggacccgcagccgctaccaccatgccgtcagcctcagcatcgaagcaccggtagacccgctggccatcgccatgctccccggcgtcgccggtatcgaaggacgccccgaccgggccggcaccctgaccattctggcccgccccggcgcgcagatccttcccgcgctcaaccgcctgatccacggcagcggctggcgggtatccggggtgcgtaccgaacacggccaactggaagaagtgttccgccaactgacccgagaaacccccgcatga

SEQ ID NO: 320227 - DNA, 735 bp, Pseudomonas aeruginosa
atgaccgccatcggcaccattttcagacgcgagctgggcagctacttcgccacgccgctcgcctatgtgttcaccctggtattcctcgtcctctccggcgtggccaccttctacctgggcgatttcttcgagcgcggccaggccgacctggcgccgttcttttccagcctgccctggctctacctcctgctgatccccgcgctggccatgcgcctgtgggccgaggagcgcaagtccggctccatcgagatgctgatgaccctgcccgtctcccgcgccaccctggtcaccggcaagttcctcgcggcctggttctgcgccgggctggcgttgctgctgaccttcccgatgccgctgacggtgaactacctcggctcgcccgacaacggcgcgatcatcgccggctacctggccggctggctgctgtccggcggctacctggccatcggatcctgcatgtcggcgctggcgaagaaccagatcatcgcctttgccctgaccgttctcgtctgcctgctattcgtcggcgccggcactccccacgtacaacaggcgctctccggctggcttccgcaatggctgctggacggcattgcctcgctgagcgtgctggtccgtttcgaggcgctcggccggggcgtgctcgacgtccgcgacctggcctacttctgcagcctgatcgtcgcctggctggtcgccaccaccatcgtcatcgacctgaaaaaggcagcgtag

SEQ ID NO: 320228 - DNA, 1803 bp, Pseudomonas aeruginosa
atgaaacgaaccctgtactcgggcgtcggcctgctgctggtcggcctgctgttcctcgctttcaacctgctgtccagcctgctgctgcgcgaccagcagttcgacctcacccagcagaagctctacaccttcagcgccggcacccaggaagtcctcgacagtctcgacgaaccgctcaacctctacctgttcttttcgaaaagccgcgccagtgacctgcccgccctgcgcaactacgcccgccgcgtcgaggaagtgctggacctctatgcacggcggagccatggcaatgtccgattgttcgtgatcgatcccctgccattctccgacgacgaggaccgtgccgcgcgcttcggcctgcaggcgccgcccatcggcccgaatggcgaagccatctactttggcctggcggccaccaacccgaccgacggcctccaggtgatcccgttcttctcgccggaagaagagccgcttctggaatacgatctcagccgcctggtccaggcactcgcacagcgggaacgcacggtagtcggcctgatgagctcgctgccgatgaccgggcaggcgcccaccgacgggcagccgggcagcaggccctgggcgatgatggacaagctctaccaacagttcgacatccgcaccctggggctcgcttcgacggaaatccccgccgaagtctcggtgttgatgctggtgcaccccaggcaattgtccgaacagacccaatacgccatcgaccagttcgtcctgcgcggcggcaagctgctggccttcgtcgaccctctgagtctcgccgatgcagacggcgggaaaagctccgacctggccccgttgctgcgctcctggggcgtccagttgcggccggataccctgctggcggatgcctcgttcgccatgatcaagcccaacgccgaacgtcgtccggagcgcaatccgacctggctacacctccccggcgacacgttcccccacgacaacgtgctgaccaccggcctggaaagcctcaacctcgccagcgtcggcctgctcgaacctctcggcggagcctcgacgcgcttcattccgttgctgcacagctcggcgcacagcatgccgctgtcgctggaacgcttccgccaatcctcgacggagcagctcaacgccaccctggtcccgaccggggaacgctacgtgctggccgccaaggtcgaggggccggcgacgagtgccttccctgcggaccgcgggaagcaaggtgaaggcctgagcgacagcgcgaacatccatgtgctgttggtcgccgatacggacctgctgagcaatccgctctggctccaggaacagcccggccacaacgagccgcaggtatgggcggacaacgacctgttcgtcggcaatgccctcgactacctctccggttcggacgcgctgatcgacctacgctcgcgaggccatacgaagcgcccgttcacccgcgtggaagcgctccgccgcgaggccgggctgcgcgcccaggaacagctcaacgcgctgcagcaaagcctcaacgacaccgacaggaacctgcgcaccttgcagcaatcgatggacgccggcgaccaggaggtgactccggaaatggaagcgacgctgcgccgcttcatcgatgacaaattgcgcatccgccagcaactacgtcaattgcagttccagctgaatgccgatgtcgagcgcctgggggaacaggtgaaactggccaatacggtcctgctgccggcactgctcaccctgttcctcctgctacattggagctggcgcagcatacgccggaggaggggctga

SEQ ID NO: 320229 - DNA, 1008 bp, Pseudomonas aeruginosa
atgcgcctgcgtaacgtagcgggactcgctctcgccctggcgctgttcgccggaatcttgggctggctccacgaacggcagcaaccgcccgcgcaaccgcctgcgagccgcgcctggctgccagggctgaaaccgcaccaggtgaccgcgctgtgcatcgccacccccggccaaccgacgatccgcgccaggcgcgatggcaaggactggatgctcgccagcaaggacggctatcccgcctcgggggaaaccatccggcagctgttgcgcagcctggccgacgcgcgcctgctggaggaaaagagcgcctcgccggaaaaccgcgaacgcatgggactctccgaccagggcaagggccaggccagccggatcaccctggagcgcggcgacgcgccgccgctggtcctgttgctgggcaagcgcacctcgcagggcgggcagttggtcaggcaggccgacgatgagggggcctggctgatcgaccgaacggtcggcctgccggtcaacgacctggccctgctcgaccctcggttgaccgacctgccattcgaacagttgcgcgaactgaccctgtcctatggcaacggcgtacggctgaacatttcccgagccagtgaaaaggacgatggcatccgcctgcgacagttcccatccaggccacagttgatgggcgaggcggaagccgagcaggccgcacgcctgttcgctgcgctcaggctgctggaggtcgcgccggccaaggcctcgcggcaaaaaccgctgctgaccttcacgctcaagagtttcgccggcggcacgctgcagggccagcttctggaactggagcgccagtactggttgcaactgaccgacagcaagggcttcgccgacgggcaggtctcagccgtcaagggttggcgctaccgcgtggagggtctgagtccggataccgctcccgcgccccagccacccaaggcatcgccggtgaagcaaagcaagccggccaagccctcgtcgcccaagtgctga

SEQ ID NO: 320230 - DNA, 1170 bp, Pseudomonas aeruginosa
atgcgcatccaggaggtccgggaacgcagtattcccctttcccgttacgccggcgtggcggctgccaccggtggtttgagcaccagcctggtggcggtgctcaccgataccgtgcgcgacggtcggcgtgtggtcggctacggccacgcctcggtagggcgctacgcccagggcgggctgatccgcgagcgtttcgccccgcgcctgctgggggctccggcggacagcctggcgagcgacgacggcagtggcatcgatccgttgcgagcctgggacctgatgatgcgcgacgagaagcccggcggccacggcgaacgctgcgtcgcggtgggcgccctggacatggcgctgtgggatgccgcggccaaggccgccggcctgccgctgcatcgcttcctggcgcgacgcctggggctggcggaagactatccgcagcgcgtaccggtctacgccggcggcggctacccctatccgcacgacgacctgggacgcctggaagaggaactgcggcgcttcgtcgatctcggctacacccacgccaagatcaagatcggcgcggccgggctggaccaggaccggcgccgtatcgacagggcgctgcgggttctcggcgacgcttcgcggctggcggtcgacgcgatgaaccgctacgacgcggagggcgcggtcgacgcagcgaaagccctggcgccgctggggttgtggtggttcgaggacatctgcgacccccacgatttccctacccaggccgaagtggcggatatctatccggggcccatcggtgccggcgaggccttgttctccctggccgaggctcgcttgctggatctctatggcggcgtgcggcgggagcgcgacgtgctggtgttcgaccccgtgcattgctatggcctgccgggctacctggcgatactcgaccacctgtgcgcccggggttggccgcgcgcggccttccgcccgcacgccggctacctgttcagcctgcacttggtggcggccctgcgcctgggttgggccgaggctacgccgtcggctttccggccattcgacgatttcgccggtgccctgccgttttcctcgggattggcgggattgccacaatcgcctggtatcggcttcgagcgccaggcgacacttgccgggctgttccgcaagcttctggaggcctag

SEQ ID NO: 320231 - DNA, 345 bp, Pseudomonas aeruginosa
atggtcgtcccgatcggtcgtagcgaccttccgccgatttgcccggcccccgcccctctgctagtgtcgcggggttttgtacacctcgccgagactcccccgatggcccgcaagaaaaccctcgatttcgaacagtccctcaccgagctgcaaaccctggtggaacgcctggaaagcggcgagctgtcgctggaagagtcgctgggcgccttcgagcagggcatccgcctgacccgcgaatgccagacgtcgctgagccaggccgaacagaaggtacagatcctcctcgaacgcgacggcgagctcagcgaagcgccgttcgatgcggaaggcgacgaggcatga

SEQ ID NO: 320232 - DNA, 888 bp, Pseudomonas aeruginosa
atgatcgcggcctaccaggcgcgctgccaggcgcgcgtcgatgccgccctggacgccctgttcgtcgctccccgcgaagaactgcaacgcctctacgaggccatgcgctacagcgtgatgaacggtggcaagcgggttcgcccgctgctcgcctacgccgcctgcgaggccctcggcggagcgccgcagcgcgccgacgccgcggcctgcgcggtggagctgatccatgcctactcgctggtccacgacgacctgccggcgatggacgacgacgacctgcgccgtggccagccgaccacccaccgggccttcgacgaagccaccgcgatcctcgccgccgacggcttgcaggcgctggccttcgaagtgctcgccgacacccggcgcaatccgcaggaacatgccgtctgtctggaaatgctcacccgcctggcgcgcgccgcaggctccgccggcatggtcggcggccaggcgatcgacctcggctcggtcggcgtggccctcgaccaggcagccctggaagtcatgcaccggcacaagaccggcgcgctgatcgaagccagcgtgcgcctcggcgccctcgccagcggtcgcgccgagcccgcctcgctggccgccctggagcgctacgccgaagcgatcggcctggccttccaggtgcaggacgacatcctcgacgtggaaagcgacaccgccaccctcggcaagacccagggcaaggaccaggcgcacaacaagccgacctatcccgccctgctcggcctggaggccgccaaaggctatgccctggagctgcgcgacctggccctggccgccctcgacggttttccgccgagcgccgacccgctgcgccaactggcccgctacatcgtcgagcgacgcaactga

SEQ ID NO: 320233 - DNA, 1884 bp, Pseudomonas aeruginosa
atgcccaagacgctccatgagattccccgcgagcgccccgccacgcccctgctcgaccgcgcctcttcgccggccgaactgcgccggctgggcgaggcggacctggaaaccctggccgacgagctgcgccagtacctgctgtataccgtcggccagaccggcggtcatttcggcgccggcctcggcgtggtcgagctgaccattgccctgcactacgtcttcgacactccggacgaccgcctggtctgggacgtcggccaccaggcctatccgcacaagatcctcaccgagcgccgcgagctgatgggcaccctgcgccagaagaacggcctggcggccttcccgcgccgcgcagagagcgagtacgacaccttcggcgtcggccactccagcacctccatcagcgccgccctgggcatggccatcgccgcccgcctgcaaggcaaggagcgtaagtcggtggccgtgatcggcgacggtgcgctgaccgccggcatggccttcgaggcactcaaccacgcctcggaagtcgacgccgacatgctggtgatcctcaacgacaacgacatgtcgatctcgcacaacgtcggcgggctctccaactacctggcgaagatcctctccagccgcacctatagcagcatgcgcgagggcagcaagaaggtgctctcgcgcctgcccggggcctgggagatcgcccggcgcaccgaggaatacgccaagggcatgctggtccccggcaccctgttcgaggagctcggctggaactacataggcccgatcgacggccacgacctgccgaccctggtggctaccctgcgcaacatgcgcgacatgaagggcccgcagttcctccatgtggtgaccaagaaaggcaagggcttcgccccggccgaactggatccgatcggctaccacgcgatcaccaagctggaagctcccggcagtgcgccgaagaagaccggcggacccaagtattccagcgtcttcggccagtggctgtgcgacatggccgcccaggacgcgcgcctgctcggcatcaccccggcgatgaaggaaggttccgacctggtggccttcagcgaacgctacccggaacgctacttcgacgtcgccatcgccgaacagcatgccgtgaccctggccgccggcatggcctgcgagggcatgaagccggtggtagcgatctactcgaccttcctccagcgcgcctacgaccagttgatccatgacgtcgccgtgcagcacctcgacgtgctgttcgccatcgaccgcgccggcctggtcggcgaggacggcccgacccacgccggtagcttcgacatctcctacctgcgctgcatccccggcatgctggtgatgacccccagcgacgaggacgagctgcgcaagctgctcaccaccggctacctgttcgatggcccggccgcggtgcgctatccgcgcggcagcggccccaaccatccgatcgatccggacctgcaaccggtggagatcggcaagggcgtggtccgtcggcgcggcggcagggtcgcactgctggtcttcggcgtgcagttggcggaggcgatgaaggtcgccgaaagcctcgacgccacggtcgtcgacatgcgtttcgtcaaacccctcgacgaagccctggtacgcgaattggcgggcagccacgaactgctggtgaccatcgaggaaaacgccgtgatgggcggcgccggctcggcggtcggcgagttcctcgccagcgagggcctcgaagtcccgctgctgcaactgggcctgcccgactactacgtcgaacacgccaagcccagcgagatgctcgccgaatgcggcctggatgccgcgggcatcgaaaaggcagtacgccagcgtctcgaccggcagtag

SEQ ID NO: 320234 - DNA, 798 bp, Pseudomonas aeruginosa
atgcgctcgttctggctgctcgcctgcctgctcctcagcctttccgccggggcggcgcagcgggtggtcagcctggcgccttcgctgaccgacagcgtcctcgaactcggcgcagcgcgccgcctggtcggcgtgctggatggcggcgagcgtccggcggcgattggcgacctgccttccgtcggccgctacggccaggtcaatctcgaacgcctgctggaactgcagcccgacctgatcctggtctggcccggcagcgtgcccgaggcgcagttgcagcgcctgcgggacttcggcatcgccctcttcatcgccgaaccgcacagcctcgacgaactggccctgcaactggctgcgctgggcgaggcattgggcgaggccgaggccggccagcggttgtcggccaggttccgcgaaggcatgcggcgcctggccgagcgctaccggcgggacaagccgctgaaagtgttctaccaggtctgggaccggccgctgtacaccattggcggacgccaggtgatcagcgatgcgctgcgcgtctgcggcgccgagaacctattcggcgacctgccgcagccggcgccgcaggtcagcgtcgaggcggttctggcgcgcgatccggcggccatcgtcgccggcagtcacgcccagctcgaactctggcggcaatggccggcgctggcggcgacgcggcgcggacagctgtaccggatcgaagacaagaacctcgagcggccgagcttcgccatgctggcggcgaccgagaaactctgccgctcgctcgccggggcgcgctga

SEQ ID NO: 320235 - DNA, 420 bp, Pseudomonas aeruginosa
gtgagtcgccagcaagcccgcggcgcgctgggacgtgcctggtggttgcaactggcgttggcgctgttgccgctgatcctggtcgagttcttcctcggcgaactgcaacccctttcccatggcctggcgatgccgctgttcatcgccgcgctgctgtcgatgttcgtcaacctgccgctgttcggtgcctacaagcgtggtctcatcgccacccagaaagcgctggatacggcggaggaagccgccgcctgggcccgtctggcgcaggtgcgccgcaaggccctgttcggcgccagcctgccggcctggatcggcgtgccgggtgtgttcgccgggctcaacggcgttgcgctgatcctgctcggggtcaccagcctggtgctgttctggctctaccgtattccgcgtcaactcggttga

SEQ ID NO: 320236 - DNA, 618 bp, Pseudomonas aeruginosa
gtgtccgtcgtgttcgtcgccgcctccaaactgccgactcccttcggcgaattcaccatgcatggtttcctcgacgaggagagcggcaaggaacatgtagccctgagcatgggcgacatcgccgatggcgcgccggtgcttggtcgcctgcattccgaatgcctgaccggcgacgcgctgttcagcctgcgctgcgattgcggtttccagttggaaggcgcgcttgccgccatcgccgaggagggccgcggcgtgctcctctacctgcgccaggaaggtcgcggcatcggcctgctgaacaagatccgtgcctatgaattgcaggatggcggtgccgacaccgtcgaggcgaacctgcaactgggttttggcgccgaccagcgcgactacgccatgtgccagccgatgctcgcgcacctgggcgtctcctccctgcgcctgatgaccaacaatccgcgcaaggtcaaggcgctggaaagctacgccatcaccgtggcggagcgcgtgccgctgcaaaagggcctgaacaagcacaacaggcgctacctggcgaccaaggccggcaagctcgggcacatgctcggcagcctgcaccagggcgaggcggaaaccacgtga

SEQ ID NO: 320237 - DNA, 645 bp, Pseudomonas aeruginosa
atgctgcggctgtgcgtcgccctgttttccagcgttctcgcgttgtcctcgctggccgcgccccaggtgttcgtggtcggcctgttccccggcgcggcggtactcaacgtcgatggccagcgcaagctggtcagggtcggccagaccggcccgcagggcgtccaggtggtcagcgccgacagccgcaaggcggtgctgcggatcgacggcatcgagcgcacctacgaactgagccgcgaatacaacgaggcaggctattcggcgccgcagcggcaaagcttcagcatcgcccgcggtacgggcgggcactattgggtggctggctcggtgaacgggcagaacatgcagttcctggtggataccggcgccaccagcatcgccatgaacgagaacgaggcgcgccgcctgggtatcgattaccgggtggacggcaagccgatggtcgcctccactgccagcggaacctcgcgcggctggcgggtgaccctggaccgggtgaagatcggcggtatcgagttgctgggtgtcgaggcggcggtgatcgagggtggctatccgaccgaagccctgctcggcatgagtttcctcaaccgggtgcgttggcgcgaggaacagggaatgctgcttatcgaggccaagcattga

SEQ ID NO: 320238 - DNA, 747 bp, Pseudomonas aeruginosa
atgcgtctgctcgtccttttctgctgcctgtggctgctgcccggcgtcgcttccgccgcccccgccgtgggcgagatccgcgtggtcagcgaaatctggacgcgctacacccaggaggacggtcgcggggtggcctgggacctgctgcgggccgtctacgagccggccggggtacgcctgcggatcgccaacgagccctatacccgggcggtcggcctggtcctgcgcggcgaggccgacgcctgggtcggcgcctaccgcggggaaatcgacgaagcgctttaccctcgctggccctatgacgtcgatccgatcgccgtgctttccctgaaagacaatccgccgccgccactggagggcctgagccggttccgcctgtcatggatgcgtggctacgccttcgcccgctatttctctaccctgaccccgcacagcgagttgcagcgccgcacctcggcgctgccgatgctgctcaaccaccgggtcgactatttcatcgattcgcgtccggaactcgaggaaatgctcgcaggggccggagcgctggcggctgagtaccgcatcaccgacgtcactcggttgccgctgtatcttggcttctccgattcccccaggggccgtgagctgctggcgctgttcgaccggcgcatgcggcagttgcatgccagcggcgagctggagcggatcttcgcccgctggaactggccctatgcgccgttgaaggcaatcctgccacccaaggagtga

SEQ ID NO: 320239 - DNA, 516 bp, Pseudomonas aeruginosa
gtgactgagcatcctgatcaggcgccggcgcagccggtgccgccgtcggtctggcgcaatccctggcatttcctcgccttcggcttcggctccggcaccctgcccaaggcgccgggcacctgggggtcgctggtggccatcccgttcatcccgctgtggcagatgctgccagactggggctactggctgatgctgggagtgaccatgctgttcggcttctggctgtgcggcaaggtcgccgacgacctgcgcgtgcacgaccacgaaggcatcgtctgggacgagatggtcggcatgtggataaccctctggctggtgccggagggctggtggtggctgctgatcggcttcgtcgtgttccgcatcgtggatattctcaagccctggccgatcagttgggtggaccgcaacgtgcacggcggcgtcgggatcatgctcgacgacgtcctggccggggtattcgcctggctggtcatgcagggtctagtctggggatgggtacactggctggtctga

SEQ ID NO: 320240 - DNA, 969 bp, Pseudomonas aeruginosa
atgggtgagttcgagctgatccgccgcttcttcgccgcggccgcctgcgcggcgccggcggcggacgtggccctcggcatcggcgacgactgcgccctgctggcgccgccagccggcgaacaactggcggtctccaccgataccctggtggaaggcgtgcattttcccgccggttgcgaccctttccttcttgcccagcgcgccctggcggtctccgccagcgacctggcggcgatgggcgccgcgcccctggccttcaccctggccctgaccttgccgcaggccgacgccgagtggttgcagggcttcgcccgcggcctcgacgccatggcccggcagtgcggcctggccctggtcggcggcgacaccacgcgcggcccgctgagcatgaccctgaccgtattcggcagggtgccggccggccaggcgctgacccgcgccggtgcgcgcccgggcgacctgctctgcgtcgggggcccgctcggcgaggctggagcggcgctggaactggtgctggagcgaagatcggcgcccgccgaggtggccgaaccgctgctggcgcgctactggacgccggccccgcaattcggtctgggcctcgccctgcgcggcaaggccagcgccgccctggacatctccgacgggctgctcgccgactgcgggcatatcgcccgcgcttccggcgttgccctgttggtcgaatgccagcgcttgcaggcaagcgccgcgttgagcggcctgctcgccggcgaggaagccttgcgccagcaactggccgccggcgacgactacgtgctggttttcaccctgccgcctgagtaccttggcgagattcgcgccgcgtggccggccatggccgtcatcggccgggtcgaggcgggacagggggtgcacctgctcgacgccgacggaaaggaactcataccggccgcggccggttaccaacatttcggaacccaacgtgactga

SEQ ID NO: 320241 - DNA, 480 bp, Pseudomonas aeruginosa
gtgagcaatcaagacagcggcaacccggcagccaagccgccgaaaggcaagaccgccgctcgccgcaaggcccgcagcctggccgtccaggccctgtactcctggcagatcgccggccagcccctgcacgagatcgaggcgcagttccgcaccgacaacgacttctccgaggtcgacggcgcctacttccacgagatcctgcacggcgtgccgcgacagaagagcgagctggactccaccttcgagccctgcctggaccgcccgctggccgagatcgacccggtcgagctggccatcctgcggctgtccacctacgagctgcgcaaccgcatcgacgtgccctacaaggtagtgatcaacgagggcatcgagctggccaagaccttcggcgccaccgacggccacaagttcgtcaacggcgtgctcgacaagctggcgccgcgcctgcgcgccgccgagctgcgcggcggcaagcgctga

SEQ ID NO: 320242 - DNA, 477 bp, Pseudomonas aeruginosa
atgaccctgaagaccatcgaaggtaccttcattgcccccaaaggccgctacgctctggtggtcggccgcttcaacagcttcgtcgtggaaagcctggtcagcggcgccgtcgacgccctggtccgccacggcgtggctgaaagcgagatcaccatcatccgcgccccgggtgccttcgagatcccgctggtgacccagaaggtcgcccagcaaggcggcttcgacgccatcatcgccctcggcgcggtgatccgtggcggcaccccgcacttcgaatacgtggctggcgagtgcaccaagggcctggcccaggtgtccctgcagttcggcatcccggtcgccttcggcgtcctcaccgtcgactccatcgagcaggccatcgagcgctccggcaccaaggccggcaacaagggcgccgaagccgcgttgtcggccctggaaatggtcagcctgctggcgcagttggaggccaagtga

SEQ ID NO: 320243 - DNA, 1098 bp, Pseudomonas aeruginosa
atggcactcaacacgatcgacgaactgatcgaagacatccgccaaggcaagatggtcatcctgatggatgacgaggaccgcgagaacgaaggcgacctgatcatggccgccgaatgcgtccgcaccgaagacatcaacttcatggtcaagcatgcccgcggcctggtctgcatgccgatgacccgcgagcgttgcgagcgcctcggcctgccgctgatggtgcagcgcaacggctccggcttcggcaccaagttcactgtctccatcgaggccgccgagggcgtcaccaccggcatctccgccgcggaccgcgcccgcaccgtgcaggctgcggcggcgaagaacgccgtggccgccgacatcgtcagccccggccacatcttcccgctgatggcccagccgggcggtaccctggctcgcgccgggcacaccgaggcggcctgcgacctggcgcggatggccgggttcgagccgtccggggtgatctgcgaggtgatgaacgacgacggcagcatggctcgccggcccgaactggaggcgttcgccgccgagcacgggatcaagatcggcaccatcgccgacctgatccactaccggctgatccacgagcgcaccgtcgagcgcatcgccgagcagccgctcgacagcgaactgggccacttcaacctgatcacctaccgcgactcggtggagggcgacgtgcacctggcgctgaccctcggcaaggtctgcgcggaagagccgaccctggtccgcgtgcataacatggacccgctgcgcgacctgctgcaggtcaaccagccgggccgctggagcctgcgcgcggcgatgaccaaggtcgccgaggcgggcagcggcgtggtgctgctgctcggtcaccagatcggcggcgacgacctgctcgcccatgtccgcgagatcgcttcggcgccggctccggcgcccaaggccaccaccacctacagcaccgtcggtgccggttcgcagatcctgcgcgacctcggcgtgcgcaagatgcgcctgctgagtgcgccgatgcgcttcaatgcgatatccggtttcgacctggaagttgtagaatacctgcccgccgaataa

SEQ ID NO: 320244 - DNA, 660 bp, Pseudomonas aeruginosa
atgttcaccggcataatcgagtcgatcggcagcgtccgcgcaatgacgcccaagggcggcgacctgcgggtctacatcgccaccggcaagctcgacctgggcgacgtcaagctcggcgacagcatcgcggtcaacggcgtctgcctgaccgcggtggaactgcccggcgatggcttctgggccgacgtcagtcgcgagagcctggcgcgcaccgccttccagcacctgaaggtgggcagccgggtgaacctggaaaaggccctgacgccgaccacccgcctcggcggacacctggtgagcggccacgtcgacggcgtcggcgaggtgctcaagcgcgaggagaacgcccgcgccatccagttcaccgtgcgtgccccgcgcgaactggccaggtacatcgcgcacaagggctcgatcaccgtcgacggcaccagcctcacggtgaacgcggtgaacggcgcggagttcgagctgaccatcgtcccgcatacgctcagcgaaaccatcatggccgagtaccagcccggacgccgggtcaacctcgaggtcgacctgctggcccgttacctggagcgcctgctgcttggcgacaaggccgccgagcccagcgcctccggcatcagcgaagcgtttctcgccgagaacggttttctcaagtaa

SEQ ID NO: 320245 - DNA, 1122 bp, Pseudomonas aeruginosa
atgaacgccgccgacccgctgtacatggcccgcgccctggaactggcgcgccaggggctgtactccacccatccgaatccgcgcgtcggctgcgtgctggtcaaggacggccaggtggtcggcgagggctggcacgtccgcgccggcgagccgcacgccgaggtccatgccctgcgccaggccggcgagaatgcacgcggcgccaccgcctacgtaaccctcgagccctgcagccacttcggccgcaccccgccgtgcgccgatgcgctggtgggcgccggggtggcgcgggtggtcgcggcgatgcaggatcccaaccccgaggtcgccggtcgcggcctgctgcgtctgatgcaggccggcatcgcggtgcagagcggcgtcctcgaagccgaggcgcgggaactcaacatcggtttcatcaagcgcatggaacatggcctgccgttcgtccgggtcaagctggcgatgagcctggacgggcgcaccgccatggccagcggggaaagccagtggatcaccgggccctccgcgcgttcggcggtgcagcgcttgcgcgctcgctccagcgtggtgttgtccggcgccgatacgctgctggcagacgatgcgcggctcaacgtacgccccgacgaactgggcctgaacgccgagcttaccgcgctcgccgcggctcgccagccgttgcgggtgctggtcgacgggcgcctgcgggtgccgctggagtcggcgttctaccaggccggtccggcgctggtggcgacctgcgccgccgcctccgcgcgcgaacgcttccaggacgccggccacgaactgctggcgctgccctccgccgagggccacgtcgatttgcacaagctgctcctggaactggcggcgcgcggcgccaacgaagtgctggtggaggccggcccgcgtctggccggcgccttcgcccggctggggctggtggatgagtaccggctgttcgtcgcgccgaagttcctcggctccagcgcccgtcctttgctcgactggccgctggcgcggatggccgatgcggcgcagttgcggatcgacgacatccgcgcggtgggcgacgactggctggtcaccgcgcggccccatccgcgggacgcctga

SEQ ID NO: 320246 - DNA, 510 bp, Pseudomonas aeruginosa
atgcgctaccatgcggcttccttcagctacgcctgtatcagcaccatgcattgtcccttctgcggtgcccatgacaccaaagtgattgactcgcgactggtcgccgagggcgatcaggtgcgccggcgccgcgagtgcctggcctgcggcgaacgcttcaccaccttcgagaccgccgagctggtcatgccgcgcctgatcaagcaggacggcagccgccagccgttcgacgaggacaagctgcgcgccggcatgcagcgcgccctggagaagcgtccggtcagcgtcgagcgcctggaagcggccatcggccacatcaagcaccagttgcgcgccaccggcgagcgcgagatcaagtcgcgggtgctgggcgaactggtgatggccgagctgcagaagctcgacgaagtcgcctacatccgtttcgcctcggtctaccggcgcttccaggacctcaacgaattccgcgaggagatcgaacgcctcgcccgcgagccggccaaggaatga

SEQ ID NO: 320247 - DNA, 459 bp, Pseudomonas aeruginosa
atgaccctgcgcccgatcgccctgctggccgtccttctcctcgccgcttgttccagcgacaagccgaagcctgcgccaacgccgcaagcttcgcgcagcgtgaccatggtcgagccggtgctaccggcccacctgcgcgagctgagcggaacgctgagcagcatccagggcagcctgccacgcggcagcgaggtgcagatggcactgctggtgatcgacgagcgcgaccgtccacagcggctgctggccagcgagacggtgctggccaccggcgaactcatgcccttccgcctgccgttcaaccccgaatccttcccgccggccggtggcgcgctgcgcgtcgaactgcacgcgcgggtgatccagtccggccagttggcctggcgcctgcatccgttgcggatcgcccagccgaccacccagtccctcggcgaactgcgcctggtacgcgcgccgtga

SEQ ID NO: 320248 - DNA, 663 bp, Pseudomonas aeruginosa
gtgacggcaccgcaagccctgacccaggcgctgggcgagctgctcggcgacgcccggctcagcgccaccgcgctgcccggcaccgacctgcgcctgtggctgatcgacgcgcagaacatggaccgccagttcagcccggaggaaacccgccgcatcctcgaagagccgccgtactggtgcttctgctgggccagcgggctggtcctggcgcgctggctggcggagcgcccgcagtgggtccgcgacaagcgcgtgctggacttcggcagcggctccggggtggcggcgatcgccgcggcccgcgccggcgccgccgaggtggtggcttgcgacctggatcccctggcgctggcagcgagccgggcgaacgccgaactgaacggagtggagctgagctattcggcggacttcttcgccgaggacgatcgcttcgacctgatcctggtggccgacgtgctctacgaccgcgccaacctgccgctgctcgaccagttcctcagccgcggccgccaggcgctggtcgccgactcgcgggtccgtgacttccgtcatccgctgtaccggcgcctggacgtgctcgaagcctgtacctggccggacctcgccgagcccgccgaattccgcctggtcagcctgtatcacgccgaacgcgggcaagcctga

SEQ ID NO: 320249 - DNA, 870 bp, Pseudomonas aeruginosa
atgagcgatacgccctacatcttcgacgtcaccggcgccaacttcgagcagctggtcatcgagaactcgttccacaagccggtcctggtggacttctgggccgactggtgcgccccgtgcaaggcgctgatgccactgctggcgcagatcgccgagtcctaccagggcgaattgctgctggccaaggtcaactgcgacgtcgagcaggacatcgtgatgcgcttcggcatccgcagcctgccgaccgtggtcctgttcaaggatggccagccggtcgacggtttcgccggcgcccagcccgaatcgcagatccgcgccctgctcgaaccccatgtgaaagcaccggcgccgcccgacgaagacccgctggaagtggcccaggcgctgttcgccgaaggccgcatcggcgacgccgaagcgaccctgaaagccctgctggcggagaacaacgagaacgccgcggcgctgatcctctacgcccgctgcctggccgagcgcggcgaactggaagaggcgcaggccatcctcgacgcggtgaagagcgacgagcacaagcaggccctggccggcgcccgcgcgcagctgaccttcctgcgccaggctgccgacctgcccgacagcgcagagctgaagagccgcctggcggccgatgccggcgacgacgaggcagcctaccagttggccgtccagcagctcgcccggcagcagtacgaggcggccctggacggactgctcaagctgttcctgcgcaaccgcggctaccaggacgacctgccgcgcaagaccctggtgcaggtcttcgacctgcttggcaacgaccacccgctggtcaccgcctaccgccgcaagctgtaccaggcgctctactga

SEQ ID NO: 320250 - DNA, 357 bp, Pseudomonas aeruginosa
atggtgcggattcgcggaagcatcggcgactggccggtggacctgaccctggaactggacgccgaggattggcgccagctggcgcaacacgtgcccccgccgccgctgggcgagccgcaggtcgcggcggccagggcgccggcgccggcagcgccggtggatcgcctatggcagaccgcccaggacctgctgcgcggcagcgggcggatcgaggggccgcagttgctggcggagttggaggggttcagcggcaatgccggcgccgccaagcaactgctggtgcgcctgcggcacgacgcccgggtcaaggtcgaggtggtcgacggcacccaggtgttcgtctggctggaggactga

SEQ ID NO: 320251 - DNA, 579 bp, Pseudomonas aeruginosa
atgcgcccactgctgttagccctcgtcttgctgccgttcgccgcccaggcccatgacgaccacgaccatgaccacgcccatggcagcctgggcaagcacgagcacggcgtcgcccagttgaacgtggcgctggacggcaagaccctcgaactggagctggacagcccggcgatgaacctggtcggtttcgaacacgccgccagcaccgacgcggacaaggccgccgtggccaaggcccgcgcgcagctggaaaaaccgctggagctgttcgccctgccagtcaccgccggctgctcggtggccagccaggaactgcggagtccgctgttcggcgacaaggcgccggcccacgcgcacaaggagaaggcaggccacgaacacgaacacgaacacggtcatgccgatatccacgcccattaccagctcagttgcgagaagcccgagctgctcaagctgctgaccctcgccgagttcttcaagcgcttccccgccacccagaaaattcaggtacaactgatcggtcccgacggccagaaaggcgccgacctggctccggccagcgccgagctgaagctgtag

SEQ ID NO: 320252 - DNA, 705 bp, Pseudomonas aeruginosa
atgagcgcactgatcaccctgaccaacctcggcttcgcctggcccggccaggcggagttgctggacattcccagcttccatctcgaacgcggcgagagcctgttcctcaaggggccttccggcagcggcaagaccaccctgctcggcctcctcggcggcgtgcagaagcccggccgcggcagcatccgcctgctcggcgaggacctggaaaagctgtccgccgcgcgccgcgaccatttccgcgtcgaccacaccggctacatcttccagcagttcaacctgctgccattcctctcggtacgcgagaacgtcgagctgccctgtcacttttccgcgttgcgccgtcagcgcgcccgcgaacgccacggtagcccggcgcaggccgccagccatctgctcggccagctcggcctcggcggcgaactgcacgaacgccgcgctgatagcctgtccatcggccagcagcagcgggtcgccgccgcccgcgcgctgatcggccagccggagctggtgatcgccgacgagccgacctcggcgctcgacgccgacagccgcgaggcgtttctccagttgctcttcgccgaatgccgcgaggccggcgccagcctgctgttcgtcagccacgaccagagcctggccgggctgttcgaccgcagcctgtccctttccgatctcaaccgcgccgcccggccggcaggactctga

SEQ ID NO: 320253 - DNA, 1266 bp, Pseudomonas aeruginosa
atgtatctcttccgactggcactggccagcctggccaaccgccgcttcaccgccctgctgacgatcttcgccatcgccctctccgcctgcctgctgctcgcggtggagcgggtccgcaccgaggccaaggccagcttcgccagtaccatctccggaaccgacctgatcgtcggcgcgcgctccggctcggtgaacctgctgctctactcggtattccgcatcggcaacgcgaccaacaacatccgctgggacagctaccggcacttcgccgaaaacccgcgggtgaagtgggcgatcccgatctccctcggcgactcgcaccgcggctaccgggtaatgggtaccgatgccggctatttcgagcactaccgctacggccgcggccaggaactgcaactggccgagggccgcgccttcggccaggacctgttcgacgtggtgctcggcgccgaggtggccgaagccctgcactacaggctcggcgagaagatcgtgctggcccatggggtgagcacggtgagcctggtcaagcacgacgacaagccgttcaccgtggtcggcatcctccagcgcaccggtaccccggtggaccgcaccctgcacatatccctcgccggcatggaggcgctgcacgtcgactggcgcaacggggtgccggcgatgggcgccgggcgcgtcagtgccgagcaggcgcggcacatggacctgcaaccacaggcgatcaccgcgttcctggtcggcctgaagagcaaggtggcgaccttcgccctgcaacgcgaggtcaacgactatcccggcgaaccgctgatggcgatcctccccggtgtcgccctgcaggaactgtggggcctgatgggcaccgccgagaaggcactgttcgtggtctcgctgttcgtcgtcctcaccggcctgatcggcatgctcacggcgatcctcaccagcctcaacgagcgccgccgggagatggccatcctgcgctcggtgggcgcgcgcccctggcacatcttcggcctgctgctggccgaggccttcagcctggcgctggccggcgtcgccctcggcctcggcctgctctacctcggcatcgccgccagccagggctacgtccaggccaactacggcatctacctgccgctggcctggccgagcgactatgagtggagcctgctcggggctatcctggcggccgccgtgctgatcggctgcgtgccggcctggcgcgcctaccgccagtccctggccgatggcctgtcgatccgcctatga

SEQ ID NO: 320254 - DNA, 519 bp, Pseudomonas aeruginosa
atgctgcgctccctgaccgtcctcctgctggctttcgccctgctcctgggcagtgccgtggcgcgcgccgcgccgcgcgaactgacctggtcgcaactgatcccggccggcgccccgcccgccccggcgccgctgccgatccacgacctcgccaacgccctcagcgaagccggtccggcggccagccagcagagccccaacgccccggtggtgaaggcactggacggcatcgaggccaagctgccgggctacatcgtgccgctggaaatcagcgaggccgggctggtcaccgagttcctcctggtcccctactacggcgcctgcatccacgtaccgccgccgccgtcgaaccagatcgtctacgtgaagaccgccaagggcgtgcagatggacgagttgtaccagccgttctgggtcgagggcaccttcaaggtggagaacgccagcagcgagctggcggcggccggctaccgcatgcaggcgagcaaggtgacgccctacgaatacgaaggtggctga

SEQ ID NO: 320255 - DNA, 699 bp, Pseudomonas aeruginosa
atgcgtaagtcctggcttaccgcttccctgctggccctcaccgtcgcctccccgttcgccgctgcggatattcaaggacacaaggccggtgacttcatcatccgtggcggcttcgccaccgtcgatcccgacgacagcagttccgacatcaagctggacggcgccaagcagcgcggtaccaaggcgactgtcgacagcgacacccagctcggcctgaccttcacctacatgttcgccgacaagtggggcgtggaactggtcgccgccactccgttcaaccaccaggtcgacgtcaagggcctcggcccgggcctggacggcaagctggccgacatcaagcaactgccgccgaccctgctgctccagtactaccccatgggcggtaccaacagcgccttccagccctacggcggcctgggcgtgaactacaccaccttcttcgacgaagacctcgccagcaaccgcaaggcgcagggtttcagcagcatgaagctgcaggactcctggggcctggccggcgaactgggcttcgactacatgctcaacgagcacgcgctgttcaacatggccgtctggtacatggacatcgacaccaaggccagcatcaacggcccgagcgccctgggcgtgaacaagaccaaggtcgacgtggacgtcgatccgtgggtctacatgatcggtttcggctacaagttctga

SEQ ID NO: 320256 - DNA, 357 bp, Pseudomonas aeruginosa
atgtacctctggctgaagaccctgcacatcaccttcgccctcagcagcgccgccctgttcgtctggcgcctggcctggaactggtcggggcgcaaggccagcggcatccgccgctggggaccgcacctggtggacaccctgctgctgctcagcgcgctcggcctggtgcacctggcgatgccctggccgctgccgctctggctgctggcgaagctggggctgttgctgggctacatcgtctgcgcggcgttcgccctgcggatggcgcggggccccggcaagggcctgctcagcgtcctcagcctcaccctgctgggcgggatcttctacctggcgctgaacaagccctggtggtga

SEQ ID NO: 320257 - DNA, 930 bp, Pseudomonas aeruginosa
atgtttgaacgccccatcctgatcactggcggcgccggtttcatcggctcccacctgaccgacgcgctgctggcgcgcggctaccgcgtgcgtgtgctggacaacctgtccaccggcaagcgcgacaacctgcccctggacgacgaacgggtcgaactgctcgaaggcgacgccgccgacgcggcgaccctggcggccgccctgaagggctgcgcggcggtcgcccacctggccgcggtcgcctcggtacaggcctcggtggacgacccggtcgccacccaccagagcaatttcatcgccaccctgaacctctgcgaagcgatgcgcgagcagggcgtgaagcgcgtggtgttcgcttccagcgcagcggtctacgggcagaacggcgaaggcacggcgatcgacgaagacaccccgaagtcgccgctgacgccctacgcgtcggacaagctggccagcgagtactacctcgatttctatcgccgccagcatgggctggagccggcgatcttccgcttcttcaacgtctacgggccgcgccaggacccgtcctcgccctattccggggtgatcagcatattcaccgagcgcgccctgaaggggacgccgatcaccgtgttcggcgacggcgagcagacccgcgacttcatctacgtcgccgacctggtcgatttcctggtccaggcgctggaggcgacggcggtggaacccggggcggtgaacgtcggcctgaatcgcagcatcagcctgaagcagttgctggcggagatcggccaggtgctcggtggcctgccgccggtgacccacgccgacgcgcgagccggtgacatcaggcattcgcgggcgaacaacgagcgcctgctgcggcgtttccgcttcgaccagccgacgccgatgggcgtgggcctggcgcgcctgctcggccgctga

SEQ ID NO: 320258 - DNA, 885 bp, Pseudomonas aeruginosa
atgcgaatgcgcctgatgcttttgggcggcggtaatgcccttggacaggcgctgatccgcctaggggcggaggaagacatcggtttcctcgcgcccagaccacccgagcagggctgggatgccgccagcctcaccaccctgctggacgaaacgcgccccgacgcggtgatcaacctcgccttctaccacgactggttccaggccgagcaggtcgaggcggagcgcctgggcgcccaggagcgcgccgtcgagcgcctcgcggagctctgccagcactacgagatcctgctggtccagccgtccagctaccgggtcttcgacggcgcccgcgccaccgcctacagcgagaaggacgagacccttccgctgggcctgcgtggccaggcgctctggcgcatggagcagagcgtgcgcgcggcctgcccgcgacatgtgctgatccgcttcggctggctgctggacgaaagcccgaacggcttgctgggacgtttcctcagccgcgccgaacaaccgcagccgctgttcctcgccgacgaccggcgcggcaacccgacgccggtggacgacgccgcgcgggtggtgctctcggtgctcaagcagctcgactgccaggcgccgctgtggggcacctaccactacggcggactggaagcgaccaccaccctggcgctgggacaggtgatcctcaacgaggcgcgtacctatcgctccaacctgatccaggagccttcggcggaggcccatgccgcgcgcccggacgcgctcgacgagccgcagcacgcggtgatggtttgcaagaagatcctccacaccttcggcatcaagccgcgcgcctggcgcgcaggtttgccggctctattggacaggtactacaggcatgtttga

SEQ ID NO: 320259 - DNA, 951 bp, Pseudomonas aeruginosa
gtgcataccctgtcttccgcacacaacagcttcgaagcctggaaccaggcgttgcgccaggtctgcgggcgcttcgaatcgcagcccgcgctgaaccggacgctgttcatcggcgatatctcgcggcaggacctcggcggtctggagttggcgcagatccgcaccaacgcagggcgcatcgcccgccaggccacccatgccgatcatgacgacgaccgccactgcttcctggtcgtccagcgcagcggccatgcgcaactgcgccagggtggggacagcatagagctggcgccaggggaaatggcgctgatggactccgcgggcggctgcgagatcattccccacggactcatcgaacacacctcgttccatctctcccgcgaagaggtatgccggcacctgccacccagccagcgggccttcggcaaactctcgccgaactgcgccagcggtcgcctgctgagcctgctggtgcagcaggtgtgcgccggagaactgcagccgtgggcggtggcggacgagggcggggcgttgcaggaggcgctgatcgccctgctcgggccggcgctacagcacgccggcgaggaattggagggaccgctggccgggctctatggctacagtctgcgccggcacgcggagcgtctgatcgagcaatccctgcaggagccgcgcctgagtccggacatgctcgccggccgcctgcgcatctcggtgcgccagttgtaccggttgttcgaggagcagggcgacagcgtctgccgctacattctccgccagcgcctcagccgcagcgccgccgacctcggcaacccacggctgcgcggcgaatcgatcacctccatcgccttcaagtggggtttcagcgactcggcgcatttcagccgggcgttcaagaagcagttcgaggtttcgcccaaggactatcgggccggcgcgctaccggcctga

SEQ ID NO: 320260 - DNA, 579 bp, Pseudomonas aeruginosa
atgtccgcctgggcgcgctggtatgagcgtcactggcgcgactggcggccagccgcctatcgccccggagccaccctggccctggtgcggcgcaacctggctgcgtgcgacggcgaggcgcaggacggcaggctgttgctgcgtacgaaagagctgagcctcgaggttcgcgagcgggtccaggcgcacctgttcatgcatatcgtcagcaccgagttcagcctgttcgtggcggcgcccggggggccgccggccagcctggagctgcgtcacgccggttgtttgcggcgtcgcggcatcctttgcaaggtacgcagcgggagcgggctcgagccgttgcgggaggccttgcaggggggcgaccgggtcttgctggagcagctcatgccgctggacttccggagtttgcgcctctgccgcgacgacaggggctggaccgtgagcctggaacacctgggggcgtgcgaggtggtcaaccgcttccccgcctatcgccgctacatccctctggtcgccgagcagcgcctggccctgctgggcgccttcgcccaattgcagcgcctgctttctcccgcctga

SEQ ID NO: 320261 - DNA, 1491 bp, Pseudomonas aeruginosa
atgtccaactccagactcacccagcacctgctccgcgggcgggttggtttccccaccgccctggccagttcggtcgggttgatcatggccagcccggtgatcctcaccgccaccaccggcttcggcctgggcggcggaaccttcgccgtggcgatgctggtggcgctgctgctgatgctggcgcagtccaccaccttcgccgaggccgcctgcctgctgccgacccgtggctcggtctacgactacctgtcgtgcggcctcgggcgcttcttcgcgatcaccggcacgctgtcggcctacctgatcgtccatgtgttcgccggcaccgccgagaccatgctcagcggcaccatggcgctggtcaacttcgagtcgctgaataccctcaccgagccgggcggcggcgcctggctggtgggcgtcggcatggtgctctgcttcggcctgctgaatgcgctggggatcaccgccttcggtcgcgccgaagtgatcctcaccttcggcatgtggagcaccctgatgatcttcgccgtgaccggcctgttgcgcctgcccgcggtggagttgcagggctggttcggggcctcgatggtcggcgacgacctgccgaccctgctgtcgctggtgggcatggcgatgttcatgttcgtcggttgcgaattcgtcacgccgctggcgccggaggtgcgccacgcttcgcggaccctgccgcgggcgatggccctggggttgatcggggtggcctgctgcatgttcctctatggcgcggcgatgcgccggcaggtggaaaacctcgacctcggcggcggcctgcacctgctggagacgccgatggcgatcccgcgattcgccgagcaggtgatgggaccgttcggacgcatctggctgggcgtgggcctgctgttcgccggggccgccaccatcaacaccctgatggccggcctgccgcggattctctacgggatggcgctggatggcgccttgccgaaggccttcacctacctgcacccgcgcttcaagacaccgttgctgtgcatcgccgtggcagcggcgattccctgcctgcacgcctggtggctgggcggcgacagcgaagggatcatccacctggtcctggctgcggtctgcgcctggggcaccgcctacctgctggtgaccctctccgtggtgctgctgcgcatccgtcgcccggacctgccgcgcgcctaccgctcgccgctgttcccgttgccgcagctattctccagcgccggaatcctgctggggatgttctacatcacgccgccggggatgaaccccgtcgacatctacctgccgttcgccctgatgctcggcctggcggccgcctacgccctgttctggaccctgtgcgtacagcgggtgaatccgttccgtccgctggcggtggaagaggtgctggagaaggaattcgccgaagaggaccagcagcagcgggagagggcgcatgtccgcctgggcgcgctggtatga

SEQ ID NO: 320262 - DNA, 1488 bp, Pseudomonas aeruginosa
atgagtattgccatcgacccgtccgtcagcgccttcttgcgcagtccccatggcctgctgatcgacggtgagtccgggccggcgcgttccggcgccgacatgccgctgtacgacccggcgaccggcgccgagctggctcgcgtggcccgcgccggcgccgaagacgtcgaccgggcagtcgctgccgcgcggcgcgcgttcgaaggcagctgggcaggccagcgcccggccgatcgcgagcgcctgctgctgcgactggcggaacgggtcgaggcgcatggcgagcaactggcgcagttggaaaccctgaacaacggcaagtcgatcaacctgtcgcgggccctggaggtcggcgcctcggtggagttcatccgctacatggccggctgggcgaccaagatcgagggtcgcagcctcgacctgtcgatcgccgcggtcccaggcgcgcgctaccgggcctacacggtgccggagccggtgggcgtggtcggagccatcgtgccgtggaatttccccttgctgatggcgatctggaagatcgtcccggccctggcctgcggctgcaccgtagtcctcaaaccggccgacgaaaccccgctgaccgccctgcgcctcggccagttgtgcctggaggcggggattccaccaggggtggtgaacatcgtcaccggcacgggcgccgaggccggcgcggcactggcggcgcacccgggcatcgataagctggcgttcaccggctcgaccccggtgggcaagctgatcgggcatgcggcggtggagaacatgacgcgtttttccctcgaactcggcggcaaatccccggtgatcatcctcgatgacaccagcctggacatggctgccgccggttccgccggcgcgatcttcttcaaccaggggcaggtctgcaccgctggctcgcgcctctatgtgcagcgcaagcgtttcgaccaggtgctggagcgcctggcggccatcgccggcgacctgagcatcggccccggcctggatccgaccacgcagatcaacccgctggtctcggccaggcagcaggagcgggtgctggggatgatcgaaagcggggtggccgagggcgccagcgtggtctgcggtggggcgcgccagggcgagacggggttctacgtgcagccgacgatccttgccgacgtcaccccggggatgcaggtggtgcgcgaggaaatcttcgggccggtgctggtggcgacgcccttcgacgatctcgacgaagcggtgcgcctggccaacgacagcatctacgggctcggtgcgagcatctggtccaacgacctgcgccaggtcatggacctggtacccaggatcaaggccggcacggtatgggtgaacgcccacaacctgctcgacccgtcgatgccgttcggcggcttcaagcagtccggcatcggacgcgagatgggccatgcggcgatcgaggcgtacaccgagaacaagtcggtgtgcatcgcctactga

SEQ ID NO: 320263 - DNA, 669 bp, Pseudomonas aeruginosa
atgccttcgaccctgtcgcccgacctcggcccgcgctgcatgcaggccttcacccaggtggtgccggccagcctgtgcgtgttctatcgcatcgacgaggattgccgcgcacacgatttccagctcctgcggatgccggccggcatgcaccgcgactacctgcgccactaccgcgactacgatccgctgcagccgcgccactgcctggccaacgcttcgccggtggtgccgctgcgccagggcatcgcccaccagcccgcggaggacagcgcgctgtaccagggcttcctgcgacgccacgggatctgcgacgtggtcgaggtgctggcgcatgcgcatcagcgtccggtcgcggccctgtcgttgctgcgcgacgcccgcctaggggccttctccgaccaggagctgcgacagttgcgcgccctgcatggcctgatggagctggcggcgcaggcatgcgccacgccaacggccagcgccgagcgcctgcaaggcctgacaccgagggaacgggagatcgccctgctgctgcgcgacggcgtcagcaacaaatgcctggcgcagtgcctcggactcggcctgccgacggtgaagacccacctgctcaacctgttccgcaagaccggcgcgcgcagccgcaccgagctggtgaagcgactcttcctctag

SEQ ID NO: 320264 - DNA, 837 bp, Pseudomonas aeruginosa
atggtagcgggcggtctctgggagaacggcgaaatggcgacgggcgacgaattcgacgcgctgctggtggaagccggccgcacaccgatgcgcggctgggaatacgactatggcggacgcatccgcctggaaccgccgccatgggatttcccggggcgcatgctggagcgctgccgggccgccgccagcctgctggacatgggcaccggcggcggcgaatggttgagccggctgccgtatcgtccgccgctcaccgtggctaccgagggctgggcgcccaacctggagattgcccggggtcgcctggagcccctgggcatccgcgtggtcgaggtggagggcgcgccggacaaccatcgccagggccgggagggcgatggcggcggggcgttgccgttcgccgatggcaccttcgacctggtcggcaaccgccacgagtcctatctgccatcggaggtccggcgggtgctggcgcccggcggctgtttcctcacccagcaggtggccggcgacttcaaccgcgagttctatgtgttgctcggcgaaccggcgccgacgccggaggcgccgcactggaacctgggtttcgcccgggcccagttggaggccgcggagttgccgccggtggcaggcggcgaaggttgggaggtgttgcacttcgccgatgtcggcgccctggcctggtacctgttgaacctgccctgggtatttcccggtttttccttcaggcgccaccgcgagcgcctgcgcggcctgcacgagagcggcaagccgctggcggtgcggcagttcctcttctggctggaggcgcgcagcccccaggccgcgcgcggctag

SEQ ID NO: 320265 - DNA, 375 bp, Pseudomonas aeruginosa
atgacccacaaacgtttcttcctcgaactgcttctcgcgctggtcgcctatgccgctgccgttctgatcagcggccagttgctggcaggcacggaaccgggcgccggccgggtcttcctcgccctgctgccggtgccaccgatggtcgccctggcgctggtggtgatccgttacctgcggcgcctcgacgaaatggcccggcgcatccatctcgaagccctcgccctggccttcgtcggcaccgccctgctcaccttcgcctacggtttcctcgaaaccaccggctttccgaaactctcgatgttcttcgtctggcccctgatgggcgcgttctgggccatcggctgcgtcctgggactgaggcgctacgcatga

SEQ ID NO: 320266 - DNA, 207 bp, Pseudomonas aeruginosa
atgaggaaccgggttcgcgagttgcgcgcggagcgcggctggtcacaggcggagctggccggaaagctggaggtatcgcggcagacggtgaacgccatcgaaaccggccgctacgacccaagcctgcccttggccttcaagctcgcccgggtgttcggactggcgatagaagcgatcttcgacgaccgggaaggccaactggactga

SEQ ID NO: 320267 - DNA, 2667 bp, Pseudomonas aeruginosa
gtggccctcgccacccaggccgaggacctgccggggcaaccggtggaggtcatcgcacaggtgctcgcgacgagcgcggcgggtgccgcgccgaggccggcgctcgacggcagcgaagcgctgtatgtgatcttcacctcgggcaccaccggcgaacccaagggcgtggtgatcgagagccgctccctgagcaacctcgtggactggcacaaccggcgcttcgagatggaccaacggagccgcaccaccctgatggccggcgtcggcttcgacgtttgccaatgggaaatctggtccaccctgtgcgcaggcgcctgcctccacctggtgcccgacgaggtgcgcccggacccggcggcgctgctggcattcttcgccgagcagcggatcagccacgccttcgcgcctaccgtgatggtgcccgcgctggcggagcagcccgccccgccgtcgctggcgctgcgctacctgttctgcgccggggaaaaactgccgccggtcgcaaccggcgggctgccctataccgtggtggattactacggcccgaccgaggccacggtcttcgccacctgccgcatcgtcgacgccgaagcacatcggcgacccgcctcgatcggcacgcccatcgacggctgcgaggcattcatcctcgacgccgacgaccggccttgccatggcgaccgacccggtgagctgaacctggcgggcgtctgcctggcgcgcgaatacctgcgcgacccggacatgaccgccaggcgcttccactactcgcaggcactgcggcgtcggctctaccgcaccggcgacaaggcccgctggctggccgatggcagcctgcagttcctcggtcggctggacgaccaggtgaagatccgcggccaccgcgtcgaactcggcgacgtcgaggccgcgctgttgcgccagccggctatccacggcgcggtggtgctggcgcatgccgacccacgctccggtagccagcaattgagcgccttcgtggtcccccgccagcaggacggcgatgccagggccgtgctcgccgccatcaagaccgcactgcgccaggaactgcccgactacatgctgcccagccgctacctgtcgctggacagcctgccgaccacggtcaacggcaagatcgaccgccaggccctgcgtcgacacctggacgaacaatgccaggaacgactcgacgagcaacgcttcggcacccccggcgaattgcaagtggccctgtcctggcaggaagtgctggggcataccgacttcggcctggacgacagcttcttcgaggtcggcggccattccctgctggccgccgccctggtgcgcgaattgagccgacgcttcggcaaccgtgcctacatccacgacatctaccgcaccccgagcgtgcgccaactggcggccagcctggcgcggcgcgccggcgaagcgccgccggcgctggacagcgaaccggcccaggagctgcaacgggacgtgcgcctgcccgccgacgtggatttcagccgccccatggacaccgcccaattgctggcgccacggcacatcctgctcaccggcgccagcgggctgatgggcgcccacctgctcgccgagctgctggccagccgcgaggccgacctgcattgtccggcccgtgcgcaaaacgacgcccatgccctcgaacgcctgcgccaggccgcccggcagcaccgcatcgaactcgccgagacggactggcgacgggtcagggcctacgccgccgacctcgcagaaccaggtttcggactaccggcggaaacctatcgcgagctggccggcagcgtcgaccaggtcttccattccgccagcgcggtgaacttcatccagccatacagctacatgaagcgcgacaacgtcgaggggctcggccaggtcctgcgcttctgcgccagcggccgctgcaagccgctgatgctgctgtcgagcatctcggtgtacagctggggccacctgcataccggcaagcgcctgatgcgcgaggacgacgacatcgaccagaacctgccggcggtggtcaccgacatgggctacgtgcgcagcaaatgggtgatggaaaagatcgccgacctcgccgccgaacgcggcctgccgctgatgaccttccgcctcggctacgccacctgccacagccgtaccggcgcctacgccgactaccagtggtggagccggctggcgcggacctgcctggagtaccgggccgtgccgctcctgcgcgagctgcgcgagggcctgaccacggtggactacatggtagaggcgatcagcgtcatcgcccgccagccttcggcgctgggcaagaaattcaacctggtgccgagcattccgcgctgcctgaccctggacgagttcttcggccgtctcgggcgacgcgccgggcgtccccttcggcagatgccgttcgacgactgggtaagtctctgggaagacaatcgcgacgccccgctctatcccctgctgagcatgttccgcgacaacatgtacgccggccgcagcaccgtcgagttgtaccaggacacctatctctgggactgcaccaacgtcgaggaacacctgcgcgggagcgccgtgcgcgagccggagttcgacgaccgcctgctcgacctgtacctcgccggcctgggcggcagcgccatgcggtaa

SEQ ID NO: 320268 - DNA, 690 bp, Pseudomonas aeruginosa
atgcacaacgttctgatcgtcggcgcctcgcgcggcatcggcctgggactggcggatgccttcctgcaacgcggcgcacaggtattcgccgtcgcccggcgaccgcaaggctctcccgggctacaggcactggcggagcgggccggggagcgcttgcaagcggtgaccggcgacctcaaccaacacgattgcgccgaacgcattggcgagatgctgggcgagcggcggatcgatcgcctgatcgtcaacgccggcatctacggcccgcagcaacaggatgtggcggaaatcgacgccgagcagaccgcccagctattcctgaccaacgccatcgcgccgctgcgcctggccagggcactgtccggccgggttagccggggtggcgtggtggcgttcatgagttcgcagatggccagcctggcgctgggcctgtcggccacgatgccgctctacggcgccagcaaggcggcgctgaacagcctggtacgcagctgggagggcgagttcgaggagttgccgttcagcctgttgctcctgcatcccggctgggtgcgtaccgaaatgggcggcgacagcgcgccgctgagcgtcgaggaaagcgccgccggactggtcgcggcggtggaggatgccgcgggcgtgaatgcctgtcgcttcgtcgattatcggaaccagccgctgccctggtga

SEQ ID NO: 320269 - DNA, 645 bp, Pseudomonas aeruginosa
atgtccctacatcgcattcgcgtaatggttgcggatgatcatcccgccatttcgctgggtatttcctacgaactgagtcagtgcggttctttggagatgctcggtcaagtttccaattctaccgagttgatcggtcggctcaacgaaggcgactgtgatgtcgttatcgtcgactatacgatgccgggcgggaaatatggcgatggactggcattgttgtcattgctgcggcgacgttatccgcatctgcaattggttgtctttaccatgctgaacaatccgggtcttatccgggccattctcaagcagggtatcaattgcatcctcagcaagtccgactcgaccagtcacctgctggcggcggtgagcgcggcctattcgcgaaaccagtatttctcgccgtcgatcagggacatcttcgtcaaccaggtgctttcctcgcacaacgaacggctgacgccccgggaggcggaaatcgtccgtctgttcggctccggactgaccatcaccgaaatcgccgagcgctcgcatcgcagcgtgcagaccatcagtacgcagaaggtcagtgccatgaagaagctcggcatcaagcgcgatgccgacctcatcaggtatgcggccgagggctattgccggatgccctga

SEQ ID NO: 320270 - DNA, 1146 bp, Pseudomonas aeruginosa
atgagcatgaggttatttcccggccgcgtttccctgcgccgccggcctggcgcgcaggctcggcaggcgctcgttctcggtctctgctgcctgaccggcggccaggcctgggccctgaacgacatcgccctgaactgctcgttcggcaatggccagggcatgccctggcgtgtggtgaacgagctgaccagcggcacggcgaaaggcacggtgctgttcgccaggccggtgagcctgttcctgagctacaagccccaggcttcccaggaggcgcatgagctggtcctcggggggaactggtccggggtgggctatccggggccctacggcacggtggcgtccgacgtcaaaggcatcggctatcggatctcggtggatgcccaggacggcgtcaagcgggtgattccggtcgacaaccagccccatgcgctggacaagcgagtcacgagcttttccggaagcacgaccagcgactacctacaggaactggtcctgacggtcgaccccggcgagttgcctgccggcgacctgaaggtaaccagcgtatccggcagcgccaccctgaatctctgggcggtggacaggctgaagggcgaagcgtccatcggcagcgtcctggcggtgcctgcggacaactaccccaccggggtttgccgaaagccctattcgctgatcggcccggcctccatcgctatcggcggcggtcccccgccgccgccgatcccgaagaaatgcaaggtcgaggtgggacgggaaatcaacgtcaaactgggtagcgtcgcgttgaagaatttcccgcgggtcaacgacacctccacggagcgctccttcgatatctctctcagcgagtgtgcggcgctggccaagccggaaatcgctttccgcgacaagtatgtctcggcgcagcaagcggacccgacgatcctcagcttgaagagcggcggcgcggcggggttcggcatcgtcgtgaagaacggcctggaccagcagcggatacgtttcgacggcacgccctacccgatgcggcgtgtcggcgacagcgccgacctcccgctgagtgccgcctacatccgtatcggcgcggagggcgaattgaaggccggggtcgccgacggcgccgccgagttcacgtttaccttcccctga

SEQ ID NO: 320271 - DNA, 3057 bp, Pseudomonas aeruginosa
atgaacaaatgctatgcactggtctggaacgtatcccagggctgctggaacgtcgtcagcgaaggcagtcgcaggcgcggcaagcccgccggcgccaaggcggcgatcgcctccgtcctggccctgctgggcgccacggccctggctccggcctatgcgctgccaagcgggggaacggtggtcggcgggagcgcgaacggggagatacacctgtcgggcggcaacagcctgtcggtcaaccagaaggtcgacaagctgatcgccaactgggactccttcagcgttgccgccggcgagcgggtgatcttcaaccagccgagcagtagctcgattgccctgaatcgggtgatcggcaccaaggccagcgatatccagggccggatcgatgccaacggccaggtcttcctggtcaaccccaacggcgtgctcttcggtcgcggcgcccaggtcaatgtcggcggcctggtggcttccacgctggacatcacggatgccgagttcaacggcaactcctccagataccgtttcacggggccctctaccaacggtgtcctcaaccacgggggcgccatcaccgcggcggaaggcggcagcatcgccctgctgggcgcgcaggtcgacaaccgcgggacggtcctggcgcagatgggcggtgtcgggctcggcgcgggcagcgacctgacgctgaatttcgacggcaacaagctgctcgacatccgcgtcgacgccggggtcgccaatgcgctggcaagcaacggcggcctgctcaaggccgacggggggcgagtcctgatggcggccaggaccgccaatgcgctgctcaacacggtggtgaacacccagggtgccatcgaggcccgctcgctgcgcggcagtaacgggcggatcgtgctcgatggcggcccggacggcaaggtcatggtgggaggcgccttgtccgccaatgcgctgaacggaccggggcacggcggcacggtcgaggtccgggggcaggcggtggaggtggccctgggcacccaggtgaacacgctcgccagcaatggcctcaacggcacctggaagattgccgccgacaagatcgacgtgcgcccatcggcggtgtcggatggcgtcaccgttcatgccgacaccctgtcgcggaacctggcgagcaccaatatcgaactggtttcgaccaagggcgacctggacctcgacggctcggtgagctgggcatcgggcaaccggctggggctgggctccgcggccgacctgacgctgaatggcaggctgaatgccagtggcgccaaggctgggctggagctgaaggccgaaggcgctatcgatatcaatgacaagatcgttctcggcggggctggcagcgcgctggccatggatgccggcgaaggccaccgggtgaacggcacggcgtcggtctccctggccggggccaacgcgacctacgtctccggcggctattactacacggtggtgcagaacctggcgcagttgcaggcgatcaacaagaacctggacggcctgtacgtgctcggcggcaatatcctgggcggcagctattactgcacggcactgcagtccatcggcgggcccgccggcgtcttcagcggcaccctggacggtctcggcaacagcatcggcaatctctcgatcagcaacaccgggccgaatgtcgggctgttcgcccgctcctcgggcaccctgagcaacctgaaactgaacaacctgcgggtatccgataacacctacggctccggtccgtcttcgctcggcgccctggtcgggatcaacagcgggcgtatcgccaacgtcagcgccagcggggtctcggtcgtcggcagccgactgcgctccaacgcactgggcggcctggtcgggcgcaatatcaacgggcagatcacgaacgcatccgtcagcggcggcgtcaccgcttatgcggcgagcacggcggtcggcggtctggtgggggagaacttcaccaccgcctgggggccggaggcggtcatcgagaacgcccacagcaacgtccatgtggctgcacagtccaccgagcgcaacagcctgggcggcgtcggcggcctggtcggactgaatgcgaaggccacgatcagggcgtccggcagccaggggaaggtcgagacctaccggcccggcctgaacgtcggcggcctggtcggctacaacatgttcggccacgtctccgatagtagcgccagcggccaggtggaggccggcggcgcggggtataccggcgggctggtcggcctgagttccggcggcgagatattccgctcgcaggcgagcgggtcggtgtacagcaagggcggcctggcgaccggagggttgatcggcaaggcagaaggcaacggcatgctcggaaacctgaaagccagcggcagcgtcatggaccaggggggcgcggatctgggcgggctggtcggcaacaacagccagggtgccatcgagaccgccgaggcgacgggcaaggtcagcggcggcagcaacagtcgcgtcggcgggctgattggacacaacctcggcggttccgtcgcccatgcgatctcgcgcggcgacgtgagcggcggcttcaacagcctggtgggcgggctcgtcggccacaacggcggcgaactggtcaacgtggataccagcggcagggtcagcgccgctgcgagtgcgtcggttggcggcctggtcggcagcaacgccggttcgatcctgtcggcgcgcagcagcagtaccgtcaacagcggcgggcgcagccgcatcggcggcctggtcggcgagaaccagatccagggacgcatcgtttcgtccatgtcggaaggaaccgtcagtggcgactactacgtctccatgggcgggctggccggtgtcaacctgggatcgatcgagtactccggcgtcagcggcaagatcgacttcaagcctcagtcccattacggccagatctacggtgcgcaggtcggcgagaaccatggggtcctgggcggcaactacgtgatcggcgaggcggcgctcctgccgcctgccggtatcgactacggcaacatctggtaa

SEQ ID NO: 320272 - DNA, 741 bp, Pseudomonas aeruginosa
gtgaccggcgtcggcctgggacgatgcggcacggcctgggtcctgctggtggcgctggtggccgatgcctccgcctcgctgtccgtgatcgggacccgtttcatctatccggcgggcgtttccgcgctgacgatccgcgtcggtaacgtcgggacgcgcccggccctggtccaggcctggctcgatcgcggcgacgagacggcggacccgagcgctgtcacggtgccgttcatcctgtcgccgccgctgttgcgtatggacccgcaggagacccaggcgctccagcttcgccataccggcgagccgctgccggacgaccgggaatcgctgttctgggtcaacctgctggaggtgccggggcgggaggacggcagcggcaacctgctgctggtgagctaccgcctgcggatgaagctcctgttccgtccgcagggtctggccggcgatccgcgagccgccgcgcgccaggtcgtctggcgcctgcgtccggcggtacggccggggcagcgggtgctgctggaggcggacaaccgcagtccctatcacgtttccctggtgcgcctagagctgggcgagggcgacctcgccatgtccctcggcagcgtcaccttgccgcctttcgccgttaccccgttgagtctgccggccgtgcccggcgaggcggcgcgggtccatttcgatgcggtgggggatgacggccagatcgagcgcggcgacgcgccggcagagagatacccgtag

SEQ ID NO: 320273 - DNA, 2781 bp, Pseudomonas aeruginosa
atgcccaaagtttctcttcataggtgcctgtccgctcccgcttacggtgggcaggtcgccctgttgcgaatggcgatacagggagggatcgccgttcgttccctgcgattcgcctgtctgctggcactgtttccttcgctgtcctcctgccagtcctggtcctccgtcggcgccgtcggcgtagccggggcgaaagcgaaggaggccagggcgggagcaccggcgaaacagccgcaggcgcccgcggtggccgttgcgtcaccggccggcgggttggacgcaccgtcgcggcggatcgtcttcgacgcgcagatgctggccctggggccgggcggacgctcgatcgatacgtcgcgtttcgagcgcggcgacgtcatcgagccaggccgctatcgcctcgacctgctgctcaacagccgatggcgtggcgtcgaggaagtcgagctgcgccgccagccggggcgggaaagcgcggtcttctgctacgaccggggcctgctggagcgggcgggcatcgacctggagaagagcgcgcgtggccaggaccgttcctcggctcgcgatcctctgcccgaaggtttgcactgcgaccctctcgagcgctatgtgccgggggcccgggtcaagctcgatatcgccgagcagtcggtctatgtctcggtgcccagctattacctgagcctggattcttcgaagacctatgtcgatccggcgagctgggacagcggcatttccgccgccttgctcaactacaacagcaatctccacgtcagggaaaaccacggcaggagcgccaccagcggctatgccgggatgaacgccggcttcaatttcgggcgggcgcgcctgcgccacaacggcacggccacctggtcgcgccgcatgggcagccattaccagcgtagcgcaacctatgtgcagaccgacctgccggcctggcgtgcgcagttattgctgggagaaaactccaccagcagcgagttcttcgatgcggtgtccttccgtggagtgcagctttccagcgatgaccggatgctgccggattcgctgcgctactacgctccggtggtccgtgggaccgccagtaccaatgcgcgggtatcggtctaccagcgcggctacctcatctacgaaaccacggtggcacccggggcgttcgctctcgacgaactgcagaccgccagctatggcggggacctggaagtgcgggtgaccgaagccagcggggaagtccgcagtttcatcgtgccgttcgccaccaccgtgcaactgctgcgccccggaaccacgcgctacagcctgacggccgggcggctcaacgatcccagcctggagcgtcggccgaacatgctgcagggcgtctaccagcgcggcctgggcaacgacgtcaccgcatacgcgggcggggccttcaccggcagctacatgtccgggttgatgggcgcggcgctgaacacgccggtgggcggattctccggtgacgtgacgctggcgcgtaccgaggttcccggcgacgaccgccttagcggctccagctaccgtctcgcctacagcaagaacctgccgaacaccggcaccaacttttcgctgctcgcctatcgttactccaccggtggctatctcggcctgcgcgacgcggccttcatgcaggaccgggtagagcgaggcgagccgctggagtcgttctcgcgcttgcgcaaccgtctcgacgccaacatcagccagcaactgggcaacggcggcaacctgtacctgaacggctcctcgcagcgctactggagcggcggcgggcgggcggtcaacttctccgtcggctacagcaaccagtggcgcgacgtcagttactccatttccgcgcaacgcctgcgcagccactacgaaggcttttccagcggtgacaggcgcggcgagaccagcacgctgttcagcctgaacctgtccattccgctgggcggcgcgggacgcgggtcgccgaccctgagcagctacctgacccgcgacagcaacagcggaacccagctcaccagcggggtttccggcatgctgggcaagcgtggcgaggcctcctactcgctgtcggcctcccatgaccgcgacagccggcagacctcgaagagcgccagcctcgactatcgactgccgcaggtcgaactcggctccagcctctcgcagggaccgggctatcggcagttgtcggtcaaggccgcggggggcctggtcgcgcacagcggcgggatcaccgcggcacaaaccctgggcgagacgatcggcctggtccacgcgccaaatgccaggggcgcggctgccggctactcgggaagccggatcgaccgccacggctatgcggtgattcccaacctgctgccctaccagttgaacagcgtcgacctcgaccccaacggcatggccgacgagatcgaactgaggtccagttcgcgcaacgtggcgcccaccgccggagcggtggtgcgcctcgactatccgacgcgggtggcaaggcccttgctggtggatagccggatgcccagcggcgagcccctgccgttcgccacggaagtgctcgatgcccacagcgggcagtcggtgggcgccgtcggccagggcagtcgcctggtgctgcgggtcgagcaggatcgcggctcggttcgggtgcgctggggcaacgagccgcagcagcagtgcctggtcgactatgcgctgggcccgcgcgagacgacgcctcccgtcctgcaactggcatgtcgcccggcgtcggccgccgaccgggagcgcacgctgtga

SEQ ID NO: 320274 - DNA, 747 bp, Pseudomonas aeruginosa
atggcgccgctaatgcatcgttttcattctttcgtggcggcaagcgccgtggccatcgccctgtgcgtcggaacggctcacgccgggctgatcgcacagggcactcgcgtcgtctttccggccagcgagcgcgaggtcaccttgcgggtcagcaatacctccggcactcccgtgctggcgcaagcctggatcgacgatggccggcaggacgttccccccgaggaactgcaggttcccttcagtgtcacgccggccgtgacgcgagtggagcccaatggcggcgccgtattgcgcatcgcctacctgaaggccccgttgccgacggatcgcgaatcgctgttctggctgaatatcctggaagttccgcccagggacgaagacgaaaacaatgcattgcagttttcctttcgttcgcgcttcaaactcttctttcgacccagccagttgaagagtgtcgattcggctgccgggaaacttcaatggaagtttctggagtcagggggagcaggaaaaaagaccgtagtacaggtaaataatccgacgccttactacgtttcgttcgccagcgtcgaattgattgtcgatggccgtgtcatgtccgtgggaaagggaatggtcgcgccattctcgacgaaggagttcgactggcagggaaatccgaagaatctagaagccgcttccgtcagatacgaagtcatcaacgattacggtggccgcaataccctcgatagggcactcggcaaataa

SEQ ID NO: 320275 - DNA, 597 bp, Pseudomonas aeruginosa
atgttccacaactccaaaggaaatcagatgaacaagttcaaacgtgcaattcttgcgcccctcgttgcgtcgggcacccttctcgcgctgatgtcccccgtggcccatgcggtcgatggggtcgtcaacttctcgggcaacatcaccgaagtcgcgtgcgatatcaacggccaggcgccgggtgcgggcaacgtcaccaacgtcgacctgggtatcgtggcgccgacccatttcaccgccgtcggaaccaactccactttccaggagttcgatctggtcctctccggtgccggctgcaccaatgacaagaaggtttccatcgccttcgatcaggtcaccaacgtcgaccgtatcagcggcaacctgatgctgatggggccgtcggaagccaagggcgtgcagatccagatcttcaacaattcggcgaccaacaccacgaagatcccgctgggcttggtcgaggccgccccgcagaaggcaaccgtcgtgaagaacacggcgaccctgaagtacaaggcctcctatgtgtccaccgagaaggccgtgaccgcgggtaccggcctgtcccgtattcgctacctcctggcgtacgagtaa

SEQ ID NO: 320276 - DNA, 825 bp, Pseudomonas aeruginosa
atgtccgcccactcgcattccggatggatcaccgtcggcgccctggccgacggcttcgctccggacaaccacgtccttcccgcctgcggcgatctcgccgggctcgaacgggtcctgcacttcgccaacggctgggtcatcgaacatgccttcgactcgcagcgcctgcgctggcgcctggccgacggcagtgccagcggcgagtcggactaccgcgccagttcactgcgggaaaacctttacctggtggatttcctcaagcaggaaaacggccggccggtctcggtcagcctggtgctggacttcgacaaccaggcgttcaccgcggtgctcggccatctgcccgaccgcgcggcctgcgaacagggcctgttcgcccgggccctggccggccgggaactgaccggcgtggaggccgagttcctgcatggcagcctcgaccgcccgtggcagcccggcgcctgcccgcacgtccccagcgacgagttggtcggcctgcgcaaccgctacgtctacagcgccagcgaggcctacgaacacatctacctcaatcccgccttctacacctggcaatgcctgcgcggcgccgagcgagggctggccgataccgaccgctgccactgctaccgactggccgaacgcctgtacctgttcgtctggcgcgagaagatcgtgccgaccctcggcgtgctgctgatcgacctggaagccgggcgcaccgacggcaagatcttcggctaccaggacgacgacttcgccaccccggtgaacttcccggtcggcgccctggcccaggtgctcaaccagacccgccacgacctgtga

SEQ ID NO: 320277 - DNA, 1386 bp, Pseudomonas aeruginosa
atggacaccaccttcggcctcgacctggcccgcgtcgaagcgctgttcaagcgcgagctgcgacgcttcgacgaactgcatccgcgctccgcccaggcctaccgggaaaaccgccgccactggctatacggcgcaccgctgcactggatgcaacagtggccgggcaactgcccgctgctggtgaaggaggcccagggcgcgcgcgtcaccgacatcgatggccagcagtacgtcgacttcgccctcggcgatagcggcgccatgttcggccacgcccaaccggcggtggccgacgccatcgcccgccaggcgcggcgcggctcgaccctgatgctgccgaccgaggacagcctgtgggtcggcgccgaactggcgcggcgcttcggcctgccctattggcaggtgaccacctcggccaccgacgccaaccgtttcgtcctgcgcctgtgccggatgctcagcggacgcgacaaggtggtggtgttcaactgcaactaccacggcagcgtcgacgaatcgcaggtggaattcgacgccgccgggcgcatggttccgcgcgcgggcgttcaccccaatggcgtacgccacgccaccaccacccgcctggtggaattcaacgacctcgacgcgctggaggccgccctcgcccatggcgacgtcgccgcggtgctcaccgaacccttcatgaccaacgtcggcatggtcccgccggccgaaggcttccacgccggcctgcgcgaactgacccgccgccacgacgtggcgctgatcatcgacgagacccacaccatctcctgcggtcccgccggctatagcggcgcgcatggcctcgagccggacttcttcgtcctcggcaaatgcatcgccggcggcattcccagcgccgtctggggatgcagccaggcgcaggcggagcggatctgggcggtactgccgcacttccgaccggggcaggcgatcaaccatttcggctttggcggcaccctggccggcaacgcgctgcaactggcggcgatgcgcgcgaccttcgccgaagtgatgacggaggacgcctatcggcacatgttccagctcgccgcgcagctcgaggcgggcgtccgcgcgacgctcgaggaactgcgcctgccctggcacgtgacgcgcatcggcgcgcgcgtcgagtacctgttcatgacccacgccccgcgcaacggcggcgaggcccaccacgcacgcaacggcctgatcgaggcctgcctgcacctctacctgctcaaccgcggcgtgctcttgacgccattccacaacatggcgctgacctgcccggcgacccgcgcagaggacgtcgaactgcacgaccgcctgctccgcgattgcctgggcgaactgctggagcgcccatcgtga

SEQ ID NO: 320278 - DNA, 762 bp, Pseudomonas aeruginosa
gtgaggcgcttggagaaccgcgtcgcactggtcaccggcgccggccagggcatcggccgggccatcgccgaatgcttcgccgccgaaggcgccagggttctgctggcgacgcgtaccgccagccgcggccaggccgtcctggaggcgatccgcctgggcggaggcacggccgaactgctggccgtcgacctgagcgagcacgacgccgcgagacgagcggtgagcgcgaccctggagcgcttcggccagttggacatcctcctgcacaacgccgctgcctttccccagtgcgccctcgcggaactggacgaaggcaccctggaacggaccctggcggtgaacctgaaaagctgcttccggctgacccaggccgcccttcccgccctgcgccgcagcgtggccgggcgcgtcctggtgacctcctcggtgaccggcccgcgcacggcgatccctgggctctcgcactatgcggcgagcaaggccggggtcaacggtttcatccgcgccgccgcgctggagctggccggcgacggcatcaccgtcaacggcgtcgagcccggcctggtcgcgactccggcgctgggcagcctcggcgacgccgccgcgctggccgcgcacatccccctcgggcgtgtcggccagccgctggacatcgcccacgccatgctcttcctcgcctccgacgaggcgagctacatcaccgggcagaccctggttgtggatggcggcgcgttgctgccggaaaacggcgggctggcctga

SEQ ID NO: 320279 - DNA, 291 bp, Pseudomonas aeruginosa
atgttccgctccacctcccatgtccgtaccgaatcggcggcacgctacgtcaatcgcctgtgcaagcactggggccacaagttcgaagtcgaactcacacccgagcgcggcttcatcgacttcggcgactccaactgcgagctgctcgcccaccccgaccatgtcctgatgattctcaacagccccgacgaggacagcctcgcccacatgcagaacgtggtcgccgatcacctgcagcgcatggccaacagcgaaagcctggagattgcctggcagcccgccgaaagctga

SEQ ID NO: 320280 - DNA, 1563 bp, Pseudomonas aeruginosa
atgaaacccgaagatttccgtgcctctgccacccgtccgttcaccggcgaggagtacctcgccagcctgcgcgacgaccgtgagatctacatctacggcgaccgcgtcaaggacgtcaccagccaccccgccttccgcaacgcggccgcctccatggcccggctctacgacgccctgcacgatccgcagagcaaggaaaagctctgctgggagaccgataccggcaacggcggctatacccacaagttcttccgctacgcgcgcagcgccgacgaactgcgccagcagcgcgacgccatcgccgagtggtcgcggctgacctacggctggatgggccgcaccccggactacaaggccgccttcggcagcgccctcggcgccaacccgggcttctacgggcgtttcgaggacaacgcgaaaacctggtacaagcgcatccaggaagcctgcctgtacctcaaccatgccatcgtcaacccgccgatcgaccgcgacaagccggtggaccaggtcaaggatgtgttcatctcggtggacgaggaagtcgacggcggcatcgtcgtcagcggcgccaaggtggtcgccacgaattccgcgctgacccactacaacttcgtcggccagggttcggcgcaactgctcggcgacaacaccgacttcgccctgatgttcatcgcgccgatgaacacccccggcatgaagctgatctgccgcccctcctacgaactggtggcgggtatcgccggatcgccgttcgactacccgctgtccagccgtttcgacgagaacgacgcgatcctggtgatggacaaggtgttcatcccctgggagaacgtactgatctaccgcgacttcgagcgctgcaagcagtggttcccccagggtggcttcggccggctgttcccgatgcagggctgcacccgtctggcggtcaagctcgacttcatcaccggcgccctctacaaggccctgcaatgcaccggctccctggagttccgcggcgtgcaggcgcaggtcggcgaagtggtggcctggcgcaacctgttctggtcgctgaccgacgccatgtacggcaacgccagcgaatggcacggcggcgccttcctgcccagcgccgaggccctgcaggcctaccgcgtgctggcgccgcaggcctacccggagatcaagaagaccatcgagcaggtggtcgccagcggcctgatctacctgccctccggcgttcgcgacctgcacaatccgcaactcgacaagtacctctccacctattgccgcggctccggcggcatgggccaccgggagcggatcaagatcctcaagctgctctgggacgccatcggcagcgagttcggcggtcgccacgagctgtacgagatcaactacgccggcagccaggacgagatccgcatgcaggccctgcgccaggcgatcggcagcggggcgatgaagggcatgctcggcatggtcgagcagtgcatgggcgactacgacgagaacggctggaccgtgccgcacctgcacaacccggacgacatcaacgtgctcgatcgcatccgccaatga

SEQ ID NO: 320281 - DNA, 513 bp, Pseudomonas aeruginosa
atgtcccagctcgaacccaggcagcaagccttccgcaacgccatggcgcatctttcggcggcggtcaacgtgatcaccagcaacggcccggccggacgctgcgggatcaccgccaccgcggtctgctcggtcaccgacagcccgccgacgctgatgctctgcatcaaccgcaacagcgagatgaacacggtgttcaaggccaacggtcgactctgcgtgaacgtcctcagcggcgaacacgaagaggtggcccgccacttcgccggcatgaccgaggtcccgatggaacgccgcttcgccctccacgactggcgcgagggcctcgccgggttgccggtgctgcacggcgccctggctaacctgcagggacgcatcgccgaggtccaggagatcggcacccactcggtgctgttgctggaactggaggacatccaggtcctcgaacagggcgacggcctggtctacttcagccgcagcttccatcgcctgcaatgcccccggcgggcggcctga

SEQ ID NO: 320282 - DNA, 417 bp, Pseudomonas aeruginosa
gtgaccgacaagaaagagcagatcgcccgtttcatccagcgcgaatttccccagacccgggtcgtggtcgaagccgtcggcgagcgtagcgccacggtctggcaggcggtcgacgccagcgacctgcgccccggcggcacggtctccgggccgaccctgatggccatcgccgatgtcgcgctgtacgtggcggtactgggcgagatcggcatcgtcccgctggcggtgaccaccagcctgaccatcaacttcctgcggcgtcccgcggcggaccgccgggtggtcggcgagtgccgcctgatgaaggtcggcaagaccctggcgatgggcgaggtctcgctgttctccgaaggcgacgcggaaccggtcgcccatgtggtcggcacctactcgatcccgccggcgcaccgccgctga

SEQ ID NO: 320283 - DNA, 960 bp, Pseudomonas aeruginosa
atgcccgcacatgccttgctcgaaacccggcgggccagcacccaggacattcccctggagcagcggctggcgttctgggaggactacaacgcttccatcctggttggcctgaaatgttcgtcgtattcccaggccggcttcgccgcgacccaggacaacctctgcctcgaacgcctgcggctggcccgcatcggcggcaacgagcacgtggtggagcgcgaccgctcgatgatccgcgcagtgcccaaggagtcgatcttcgtctctctggtgcagggcagccagtcgttcttctaccaggacaacggctgcaacctcctgcaaccgggcgagctggttatctaccggaccgacaagccctacctgttcggtttttccggaccgatgcggcagttcatcttcgacattccccaggacgatttcgccgagcgctgcctgcgcgacttcaagggaccgctgaagatcggcgcggaaagcccggtgcagcgcctgctggtgcggaccctcggcgagcgtacccgggatttcctcgatagcccccatggcgaggatgccgagcgctaccaggaggaagcctacgacctgctggcgagcatcatcagcgaccatgccggcgagcaccgtgccagcgccctgggcgcgtcctacctgctggcggccaagcagtacatccagcagcatctcgacgaacccgccctgagctgcgagcgggtggccgccgccactggcgtctccagccggcacctggcgcggctgttcgcccaggaaggcagctcgcccgggcgctacctgcaggagcggcgcctggagcgggcccgccagttgctcgcttcgccccagggccggcgcctggatgtcgccgaggtcgcctatcgccacggcttctccagccaggcgcatttcgcccgggccttcaaggcgcgctacgggatgacgccgagcgaggcgcgtggccgctag

SEQ ID NO: 320284 - DNA, 534 bp, Pseudomonas aeruginosa
atgcccgaactcgccacccgtgaattctggaaagacctgcaaccgattcccgactgcttcaagccggacgccaagcccgaggtctacctgcgcaacgcgccgaccgaggacgagcgcctctacgtgcccttcaccgagaccgtgaagtcgcgtccgctgtggatctcgccaagcgaaaaccgctggtgcgacatcctgatggcgacgagcgccggcctggtcaaccgccactaccacccgcacgaggtgttcgcctacaccatcagcggcaagtggggctacctggagcacgactggaccgccaccgccggcgacttcgtctacgagacgcccggcgagggccacaccctggtggcctacgagcacgagcagccgatgcgtgcattcttcatcgtcaagggaccgctggtctggctcgacgagaagggcaacgcggacggcatcttcgacgtccacgactacatcgcgatgtgccgtgagcactacgacaagatcggcgtcggcgccgcctacatcgactccctgttccgctga

SEQ ID NO: 320285 - DNA, 1260 bp, Pseudomonas aeruginosa
atggcgcataacaacaattccgccagttacgaaaacgtcctgctctgcgtgctgttcctgaccttcggcttcgtcttcttcgaccgcctggcgctgtccttcctgtttcccttcatggaacaggagctgcaactgagcaacagccacctgggcatgctctcctcggtgctggccctggcctgggcggtatccggcgcgctggtcggcgcctggtccgaccgccgcgggcagcgcaagccgctgctgatcgtggcggtgatcctgttctcgctgtgctcggcgctgtccgggctggtcggcggcttcctcagcctgctgctgttccgcggcatcatgggcctggccgaggggccgatcctgccgctctcgcaatcgctgatggtcgaggcctcctcgccacatcgccgcggcctcaacatgggtctgctacagggctcggcggccggcctgctcggcgcggtgatcggcccgccgctgctggtggccctggccgaaaccctcggctggcgtcacgccttcatcgtctcgttgctgccgggcctgctgatcgcctggttgatctggcgccatgtgcgtcccgacccgccccgcgcgcagcgcccggcgccgcgcgccgaagaagcgaaaggcaagcgcctggcactgctgaagagccgcaacatcctgctctgcaccctgatcagttgcgtattcgtcacctggttcatcgtgctgatttcctttaccccgaccttcctggtcaacgcccgcggcttcagcccggcgaccatgggcaggctgatgagctgcctgggcgtcgcctgggtggtctggggcttcgccgtaccggcgatatccgatcgcatcggccgtcgaccgaccctggtggcgttctccctgctcgccgcgtgttgcccgctggcgctgctctatgcgccgaacgcgaccagcctcggcctgctgttgctgctgacctacaccgggctcggctgcttcaccctgttcatggcgaccatcccggcggagaccgtctcgcgcggcgtcatcgccaccgccctcggcctgatcatgggcctcggcgaactggtcggcggtttcctcgcgccgaccgtggccggcttcgccgccgaccgcttcggcctgtccatcgtcatgtggatgtcctgcggcggcgccctgctcgccgcgttcctctcgctgttcctgcgcgaaaccgcgcccgccgtgctggcgcgccagcgcagcgcgcctacctccgtcctgcaaggaaaccaaccatga

SEQ ID NO: 320286 - DNA, 1059 bp, Pseudomonas aeruginosa
atgaaagcactgcgctggcacgctgcccgcgacctccgcctgagcgaactggaacgccaggcgccgcggcccggcgaagtcgaactggaagtcgcctactgcggcatctgcggcagcgacctgcacgaataccagagcggcccgcactcgattccccaggccgaggcgcacccgctgtccggttgccgcgcgccgctgaccctcggccatgagttctgcggcgtggtcgccgcgctcggccctggcgtggagggactgcgcatcggcgaccgcgtcgcggtggagccggaataccgctgcggcgaatgccgctactgccgggaaggccgctacaacctctgcgagtcgatgggcttcatcggcctgatgggcgacggcggcttcgccgagcgcgcgcgagtgccggcctacatgctgcaccgcctgccggacgcggtgggcttccgccaggccgccgtgctcgaaccggccgccgtggccctgcacgcgctgcgccgcagcagcctggcgccgggccagcgctgcgcggtgttcgggctcggcccgatcggcctgctgctggtgatgctcgcccgcctgcgcggaatcgaggacatcgtcgcgatcgacgtcagtcccgagcgcctcgccctggccggggagttcggcgccagccgggcgctcgacgcccgcgacggcgacacggcggcgcgcctgcgcgagggcggcgcgctcgactgcgccttcgaggccgccggcagccaggccagcctcgacgccgccctggccagcctgcgcaagggtggcgagctggtgctggtgagcctgatgggcgaggtccggctggacgccttcgacctggtcaaccgcgaactgcgcctgctcggcagcgtcggctaccgcgacgcctacccggagctgatcgccctgctcgccgacggccgcctcgacctggcccgcgcagtgacccgcagcgtgcccctggagcaggctgtcgagcacggtttcgaggccctgctgcgcgacaagtcgcaggtcaaggtgctggtcaatcccaacccggccctggccgacgcctga

SEQ ID NO: 320287 - DNA, 726 bp, Pseudomonas aeruginosa
atggttttccaacacgatatctacgccggccagcaggtgctggtcactggcggcagctccggcatcggcgcggccatcgccatgcagttcgccgaactcggcgccgaagtcgtcgccctcggcctggacgccgacggcgtgcacgcaccgcgtcatccgcggattcgccgggaagaactggacatcaccgacagccagcgcctgcaacggctgttcgaagcgctgccgcgcctggatgtgctggtgaacaacgccggcatcagccgcgaccgcgaggaatacgacctggctaccttcgaacgggtgctgcgcctcaacctgagcgccgccatgctcgccagccaactggcccggccgctgctggcgcagcgcggcggcagcatcctcaacatcgcctcgatgtacagcaccttcggttccgccgaccgcccggcctacagcgccagcaagggcgccatcgtccagctcacccgttccctggcctgcgagtatgccgccgagcgcatccgggtcaacgccatcgcccccggctggatcgacacgccgctgggcgccgggctcaaggccgacgtcgaggccacccgccggatcatgcagcgcacgccgctggcgcgctggggcgaggcgcccgaggtggccagcgccgcggccttcctctgcggtcccggcgccagcttcgtcaccggcgccgtgctggcggtggacggcggctatctctgcgcctga

SEQ ID NO: 320288 - DNA, 1305 bp, Pseudomonas aeruginosa
atgaaaaccctccgcaccttgccggcgctgctctgcgccggtttcctcggtctctccgcgcaggccgccgaagacagccgcagcggcccgctggccgggttcggcgaacgactccagcgccacggcgtgaagacccacgcgcagttctggagcctgtcgctgaagaacctcgacaccggcccgcgccagcacagcttcggcaacagcggcgacctgttcctcggcgccgacctcgacctcgccaccctcgccggcctggacggcgcctcgctgcacatcgaggaaaccctgttcatcctcgaccgcggcaccggtcagcccaccgggccgagctggcagggcgcggtgggcagctacttcggcggcgcgccgctgcacaacgacatcggcgccaaccagctgagcctgctcacctggcagcagcagtggctgggcggacgcctcgacagccatctcggacggaccaatgcgcggcgctatttcctgatctacaactgcgagaccgtggtcacctgcaacgacccgatcatcgacgcctccaccggcatcctgccgccgccctacggcgcctggggcggctacttgaagtaccgggcgaccccgaccctgtacctgcacgccggggccttcgagtccaacccggtggattacctgaagaagcgccatggcctcgatttcggcaccgacgacgccagcggcaccagcctgctgctggggatcggcgacaagcgcgaggaaagcctcgatccctaccgctcgcactatgaactcaacgcctacctgaacaccgccaaccaggtcgacccgctcaccggcgccagcgaccacggcagcgccggcggcttcttcaagttccagcagctgttctggcgcgccgacggcggccgcctcgattcgccgagggcgctggggctgttcggctcgctgtcggtatcggccgacgacaagcagccgttccgtcatttcgccgagctgggcctgacctaccatgcgcccttcgaccgcacgcgggacaagctcaacctcaaggccagctacctgcgcctgaacgatcaccagctggagttccagcgccaggcgcggatcgccgctggaggcgatgcgaaactcggccagcgcgacgtgtacgccctggaaaccaatgcgcacatcgcactgaccccgcacatcgcgctggagccgtcggtgcagtacatcttcaacccggacaactactacaaccccggcgctcgcgaactgagcggagacggtttcgtcgtcggcctgcaactgatggtcgacatgggctcgctgctggggctttag

SEQ ID NO: 320289 - DNA, 1743 bp, Pseudomonas aeruginosa
atgggcgcggggcgaaaaagaacgccgggcgaggcccggcagcacacccagaaaggtgccgacatgacttccactgcccgccgttcgttcgactacatcgtggtcggcgccggctccgccggttgcgtcctggccaaccgtctttccgccgatcccgccgtctcggtctgcctggtcgaggccggccccagcgaccgcacgccgctccccgccgcctacatccgcacgccggccgggatcatccgcctgatcgccaacccgaagtggaactggatgcatcgcttcgccgcccagcccggcaccgccaaccagccgatcgcctgcccgcgcggcaaggtctggggcggctccagcgcgatcaacgggatgatctacatccgcggcgaccgccacgactacgaccgctgggcatccctcggcaaccgtggctggagctacgacgagctgctgccctactttcgccgctcggaacatttcgagccgggcgaatcgccctggcacgggcgcggcggcgaattgaacgtcgccgcgcagcgcagcccgggcccgatcaaccaggtgttcttccaggccgccgaggaaatgggctggccgtacaacgccgacttcaacggcgagcgccaggaaggcatcggcccgttccacgtcacccaggtcaacggcgaacgctgtagcgcggcgcgcgccttcctgcacccggccctggcgcggcccaacctcaccgtgctcagctcggcgctgaccctgcgcgcgctgctggaaggtacccgcgccaccggcgtggagatcagccaggctggcgaggtcgtgcaattgcaggcacgccgcgaagtgatcctcagcgccggctcgatcaactcgccgcagctcctgttgctctccggcatcggcccggcggcggaactggcgcgccacggcatcgtccagcgccatgagttgcctggggtcggcgagaacctgcaggaccaccaggacatcgtgctgatgtaccgcaccgaggccaagctcggctacggcctgggcttctcgccgaagggctggctgccgctgctgcgctcgccctggcagtacctgttcggccggcgcggggcgctgacctcgaacaccgtcgagtccggtggcttcctccgcctcgacccgcaggcagagaccccggagctgggtctgatcgtggcccccgcgctgaagaaccagccgcagcgcctggtccccttcggccacggggtcagcctgcacgtcgcggtgatgcacccgcagagccgcgggcgggtccgcctgaactcgccggacccgcacgaccggccgctgatcgaagccaacttcctcagccaccctgccgacctcgataccctggtccggggtttccaactggtccgcaaactggccgccagccgcagcttcgcccgtcacctcaagggcgagctggtaccgggcccgcaggtttccagccgcggccagatcgaggcctggatccgcgccaacctgggcaccgtgttccatccggtgggcacctgcaagatgggccacgaccagctcgcggtggtcgacgaccagttgcgcgtgcacggcctgcaaggcctgcgggtggccgatgcgtcgatcatgccgacgctgatcaccggcaataccaacgccccggcgatcatgatcggcgagaaggccgccgacctgatcctcggcaagccggcgccccatgcaccgcccgcgcgacaaccggccgtgcaggctctggccggcgcctga

SEQ ID NO: 320290 - DNA, 261 bp, Pseudomonas aeruginosa
atgactcgcactctgctcgccaccaccctgctcgccgcgcttgcgcttcccgcgttcgccgcccaggccgccgcaccggtaccgaccgaaagctaccgctatggcatgccgctggatgtgcacaaggtggtggcgacccaggaacaggcgtcgaccacctgcgagatcgtcgatgcacggatggactacctagactccgccggcaagctgcattcgctggcctaccgcaagtacgccagcgcctgcagccagggcggctag

SEQ ID NO: 320291 - DNA, 741 bp, Pseudomonas aeruginosa
atggagcatgtcgatcacatcctgatcgtcgacgatgaccgcgagattcgcgagctggtaggcaactacctgaagaagaacggcctgcgcaccaccatcgtcgccgatggccggcagatgcgcgcgttcctcgaagccaacacggtggacctgatcgtcctcgacatcatgatgcccggcgacgacggcctgctgctctgccgcgagctgcgcgtcggcaagcacaaggccacgccggtgctgatgctcaccgcgcgcaacgacgagaccgaccgcatcatcggcctggagatgggcgccgacgactacctgaccaagcccttctccgcccgcgaactgcttgcccggatcaacgccgtgctgcggcgtacgcggatgctgccgccgaacctcaccgtgagcgagagcagccggctgatcggcttcggccagtggcaactggacaccagcgcccgccacctgctcgacgacgccggcaccgtggtcgccctcagcggcgccgagtaccgcctgctgcgggtgttcctcgatcatccgcaacgggtactcagtcgcgaccagttgctcaacctgacccagggccgcgaggcggacatcttcgaccgttccatcgacctgctggtcagccgcctgcgccaacgcctcggcgacgacgcccgcgaaccggagtacatcaagaccgtgcgcagcgagggctatgtgttctcgctgccggtgcgactggtcgaggcccatccatga

SEQ ID NO: 320292 - DNA, 1305 bp, Pseudomonas aeruginosa
atgaagctcgccgtgccgcgcccgcgcagcctcgccgcgcgcctggcgctgatcctcttcgccgggctggtgctggcctacgggctgtccttcgcctcgcagttctacgagcgctaccagaccgcgaagcacatgatgctcgacagcctcgaacaggacgtggcgatctcggtagccatgctcgaccgcctgacgcccgccgagcgcgaggcctggctgccgcgcctggaacgacgcacctaccgctatcgcctcgacgccggcgagcccggccagccgctggcgctggccgacgcgccggttgccgcgcactccatcgaacgcgccctcgacggtcaatatccgctgaccctgcgcaaggtggccgacagccgtccgcacttccaggtcctcctgcgcctgcgcgacggcagcccgctgaccatcgacgtcacgccggccccggtgccgctgtccggctggctgccgctggtgctgctggtgcagttgttcctgctgctgctctgcaccggcctcgcggtgcgcaccgccatcggcccgctgacccggctggtgaaggccgtggaacatctcgatccgaatcgtccggcacagcctctcgcggaaaccggcccacgcgaagtggcgcatgcagcggcggccttcaacgccatgcaggcgcgcatcgccgactacctcaaggagcgcatgcaattgctcgcggcgatttcccacgacctgcagacgccgatcacgcggatgaagctgcgcgtcgagttcatggacgcctccagcgacagggacaagctgtggaacgatctcgaagagatgcagcacctggtccgcgaaggcgtggcctatgcccgcagcatgcacggcagcaccgagaccagttgccgggtggacctcgacgccttcctcgacagcctggtcttcgactatcaggacagcggcaagcaggtacaactcgacggccgtaccggcgcggtgatcgacacccgtccgcacgccctgcgccgagtgctggtgaacctggtcgacaatgcgctgaagttcgccggcgccgcgcgcctggaagtggaacgccgtaccgatggcggcacgcgaatccaggtgctggacaatggcccggggattcccgccgaggaactcgacgaggtgctcaagcccttctaccgggtggaaaactcgcgcaatcgcgacaccggcggcaccggcctcggcctggccatcgcgcagcagctgagcctggccctcggcggccgcctgaccctggccaaccgcgccggcggcgggctttgcgcgcgcatcgagctggacccctga

SEQ ID NO: 320293 - DNA, 630 bp, Pseudomonas aeruginosa
atgaccgtcccaacctctcaatccgcctggcacggctggcgactgttcgccgtcctcgccgtcgccgtgctgtgcatgaccgccctcgtcctggctctccaggcgcaaccggtggagggcctgcgcagcgccatccgcgccaccgcgcgcagttccttcgcgctgttcctcgccgctttcctcgcgtcctcgctggcgaccctggtgcccggcccggggacccgcgcgctgctccgtgaaaggcgctacctgggcctggccttcgccttctcccacgcagtacacgccttgctgatcctggcctactggaagctgttccccgagacattctggagcggccgctcggtcgcggcgaacatccccggctcgatcggctacctgttcatcctgctgctcaccctcacctccttccgcaccccggcccgactgctcggcccacgcgcctggaaagccctgcactcgaccggcacctgggtgctggcgggcatcttctgcctgtcgttcttcaaacgcatccccatgggcggctggtacgtactggcgttcgccacgatcttctccgccatcgtcctcaagctcaccgccaagctcgccgtgcgcttgcgtcgtcgcgacgtacagccggcctga

SEQ ID NO: 320294 - DNA, 510 bp, Pseudomonas aeruginosa
atgcaagcatccgacctgcgcgcctggcgccgacccttcgccctgctcgaccgctgcggcggctggagcgccgacctgtccctgcgactgttcctggcctgggagttcttcgagtccggttgggaaaagtggaacggcgagaactggttcggcgatatccagtcggctttcccctttcccttcgaccgcctgcccgccgccttcaactgggaactgtcgctgtgggccgaactgctcggcgcgctgttcctcctgctcggcctcggtacccgcctgaccgccctggtgctgatcgtcgtcaccctggtggcgaccgccgccgtacactggccggcggagtggtcgagcctggcggaactggcccgcggctactcgatcaccgaccacggcttcggcaatttcaagctcccggcgatctacctggcggcgctgctgccgctgctgttggcgggggcggggaagctgagcctggaccactggctcgggcggcgcctgggcctgtcccgctag

SEQ ID NO: 320295 - DNA, 756 bp, Pseudomonas aeruginosa
atggatgagcgcctgcgccaacagcagttcagcctcgcccggcacctgcgcgacccgcttggcaatgcgccgccgccggacatcgaagaacgtcgcctgcgggtctaccgcgagctgttctacaacgccatcgaaggcctccttgccagcggcttcccgcgcttgcgcgggctgcttggcgagcagcagtggcatggcctggtgcgcgagttctatcgcgaggagagaagccatacccccctgttcacccgtatcgccggggtcttcgtcgactacctgcggcagcggggcgagtatcggccggcgtggcaagccgagttggcccacttcgaatggagcgaaacgcgcctctacctggccgagcccgacgatccgccgtatcggcgtgaaggcgacctgctcgacggggtgccgctgctgtcgagcctggcgctgccgctgggctatcgctggccggtgcatcggctcgaagaggacgtcgcgctcgccgaagcgcctgcggaaccgaccctgctgttgatgcaccgcgattcctcgcatcgcgtgcataccgcgcgcctgactccgctggcataccgcctgctggagtcgctggcgagacggcgcctgagcgggcgcgagcacctggcggcgctggcgctcgaggcgcggagtgcgcccggagcgctcgacgcggcggggctggagttgctggcagcgttgcggacccagggtgtcgtgctcggaaccctggaacgcgattgggcgggcggatga

SEQ ID NO: 320296 - DNA, 831 bp, Pseudomonas aeruginosa
atgaccctgatcgacaacgccgccggcctcggcctgaggcgcggcctgcttccgcaactgctggcgatggcgcccggcgcggtggacttcctcgaatgcgcgccggacaactggatcggcgtcggcggtgccttcggtgccgacctggagcgcctggtggagcgctttccactgacctgccacggtctctcgctgtccctcggcggctccacaccgctggatgccgccttcatcgagcagacccgacgcttcctcgtccgccaccgggtcgcgttgtacagcgagcacctcagttactgttccgacgatggccatctctatgatctgttgccgctgccgttcaccgaggccgcggtgcgtcacgtcgcggcgcgcatccgcgaggcgcaggaacgcctggagcggcgcatcgcggtggagaacatttcctactatgcagcgccgtaccgggagatgagcgagatcgagttcgtcaacgcggtactcgacgaggccgactgcgacctgttgctggacgtcaacaacctgttcgtcaacgcctgcaaccacggctacgacgccctcgacttcctcgcccggctgccgcccgggcgggtcgccgcctaccatgtggcggggcactacgacgaggcgccggacctgaagatcgacacccatggtgccgccgtgaagcccggcgtctgggccttgctcggagccgcctatcgtcgcttcggcgtgcgcccgaccctgctcgagcgggacttcaactatccgccgctgggcgaactgctgctggaagtggagcagatccgccaatggcaacgcgacgagggacgccgtcatggatga

SEQ ID NO: 320297 - DNA, 468 bp, Pseudomonas aeruginosa
atgtccgttttcgattcgcgtcaaaagacttccgccagcctgctcggtgccgtactggtggggggaatgctgctcggcggttcggcgttcgccgtcgagccgctgggccaggggctgcaagtggcggcggcgagcgccggcgaaggcaagtgcggagaaggcaagtgtggtagcggcggctccgcgaagaccccggccaaggccggcaccgagggcaagtgcggggagggcaagtgcggcgacgcctcctttgcccgaaccgacaccgatcacgatggcaaggtctcgcgcgccgagttcctcgcggtggccaaggaccgtgccggtgagttcgacagcatcgatagcgaccatgacggcttcatttccgaagccgaggcctacgaacacctgcgcaagacctacgaggccaacggcaagccgatgcccgccgggctgttcagcaagctggagcaaggccggcactga

SEQ ID NO: 320298 - DNA, 1245 bp, Pseudomonas aeruginosa
gtgctgaaacgcattccggtaacccagcttcgcctcggtatgttcgtccagagcctttgcggctcgtggctggaccacccgttctggaaaagaggtggcttcctgctcgacagccaggccgacctgcagcgcctgcgcgaaagcgccgtgaaggaagtctggatcgatgccagcaagggcctcgacctcccggaggaagcggcggtctcggccgctgcggtcctgccggtcaccatgccggccggcccttcgccggcgcgggtcgccctggaggaggaaatccgccacgccgccctgctctgcagccgtgccaaggccgccgtggtcagcatgttccgcgacgcgcgcatgggccaggccatcgataccgcgcatgcatcggacctggtggacgaaatctccgcctcggtgctgcgccatcccaacgcgctactcagcctggtacggctgaagacctcggatgaatacacctacatgcattcggtggcggtctgtgcgctgatgatcgccctcgcccgccagctcgaactgcccgacccgctggtacgcgaggcggggctggccggactgctgcacgacatcggcaagatggcggtgcccgatccgatcctgaacaagcccggcaagctcaccgaccaggagttcggcctggttcgccggcatccgcagaacggcgcgcggatgctgctcgattgccgccaggtcagcgccctggtggtggatgtctgcctgcaccaccacgagcgcatcgacggcaccggctaccccttcggcctggcgcaggagcagatcagcctgctggcgcgaatgggcgcggtgtgcgacgtctacgacgcgatcacctccgaccgtccctacaagaagggctggaacgccgccgaggcgatccgacgcatggccgaatggaacgggcacttcgacccgcaggtgttccgcgccttcgtcaaggcggtgggcatctacccggtcggcgcgctggtcaggctggaaagcgggcgcctcggcgtggtcctcgaacaacacggccgctcgctgctgacgccacgggtcaaggtattcttctcggcccgctcgaaggtgccgatcccgcagcaggtgctagacctgggtagggccggacagaccgaccgaatcgtcggcttcgagccggcggaagcctggaacttccgcaatctcgacgagatgtggacgggactggccaagtccacgggctcttatttcgacgcgggaaccggaaatccgtag

SEQ ID NO: 320299 - DNA, 888 bp, Pseudomonas aeruginosa
ttggttcgaccccatttgccgctgaacgccctgcgcgccttcgaagcttcggcccggcacctgagcttcacccgcgcggccatcgagctgtgcgtgacccaggcggcggtcagccaccaggtgaagagcctcgaggagcgtctcggcgtggccctgttcaagcgtctgccgcgcggcctcatgctgacccacgagggcgagagcctgctgccggtgctgtgtgactccttcgaccgcatcgccggcctgctggaacgtttcgagggtggccactaccgggacgtgctcaccgtcggcgcggtcggaaccttcacggtcggttggctgctgccgcggctggaggacttccaggcgcgccatcccttcatcgatctgcgcctgtccacccacaacaaccgcgtcgacatcgccgccgaggggctcgactacgcgatccgcttcggcggcggcgcctggcacggcaccgaggcgctggcgttgttcgaggcgccgctgacggtgctctgctgcccggaggtcgccgcccagttgcacagtcccgccgacctgctgcagcacaccctgctgcgctcctaccgcgccgacgagtggccgctgtggttccaggcggccggactgccggcgcacgcgccactgacccggagcatcgtcttcgacacctcgctggccatgctcgaggcggcccgccagggtgtcggcgtggccctggcgccggcggcgatgtttgcccggcaactggccagcgagagcatccggcgtccgttcgccaccgaagtgagtaccggcagctactggctgacgcgcttgcagtcgcggggggagaccagcgcgatgctggcgttcagggagtggttgctgggccaggccgtcttggagagcgaggcgtag

SEQ ID NO: 320300 - DNA, 1194 bp, Pseudomonas aeruginosa
atgcgcgataccagattcccctgcctgtgcggcatcgccgcttccacactgctgttcgccaccaccccggccattgccggcgaggccccggcggatcgcctgaaggcactggtcgacgccgccgtacaaccggtgatgaaggccaatgacattccgggcctggccgtagccatcagcctgaaaggagaaccgcattacttcagctatgggctggcctcgaaagaggacggccgccaggtgacgccggagaccctgttcgagatcggctcggtgagcaagaccttcaccgccaccctcgccggctatgccctggcccaggacaagatgcgcctcgacgaccgcgccagccagcactggccggcactgcagggcagccgcttcgacggcatcagcctgctcgacctcgcgacctataccgccggcggcttgccgctgcagttccccgactcggtgcagaaggaccaggcacagatccgcgactactaccgccagtggcagccgacctatgcgccgggcagccagcgcctctattccaacccgagcatcggcctgttcggctatctcgccgcgcgcagcctgggccagccgttcgaacgactcatggagcagcaagtgttcccggcactgggcctcgaacagacccacctcgacgtgcccgaggcggcgctggcgcagtacgcccagggctacggcaaggacgaccgcccgctacgggtcggtcccggcccgctggatgccgaaggctacggggtgaagaccagcgcggccgacctgctgcgcttcgtcgatgccaacctgcatccggagcgcctggacaggccctgggcgcaggcgctcgatgccacccatcgcggttactacaaggtcggcgacatgacccagggcctgggctgggaagcctacgactggccgatctccctgaagcgcctgcaggccggcaactcgacgccgatggcgctgcaaccgcacaggatcgccaggctgcccgcgccacaggcgctggagggccagcgcctgctgaacaagaccggttccaccaacggcttcggcgcctacgtggcgttcgtcccgggccgcgacctgggcctggtgatcctggccaaccgcaactatcccaatgccgagcgggtgaagatcgcctacgccatcctcagcggcctggagcagcagggcaaggtgccgctgaagcgctga

SEQ ID NO: 320301 - DNA, 399 bp, Pseudomonas aeruginosa
atgagcgcttccccgcccctccgccagccctgcccgcccggcgcctgcgtctgcgaacgcgagcgcctggaggcgcccggcgcggaccgtcgcatcctcctcctgacccgccaggaagagcagcgcctggccgctcgcctggaagccctgcgcagcctggaagacctggaacacctgctgcggcgcatggaggaacaactgggcatccgcctgcggatcgccccggccttcggcgaggtgcgcagcatgcgcggcatccgcatgcgcttcgaggagcagccggggctctgccgcaagacccgccaggcgattcccgccgccatccgccgcggcctggagaagcgcccggaagtcgcctacgccctgctcaacgcccacgacctgctgcgcgacgcctga

SEQ ID NO: 320302 - DNA, 4254 bp, Pseudomonas aeruginosa
gtgaacgtacaacagagcaagttcaggctgagccgctgggcgggcgcgacactggcactcggactgctgctgtccgggctgggcgcctgggggctggcgctggtcaacgagcaacaggcgcggatggcgctggaacgcgaggcggaactgctggccgaggcggtgacccgccgcgtggaactctaccagtatggcttgcgcggggtgcgcggtgccttgctgacggcgggcgaggcgcacatcgaccgcgaactgttccgccgctacagcctgacccgcgacatcgaccgtgagtttcccggcgcccgcggcttcggcttcatacgccgggtggcggccgccgacgaggccgggttcctgcgccaggcgcgggccgacggccagccggagttccgcatccagcaactgactccgcacgatggcgagcgctacgtcatccagtacatcgagccggtggcgcgcaacggccaggcgctgggcctggacatcgcctcggaagccaatcgccgggaggccgcccgcgccgccctggagaccgggcaggtgcgcctgacggggccgatcaccctggtccaggccagcggcttgcgccagcaatcgttcctcatcctgatgccgatctaccgcagcggcatcactccaccgccggggccccagcgcgaactcgaaggcttcggctggagctatgcgccgctgctgaccggcgaggtgctggccgggttgcccatcgacaatgcggcgatccacctcgaactcagcgacgtcaccggcgacggcgctgccgtacccttcttcgtcaacggcgccgcggcgccggctcaacgcctgttcggccacatgctgcggcgggagatctacggtcggcactggcagatggcgttcagcgcactgccgctgttcgtccagcgcctgcaccagccttcgccgcgcatcctgttcctggccggcagcctggtcagcctgttgctggcggcgctggtcaacgccagcgccctcggccgcctgcgccggcgtcgggaggcggcgacccaggcgcggctggcggcgatcgtcggcaattcggcggacggcatcatcggcgtcggcctcgacggcgtcatcagcgactggaatcgcggggccgaggcgttgttcggctaccgcgaggagcaggcggtcgggcggcgggtggtggacctgctggtgccgccatccaaggagaacgaggaactcgacatcctcgcccgcatcgcccgtaaagaacaggtggtcagcttcgataccgtgcgccggcaccaggatggccacctgctcgacgtggcggtgaccgtctcgccgatcctcggtccggacggcggcgtggtcggcgcctcgaagaccgtacgcgacatctccgcgaagaaggccgccgaggcccgcatccgcgagctcaataccggcctggagcaccagatcgccgagcgtaccgccgaactgcgtcggttgaacgtactgctcggcagcgtgctgcaggcggcgtccgaggtgtcgatcatcaccctcgaccgcgacggcatcatcagcggcttcaatctcggtgccgagcggatgctcggctaccgcgccgacgaggtggtcggcaaggcctcgccgaccctgctgcacagcgagcgggagttgctcgcccgcggccaggagctgggcgaggagggtttccgcgtgctggtggcgcgggccgaacaggagggcgccgagacccgcgaatggacctatctgcgcaaggacggctcgccgctcagcgtgacgctttcggttaccgtcctgcgcgacgaggctggggcgatcaacggctacctgggcatcgccgtcgatgtcaccgaatggcgcaacgccgagcgcgagatggccgcggcgcgcgaccagttgcaaatggccgccgacgtggcgcgcctgggcatctggcgctggaacctggccgacgacagcctgcagtggaacgagcgcatgtgcgagctgtatggccagccgctggcgttgcgcgacggcggcctggtctacgagcattggcgcagccgcctgcatccggaagacctcgagcgcaccgaggccagcctgcgcgcggcggtggaggggcgcggcaactacgatgtgatcttccgcgtggtgctgcccgacggcggcatccgcttcatccaggccggcgcgcaggtcgagcgcgacgccgacggcaacccgctgcaggtcaccgggatcaacatcgatatcaccagcgaccagcaactgcaggcgcgcctgcgcgaggccaaggagcaggcggacgccgccagcgcggcgaagtcgtcgttcctggcgaacatgagccacgagatccgcacgccgatgaatgccgtgctgggcatgctgcaactggcccggcagaccgatctcaacgaacgccagcgcgactacctggacaaggccagctcggcggcaacctcgttgctcggcctgctcaacgacatcctcgactactcgaagatcgaggccggcaaactggtcctggaaatgctccccttcgagctggagccgctgatgcaggacctggccgtggtgctctccggcaaccagggcgacaaggacgtcgaggtgatcttcgacatcgatcccgagctgcccagcgcggtggtcggcgaccgcctgcgcctgcagcagatcctcatcaacctggccggcaacgcactgaagttcaccgcccgcgggcacgtcctggtgagcttgcggcgtctggcgcacgacgcccacctggtgcgcctgcgggtgctggtggcggacaccggcatcggcatcagcgcggaacagcagcagcgcatcttcgaaggtttcacccaggccgaggcgtccacctcgcgacgcttcggcggcaccggcctcggcctgttcatatgcaaacgcctggtcgacctgatgggcggtgaattgcgggtcgagagcgcgccgggcagcggtagccggttctggttcgacctggacctcgacgtcgcccacgaccaaccgctgcgtgcggcctgccccggggccggcgaaccgctgcggctgctggtggcggacgacaacctggtggccggcgagctgctcgaacgcacggtcggcgccctcggctggcgcgccgactgcgtcggcagcggcagcgaggcggtggcgcgggtccaggcggcgatggccgagggccgtcgctacgacgtggtgctgatggattggcgcatgcccgatctcgacggcctcagcgcggcgcaactgatccgccagttgcagggcgacctgccgccgcccatggtgatcatgatcaccgcctatggccgcgaggtgctggccgatgcgcgcgaccacagcgcgccgcccttcgtcgattttctcaccaagccggtcacgcccaagcaactggccgactcggtgctgcatgcgttgcacggcgaacagggcgccccggccaacccgccgccgcgcccggtggagcgcacccagcggttgcggggcgtgcgtctgctggtagtggaggacaacgcgctgaaccgccaggtcgccgccgagctgttgagcagcgagggcgcccgggtggccctcgccgacggcgggctggcgggcgttcagcaggtgctggaggcgagcgtgccgttcgacgcggtgctgatggacatgcagatgccggatatcgatggtctcgaggcgacccggagaatccgcgccgacgggcgcttcgccgggctgccgatcctggccatgaccgccaacgcctcgctggccgaccgcgaagcctgcctggcggcgggcatgaacgaccatgtggcgaagccgatcgacaaggagcgcctggtgctttgcctgctcggtcatctcggcaggagcggcgccaggggcgcgccggcaacggcagcggacgcgggcgaactggtcgaggcgcggggcgatatcgtcgggcgtttcggcggcagcctggagctgatcgtccaggtgttgcggcgcttcgttccggacatgcaggacctcttcgcccagctcgaacgccagctcggcgagggcgatgtccagggcagcgccgcgaccctgcataccatcaagggcagcgcttccaccgttggcgccagcgccctggccggccgtgccagcgagctggagcaggccctgcgccgcgccgatccgctgcgcggcatggaaatcctcgccggcatccgcctcgacgaactgcgcaccctgtgcgatgcctgcctgctccgcctgcaggcgatgttcggcgacgtgcaggcggagtcggcgagctga

SEQ ID NO: 320303 - DNA, 1191 bp, Pseudomonas aeruginosa
atggacagcacctccgaaacccgcagcggcagctggctgagcgtgatcgccctggccctggccgccttcatcttcaacaccacggagttcgtcccggtcggcctgctcagcgacatcggccacagcttcgagatgcccacctcgcaggtcggcctgatgttgaccatctatgcctgggtggtgtcgctggcctcgttgccgatgatgctgctgacccgcaatatcgagcggcgcaagctgctggtcggggtattcctgctgttcatcgccagccacgtgctgtccgggctggcctggagcttccaggtgctgatgctcagccggatcggcattgccttcgcccacgcggtgttctgggccatcaccgcttcgctggcggtgcgcgtggcgccgccgggacagcaggccaaggcgctagggctgctggccaccggcaccaccctggcgatggtcctgggcatcccgctggggcgggtggtcggcgaggccctgggctggcgtaccaccttcatggccatcgccggactctcggtgctgaccctgctctacctggcgcgctccctgccgctgctgccaagccagaactccggttccctgcgcagcctgccgatgctgttccgacgcccggcgctggtctgcctgtacgtgctgaccgtggtggtgatcagcgcccagttcaccgcctacagctacatcgagcccttcgccaagcaggtggcgcggatgagcggcgaggcgaccaccctgctgctgctgttgttcggcggcgccgggatcttcggttcgatcctcttcagccgctacagcgaggctttcccgcgaggcttcctgctggccgcgatcctcgtcttgggcagcagcctggcgctgctgttgccgctgtccgcgcagccgacctggctgatggcgctcagcctgctctggggcatgtcgatcatgtgcttcggcctggcccagcagtcccgcgtcctgcgcctcgcctcggacgccaccgacgtggccatggcgctgttctccggcctgtacaacgtcggcatcggcgccggcgcgctgctcggcagcgtggtcagcgaacgcatgggcctggcctcgatcggcaacgtcggcgccgtgctggcgctggccggcctgctgctcgccctgttcgccgcactgcgctacgcggaggcgctgaaaagcacgtcgttgtga

SEQ ID NO: 320304 - DNA, 510 bp, Pseudomonas aeruginosa
atgatcgaactcagaaccatcacccgcgacgattgggaaacctgcattgacctgaaggtcgcccgccaccaggcgcacttcgtcgcttccaacctctattcgctggcccagagccgctacctgccggggttccgcgcggtcggcatccaccacggcgggcgcatggtcggcttcgccctctacggccccgacgccgacgacggccactactggctctaccgtctgatgatcgaccgccgctaccagggcaaggggcatggccgcgccgccctgcaacggatcatcgccagcgtgcgccggacgaggcggcgcagcgatcgcctgatggtcgcctacgccgtcgacaacgacgtggcccgccagctttatcgggacgccggcttcgtcgaacagggcctcgcgccttggggcgagacgatggcctgcctgatgctgccggagccgtcccatcgctccgggaaggtcgccggagcgccgggcgggcgtgcagcgcacggcgtcccggcgtag

SEQ ID NO: 320305 - DNA, 1386 bp, Pseudomonas aeruginosa
atgtctcatcgccctgtgatcaacgcctcggtcagtccgaaaggcacgctggaaaccctctcccaacgcgaagtgcaacaactgagcgaaaccgccaacggcaagacctaccaactgttccgccagtgcgccctggcgatcctcaataccggcgcccacagcgacaacgccaagaccatcctcgacgcctacaaggacttcgaggtgcgtatccaccagcaggaccgaggcgtgcgcctggagctgatcaacgcgccggccgacgccttcgtcgatggcgagatgatcgccagcacccgcgagatgctgttcagcgccctgcgcgacatcgtctacacccagagcgggctggacagccagcacgtcgacctggacagctcccagggcctcaccgactacgtcttccagctgctgcgcaacgcccgtacgctgcgccccggcgtcgagccgaagatcgtcgtgtgctggggcggccactcgatcagcagcgaggaatacaagtacaccaagagggtcggccacgaactcggcctgcgcagcctggatgtctgcaccggctgcggaccgggggtgatgaaggggccgatgaagggcgccaccatcagccacgccaagcagcgcatcgtcggcggtcgctacctgggcctgaccgaaccgggaatcatcgccgccgaggcgccgaacccgatcgtcaacgaactggtgatactcccggacatcgagaagcgcctggaagccttcgtccgcgtcggccacggggtcatcatcttccccggcggcgccgggaccgcggaagagttcctctacctgctgggcatcctcatgcacccggacaaccaggacctgcccttcccggtcatcctcaccggcccccgcagcgccgaagcctacctgcagcagctccatgaattcgtcggggcgaccctcggccatgcggcgcagcgccactaccggatcgtcatcgacgacccggccgaggtggccaagcagatggcccagggcctgaaggaagtgaagcagttccgccgcgagcgcaacgacgccttccacttcaactggatgctgaagatcgatgaaagcttccagcgcccgttcgagccgacccacgagaacatggccagcctccagctcagccgcagcctgccgccccacgaactggcggccaacctgcgccgcgcgttttccgggatcgtcgccggcaacgtcaaggacaacggcatccgcatgatcgagcaatacgggccctacgagatccacggcgacccggcggtgatgctgccgctggaccgcctgctgcaggccttcgtcaagcagcaccggatgaagctgcccggcggcgcggcctacgtcccctgctaccgggtggtgcagaccgaggcggcctga

SEQ ID NO: 320306 - DNA, 588 bp, Pseudomonas aeruginosa
atgtccccatctccatcgccagccctcgccgcactccgcgacgccacccgtgacctgcacgcagaactggaccgccgttcgccgttgggcgacgacgatctcgacgaccgcgcctacctcgaccatgccggacgcatccttggctggctggagcctctggagcgcgcgctgcgcgacaaccgcagcggctggccggcggcgctgcgggccgacgcgcggctggtcaagagcgcctggctggaaagcgacctgctggccggcggcatgagccgcgcgcaggtggaggcgctaccgcgctgcgccgacctgccgaatgcgacacaggccgcggaggtcttcggggtggcctacgtgatggaaggcgcgacgctgggcggcgcgtatctctacaaacgactagctccacgcctgcccggtctgccgctacagtggttgcggggctacggccaggcaaccggggtgcgctggcaggagtttctcgaacagctcgcccggcagatcgacagccccgaagccatcggccttgcgcaggatgcggcacaggctacattcctttcgtttcgtcgatgggttctcgacgaagcctga

SEQ ID NO: 320307 - DNA, 2187 bp, Pseudomonas aeruginosa
atgacgagcatcaccccggttaccctggcgaactgcgaggacgaacccatccacgtgcctggcgcgatccagccgcacggggcgctgatcgccctgcgcgcggacggcatggtcctcgcggcaagcgagaacatccaggcgctattgggtttcgtcgcctcgccgggttcctacctgacgcaggagcaggtgggaccggaggtcctgcgcatgctcgaagagggactgaccggcaacggcccatggtcgaacagcgtcgagacgcggatcggcgaacacctgttcgacgtgatcggccacagctacaaggaagtgttctacctggagttcgagatccgcaccgcggacacgctgtcgatcacctccttcaccctcaacgcccagcgcatcatcgcccaggtccagttgcacaacgacaccgccagcctgctcagcaacgtcaccgacgaactgcgccggatgaccggctacgaccgggtgatggcctaccgtttccgtcatgacgactccggcgaggtggtcgccgagagccgtcgcgaagacctcgaaagctacctggggcaacgctacccggcctcggacatcccggcccaggcgcgtcgcctgtacatccagaacccgatcaggctgatcgccgacgtggcctatacgccgatgcgcgtgtttcccgcgctgaacccggagaccaacgaatcgttcgatctcagctacagcgtgctgcgcagcgtttcgccgatccactgcgaatacctgaccaacatgggcgtgcgcgcctcgatgagcatctccatcgtggtcggcggcaagctctggggactgttctcctgccatcacatgtcgcccaaactgattccctacccggtgcgcatgtcgttccagatcttctcccaggtctgcagcgccatcgtcgagcgcctggagcaggggcgtatcgccgaactgctgcgcgtgtccaccgagcgcaggctggccctggctcgccgcgcgcgggacgccgacgacctgttcggcgcactggcccacccggacgatggcatcgccgcactgattccctgcgacggcgccctggtcatgctcggcggccgcaccctgagcatccgcggcgacttcgagcgccaggccgggaatgtcctgcaacgcctgcagcgcgatccggaacgggacatctaccacaccgacaactggccgcagcccagcgaggactctccggacggcggcgactgctgcggtgtgctggcgatccgtttccaccgccaggaatcgggctggatcttctggttccgccacgaggaagtgcaccgcatccgctggggcggcaagccggaaaagctgttgaccattggcccctccggcccgcggctgaccccgcgcggctcgttcgaggcctgggaggaagtggtccgcggccactccacgccctggagcgaaaccgacctggcgatcgccgaaaagctgcgcctggacctgatggaactgtgcctcaaccatgcggccgaggtcgaccgcatgcgccagcgcctgatcgcggtgctcggccacgacctgcgcaacccgttgcagtcgatctccatggcggcggccctgctgtcctccagcgacacccgcaccaccgaactgcgccaacacatttccgcgtccagcagccgcatggaacggctggtcagccagatcctcgacatgagccgcctgcaatcgggcatcggcctcaccgtgaacccggtcgacaccgacgtctcgcaactggtgcagcagatcgtctgcgaaaccgacgtcgcctatcccggcctggtgatcgagatcgccatcgacccgcaggttcgtgccgtggtcgacccggaccgctacgcccaggtcgccgccaacctgctgagcaacgcccgtcatcacggcctgcccggccggccggtgctggtaaccctgacccgccagggcgacgaggtgtgcctgagcgtgctcaacgaaaccagcggcctctccgaagcgcaactggccaacctgttcgaaccgttcaagcgcgagtcggcggacaaccagcgcaaccgcaacggcctcggtatcggcctgtacatctcccaggccatcgcccaggcccaccaggggcgtatcgacgtggactgccgcgacgacgtcatcaccttctgcctgcgcctgccggtgcgccaggcggagaccggctcctcgtcctga

SEQ ID NO: 320308 - DNA, 570 bp, Pseudomonas aeruginosa
atgccccgcctccgcctccggaccgtcctcgcctgcctcgccgtgttctgcgcggctcccgcactggccagggtcgaagtgcattcgctgcaacacaagagcatggggcgggtgctgacggtccgcgtctcggaggagatcgcgccgggcgactacgagacgctgctcaagggtttgcgcaacaatccgggaacctactcgcgcaagctgctcctgctgaacagcatcggcggcagcgtgccggaggcgatccgcatgggccgcctgctgcgcgaatccggcttcgacgcgctggtgccgtcgagcagcgtctgccagggcacctgcgtctacctgctggcggccggcaagcgcaagaccgtacgcggctacgtcggcctgcaccgtccctactacgcccacggcgactcgctgcactcgcgctcggccaacggcatgcgctacgactccgccgcctacttccgcgaaatggatatccccagcaccttggtacaggccatgcaaagcaccgatcccaaacggatgcgcgtgctttcggcgaaggaactggcgcagtaccggctgaactga

SEQ ID NO: 320309 - DNA, 807 bp, Pseudomonas aeruginosa
atgcatgatgcagccacctccatgccgccgcaggctccctcaacctgggccgactaccttgccggctaccgctggcgagggcagggcgaaggatgttccgcggccacggtccaccgcctggaggctgcgcggcggccgaccctgttcgtcaagcaggaagtgctgtccgcacatgccgagctgcccgccgaaatcgcccgcctgcgctggctgcacggtgccggcatcgattgcccgcaggtgctgaacgaaacccagagcgacggccggcaatggctgctgatgagcgcagtgccgggggacacgctgtccgcgctggcgcagcgcggcgagctggagcccgagcgcctggtgcgcctggtggccgccgccctgcgccggctgcacgatctcgatccggccgcctgtcccttcgaccatcgcctggaacggcgtctggacaccgtgcgccagcgggtcgaggccgggctggtggacgaggcggacttcgacgacgaccatcgcggtcgcagcgccacggagctgtaccgcctgctgctcgaccggcgtccggcggtcgaagacctggtggtcgcccatggcgacgcctgcctgccaaatctgctggcggaggggcggcgcttcagcggcttcatcgattgcgggcggctcggcgtcgccgaccggcaccaggacctggccctggccgcgcgggacatcgaggccgaactcggcgcggcctgggccgaggccttcctcgtcgaatacggcggcgatatcgacggcgaacggctggcgtacttcaggctattggacgagttcttctag

SEQ ID NO: 320310 - DNA, 912 bp, Pseudomonas aeruginosa
atgccagagcgccagccgatccccaacatcaacatcgggcaggtctacgaccagcgctatgccgacgccgaggtgcactacgatgcgctgggcaacctggccggattcttcggtcgcaacatgccggcgcaccggcacgaccgtttcttccaggtgcactacgtgaagaacggcgcggtgcgggtctatcttgacgagcgccagtacctggagtcggggccgatgttcttcctcaccccgccgaccgtgccgcacgccttcgtcaccgaggcggacgccgatggccatgtgctgaccgtgcgccagcaactggtgtggagcctcaccgaagcagagccgggcctggcgcccggcccgcaggtggcgccggcctgcgtggcgctgggcaacctggagggcggcgcggccgaggaggcggcgcgcctggcgctgctcttcgagcagttgcgcagcgagtcgatggccagccgctccggccgccagcaggcgctgctggcgctgacccggctggtcatgatcagcctgctgcgtctctcggccaattcggtggctgcgcggccgatgcgccacgaagacctgcagatcttccagcgcttcaacgcgctgatcgaggagcgctatgccgagcactggccgctgtcgctctacgccagccggatcggcgtcaccgaggcgcgcctcaacgacgtctgccggcgcatcgccgacctgccgtcgaagcgcctggtgtatgaacggcttatgcaggagtccaagcgcctgctgctgttcaccggcggctcggtgaacgagatctgctaccagctcggcttcaaggacccggcctacttctgtcgtttcttcgtgcgttacgcagggcttacccccagcgcttaccgccagcgacaggccgacggggagtcccgtcgctga

SEQ ID NO: 320311 - DNA, 660 bp, Pseudomonas aeruginosa
atgagccgcgcactgaatgacgtcgccgccggcaccctgttcggcgtcgcgctgaactacaagggcctgctcgacagccgcctgccggagttccagcagccgccctaccagaagccgccagtgaagccggtgttgttcatcaagacaccgaatacccgcaacgagcacgacgccccggtgctcttcccgcgcggcgtcgagcgcctgcaaccgggcccggcgctgggcgtggtgatcgctcgcgacgccagccgggtgaaggaggaagaggccatggcgcatgtcgccggctacgtgatcgtcaacgagttcagcctgccggaagacagctactaccgcccggcggtgaaagccaagtgccgcgacggcttctgcccgttcggtccgcaactggtgccgacgcaggagatcgccgatccccatgcgctggagctgaagctgtacgtcaacggcgaactgcgccaacgcaacaacaccgccaacctggtgcgcgacatcccgcggctgatcgccgagatcagcgagttcatgaccctgcacgccggcgacgtgctgatcaccggcacccccgaagggcgagtcgacgtgcatcccggcgaccgcgtcgaggtcgagatcgacggcctcggccgcctcgccaacagcatcgtcgcggaatga

SEQ ID NO: 320312 - DNA, 780 bp, Pseudomonas aeruginosa
atgaaacacgcacgcatccgctaccagggccgggttcaccaggtcaccgtggaagacgccaacgccgtccgcctggccgacggcaccctgctcgccgaggaccgggtggagtggctgccgccggccaccgggagcatgttcgccctcggcctgaactacgccgaccatgccgccgaactgtcgttcaaggcgcccagcgaaccgctggcgttcatcaagtcgccgggcacctacaccggccaccgccaggtcagctggcgtccggacaacgtcgactacatgcactacgagtgcgaactggtggcggtgatcggcaagccggcgcgcaacgtccgccgcgaggacgccctcggctacctggccggctacacggtgtgcaacgactacgcgatccgcgactacctggagaactactaccggcccaacctgcgggtgaagaaccgcgacgccaccaccccggtggggccgtggatcgtcgacgcggccgaggttcccgagccgaaccggctggtcctgcgcacctgggtcaacggcgagctgcgccaggaaggcagcaccgcggacatgatcttcgacattccctacctgatcgaatacttctccagcttcatgaccctgcagccgggcgacatgatcgccaccggcaccccggaaggcctgtccgacgtggtccccggcgacgaagtggtggtggaggtggaaggcgtcggtcgcctggtcaaccgaatcgtcagcgaggccgaattcttccgcgcccgcgcacaggagcacgcagaatga

SEQ ID NO: 320313 - DNA, 1461 bp, Pseudomonas aeruginosa
atgatcaaacactggatcaatggccgcgaggtcgaaagcaaggacgtcttcgagaactacaacccggccaccggcgagctgatcggcgaggtcgccagcggcggcgcggcggaaatcgacgcggcggtggcggcggcccgcgaagccttcccgaaatgggccaataccccggccaaggagcgcgcgcgcctgatgcgccggctcggcgagctgatcgaccggaacgtgccgcacctggcggaacttgagaccctcgacaccggcctgccgatccaccagacgaagaacgtgctgatcccgcgcgcctcgcacaacttcgagttcttcgccgaagtctgcacgcggatgaacgggcacagctatccggtcgacgaccagatgctcaactacaccctgtaccagccggtgggcgtctgcggcctggtctcgccgtggaacgtaccgttcatgaccgccacctggaagaccgcgccgtgcctggcgctgggcaacacggcggtgctgaagatgtccgagctgtcgccgctgaccgccaacgagctgggccgcctggtgcacgaggcgggcattccgccgggggtgttcaacgtggtccagggctacggcgccagcgccggcgacgcgctggttcgccaccgcgacgtgcgcgcggtgtccttcaccggcggcaccgccaccgggcgacggatcatggaggcggccgggatcaagaaatactcgatggaactgggcggcaagtcgccggtgctggtcttcgaagacgccgacctcgagcgggcgctggacgccgctctgttcaccatcttctcgctgaacggcgagcgctgcaccgccggcagtcgcatcttcgtccaggaaagcgtctacccgcagttcgtcgccgagttcgccgcgcgcgccaggcgcctgatcgtcggcgatccgcaggacccgaagacccaggtcggctcgatgatcacccaggcccactacgacaaggtcaccggctacatccgcatcggcctcgaggaaggcgccaccctggtggccggcggcctggagcgtccggccggcctgccggcgcacctgagcaaggggcagttcatccagcccacggtgttcgccgacgtggacaaccgcatgcgcatcgcccaggaggagatcttcggcccggtggtctgcctgatcccgttcaaggacgaagccgaggcgctgcgcctggccaacgacgtggaatacggcctggcctcctacatctggacccaggacatcggcaaggcccatcgcctggcacgcggcatcgaggccgggatggtcttcatcaacagccagaacgtgcgcgacctgcgccagccgttcggcggggtgaaggcctcgggcaccggacgcgaaggcggggaatacagcttcgaggtattcgccgagatcaagaacgtgtgtatatccatgggcagccatcacatcccccgctggggcgtgtag

SEQ ID NO: 320314 - DNA, 924 bp, Pseudomonas aeruginosa
atgggcaaagtcgctctggctgccaagatcacccacgtaccctcgctgtacctgtccgagctgcccggcccgcgccacggctgccgccagccggcgatcgacgggcaccgcgagatcggccggcgctgccgcgaactgggggtcgacaccatcgtggtgttcgacacccactggctggtcaacgccggctaccacatcaactgcgcgccgcacttcgaggggctctacaccagcaacgagttgccgcacttcatcgccaacatggagtacggcttccccggcaacccggagctgggccgcatcctcgccgagggctgcaacgcgctcggcgtggagaccctggcccacgacgccaccaccctcggcccggagtacggcaccctggtaccgatgcgctacatgaaccaggaccgccacttcaaggtggtctcggtctccgccctgtgcaccgtgcattacctgaacgacagcgcgcgcctgggctgggccatgcgcaaggcggtggaagagcactacgacggcacggtggcgttcctcgccagcggctcgctgtcccaccgcttcgcccagaacggccaggcgccggacttctccgaccgcatctggagcccgttcctcgaggtcctcgaccatgaagtcgtgcagatgtggcaggaaggccgctgggcggaattctgcgggatgctcccggagtacgcctccaagggccatggcgaaggcttcatgcacgacaccgcgatgctcctcggcgccctcggctggtcggcctacgacggcaaggcggaggtggtgacgccctacttcggctcctccggcaccgggcagatcaacgcggtattcccggtcaccgcccaggacggctcggcgatccccgccgcccaagccggcaacccggccggcgccagttgcgccagccgcctctga

SEQ ID NO: 320315 - DNA, 393 bp, Pseudomonas aeruginosa
atgccgcacttcatcgccgaatacaccgacaacatcgaagccgaagccgacctgcccggcctgttcgagaaggtccatgcctgccttggcgccagcggcgttttcccgctcggcggcatccgcagccgcggcgtgcgcctggacacctggcgcatggccgacggcaagcacgactacgccttcgtccacatgaccctgaaagtcggcgccggtcgcgacctggagactcgccggcaagtcgccgaggcacttttcgaggtgatcaccgcgcacttcgccgagctccaggcgcgacgcctgctggcgctgtccttcgaactcaccgaactggacgcggagctgaactacaagcgcaacaacgtgcatgaattcctgaacaacccggcggactga

SEQ ID NO: 320316 - DNA, 1305 bp, Pseudomonas aeruginosa
atgagcacagccagcaccctgaacagcaccaccctgcctctcagcgacagcacccacgaccgcgtcacctggcggctgatgccgctgctgctggtgtgctacgtcttcgcccatctggaccgcatcaacatcggtttcgccaaattgcagatgagcaccgacctgcacttcagcgacaccgtctacggtctcggcgccgggctattcttcatcgcctatgcgctgttcggcctgcccagcaacctgatgctggaacggatcggcccgggccgctggatcgcctgcctgatgctggtctggggctgtctctccaccgccatgctgctggtggagaccgcgcgcggcttctacctgctgcgctttctcctgggggtcgccgaggccggcttcttccccggtatcctggtctacctgaaccgttggttcccggcgcgccgacgcgggcagatcaccgccctgttcgccatcgccgtgcccatggccggggtgatcggcggaccgctttcgggctggatcctagaaggcttccatgacgccctcggactgcgcggctggcagtggatgttcctgatcgaaggcctgccggttgtgttgctcggcgtggtggtctggtgctcgctgccggaaagcttcgaacgggtgacgtggctcagcgacgaacagaagcacctgctgcgcgaggaactggccggcgaggagcagcgcaagaccatcacctccttctccggcatcttcagcaatccgcaggtgtggctgctggtggcgatctatttcgcggtgatgctggcggtgaacaccatcgcgttctggatgccgagcctgatccatggcgccggcatcgcccaggacagccgcatcggcatgctcagcgcggtgccctatctcgccggctgcgccttcatgatcttcatcggccgttcctccgaccgcctgcgcgagcgccgctggcacctgggcattccgttgctgatggccgccgccgggctcagcctggcggccctggcaccgaccagcgcctggctggtgatgggcggcctggtgatcgccgggatgggcgccagcgccgccctgccgatgttctggcaactgccgccggccttcctttccagcgccaccctggccgccggaatcgccctgatcagttccttcggcagcatcgccgccttcctcgcgccctacctgatcggctggatgcgcgacaccacccagagcgccagcctggccctgtacctgctggccatcctcatcgccctcggcgccggcctggtcctgcggacccccgccgccgtggtcaacccacgctga

SEQ ID NO: 320317 - DNA, 804 bp, Pseudomonas aeruginosa
atgctcgatccccgtctgatccaggaagccgccaaccgcctcgacgccgccgaacgctcgcgccagcaggtaaggcagttctccctcgactacccggacatcgccatcgaggacgcctacgccatccagcgcgcctgggtcgagcgcaagatcgccgacgggcgcgtgctcaagggccacaagatcggcctgacctcgcgcgccatgcaggtctcgtcgaacatcagcgagccggactacggcgccttgctcgacgacatgttcttcgaggagggcagcgacatccccttccagcgcttcatcgtgccgcgggtcgaggtggagctggcgttcatcctcggcaagccgctgaagggaccgggctgcaccctgttcgacgtgctcgaggccaccgagtgggtgatcccggcgctggagatcatcgatgcgcgcatccagcaggtcgacccgcaaacgaaagtcacgcgcaaggtcttcgacaccatctccgacaacgccgccaacgccggcgtggtgatgggcggccgggccgtacggccaggcgatatcgacctgcggcgggtaccggcgatcctctaccgcaatggcgtgatcgaggagtctggcgtctccgccgcggtgctcaaccacccggccaagggcgtcgcctggctggccaacaagctggcgccctacggcgtctgcctggaggccggccaggtgatcctcggcggctccttcacccgcccggtggcggccgcgccgggggacaccttccacgtcgactacgacctgctcggcagcatctcctgccgtttcgtctga

SEQ ID NO: 320318 - DNA, 807 bp, Pseudomonas aeruginosa
atggacctgcccgtcaatcgcttcaagcaacgcctgcgcagcggcgaggcgcagatcggcctgtggctcggcctggccgatccctactgcgcggagctggccgccaacgccggcttcgactggctgctgctggacggcgagcacgcgcccaacgacctgcgcagcctgctcggccagttgcaggcgctggcgccctaccccggccagccggtgatccgcccggtgcagggcgacactgcgctgatcaagcaattgctcgacatcggcgcgcagaccctgctggtacctatggtcgacagcgccgcccaggccgaagggctggtgcgcgccgtgcgctatccgccggcgggcgtacgcggggtcggcagtgcgctggcccgggcctcgcgctggaacagcgtggcggagtacctgaaccacgccgacgagcagatgtgcctgctggtccaggtggaaaacctggagggcctggccaacctcgacgcgatcgccgccgtcgagggcgtcgacggcgtgttcatcggtccggccgacctcagcgcagccatgggccatcgcggcaatccaggccatcccgaggtgcaggcggccatagaggacgccatccaccgcatccgcacggccggcaaggccgccggcatcctctccgccgacgagacactggcgcggcgctacctggagctgggctgcgcgttcgtcgcggtgggcgtggacaccagcctgctgatgcgttcgctgcgcgagctggcggggcgcttcaagggcggcgcgccggcgccgtccgccagttcctcggtctacggctga

SEQ ID NO: 320319 - DNA, 489 bp, Pseudomonas aeruginosa
atgaacaacctgatccgtttgcgcgatggcgtcgccgaggtctgccgcgacgatccctggcaactcctgcgcgagttgcccgacgcgctgccgccggggccgttgctgctgcctctggcggcctggctggagcgccgcggcgaggccggagccgccgcgccctggctggcgccggacgatgaggtggaggccttgctgccgcacttcgccgagctgccgctggtcgccgtcgatttccccagcttccgcgacggtcgtggctacagcctggcctacctgctgcgcgtgcgcctggggtggagcggcgagttgcgcgcagtgggcgacgtgttgcgcgaccagctcagccatatgcgccagtgcggcttcgatgccttcgcggtgcgcgaggacaagaacgtcgaggacgcgctcaaggggctggcgggcttgagcgtgctctacggccgctcggcgatcgagccgcgaccgttgttccgccgacgctag

SEQ ID NO: 320320 - DNA, 1674 bp, Pseudomonas aeruginosa
atgtaccagtacgacgaatacgaccaggcgctggtgagcgagcgggtggcgcagttccgcgaccagatcgcccgccgcctcgacggcgaactgagcgaggaggagttcctcccgctgcgcctgcagaacggcctgtacctgcagaagcacgcctacatgctgcgcgtggcgattccctacggcaccctctcgtcgccgcaactgcgcgccttggcgcacgtcgcccggcactacgaccgcggctacgggcacttcaccacgcggcagaacatccagttcaactggatcgaactggagcaggtcggcgatatcctcgaacacctcgccggcgcgcagatgcatgcgatccagacctccggcaactgcgtgcgcaacatcaccaccgaagccttcgccggggtcgccgcggacgaatggaccgacccccggccgctggccgagatcctgcgccagtggtcgacggtgaacccggagttcctgttcctcccgcgcaagttcaagatcgccctcagttcggcggtggaagaccgcgccgcggtgcagatgcacgacatcggcctgtacctttaccgccaccccgacgccggcgagttgcgcctgcgggtcctggtcggcggcggcctgggacgcacgccgatgctcggccaggtgatccgcgacgacctgccctggcagcacctgttgtcctacgtcgaggcgatcctgcgggtctacaaccgctacggccggcgcgacaacaagtacaaggcgcggatcaagatcctggtcaaggcgctgggcatcgaggctttcgcccgcgaggtggaggaagagtggcagcacctgcgcgacggcccggcgcaactgactgccgaggagtgccagcgggtcgccgagcgcttcgtattgccgcgctacctgccgccggccggcggcgagctggcctacggcagcgcccgtgcggccgatccggccttcgcccgctgggcctcgcgcaacgtccaggcgcacaaggtgccgggctacgcctcggtggtgctgtcgaccaagcccggcgccagcgcgccgccgggcgacgtcaccgcggagcagatggaacgcgtcgccgactgggccgagcgctacggtttcggcgagatccgtgtggcccacgaacagaacctggtgctccccgacgtgcgcctggagaacctccacgcgctgtggcgcgaggcctgcgcagccggcctcggcacgcctaaccaaggcctgctcagcgacatcatcgcctgtcccggcggcgactactgcgcgctggccaacgccaagtcgatccccatcgcccagggtatccagcagcgcttcgaggacctcgaccacctgcacgacatcggcgagcttagcctgaacatctccggctgcatgaacgcctgcggccaccaccacatcggcaacatcggcatcctcggcgtcgacaagaacggcagcgagtggtaccaggtcaccctcggcggcgcccagggcaaggacagcgcgctgggcaaggtgatcgggccatcgttcagcgctgccgaggtgccggcggtgatcgaacggatcgtcgaaaccttcaccgacctgcgggtcggcccggaacgtttcatcgacaccttcaaccgggtcggcctggagccgttcaaggcccgggtctacgccaggatggaggaaccggcatga

SEQ ID NO: 320321 - DNA, 1431 bp, Pseudomonas aeruginosa
atgagcgaaagaattcccgcgatccaggtcgagcccgccgcaccggccgctccgtcgaaacagccgcccgcgcccggcaagctgccgtcggcggtgaacggcccgatctacacccgcagcttcaccggtctgttccgcaacttccgccgcctcggcggcggcctgctgttcctgctgttcttcggcaccctgtggctgaactggaacggccgccaggcggtgctctgggacctgcccgaacgcaagttctacattttcggcgcgaccttctggccgcaggacttcatcctgctctcggcgctgctgatcatcgccgccttcggcctgttcttcatcaccgtgttcgccggccgcgtctggtgcggctatacctgcccgcagagcgtgtggacctgggtgttcatgtggtgcgagaaggtcaccgagggcgaccgcaatgcgcggatcaagctcgaccagggtccggcgagcgccgccaagctcttgcgcaaaacggccaagcacgcgctgtggctgggtgtgagcctggtcacggcgatcaccttcatcggctacttcactccggtgcggccgctggtggccgacctgttcagcttccagctggacctggaaagcctgttctgggtgctgttcttcaccgccgccacctatgtcaacgccggctggctgcgcgagcaggtgtgcatccacatgtgcccctactcgcgcttccagagcgtgatgttcgacaaggacaccctgatcgtgtcctacgacgccgcccgcggcgagtcccgcggcgcccgcaagaaaggcagcgatccgcgcgcccaagggctcggcgactgcatcgactgccagcagtgcgtgcaggtctgccccaccggcatcgacatccgcgacggcctgcagatcgcctgcatcggctgcgccgcctgcgtcgacgcctgcgactcgatcatggacaagatgggctatgaacgcggcctggtgcgctacacctcggaacgcgccctggaaggtggccagacccgcttcctgcgtccacgcctggtcggctacgcggcggtgatgctggcgatgatcggcgccttcgtcgtcgccctggatgcccgcccgctggcctcgctggacgtgacccgcgaccgtgggctgttccgcgagaacgccgccgggcagatcgagaacatctacaccctcaaggtcatcaacaagacccagcagccgcagcgctatcgcctgcaactcgacgacgcgccggagttccgcctgcagggcgagcacaccctgagcctgaagcccggcgagatcctcgacttcccggtgtcggtggcctctaccgccgaacgcgccagggccggctcgcaaccgctggcgttcagcctgcgcggcatcgacgacccgagcctggcggtcggcagcaccagcaccttcgtttcgccggcgcgctga

SEQ ID NO: 320322 - DNA, 1503 bp, Pseudomonas aeruginosa
atgaggcatgacaacacggtcccggcgcgcatagagtgggcgccagcggccgtgcccacggccagccaggacagcggccaggacaagatgaagcgctacgagaaattcgccgacgagattgccgagctgatccgcaccggcgtcctcgcccccgggcagaaggtgccctcggtacggcacgccagccgtacctacggggtcagcgcttccaccgtgttccaggcctactacctgctggaaagccgtgggctgatcatggcccgcgcacgctccggttacttcgtctgccagcacgtgcagcggccgctgccggaaccggagatcagcccgcgccaggccgacgccaccgaggtcgacgtcagcgagctggtgttctccgtactcagttcgatcaaggacccggacaccgtacccttcggctcggcgttccccagtccgcaactgtttcccctgccgcgcctggcgcgctcgatggcccacgcggtgcgcgacatggacccgcagtcggtggtcgccgacatgacgccgggcaaccatggcctgcgccggcagatcgccctgcgctacatggtcggcggcctgctgctgccggtggaagaactggtcatcagcaacggcgcgctggaggcactcaacctctgcctgcaggtggtcacccgtcccggcgacctggtggccatcgaggcgccggcgttctacgccaccctgcaggtgctggaacggttgaagctgaaggcggtggaaatccccgtgcatccgcgtgaaggcatcgacctggaagtgctcgccgacagcctggagcgcctgccgatcaaggcctgctggttcatgagcaacttccagaacccgatgggcgcgagcatggacgacgagaagaaacgcgccctcgccgagctgctggcgcgccaccaggtgccgatgatcgaggacgacgtgtacgccgaactgtacttcggccagcaggcgccgaaaccggtcaaggcctacgaccaggaaggcctggtgatgcactgcagttccttctccaagagcctggcgccgggctaccgggtcggctgggtggccggcggacgctacgccgagcagatcgagcgactgaagctgatgaccagcctgtcggcgtcgatcccggcccaggcggccatcgccgactatctccagcacggcggctacgaccgccacctgcgcaagctgcgctacgccctggagacccagcagaacgccatgctcgcggcggtggcgcgttacttccccgagcagacccgggtcagccgtcccagcggcggctacttcctctggctggagttgcccgaggcggtcgactcgctgcgcctgttccaactggccctggcccagggcatcagcctcgccccggggccgatcttctccgccacccgccgcttcgcccattgcgcccggctcaactacgggcacccgtggagcgcgcggcaggagaaggcgatggagacactcgggcggatcgcccagtcgctggcgggatga

SEQ ID NO: 320323 - DNA, 474 bp, Pseudomonas aeruginosa
gtggaggcgaacagctacagcgagttcaaggccgaggagcatcacaccgtgcacggagagcgcaaggtggagctgaaggccgatgaccacctgacggtcggcgacagccagcacgtgaagctcggtcgtgcctacctggccagggccgggcgcgagatccacctgaaggccgggcagaagatggtgatcgaggctgacagcgaactgacggtgaaggccggcggcagcttcatccggctcgacgcaagcggcatcgccatcagcggcccgctggcacggatcaatgcaggcggcgcgccgggaagcggctcggggatcgcgatcaagatgccgcgggtgccgggcatggccgaccaggacagccccggcgcgccacccgaggcggtcgcggccaacctaccgccgcggcaaccggtctgcgaagagtgcctgctacaggcgaagaaaagaggccaggcgctcgccgagcgctga

SEQ ID NO: 320324 - DNA, 816 bp, Pseudomonas aeruginosa
atgacgccgaacccccgccattgggcccgcgagctgtggcagcgctcccgcgatcgcggcttgcagacccacatcgatgtattggtcgatgccaccgggctggacgactatcccttgctcgccgagcatgcgcggcaaagcgatcctccggcgctgttcaaattgctggagcaaaccccggaggccgccctggccgacgagggcccgctgctgctgcgcctggaagacggccacgcggcctggctggacgaactgctcgaacgcatcgactgccgccgccacctgatgctcctgttcagcccctggccgttgccgcgcctgggcgagcacctgcgcagctgcacccaggccgagtggaaccagggtcgttccagcggcgtactgcgtttctacgagccgggcctgttcatggcggtcagcgacatgctcgatccccggcagagccgttacctgcatgccccggtttccagctggcactggctggaccgcgacggccggccgagggcgctggccggtcattaccaggcccacgagacgccgccgctgcaagcggccctccgcctggaagcgcaccaggtcgctgccttgcgcgcctggagcgaggccgaagcctaccgccgcgaatacttcgtgctgccccgcgagcatggactgggcagccaggaaagcctgctccagcatctggtccaggcgcacctggccgccgaccgccagggcttgcaggacttcgaccagcgcgatgccttcgtcgcccaatggctacgcgaacagacccccggccccggcttttccccggcgggaacgagtcgcgcatga

SEQ ID NO: 320325 - DNA, 243 bp, Pseudomonas aeruginosa
atgcacgcaacgtttcagaaaagaacagtcttccggcaggatggtcggcaggcactgggagagggcctcatcgggcaggcgcatggtgtcatcggcccaatccatatgcccggcagcgaacggcgcactatccgccagcccaactgccgccacggtatcgaaaaggccgaggaactcgatcgagatcggcagaccggcaaagcgatattccacccgaccatcggcatcgctgacccgggttag

SEQ ID NO: 320326 - DNA, 1341 bp, Pseudomonas aeruginosa
atggtgcccaagattgaagcggagttcagcgtctccgaagaactcgccacccgtttcaacgcctggcaggcccaggccaaggccggccccctggaagaggtgatccgtcgcgagaccgcgttgatcaccgcctggcgcatcgaccgctatgccggcgggctgcgcaacaaggcgttcttcgccaatgtcccgccggacatgccggaagcccagcagaaggcctgggaggccctgtacaagcggcgtagcctggagtacgcggccgcccagcagggcaagccgctcccgccgatgagcgccgccgaacaggcggagtgggatcgcaacgtggcgctgatcggcggcgaggacaaactgcgcgacctgcgggtggagaagcagttcgatccgccgctggaccagcgccaactactcggcgccgccgccgagttcgcccatgactacaagggcgactggggcgtgctcgacgacggcatgacggtgggcggagtgatcgacctgctgctcggcggcaccgtattcctgatcaacgaggaagacgaagccgaggaatacagccagatccaccgcgacggcagcgcgcgctaccaccagttgttcagcgctcccgaccgggtggcgccgggccaggaaaagctggtggcgctgttcgacgaacaggtgcacgactcccgcgcctggttcatgaacacttcggcgataggcccgcgagaacccttcaccgactacttccgctatcgcctggtgcatttcgacaacgagtcgaacaagcggctctcggtactggccaccgccgggcgggtggtaggcgtaggggtgatgctggccagcgtcggcctcagcgtcaagcgtcgcgatccgcggatgctgctcgggctgttcctgccatcgctggcgcgtccgctgctgagcggcaaggtcggcctgccggagatcagcgccttcgacccgctgaccgggatcgccttgccgatggtcggcggggcggcgctggacaacctgcgggccttcacctgcgagcctggcgacaaggtcgagcagatcggccagttgccgccaccgccgccgctggcggtcgcggcggtgcaatcgcccgcattgcagcaggtgctgctggctcagcagaccgtggaggcgctcaaggcgcgcgacctgggcagcctggccgggctggtggccaaggccgaactcacccaggcgcccgcggcggcgaccccggcctggctcgccgaggcgaagcaggccttgcaggacatgggcacggagcaggcgcaaccgccgggccccggctcggcgccgggctggctaaagcgcggcaaggacctgatggaatcgctttga

SEQ ID NO: 320327 - DNA, 414 bp, Pseudomonas aeruginosa
atgcgcccgatgtacgccgtagcgatccttttcctcctggccggctgttcctcggttcccgccgagaagacccgggcgatccccgccgaacgcctgctcggctaccagcaaccggtgagcggtggcggccggctggaagtccaccgcgactatggctacctgggcggcggctgctacgtggcgttccttatcgaccgccaggtcgccgcgcgcatcggcgtcggcgaggaagccagcttccaggtgccggcgggcgagcatgtggtcggtatcggcatcgatacccaggacgacaccctctgcggcaagggcctgctgaaccgcgagctgagaacccggatcgccgcggacggcaacgcgcgcttccgcatcgtcagcgaggccagcagcgggttcgacatccgcgccgaatga

SEQ ID NO: 320328 - DNA, 471 bp, Pseudomonas aeruginosa
atgcgccaggccctgctgatcgtcgacgtgcaaccctgtttcgccccgccggactggctgctggaaggcatcggccaactgctcgggcggatgccctcggtggccagcgtcgagcgccatgacgaatcccgtacgccgttccagcgccagctcggctggcgaccgccgctcgacgatgcctgcctggtggcggccgaccgggtcttcgtcaagcatggctacctgccgacggcggaactcgtcgaccatctgcgtgcgctgcgagcggaacgggtgctggtatgcggcatccaggccgacacctgcgtgctcgccgccggcttcgccctgttcgacgccggcctgcaaccgaccctgatcggcgacctggtgctcggctcctcgctggatcgctcgggggagctgggtgtgcgcctgtggaagcatcatttcggccaggtcgtcagcctggccgaggtgctggcggattga

SEQ ID NO: 320329 - DNA, 516 bp, Pseudomonas aeruginosa
atgaccgatagccctcgtccagaactggatatggaaacccaggagttcgtccaccagctgttcgacctggcccgccagggcaacagccagcgcctcgagcaactgctgcaacagggcctgccgccgaacctgcgcaaccacaagggcgacagcctgctgatgctggccagctaccatggccacgccgacacggtacgcctgctgctggcctacaaggccgacccggacctgcgcaacctggccgggcagacaccgctggccggcgctgcgttcaagggcgacctggcgatggtcgaactgctcctcgccggcggcgccgacgtcgagggcgcctcggccgacggcaagaccgcactgatgatggcggccatgttcaaccaggccgaggtcgccgccagcctgctggcccacggcgcccgtcgtgacgcccaggacgccgccgggctgacgccgctggcggcggcgcggatgatgaatgccgaggccacggtcgcgctgctcagccggccccactga

SEQ ID NO: 320330 - DNA, 1122 bp, Pseudomonas aeruginosa
gtgcataaagccgtcatcagcggaaccggtctttatactccgccctacagcatctccaacgatgagctggtggagagcttcaataccttcgtgcgccagtacaacgaccagcacgccgaggccatcgccaagggcgaactggaggcgctggccgagtccagctcggcgttcatcgagaaggcgtccggcatcaagagccgcttcgtgatgaacaaggaaggcatcctcgacccgcagcgcatggttccgtaccttcccgagcgcagcaacgacgagtggtcgatcctctgcgagatggccgtggccgccgccagggaggcgctgcagcgtgccggccgcagcgccgccgacatcgacggggtgatcgtcgcctgctccaacctgcagcgcgcctacccggcgatcgcggtggaggtgcaggccgcgctgggcatccagggctacggctacgacatgaacgtggcctgctcctcggccaccttcggtatccaggccgccaccaccgcgatccagaccggccaggcgcgggcgatcctgatggtcaacccggagatctgcaccggccacctgaacttccgcgaccgcgacagccacttcatcttcggcgacgcctgcaccgcggtgatcgtcgagcgcgccgacctggccgtgtcgaagcaccagttcgacatcgtcagcaccaggctgctgacccagttctccaacaacatccgcaacaacttcggcttcctcaaccgcgccgacgagagcggtatcggcaagcgcgacaagctgttcgtccaggaaggccgcaaggtgttcaaggatgtctgcccgatggtcgccgagctgatcggcgagcacctggcggccaatgaaatccaggtcgccgaggtcaagcgcttctggctgcaccaggccaacctgaacatgaacctgctgatcacccgcaagctgctcggccgcgacgccgaggcgcacgaggcgccggtgatcctcgacagctacgcgaataccagttccgccggctcggtgatcgccctgcacaagcaccaggacgacctgcccagcggcgccatcggggtgctcagctcgttcggcgccggttactcgatcggtagcgtgatcctgcgtaaacactga

SEQ ID NO: 320331 - DNA, 612 bp, Pseudomonas aeruginosa
gtggcggcgcctaccgacgccgagctgctgccgcgcctgctggccggcgagcagcgagccttccgcgagctggttggcgcctaccagggcgccatgcgggccgtggcctgggcgatcatcggcagatcgcataccgaggaagtggtgcaggacgcctggctcgcggcggttcgcgggctggacgggttccaggggcgttcgagcctgaagacctggctgctgaccattaccgccaataccgccaagagccgcttgcgccaggttcgccgggaagttttcctcgacgacctgccggggccccatggtacggtggatgaccagcgctttgccgccgacggtcactggagccagccgccgcacgcctggcacgaggattcgccggaagccctgctcgccgcgggcgaactgcgcgattgcctggacaagaccctcaacggtctgtccgagctgcagcgcagcgtgctgaccctgcgcgaacgccagggcttggagctggaggaaatccgtgatctcctggatatcacgctttccaatgtccgggtgctgctgcatcgcgcccgcctgaaggtcttcgccaccctggagcatttcgaggagaccggccaatgctga

SEQ ID NO: 320332 - DNA, 240 bp, Pseudomonas aeruginosa
atgctgagttgcaaggaactggtcgcccggtccagcgactttctcgatgggcaactggacttccgcggacaactggcggtgcgcagccacctgctcatgtgccggcattgccggcgcttcatccgccagatgcgcctgacccaggcgaccgtgcgccatctgccggaagggcaggggccggaactcgaccgcctggccgcgcatctctccgaattgcgcaaggacgccgcgcggcgctga

SEQ ID NO: 320333 - DNA, 315 bp, Pseudomonas aeruginosa
atgaaaaagatttccctcgcttcttccgtcgtcggcgctgctctgctcggcgtagccagtgtcggcgcgcatgccgcgcagaatcccttcgccgtgcaggagctgagcagcggctacagcgtggctgccgccgagaaagccaaggaaggttcctgcggcgaggccaagtgcggtgccgacaagggcaagcgcgaagcctccaaggcaggtcatgaaggcagctgcggtgcggatcgcaaggccaaggaaggttcctgcggtggcgagaagaaggccggcgaaggcaactgcggcgccgacaagaagaagtcgtaa

SEQ ID NO: 320334 - DNA, 855 bp, Pseudomonas aeruginosa
atgcaacgggaattcgtcagcggcgccgggctaggcctgcgtcgcgcgctgctggagccgctcggcgccggcgatgaggtccgggtcgacttcctcgaggtcgccccggagaactggatcggcatcggcggccgtctcggccgccagttccgcgagctgaccgagcgcctgccgttcctctgccatggtctgtctctcaacctcggcggctacgccccgctggacatgtcgttgctgcgcgcgatcaagggtttcatcgagcagcatgacatccgtgcctacagcgagcacctgtcggcctgcgccgacgacggccagctctacgacctgatgccgctaccgttcagcgacgaatcggtgcgccgggtcgccgaacgggtccgggtggtacaggacgtcctcgagcggccgttgatcgtcgagaacgtctcggcgtatgcgcgcttgccgggcgagctggaagaggtcgatttcgtccgcgcggtactggaggaagccgattgccaattgctgctggacgtcaacaacgtctacgtcaacgcctgcaacttcggtttcgacgcccacgcctacatcgccgcgatgcccagccggaggatcgcctacctgcacatggccgggcacgacgagcagggcgccagcctgaagatcgacacccatggcgcgccggtctgcgatccggtctgggaactgctggcacatgcctatgcctgccatggcgaacgcccgacgctgctggagcgcgatttcaacctcccgccactgagcgagctgtatgccgaaaccgatcgcatccgcgagctgcagcggcgcagcggtgaagcgcaactgcgcagcctggggtacggcacatga

SEQ ID NO: 320335 - DNA, 594 bp, Pseudomonas aeruginosa
atgaaccacacgaccttgcaacggcgtttcgccgcacgtatccgcgatccgcagcaggccttgccgcccggcatcgcgacggagcgcatggcgatctacgaggaactgttcttcaacaacctggacggtttcatccgcagcggtttcccggtcctgcgccagttgttcgacgagccgcgctggcatcgcctggtgcgtgccttcatgcgcgagcatcgctgccgcacaccgtacttcagccaattgggcgaggagttcatcggctggctgcaggacggctaccgcgcggaggagggcgatccgcccttcctgctggagctggctcactacgagtgggtcgagctggccctgtcgctggccgaggcgcctgtcgagacgctgccgcaggcctggtcgtggtcgccactggcctggccgctggcctatcgctggccggtccatcgcctggggccgagccatcggccgatggagccgccggccgagcccggaagctgcggcctgagcgccgacgtggagtatttcgaaaatgccttcgccttgctggaggactggcacgcccagggcatcctcatgggcgagggcgctctggagtga

SEQ ID NO: 320336 - DNA, 591 bp, Pseudomonas aeruginosa
atgaagactgtcttcctgcgtttacagcatgccctcgacgtcacccgtcgagcggatttcctcgccccgctggcgctacgcctgtacctggcgccggtgttctggatggccggctgccagaagctggcggacatgccggccaccatcgagtggttcggcaatcccgactggggactcggcctgccgtttcccgaactgctggcctggctcgccgcgctgagcgaggccggtggcgccgtgttgctgttgtgcggcctggccgtgcgctggatcagcctgccgctgatggtgaccatgctggtagcgatcttcgccgtgcactggccgaacggctggcaggcgatcgccgatccgtccgcgccgttcgccaacgcccaggtgctggaggctggcgagaagctggcgcgagcccgggaaatcctgcgcgaatacggcaactacgactggctgacgtcgagcggaagcttcgccatcgtcaacaacggcatcgagttcgccgcgacctacctggtgatgttgctcgcgctgttcttcggcggcgccggcaagtggctttctgctgacttctggattgctcaaaaattgcgctga

SEQ ID NO: 320337 - DNA, 1317 bp, Pseudomonas aeruginosa
atgatccgtaagcactcgctcggcttcgttgccagcgctctggctctggccgtatctgcccaggcgttcgccggcaccgtgaccaccgacggcgccgatatcgtgatcaagaccaagggtggcctcgaagtcgccaccaccgacaaggaattcagcttcaagctgggcggtcgcctgcaggccgactacagccgtttcgacggtttctataccaagaatggcaacaccgccgacgccgcctacttccgccgcgccttcatcgaactcggcggcaccgcgtacaaggactggaaataccagatcaacttcgacctgtcgcacaacaccggcagctccgacaacggctatttcgacgaagcttcggtcacctacaccggcttcaacccggtcaacctgaagttcggtcgcttcgaccccgacttcggcctggaaaaggccaccagctccaagtgggtgaccgctcccgagcgtaacgccgcctacgaactggccgactggatcaacacccaccaggacggcatgggcgcccaggtcaactcgaccctcgccgacatggcctacctgtccgccggcgtatccgccaaggacgccgacgacagcgacggcgacagcgtcaagcagttcaacttccgcggcgtgttcgcgccgatgcacgaagccggcaatgttctccatgtcggcgtgaactatgcctaccgcgacctcgacgacaccgccttcgactcgcgcatccgtccgcgcctgggcatgcgcggcatcgccaccagcggcggcaacgacgccggtgacaacggcaaccgcgcgaccttcggcggcgtctccaactcgccggccggttcctacaaggacgacagcgtctggggcctggaaggcgcctgggcgatgggcccgttctcggcccaggccgaatacctggcacgcaagctgaaggccgatgacaacgcctacaaggacatcaaggccaagggttactacgcgcaactggcctacaccctgaccggcgagtcccgccagtacaagctggaaggtgccaagttcgactccgtcaagccggaaaacaaggaaatcggcgcctgggaagtgttctaccgctacgacaacatcaaggtggaagacgacaacgtggtcgccgataccgccactcgcgaagtcggcgacaccaaggccaaggcccacaacctgggcgtgaactggtacgtcaacgatgcggtgaagatcagcgcggcctacgtcaaggcgaagaccgacaagatcaccaacaacaatggcgacgatgacggcgacggcttcgtgacccgcttgcagtacgtgttctaa

SEQ ID NO: 320338 - DNA, 1323 bp, Pseudomonas aeruginosa
atgattcgcagacactcgtgcaaaggggtggggagcagtgttgcctggagtttgctgggcctggcgatttccgcgcagagcctggccgggaccgtgaccaccgacggtgccgacatcgtgatcaagaccaagggcggcctcgaagtcgccaccaccgacaaggaattcagcttcaagctcggcggccgcctgcaggccgactacggccgcttcgacggctactacacgaacaacggcaataccgccgatgccgcctacttccgccgcgcctacctggagttcggcggcaccgtctaccgggactggaagtaccagatcaactacgacctgtcgcgcaacgtcggcaacgacagcgccggctactttgacgaagcttcggtcacctataccggcttcaacccggtcaacctgaagttcggccgcttctacaccgacttcggcctggaaaaggccaccagctccaaatgggtcaccgcgctggagcgcaacctcacctacgacatcgccgactgggtcaacgacaacgtcggtaccggtatccaggccagctcggtgatgggcggcatggctttcctctcgggcagcgtgttcagcgagaacaacaacgataccgacggcgacagcgtcaagcgctacaacctgcgcggcgtgttcgcgccgctgcacgagccgggcaacgtggtgcacctgggcctgcaatacgcctatcgcgacctggaggacagcgcggtggatacccggatccgcccgcgcatgggcatgcgcggcgtctccaccaatggcggcaacgatgccggcagcaatggcaaccgcggtctgttcggcggcagttcggcagtcgaggggctgtggaaggacgactcggtctggggcctggaaggcgcctgggcgctgggtgccttctcggcccaggccgagtacctgcggcgcacggtcaaggccgagcgcgaccgcgaggatctcaaggcctccggctattacgcgcaactggcctacaccctcaccggcgagccgcgcctctacaagctggacggcgccaagttcgacaccatcaagccggagaacaaggaaatcggcgcctgggagctgttctaccgctacgactcgatcaaggtcgaggatgacaacatcgtcgtcgacagcgccacccgcgaggtcggcgacgccaagggcaagacccataccctgggcgtcaactggtacgccaacgaggcggtgaaggtttccgccaactacgtcaaggcgaagaccgacaagatcagcaatgccaacggcgacgatagcggcgatggcctggtgatgcgcctgcagtacgtgttctga

SEQ ID NO: 320339 - DNA, 300 bp, Pseudomonas aeruginosa
atgatcggctggggacgtgcctgtattggcgtcggggggctgctgttgctgggccagttgctggggggcgccctgctgctcgcggacgacggcgaagcgacgctggcggtcgaacacttctggcaattcgtcttcctgatcccggcgatcctggtggcactgggaatgttcgtcctgcagcatcacgtgggttccttcgcccagttgtaccgccggcgtctcgatggcgcctcctacctgctggtttcctgcggcatcgccctggtcctgggcaagctctgcgtcctgctgctcgcctga

SEQ ID NO: 320340 - DNA, 813 bp, Pseudomonas aeruginosa
atgcaaaaccgcatgatgatcaccggtgccggctccgggctggggcgcgaaatcgccctgcgctgggcgcgtgacggctggcgcctggcgctggccgacgtcaacgaggccggcctggcggaaagcctgaaactggtgcgcgaggcgggtggcgatggcttcacccagcgttgcgacgtacgcgactacagtcaactgaccgcgctggcgcagagctgcgaggagaagttcggcggcatcgacgtcatcgtcaacaacgccggggtggcctccggcggcttcttcggcgagttgtccctggaggactgggactggcagatcgcgatcaacctgatgggcgtggtcaagggctgcaaggccttcctgccgttgctggagcgaagcaagggcaagatcgtcaacatcgcctcgatggcggcgttgatgcagggcccggcgatgagcaactacaacgtggccaaggccggggtggtggcgctttcggaaagcctgctggtagagctggcgctggtcgaggtcggcgtccatgtggtctgtccttcgttcttccagaccaacctgctggactctttccgcggcccgagccccgagatgaagcaccaggtcggcaagttgctggagagttcgccgatcagcgccaccgacatcgccgactacatccacgccgaagtggccaagggcagtttcctgatcctgccccacgagcaggcgcggatggcctggaggatcaagcagcagaatccccaggcgatctatgacgagatgaccgcgatggccggcaagatgcaggccaagcgtcagcgccaggcctga

SEQ ID NO: 320341 - DNA, 423 bp, Pseudomonas aeruginosa
gtggagtctgaatccatcgtctatggctgcatccgcgactggccgggcgattcgatggagcggcgcatgcgtcgtgccgccaaccgccgcgtgctggacagcctgccgggcggcgaggcctggccgttcctcggacgcgagatgttcagccgctgcgagcagtccggggccgggctctaccagacccagatcatccacttcggtgccagctaccaggccatcgaatacgagtggagcctgtgggtcgagcagttcgaggcgttgctcaggcgcctctactgggccagcgcggtggtccacctggagaccgaagtgaacggcagccatacctttcgctgggagtccgagcgtggcttccataccccccaggagagcgacctgcaggtccgctgcgcctgggagcgggagggcgggcggcggtga

SEQ ID NO: 320342 - DNA, 330 bp, Pseudomonas aeruginosa
gtgatcaactacttctggttcgtcctcgcggcgttctgcgagatcgccggctgctacgctttctatctctggctgcggctgggcaagagcgccctgtgggtgctgcccggcctgctcagcctgaccctgttcgccttgctgctgacccgcgtggaggccagctacgccggccgcgcctatgccgcctatggcggcatctacgtcgccgcgtcgctgttctggctggcttttgtcgagcgctcgcggccgctatggagcgactggctgggcgtggccttgtgcgtggtcggtgccagcgtcgtgctgttcggcccgcgcctgtctcagtga

SEQ ID NO: 320343 - DNA, 288 bp, Pseudomonas aeruginosa
atgaaaccgcttttcgccctcgccagcgcctgcgccttgctggtcgccacgccggtcttcgcctgttccgaagcggaggcggaaaagatgggcaaggaagtcgccaccaaggtcgcctcgatcacccagaagaacccgcaacgggccagggaactcaacgagcagttgcgccagcgccaggaagcccgctcggaacagaaccggccgagcgattgcgatgcctacgcgcagatgctcaaggaactggatcaggaaaaaggtgacgtacagcgcaacacttcgcagtga

SEQ ID NO: 320344 - DNA, 384 bp, Pseudomonas aeruginosa
atgactcacgattgggatctggtcgaacggttgctgctggaggtccggcagtccgcccatgagaacttcgccccgcgcgcccatgccgaacgcctggccgaggaacgctcccaggccgggcagcgggtcggcgacatggatgcgttgaagcagaaggccgccgactacgaggcgatcctgctggagggcggcttcatcgagccgcgtccggaagagcagggcggcaatggcgagaacttcgtcctcacgccgcgcggcgagcgcctgctcggcctgatcggcggcgagacgccgaaggccgccgaggctcgccggctgctcgaggagaacggcagcgaagcgctgcacgccgagcgcttcgaccgtttcgtcgccgggctctga

SEQ ID NO: 320345 - DNA, 4350 bp, Pseudomonas aeruginosa
atgatgcctatttcatcctcttccgcccgccgcgccgagccggctccgcggcccctggcggagttccatcccgtcgtccgccagtggttcgaacgccacttcgccgcgcccacgccggcgcaggtggaggcctggccggcgatccgcgaggggctttcgaccctggtcgccgcgcccaccggttcgggcaagaccctgaccgccttcctcgccgccatcgatgccttggtggtggaggggctggccgccggcggcgagttggcggatgccacccaggtggtctatgtctcgccgctgaaagcgctgtccaacgacatccgcatcaacctggagcaaccgctggctggcatccgcgaggaactggcgcgtctcggcctgcccgacgtcgatatccgtagcgcggtgcgcaccggcgatacgccgcaggtcgagcgcggagcgatgcgcaagcgcccgccgcacatcctggtcaccacgcccgaatcgctgtacatcctgctcggctcggagtcgggccggcagatgcttgccggggtgcgcagcgtgatcgtcgacgagatccatgccctggccggcagcaagcgcggcagccacctggcgctgtcgctggagcgcctgcaggcgctgtgtccgcgaccgctgctgcggatcgggctgtccgccacgcagaaaccgatcgagaaggtcgcgcgcttcctcgtcggcgccagcggcaatccgcgcgatccggcctgccggatcgtcgacatcggctatacgcgcccccgcgacctgggcatcgaggtaccgccggtggcgctggaagcggtgatgtccaacgacacctgggagctggtctacgaccgcctggcgcacctggccggcgagcaccgcaccaccctggtgttcgtcaacacccggcgcatggccgagcgggtcacccgcttcctcgccgaacgcctcggcagccgccaggtggcggcccaccacggcagcctggccaaggagctgcgcctggatgccgagcagcgcctcaaggccgggcaattgaaggtactggtggcgaccgcctcgctggagctgggcatcgatatcggcgacgtcgagttggtctgccagttgtcgtcgccgcgctccatcgccgccttcctgcaacgggtcgggcgttccgggcacagtgtcggcggcacccccaagggccggttgttcccgacctcccgcgacgacctggtggaatgcgcggcgctgctcgacagcgtgcgccgtggcgagctggacagcctggtgctgccacgccagccgctggacgtgctggcgcagcagatcgtcgccgaagtggcctgccaggagtggcgcgaggacgacctctatcggctggtgatccgcgccgaaccctacgccgggctggagcgcgagcgcttcgacgaagtcctgcggatgcttgccgagggctaccactcacgcctcggcgtgcgcggcgcctatctccatcgcgatgcgctcaacggcctgctccgtggccgccgtggcgcgcggctgaccgcgctgacctcgggcgggaccattcccgataccggcgactacagcgtgctgctggagccgcagggcctgctggtggggacggtcaacgaagatttcgcggtggagagcctggccggcgatgtgttccagctgggcaacacctcgtaccggatcatccgcatcgagccgggacgggtacgggtcgaggacgcccagggccagccgccgaacattccgttctggctgggtgaggcgccggggcgcagcgacgagctgtcggccagcgtggcgcgcctgcgcgacaccctcgacgagctgctcggcgaaggccaggcattgccggaagggcagcggctggagccagccatcgcctggctcggcgccaccctcgggctggacgatggcgccgcgcggcagatcgtcgagtacctggcccgcgcccgccaggccctgggtggcctgcccgggagccggcggctggtgatggaacgcttcttcgacgaatccggcggcatgcaactgatcatccacagtccccacggcagccgcctcaaccgcgcctggggcctggcgctgcgcaagcgtttctgccgcagcttcaacttcgagctgcaggcggcggccaccgaagacgcgatcatcctctcgctgtccaccagccacagctttcccctcgacgaggtctggcgctacctgcattcggcgagcgccgagcacctgttggtacaggccgtgctcgacgcgccgctgttcggcgtgcgctggcgctggaacctgaccacctcgctcggtttgccgcgctatgccggcggtcgcaaggtgccgccgcaactgctgcggatgaagagcgaggatctgctggccagcgtgttccccgaccaggtggcgtgcctggagaatatcgtcggcgagcgcgaggtgcccgatcacccgctggtggcgcagacccttgacgactgcctgcacgaggcgatggattgcgagggctggctggccctgctgcgcgacatggagagcggcgcggtggacttgctggcgcgcgacctgccggcgccttcggcgttggcggcggagatactcaccgcgcgtccctacgcctatctcgacgatgcgccgctggaggagcggcgtacccaggcggtacagaatcgccgctggagcgatcccgagtccgccgacgacctcggtgccctggaccttgaggcgatcgaggcggtgcgtggcgaggcctggccggaagcgcgcaacgccgacgagatgcatgaggcgctgaacagcctgggcttcctcacctcgggcgaggccgaggccaatccgggctggggggaatggcttgcgcaactgtcggagcaacgccgcgccggacgcctggactgcgcaggcagcactctctggctggcggcggagcgcctgccggcgatgcgcctggtgcatcccgcggcgaaggtgcccgacgctttccaggcgcctcgcggctatccgccgccggactcggcggaagcggcgaccgtggagctgacccgcgcccgcctgggtggcttcgggccacgcacggccgggcagttggcggccgacctgggcatcggcctggccgaccagcagtacgccttggccgccctggagcgcgaaggctatgtgctgcgtggccgcttcagtcctggcgcgacggaagaggagtggtgcgaacgccatctgctggcgcgcatccatcgctatacggtgaagcgcctgcgccgggaaatcgagccggtggagcgcgccgatttcatgcgtttcctgttcgactggcagcgcctggcgccgggcacccgtggccggggtgcggagtccctggctacggtggtcgagcagctggaaggcttccaggccgcggcggccgcctgggaaagcgaactgctggcagcgcgggtggccgactacgccagccattggctggaccagctgtgccgttccggacgcatcgtctgggcgcgcctggccggacgcagcaaggccgccggcggtccgctgcgcagcgcgccgatcgtgctcctgccgcgccgcgagctggggctctggagcgtcctgcagcgcgacgcgccggagccggaactgtcgccgcgcgcggccagggtactggaggtgctgcgcgagcagggtgcatcgttcttcgacgaactgagccaggatgcccacctgctgcgcagcgagctggagaacgccctcggcgagctggtctcggtcggccgggtcaacgccgacagcttcgccgggctgcgcaccctgctgatgccggcggacaagcgcagccgccaggagcgccgctcgcgcggcctgccgggcggcatgcaggacgccgggcgctgggcgccgctgcgccgggcgaaggcggaagaggcggggcagcgtttgccggcggaggttctcgaacatgtcgcccggaccttgctgcggcgctatggggtggtcgcctggcgcctgctggagcgcgaagccgactggctgccgccgtggcgcgagttgctgcgcgtctaccatcgcctggaagcgcgcggcgagattcgcggcgggcgcttcatcgccggcctggccggcgagcagttcgccttggcggaagcggtcggcctgttgcgcgaggtgcgcaagcgaccgccggatggggcgatgctggtggtgtcggcagtcgatccgttgaacctggtcggcggcctgctacccggcgaacgggtgccggcggtgaccggcaaccgcctgctctatcgagacggagcgccgctggcggcgctggtagccggcaaggtgcggatgctcgcggaagtcgacggcgagaccgcgcagcagatccgtgcgctgctgatccgccgtcactga

SEQ ID NO: 320346 - DNA, 3480 bp, Pseudomonas aeruginosa
atgtcgctgtccatcgggctgatcgccgtggtcgccctggtctacatggccatcctgttcgccatcgccttctatggcgaccgtcgccgcaccccgctctcaccccgcctgcgtgcctgggtctacagcctctccctggcagtgtactgcaccagctggaccttcttcggcgcggtcggccaggccaccgaccagctctggtcgttcctgccgatctacctcggaccggtgctgctgatgctgttcgcgccctgggtgctgcagaagatgatcatgatcagcaagcaggagaacatcacctccatcgccgacttcatcgccgcccgctacggcaagtcgcaggcgctggcggtggtggtggcgctgatctgcatggtcggcgtgctgccctatatcgccctgcaactgaaaggcatcgtcctcggggtgaacctgctgatcggctccggcgccgactccaccggtacccgcgcccaggacacggcgctgatcgtgtcgctggtgctggcgctgtttaccatcgtcttcggtacccgcagcctggatgtcaccgaacaccaccgcggcatggtcctggccatcgccttcgagtcgctggtcaagctcaccgccttcctcgccgtgggcatcttcgtcaccttcggcctctacgacggcttcgccgatctcttctcccaggcccgcgccgcgccgcagttggccgactactgggaagagaccgtgcactggccggcgatgctgctgcagaccggcgtggcgatgaccgcgatcatgtgcctgccgcggcaattccacgtcaccgtggtggagaacatcgagccgcgcgacctcaacctggcgcgctgggtgttccccatctacctggtgctggccgcgttgttcgtggtgccgatcgccctcgccggccaattgcacctgcccgccggggtaatgccggactccttcgtcatcagcctgccgctggccgaggcgcacccggcgctggccctgctggcattcattggcggcgcctcggccgccaccggaatggtcatcgtcgccagcgtcgcgctgtcgaccatggtctccaacgacatgctcctgccgtggctgctgcgacgccgggaaaaggacaccgaacggcccttcgaggccttccgtcactggctgctgaccgtacgccgggtgagcatcgcggtgatcctgctgctcgcctacgtggcctaccgcctgctcggctccagcgccagcctggcgaccatcggccagatcgccttcgccgccatcgcccagctcggcccggcgatgatcggcgcgctgtactggaaacaggccaaccgccgcggggtcttcgccggcctcgccgccggctcgctgctgtgggcctatacgctggtcctgccggtggtggccaagggcctcggctggccgctggagcgcatccccggcctgacctggctggcaagcaatcccttcggcctgccgatcgagccgctgacccagggcgtgctgatctcgctggtcggcaacttcgccctgttcggcctggtctcggtgctctcgcgcacccgcgtgtccgagcactggcaggccagccgcttcatcggccaggagatctcccagcggcagaactcgcgcttcatgctcgcggtgcaggtggaagacctgctgatgctcgccgcgcgtttcgtcggcgaggaacgcgcgcggcaaagcttcatccgcttcgcctaccgccagggcaagggcttcaccccgaaccagaccgccaacaacgagtggatcgcgcacaccgagcgcctgctcgccggggtactcggcgcgtcctcggcgcgggcggtggtgaaggccgccatcgaagggcgcgagatgcaggtggaggacgtggtgcggatcgccgacgaagcctccgaggtgctgcaattcaaccgcgccctgctgcagggcgcgatcgagaacatcacccagggcatcagcgtggtcgaccagtcgctgcgcctggtggcctggaaccaccgctacctggagctgttcgagtacccggacgggctgatctacgtcggccggccgatcgccgacatcatccgctacaacgccgatcgcggcctgtgcgggcccggcgatccggacatgcacgtggccaagcgcctgtactggatgcgccagggcactccgcacacctccgagcggctgttccccaacggccgggtcatcgagctgatcggcaacccgatgcccggcggcggcttcgtcatgagcttcaccgatatcaccgcctaccgcgaggccgaacagggcctcaagggcgccaacgagtcgctggaacagcgggtccaggagcgtacccaggaactttcgcagttgaaccaggaactcagcgaggcgaagagcaacgccgaggccgccaaccagtcgaagacccgcttcctcgccgccgtcagccacgacctgatgcagccgctgaacgccgcgcggctgttctccgccgccctcgcccaccaggacgcgctgcccggcgaggtccgcgacctggtgcagcacctcgactcgtcgctgcgttccgccgaggacctgatcaccgacctgctggacatctcgcgcctggaaagcggccgggtcagcgccgaacgcaacccgttcccgctgaacaacctctacgatgccctcggcgtcgagttcaaggcgctggcccaggaacagggcctgcatttccgcctgcgcggcagccaactgcgggtggacagcgacatcaagctgctgcggcgcatcctgcagaacttcctgaccaacgctttccgctacgccaagggccacgtgctgctcggcgtgcgccgcgaggacggctacctgcgcctggaggtctgggaccaggggccgggcatcccaccggacaagcagaaagtcatcttcgaagagttcaagcgcctggacagccaccagacccgcgcggagaaaggcctcggtctcggcctggcgatcgccgaccggctctgcaaggtcctcggccatcctctggaagtacgttcctggccgggcaagggcagcgtcttcagcgtccgcgtaccgctggcgcggcaggcgccgccggccctggccaacggccacaaggccgaaccggcgcaggcgctgaacggcgcccaggtgctctgcgtggacaacgaggacagcatcctcgccggcatgaacagcctgctcagccgctggggctgccaggtctggaccgcgcgcagccgcgaggaatgcgccacgctgctggacagcgagatgcgcccgcaactggcgttgatcgactatcacctggacgacggcgagaccggtacgcaattgatggcctggctgcgtacgcgcctgggcgagccggtgccgggcgtggtgatcagcgccgacgcgcggccggaactggtggcggagatccacgccgccggcctcgactacctgtccaagccggtcaagccggccgcgttgcgggccctgctcagccgccatctgagcctgcgctga

SEQ ID NO: 320347 - DNA, 570 bp, Pseudomonas aeruginosa
atgttcaagccgctaccgatcaccctgcagcgcggagccttgcgtctcgagccgctggtggaagcggacattcccgagctggtgagcctcgccgaagccaaccgcgaggcgctgcagtacatggacggaccgacgcggccggactggtaccgccagagcctcgccgagcagcgcgagggcagggcgttgccgctcgccgtccgcctcggcgtgcaactggtcgggaccacgcgcttcgccgaattccttcccgccttgccggcctgcgagatcggctggacctggctcgaccaggcccagcacggcagcggcctgaaccgcatgatcaagtacctgatgctcaagcatgccttcgacaacctgcgtatggtccgcgtgcagctcagcacggcggcgagcaacctgcgcgcccagggcgccatcgacaagctcggcgcgcagcgcgagggcgtgctgcgcaaccaccggcggctggccggcgggcggctagacgacaccttcgtctacagcatcaccgaccacgaatggccgcaggtcaaggcggtgctggaagccagcttcaccggctga

SEQ ID NO: 320348 - DNA, 855 bp, Pseudomonas aeruginosa
gtgccggacgagacgagcggagaacacacgcatttctggcgcgccgccgaactgggcggcgtcgaactgctgcacgcgcgctatgtggagcagcgcttcgcgccgcacgtgcacagcagcttcgccctggtcatcatcgagcagggcgcgcagcgcttccgccatcgtggcggcgagcacctggccccgctgggcagcatggtgctgatcaaccccgacgaagtgcacaccggctccaaggcccatgatgccggttggctctatcgcggctactacccggaaatggaacagatcgacgggattctcgacgagctggaaatccatcatggcggcgtgccgcgtttcgccgacagcgtgatccacgaccagcccctggcacgcgccttcgtccacttgcaccgcctgctggccgagcatgccggcagcctggaaacccagacccgctggcgcgagacgatgctcgccctgttccgtcgccacgcccgcctgccagaagcgccgaaggccgggcaggagccgttggcggtggcccgcgcccgcgaactgctggcggcgcggttgctcgatccgccttcgctggaggaactggcggcggcggtcaatctgtccccgttccattttgcccgggtcttccgtcgcgccaccggcatgccgccccacgcctggctcaggcagcgccgcctggagcaggccagggcactgctcaagagcggccgggcgccgctggaggtggccctggagctgggcttcgccgaccagagccacctcggtcgccagttcaagcaggcctacggggtggcaccgggtgaataccgctcggcctgcgcgcgctcgtccttgacgacatacgaataa

SEQ ID NO: 320349 - DNA, 2166 bp, Pseudomonas aeruginosa
atgtcgtccgtgagttcgttgtcgcgcctggccgtcgccatcgcgctgggtgtgtccatgcaggcggcgcaggccgaagaggaagccaaggagctgggcacggtcaccgtggtcggcgactggctgggcgaagccgaccaggcggtggtgcagaaccatcccggcgcgcgcagcgtggtgcgtcgtcgggaaatgctcgagagcggtgcgcagaacgtccgcgacgtgctgcgcaaggtgcccggcgtgcaagtgcaggacaacaacggtaccggcggcagcgacatctccctgaacgtcggggtgcgtggcctgacttcacgcctgtcgccgcgctcgacggtgatgatcgacggcgtgccggcggcggtggcgccctacggccagccgcagctgtcgatgatgccgctgtccatcggcaacctggagagtatcgacgtcgtgcgcggcgccggctcggtgcgctacggcccgcagaacgtcggcggggtgatcaacttcgtgacccgggcgattccggagaagttctccggcgaaatcggcaccaccatcgagcatgccggccacggcggctggaagaagctcaaccaggcgttcctcggcgggaccgccgacaacggcctgggcgtggcgctgctgtattccggggtgaagggcgccgactaccgcgacggcaacaacgacaacgatatcgacgacgtgctgctcaagacccattggcagctcaccgacagcgaccagttggcggccaacttccactactacgacgcctacgccgatatgccgggcggcctgacccaggcgcagtacgacgacgatcccttccagtcggtacgcgactgggacaatttccgtggtcggcgcaaggacttctcgctgaagtacacccgccaggtcgacgacctcacccagttcgaggtgctcacctactacagcgacagtttccgcggcagcagcatcgccgcgcgcaacctcaggaccatcacctcgtacccgcgcgactaccatgtgttcgcggtggagccgcgggtctcgcggatcttcttcgccggcccgaccacccaggaggtcggcatcggctaccgctacctgaaggaagcaatgaacgagcgcgccagccagctggccctggtcgacaatgtgccgaccgtgcgtcccggctcggacggccatacctaccaggaccgtaccggcggtaccgaggccagcgccttctacatcgacgacaagatcgatgtcggcaactggaccatcacccccggcatccgcttcgagaagatcgacagcgactggcgcgaccgcccggtgctcggcctgaacggcaagccggtgcaggagaagaagcgcagcaaggactacaacgaaccgctgccggcgctgagcctgatgtatcacttgagcgacgagtggaagctgttcgccaactactccgaatcgttcggcagcctgcagtacttccagctcggccagggcggcagcggcaacgataccgccgccggcctggagccggagaaggccaagacctacgaactgggcacgcgctacgacaacggcagctggggcggcgagatcacgctgttctacatcgacttcgacgacgagctgcagtacgtcagcaacgacgtcggctggaccaacctcggcgccaccaagcaccagggcatcgagacttccggccactatgacttcgccgctctcgatccgcgcctggacggcctgtcggtctacggcagcctcacctatacccgcgccacctacgaaggcgacattccctccttcaaggggcgcgacctgccgctctactcgcgccaggtggccaccgccggggtgcgctacgaggtcgaccgctggacctacaacctcgacgccttcgcccagtccatgcagcgcgcgccagggctgagcaccgacagccagggcaacttcacccacaactacatcaccgagcccagcgccgacggccagtacggcgacattcccggctacgtgacctggaatgcccgcgtcggctacgacttcggcccgcaggcgtcgaacctgaagctcggactcggggtgaagaacctgttcgacaagcagtatttcacccgctccagcgacaacaattcgggaatctacgtgggtcagccgcgaacgctgttcatgcaggccagcgtcggtttctga

SEQ ID NO: 320350 - DNA, 1875 bp, Pseudomonas aeruginosa
atgacccaacattcgcaattcgccctgctgggcaagcggcgtttcctgccgttcttcatcacccagctgctcggcgccttcaacgacaacatcttcaagcagtcgctgatcctcgccatcctctatcacctcagcgtcagcggcgaccgcagcctgctggtcaacctctgcgcactgctgttcatcctgccgttcttcctgttctcggcactgggcggacagttcggcgagaagtacaacaaggacgcgctgatgcgcgcgctgaagctggccgaggtaggcatcatgctggtcggcgctgccggcttcgtcttcggcagcctgccgctgatgttcgtcgcgctgttcgccatgggcacccactcggcgctatttggcccggtcaagtattcgatcctgccccagcacctgcacgaggacgaactggtcggcggcaacgcgctggtggagatgggcaccttcctggcgatcctggccggcaccatcggcgccggcgtgctgatgtcccatgcgcattacgcggcggcggtggccaccgcggtggtgctggtggccgcctgcggctacctggccagccgcggcattccgcgagcggcggcggcgctgccggggttgaagctcgactggaacatcttcgcccagtcctggagcatcctccgcctggggctcggccagcgcccggcggtctcgcgctcgctggtgggcaactcctggttctggttcctcggcgcggtctacctgacgcagatcccgaccttcgccaaggaatggctgcacggcgacgaaagcgtggtgaccctgatcctcaccgtgttctcggtgggcatcgcgctgggctcgatgctttgcgagaagctttccggtcgcaaggtggagatcggcctggtgccgttcggctcgatcggcctgaccgtcttcggcatcctcctctggtggcacgccggcggcattcccccaggcgaggcgccctacgactggctggcggtgctgcgccaccatgagacctgggcggtgctggccgacatcctgttcatcggcattttcggcggcttctatatcgtaccgctgtacgccctgatccaggcgcgcaccgacgaggacaagcgggcccgggtgatcgccgccaacaacatcctcaacgccctgttcatggtcgccgctgcgctggtctcgatcctcttcctcagcgtcgccaagctgtcgatcccgcagctgttcctcgccctgtcgctgatgaacgtcgcggtgaacgtgtacatcttcaagatcgtcccggaattcaccatgcgcttcctggtctggctgctcagccacaccatgtaccgggtcaggcatgtgaacctggaggcgatcccggacgagggagcggcggtgctggtgtgcaaccacgtctcgtacgtggacgcactgctgatcgccggctcgatccggcggccggtgcgcttcgtcatgtactacaggatcttctcgctgccggtgctcaacttcgtcttccgcaccgccggcgcggtgcccatagcggcgcgccacgaggacgaagggatctacgaacgcgccttccagcgcatcgccgactacctgagggacggggagctggtgtgcatcttccctgaaggcaagctgaccgccgacggcgagatgaacgagttccgcgccgggatcgagcggatcatcgaggaaaccccggttccggtgatccccatggcgctgcagggtctgtggggcagcttcttcagccgcgacccgaacaagggcttcttccgccgcctgtggtcgcgggtaagcctggtggccggcgaatcggtggcgccggaggcggtggagcgcctcgacctgcaggcgcgggtgacgagcttgcgcggcgaagctcgctga

SEQ ID NO: 320351 - DNA, 210 bp, Pseudomonas aeruginosa
atgtcgaatcgtcagaacggcaccgtaaaatggttcaacgacgccaaaggcttcggcttcatcaccccggaaagcggtaacgacctgttcgttcacttccgttccatccagggcaccggcttcaagagcctgcaggaaggccagaaggtttccttcgtggtcgtcaacggccagaaaggcctgcaagccgacgaagtacaagttgtctaa

SEQ ID NO: 320352 - DNA, 315 bp, Pseudomonas aeruginosa
atgtcctggatcatcctgtttttcgccggcctgttcgaagtgggctgggccgttggtctgaaatacaccgagggcttcagcaagccgcttcccacggtcctcacggcgctcgccatgctggtcagcctgggcctgctcggcctggccatgaagcacctgccgctgggcaccgcctatgccgtctggaccggggtcggcgcggtcggcacggtcatcgccgggatcgtcctgttcggcgaatccatggcattgctgcgcctggccagcgtcgcgctgatcgtctgcggactggtcggcctcaagctgagccattag

SEQ ID NO: 320353 - DNA, 936 bp, Pseudomonas aeruginosa
atgcgtgccctgaccgccctgagccgcttcgtcagcgccagcttcccgttctgggtcctgctgttcgccatcctcgccttcttccgacctgcctggttcctcccgctcaccgcagccatcgcgccactgctcggcctggtgatgttcggcatgggcctgacgctcaagggcgaagacttccgcgaggtcgcccggcaccccatacgggtgctgatcggcgtgctggcccagttcgtcatcatgcccggcctggcctggttgctctgccgcctgttgcagttgccggcggagatcgcggtgggcgtgatcctggtcggctgctgccccggcggcaccgcttccaacgtgatgacctggctgtcccgtggcgatgtcgccctgtcggtggcgatcacctcggtgaccaccctgctcgccccgctggtcacgccggcgctggtctggctgctggcttcggcctggctgccggtgtcgttcgcggcaatgttcctgtcgatcctccaggtggtgctggtgcccatcgccctcggcctgctggcacagcgcctgctcggcgagcgcacccggcaggtggcggaggtgctgccgctggtctcggtattcagcatcgtggtgatcatcgccgcggtggtggccgccagccaggcgcggatcgccgagtccggcctgctgatcatggccgtggtgatgctgcacaacggcttcggcctgttgctcggctatctcaccggcaagctgaccggcatgccgctggcgcagcgcaaggccctggccatcgaagtcggcatgcagaactcggggctcggcgcggcgctggccaacgcccatttctcgcccctggcagcggtgcccagcgcgctgttcagcgtctggcacaatctctccggttcgctgctggccgccctgttccggcgcatggaagatacgccgcgttga

SEQ ID NO: 320354 - DNA, 921 bp, Pseudomonas aeruginosa
atgtggttccgcaatctgctcgtctaccgcctcacccaggatctgcaactggatgccgattccctcgagaaagccctcggcgaaaaacccgcccgcccctgcgccagccaggagctgaccacctacggcttcactgcgccgttcggcaaaggcccggacgcaccgctggtacacgtcagccaggacttcttcctgatctcggcacgcaaggaagagcgcatcctgccgggcagcgtcgtgcgtgacgcactgaaggaaaaggtcgacgagatcgaagcccagcagatgcgcaaggtctacaagaaggaacgcgaccagttgaaggacgagatcgtccagaccctgctgccgcgcgccttcatccgccgctccagcaccttcgccgcgatcgcgccgagcctcggcctgatcctggtcgactcggccagcgcgaagaaggccgaagacctgctctcgacgctgcgcgaagcgctcggctccctgccggtacgcccgctgagcgtgaaggtcgcgccgaccgcgaccctcaccgactgggtcaagacccaggaagccgccggcgacttccacgtgctcgacgaatgcgagctgcgcgacacccacgaggatggcggcgtggtccgctgcaagcgccaggacctgaccagcgaggaaatccagctgcatctcaccgccggcaagctggtcacccagttgtccctggcctggtcggacaagctgtccttcgtcctcgacgacaagctggcggtcaagcgcctgcgcttcgaagacctgctgcaggagcaggcggaaaaggacggcggcgaagacgccctcggccagctcgatgccagcttcaccctgatgatgctgaccttcgccgaattccttccggcgctcttcgaggccctcggcggcgaagaaatcccccagggcgtctga

SEQ ID NO: 320355 - DNA, 762 bp, Pseudomonas aeruginosa
atgaaacaacatcggttggcagcagcgatcgcactggtcggtctggttctctccggctgcgattcgcagaccaacgttgagttgaagactccggcacagaaagcttcctatggtatcggcctgaacatgggcaagagcctgtcccaggaaggcatggacgacctggattcgaaagccgtcgccaagggcatcgaagacgccctcggcaagaagaagcagcagctcaccgatgaagagctgaccgaagccttcgccttcctgcagaaacgtgccgaggagcggatggccgccatcggcgacgaaaacgccaaggccggcaagaagttcctcgaggaaaacggcaagcgcgacggcgtgaccaccaccgcttccggcctccagtacgaaatcgtgaagaaggccgatggcccgcaaccgaaggccaccgacgtggtgaccgtccactacgaaggccgcctgaccgatggcaccgtcttcgacagctccatcgagcgcggcagcccgatcgacctgccggtcagcggcgtgatcccgggttgggtcgaagccctgcaactgatgcacgtcggcgagaagatcaagctgtacatccccagcgagctggcctacggcgcgcagagcccgagcccggcgatcccggccaactcggtactggtcttcgacatggaactgctcggcatcaaggatccgtccaaaccggacgcggagcccgaggccggtgccgcagcgcagcccgaagccaaggcggacgcgaagaagtaa

SEQ ID NO: 320356 - DNA, 432 bp, Pseudomonas aeruginosa
atggatgcaccacgaggattcagtcgttacctggggatcgcggaacgtttcctggcccgtggccgggtgcccgccttgttgattgcagtagcacgcaagcgctcgcgcctgaagctggtgaagagcgacctgcgcctgctgcaggaactgctggtggcctgggttcgcggcgaataccgcggactcagccgccaggcgttgctctcggtgatcgcggcgctggcctatttcctttcgccggtggatatcgttcccgacttcatcttcggtgtcggcctgctcgacgatctggccgtcctggcctgggtagtgcgtcgctggcaggccgagctggatgccttcaaggtctggcgtgacgcccagggcgtcgagacgcaacaggcgctgcgagagctgccggctcccagggcggagcgcgttcagggttcctga

SEQ ID NO: 320357 - DNA, 747 bp, Pseudomonas aeruginosa
gtgcgccggagaagtcttggtttgtgcatcctgctgggagtcggacaggccttcgccggcgagctgcgctggggcttcagccccgccgacggcatgccctacgtggacatcgtcgaccaccagctgcaaggcggcttcacccgccagttgggggagcgggtcgcgcagcggctgggattgtcgctgcgtttcgtggaaacgccgaaccgaaggatcgacggcttcatggccagcggacatattcacgtgatctgcaactccaaccccggatgggatagcaaacccgaacgctaccattggtctcctgccctcttcgaagagcaggacgtcctgctgcagcgcgacgaccgtccggcgatccgcgacttcgccgagctgcgcggcaagaccctgggtacaagtctaggctatgtctacgcggacaatctcatgcaggccttcgctgccggggaaattcgccgcgaagatacccgcgacctggccagtcgcgtgcagatgctcaagcgttcgcgcctggacgccgcggtggacatgcgccgcccgctgctctacctgacgcgccagcatcccgagctgggcctgagggtcagtccgctggtactgcagagctatcggatgcactgcatctatggcggacaactgccggtccccgtcgaaagtatggaccgggtgctcgatgagatggtcagggacggcagcatcgggcgcctactggaaaacagcctgcaagcgcctcaggaaccctga

SEQ ID NO: 320358 - DNA, 231 bp, Pseudomonas aeruginosa
atgaatgtccaagtgatcacgcgagacggcgaggcggaatacgcggtgttgccctgggccgaataccaggcgttgctggccgccgctggtcgcccggccgccagtgtcgcggtggagacgaccgcgccggcgccgccttccgcgagtctgctggagcgccgcgaggcgcgcggcctgagcctggaacaggtggcccggggggcggtatcagtccttcctatatggcgatga

SEQ ID NO: 320359 - DNA, 360 bp, Pseudomonas aeruginosa
gtgctgatcagccgtaaacactgggatagcctgctgctggaaatcgaagatgcgcgtcgccagcgtcatctgctcacctaccgggcgctgatcgagcgcctgcaactgccgactccggcgatgaccaccctcactgcggctctcgagcacctggcatcgctggatgcgcgctcggggcgtccgttgcgcagttcgctggtcatcagccagggcgcaagccgcttgccacgcaccggtttcttcgagtgcgtggagcgcctcgggcgtttttccggtccgccggacggcccggccgcggctggctggcatgcggcggaagtggtccgtgtcttcgaattcgagtatcccgatgaactctga

SEQ ID NO: 320360 - DNA, 480 bp, Pseudomonas aeruginosa
atgaactctgaatggatctggcgcctgcgcgcccgcctcggttacggcgtggcccggcagttgctgggctggccctggctggtcaagcagccgcgagcctggcagtggatgcaggggcagttctcgcgcatggccaacctcggacaccgcgacgcccaggcgttctacggtcacctgctgctgttccgtggacagggcttcggcgcgcgcgaggagggcctgcgcctgctgcgcctggctgccagcgcgggcgatgggaaagcggcctaccagctcggcgtgcaggcgctcaagggcgacagccggcaagcgcccgacgcgctggcagccagccgccactgggcactagcggcagaggcgggccacccgctggcggcgcgcaagctggcggaactctaccgcgatggaggcccgggcctggcgccggacagcgagcgcgccgagcactatgcgcaacgggcgtccgcgctcggtctatag

SEQ ID NO: 320361 - DNA, 1749 bp, Pseudomonas aeruginosa
atgaccgtcaccgagcagttgagcgccctggacagcatcctggcccacggcgacctgcactgcctgttccagcccatcctctcgctttccgaacggcgcctggtcggctacgaagcgctgacccgcggtccgtccaacagcccactgcactcgcccctggcgctgttcgccgtggcccgccaatgcggaaggctgagcgaactggaactactctgccgacaacgcgccttcagccgcttccgcgacatccagggcgacgccatgctgttcctcaacgtctccccggagtccctcctcgaggccggtcatccgcccggccgcaccctgcaattgctgcaacagctggggatctcgccgaaccgggtggtgatcgaactgaccgagcagacccccatcgacgacttcgacctgctcgacaccgcgctgcaccactatcgcgccatgggcttctccatcgccctcgacgacctcggcgctggctactccagcctgcgcctgtggtcggaactgcgtccggactacgtgaagatcgaccgccacttcgtcgacggcatccacctggacaccgtgaaacgcgagttcgtcggctccatcctgaagatggcgcgggcctctcgcgcccaggtcatcgccgaaggcatcgaactgcccgaggaactcgcggtgcttagcgagatgggggtcgacctggtgcaaggctatctgttcggccgcccgctggaacacccggcgagcgacgtacaacagatgctgcccagcgctgacgcccccagccagtcttccagcgacgagcacggcgacctgcgtgcgctgctgctggaacagcgcgcggtcgacgttcgcacctcgacccaggaagtggtggaaatcttccgccgccaggccaacctgaactccctggcgatcctcgacgaagaggggcgtcccatcggcatcgtccatcgccacgcgctcaccgacgccttgctccggcccttcgcctgcgacctgttcctgcgcaagccgatcagccgcctgatgagcgacgattttctcgccgtggaactcggccagaccctgcagcaggtcagccgcctgctgaccagccgcgcacgccagcgtatcgaggaagatttcatcatcacccgcggcgggcactatgcgggcatgggccgggtgatcgacgtgctcaggctgatcaccgaggaaaagctccagcaggcgcggcacgccaatccgctcaccttgcttcccggcaacgtgccgatccagcaatgcctcgaacgcctgctgcaacaaaggcgcgaggcggtgatctgctacatcgacatcgacagcttcaaacccttcaacgatctctacggctacgcccgcggcgacgaggtcctgctgtgcctggcacagtgcctgagcgaacggatcgacccgggcagcgacttcgtcggccatatcggcggtgacgacttcatgctggtgctcggccccgaggactggcgcacacggatcgaccggttgctggaaaccttccagagccaatgccggcgcttctacagccgcgagcacctggacgccggctgtttcgttgcgcacaaccgccatggccagcgcgaggagtacccgctgctgtcattgtccgtcggcgtggtgcatctaccggccgaagcctgccagggaatggatgccgcgcacctggcgacgctggcctccgaggccaagcgccaggccaaggcggtgccaggctacagcctgcacctgatcgaggccgcctga

SEQ ID NO: 320362 - DNA, 2130 bp, Pseudomonas aeruginosa
atgcgtcattactccgcgatcagtcgaatcagcatgaagcgttttctgccccgtaccgccctgttgctcctcctcggcgccagttcgctgccgctgttcgcctcgaccgccgtctccgtcggcagcgcccagaattcctgggacagcctgcagccggaccgcgagcaggtcatcgccagcctcaacgtggtggaactgctcaagcggcaccactacaacaagccgccgctgaacgatgaacgctcggccaagatctacgacagctacctgaagatgctcgatccggcgcggatgtacttcaccgccggcgacatcgccgagttcgatcgctggcgcaacaggttcgacgacttcctcaagagcggcgacctcgatcccggcttcgtcatctacaagcgccacctcgaccgcctgaaaggtcggctcgactacgccctggcgatgctcgacaagggcgtcgacaagatcgacttcagcgtcgacgagagcctgctgatcgaccgcgaaaaggccccctgggcgaaggacaccgcagagctcgacgacctctggcgcaagaaggtgaaggacgaggtcctgcgcctgaagatcaccggcaaggacgacaaggcgatccaggaacagctcaccaagcgctacaagaaccagctgtcgcgcctgaagcagacccgcagcgaagacatcttccaggcctacatcaacgccttcgcccagtcctacgatccgcacacccagtacctgtcgccggacaacgcggaaaacttcgacatcaacatgagcctctcgctggaaggcatcggcgcggtgctgcagagcgacaacgactacgtcaaggtcgtacgcctggtgccggccggcccggcggcgaagagcaagcagatcgccacctccgacaagatcatcggcgtcgcccagggcaagggcgaaatggtcgacgtggttggctggcgcctggatgaagtggtcaagctgatccgtgggccgaaaggttcccaggtacgcctggaagtgattccggcgagcaacgcgccgaacgaccagaccagcaagatcgtcgccatcacccgcgaggcggtgaagctggaggaccaggcggcgaagaaatccatcatcaaggtcgaccacgaaggccgcagctacaagctcggcgtgatcgacctgccggccttctacctggacttcaaggcctaccgcgccggcgacccgaactacaagagcaccacccgcgacgtgaagaagctggtcgccgaattgcagaaggacaaggtcgacggcatcgtcctcgacctgcgcaacaacggcggcggctccctgcaggaggccaccgagctgaccggcctgttcatcgaccagggcccgaccgtactggtgcgcaacagcgacggccgcgtcgacgtgctcaacgacgacgaaggcaaggccttctataccggcccgctggcggtactggtcaaccgtctctcggcctccgcctcggagatcttcgccggcgccatgcaggactaccaccgcgcgctgatcctcggtggacagaccttcggcaagggcaccgtgcagaccatccagccgctcaaccacggcgaactgaagctgaccctggcgaagttctaccgagtctccggtcagagcacccagcaccagggcgtgatcccggacatcagctacccgtccatcgtcgacgacaaggaaatcggcgaaagcgccctgcccgactcgatgccctgggacaccatccgcccggtggtgaaggacgaggccaacccgttcaagccgttcctcgcgcaactcaaggcccagcacgacgcgcgcaccgagaacaatgccgacttcgtctacgcccgcgagcgcctggcgctggcccaggagctgatgaaggagaagaccgtcagcctgaacgaggccaagcgccgcgcccagcagaccagcatcgagaaccgccagttggccatggagaacgccctgcgcaagtccaagggccaggagccgctgaaggaactcaagcgcgaggacgagaacgccctgccggaagaggacgacaagaccaagccgcaggacgacgcctacctcaccgagtccgggcacatcctgctggactacctgaacctcaactcggcggtggccaagcactga

SEQ ID NO: 320363 - DNA, 963 bp, Pseudomonas aeruginosa
gtgaacgcattgcaaggtatcgaaggtcgtgtcgagtggtcggaaatcgccgccccgtcctgcggtcagggcgaaatccgcatccgcgtggcggccgccggactcaaccgcgccgacctgttgcagaaggccgggctctacccgccgccacccggcgccagcccggcgctggggctcgagtgtgcgggtgtggtcagcgaggtgggcgcgggctgcacctggcaggtcggcgaccgggtctgcgcgctgctcgccggcggcggcatggccgaggaagtggtggtggacgcgcgccacgtactgccggtcccggcagggctgagcctggcggaggcggcggggattccggaggtctacgccacggcctggctgaacctgttccagttggcggcgttgcagcccggcgagaaagtgctgctgcacgccggcgccagcggcgtcggttcggccggcatccaattgtgcaaggcgttcggcaacccctgctgggtcagcgtcggttccgccgaacgcctggcctactgcgaatccctgggcgccgccggcggcgtgctgcgcaagcagagcctggaatcgctgcgcgatttcgccccgttcgacgtgatcctcgatccggtcggcgcccgctatgccgggttgaacctggagttgctgcggcgcgacgggcgctgggtgatcatcggcctgatgggcggccgcgaggcgcaactggacctggctcaactgctaggcaaacgcatccagttgaccggctcgaccctgcgtacccgtgatgccgagttcaaggcgcagttgatcgccgaactggggttgaaggtctggccattgttctccgccgggaaactccgcgcgcagctggagcgaaccttcccgatcgtcgacgccgaggcggcgttcgaggcgttggcgagcaaccaggtgcagggcaaggtcgtgctggtggtggacccgtcgctggcctga

SEQ ID NO: 320364 - DNA, 651 bp, Pseudomonas aeruginosa
atgagcctggtgatcttcgacctggacgagaccatgatccacggcgactgctccagcctgtggagccagcgcatggcgagtctcggctgggtcgacgaatccttcgtccgccgcgacgccgaactgatggagcagtacgccgagggcaagctgtccatggacctgtacatggactacaccctgcaaccgctgatcggtcgcagcgtcgaggaagtcgagcgggaagtggaagcctacgtcgaggaggtcatcgagccgctgatctacagcgacgcctgcgcctgcctggcgcgccaccgcagcgccaacgaccgggtgctgatcgtctccgcatccggggtgcacctggtcaagccgatcgcggcgcggatcggcgtcgacgaagtcctcgccatcgatctcgaagtgctcgacggacactacaccggccgcaccctcggcaccctcacctatcgcgaaggcaaggtattgcgtctgctcgacctgctggaaggagacgatcgccaactggccgacgcctggttctactcggattcgcgcaacgacctgccgctgctgaagctggtcggccatccgaatacggtcaatccggacccgaccctgctcgcctacgccaaggaaatgggctggccggtcaacgcctggcgctga

SEQ ID NO: 320365 - DNA, 996 bp, Pseudomonas aeruginosa
atgtcgttcgtcagcgtcgaacagctcgacaagagctacggtgccaccagcatcttccgcgatatcgacttcgccgccgcccgcggcgagttcgtcaccctgctcggccccagcggctgcggcaagtccaccctgctgcgctgcatcgccgggctgaccgaggtcgacagcgggcgcatcctcatcgacggcgaggatgtggtgcctttgccgccgcagaagcgcgggatcgccatggtgttccagagctacgcgctgttccccaacatgaccgtgcaacagaacgtcgccttcggcctgcgcatgcagaaggtgccggcggcggaactgaagcagcgggtcgccgaagccatcgaactggtggaactgggcgagtacgccgcacgctacccgcaccaactctccggcggccagtgccagcgcgtggcgctggcccgctcgctggtgacgcgcccgcgcctgctgctgctcgacgagccgctgtcggcccttgacgcgcgcatccgcaagcacctgcgcgaacagatccgccgcatccagcaggagctggggctgaccacggtgttcgtcacccatgaccaggaggaagcgctgaccctgtccgaccgcatcgtcctgatgaacgccggacgcatcgtccagagcggcgacgcggagaccctctacaccgcgccggaaaacgccttcgccgccggcttcatcggcaactacaacctgctcgacgccgaacaggccagccgcctgctcggccagccctgcgcgcaacaggtggcgatccgcccggaatccctgcgcctgggcaacgaaccgagcgaaggcgtgccggcgctggtacgctcgcacagtctgctcggcaacgtgatccgttaccgcgtcgaggccgccggggtggaactcaccgtcgacgtcctcaaccgcagcgcagaccgcctgtatccggccggcagtcagctgacgctggtcatcgatcgcaacagtattcgagaggtagcttga

SEQ ID NO: 320366 - DNA, 798 bp, Pseudomonas aeruginosa
atgtcgcgcgctgatcgacgtcctgccgcgctctaccatcgcctggtggtctgcgcgctgttcctgatcctggtcctgccgctggcggcgaccctgctctactcgctggccacccagtggtcggcgaccctgctgccggacggcctgaccctgaagtggtacctgacgctgtggagcgaccagcgcttcctgctggccttcgcccgctcgctgctggtctgcttcggcgccctggcgttcagcgtgttgctgatcctgccgctgatgttcgtcatccactaccacttcccgcgcctggacggcgtgatgaacgtgctcatcctgctgcccttcgcggtgccgccgatcgtctcctcggtgggcctgctgcaactctatgccagcgggccgctggaaatgatcggcacgccctgggtgctggtcggctgctacttcaccatcgccctgccgttcatgtaccgggcgatcaccaacaacctgcaggcgatcaacctgcgcgacctgatggacgccgcccacctgctcggcgccagcacctggaaggcggcgctgctggtcgtgctgccgaacctgcgcaagggggtgatggtggccctgctgctgtcgttctccttcctcatcggcgagttcgtcttcgccaacctgctggtcggtacccgctacgagaccctgcaggtgttcctcaacaacatgcgcaacagcagcggccactacaccagcgcagtggtggtctcctacttcgtgttcgtcctggtcctgacctgggcggccaatcgactgaacaaggacaaggcctga

SEQ ID NO: 320367 - DNA, 840 bp, Pseudomonas aeruginosa
atgaaacgactctccggcaaatggctggcgctgctgttcctgctgcccttcgcggcgttcttcgtgattttccagatagcgccgctggcctgggtcgcgctgaacagcctgaaggccagcgacgcctggagcctggccaactacctcgagctgttcggctcgcccttctaccgccaggcgatccgccatagcctggagatcgccggctggtcgagcctgctcggcctgctcatcgcggtgctcggcagccattcgctgcgccacgtcgacagccgcctgcgcgacttcgtcatggccttctccaacatgaccagcaacttcgccggggtaccgctggcgttcgccttcatcatcctgctcggcttcaacggcgcgctgaccctgttgctcaagcaggccggctggatcgacgacttcaatctctactcgaagaccggcctgataatcctctacacctatttccagatccccctcggggtgatgctgctctacccggccttcgacgccctgcgcgaggactggcgcgagtccgccgcgctgctcggcgccaacggctggcagtactggcggcacatcggcatcccggtgctgaccccggcgctgctgggtaccttcgtcatcctcctggccaacaccctcggcgcctacgccacggtgtactcgctgaccaccggcaacttcaacgcgatcccgatccgcatcggcgcgctggtcgccggcgacgtgttccccgacccgaacatggccagcgccctggccatggtgctggtcggcctgatgaccctgatcaccctggtccaccaatggctgctgcgcaggagctaccatgtcgcgcgctga

SEQ ID NO: 320368 - DNA, 810 bp, Pseudomonas aeruginosa
atgcgccacgacgtcatcctcgtcctgctggacggcctcaaccacagcgtcgcccgcgactgcatggggcatctccaggccctctgcggcgccggccgcggccagtcgtaccgcctggaatgcgagttgccttcgctgtcccggccgctctacgaatgcatcctcaccggagtgccgccaatcgatagcggcatcctgcacaacgacgtggtccgcctgagccaggaacagagcctgttccactacgcccgcgcggccggcctgagtaccgcggcagcggcctaccactgggtcagcgaactgtacaaccgcgcgccgttcgacccggcccgcgaccgccacaccgacgccagcgcactgccgatccagcgcggacacttctactggagcgaccactatccggactcgcacctgttcgccgacgcggaaagcctgcgccgccggcacgcaccgaacttcatgctggtccactcgatgaacatcgacgacgccgggcacaggcacggcctcgccagccccgcctaccgcaacgccgcgcggcgcgccgacgcactgctgtcggaatacctgcaccagtggctggcggccggctaccaggtggcgatcaccgccgatcacggaatgaacgaggaccgcagccacggcggcatcctcgaggaggagcgcgaggtgccgctgttcgtcttcggcgacgccttcagccgcgacgacctggcgcaaccgctgcagaccgacctctgcggcacgctctgcgaaatcctcggcgccgcccacgacaaacccgtctgccgggagctgctcgccccatga

SEQ ID NO: 320369 - DNA, 1059 bp, Pseudomonas aeruginosa
atgaaacgcatgcttgcttcattgctgggaaccgccatcgccctcggcagcggcctggcgttggccgccgaagcggacctgcaggcgctggaacaggccgcgcgcaaggaaggccaggtcaacagcgtcggcatgcccgacagctgggcgaactggaaggacacctggaaggaccttgagagcaagtatgggctcaagcacatggataccgacatgagttcggcccaggagctggccaagttcaaggccgagaaggacaacgccagcgccgacatcggcgacgtcggcgccgccttcggccccatcgccgtgcagcagggcgtcagccagccgtacaagccgagcacctgggaacagatcccggcctgggccaaggaccaggacggccactgggcactcgcctacaccgggaccatcgccttcatcgtcaacaaacaactggtgaaggacgtaccgcacagctgggccgacctgctgcagggcaagtacaaggtcaccatcggcgacgtcagcgctgccgcccaggcggtcaatggggtgctcgccgcggccatcgccaacggcggcgacgagaagaacatcaagccgggcctggagttcttcggcaagatcgccaagcagggccgcctgtcgctgaccaacccggtgatcgccaccctggaaaagggcgaggtcgaagtcggcatcgtctgggacttcaacggcctcagctaccgccagcagatcgacccggagcgcttcgaggtgctgatcccctcggacggctcggtgatctccggctacaccaccatcatcaacaagtacgccaagcacccgaacgccgccaagcttgcccgcgagtacatcttcagcgacgccggacagatcaacctggccaagggcaacgcgcgaccgatccgcgccgagagcctgaccctgccggacgacgtgaaggcccaactgctgcccaacgagcagtacgccaaggcccagccgatcaaggacgccaaggcctgggaggaaacctccaagcgcctgccgcggcagtggcaggaagcggtgatcatcaacatgcagtga

SEQ ID NO: 320370 - DNA, 717 bp, Pseudomonas aeruginosa
atgcgtgacgaagcgctacccaccgtaacggcgatctgccgggcgctcagcgagcagatcggccatggtctgctgccggcgggtggcaagctgccggccgagcgcaagctcagcgagctgttcgcgacgacccggatcaccctgcgcgaggcgctgatccaactggagtcgcagggcctgatctaccgtgaggagcgccgcggctggttcgtctcccccgagcggctggcctacaacccgctggtccgcagtcacttccatgcgatggtcagcgaacagggccgggtgccggcgaccgaggttctgtcggcccggcagatgccggcgagcgcggcggtctgcgagctgctggagctgccggcgctgtccagcgtctaccagatccgccgggcgcggcgggtggacgggcggctggtgctgtatgtcgagcactacctgaacgcgcagtacttccccggaatcctcggccacgacctgacccgctcgctgaccgaactctatgccagcgagtacggcatccactatgggcgggtgcgtttcgacatggtgcccaccgcactgcatgccgaggctgcggcgccgctgaaggtggcggtgggcagcccggccctgcgcatcagccggatcaaccgcgaccagcgtggtcggctgatcgactgcgacctggagttctggcgccacgacgccatccatatcagcgtcgaggtaccgcagtaa

SEQ ID NO: 320371 - DNA, 552 bp, Pseudomonas aeruginosa
atgttcatactgccgatttcgtccgacctgcacctggagctgctcgaccagccgcgcgcggaggaactgttccgcctggtacgtgccaacagcgagcacctggcgccctggatgccgtgggtgccgctgacgcagagcgtggacgatacccgccgtttcattggcgaaggccagcggttgtgggcggagcgcaggagctgccgctgcgggatcgtagaatccggatgcctggtcggcgtcatcgacctgcacgacttcaccgaggacagtcgcagcgccagcatcggctactggctggcggcgtccgcgcaagggcgcgggctgctggccagcgcgttggggaagacgatcgagctgggtttccttggctacgaccggcagcgcctggtgatccgctgttccaccgagaacctgcgcagccagcgcgccgccgagcgccagggcttccggcgcgacggagtgatccgggccaacgagatcatcgccgggcgtgcccacgaccatgcgatctacacgctgttgcgcagcgaatggcacgctgcgcacgcctga

SEQ ID NO: 320372 - DNA, 1290 bp, Pseudomonas aeruginosa
atgcgcgcagaactcaaccagggcctgatcgatttcctcaaggcctcgcccacgcctttccatgccaccgccagcctcgcccgccgcctggaagccgccggctaccgccgcctcgacgagcgcgacgcctggcacaccgaaaccggcggccgctactacgtgacccgtaacgactcgtcgctgatcgccatccgcctgggccgtcgctcgcccctggaaagcggcttccgcctggtcggcgcgcacaccgacagcccctgcctgcgggtcaagccgaacccggagatcgctcgcaacggcttcctccagctcggcgtcgaagtctatggcggcgccctcttcgccccctggttcgaccgtgacctgtcactggccgggcgcgtcaccttccgcgccaatggcaagctggaaagccgcctggtcgacttccgcaaggccatcgcggtaatccccaacctggccatccatctcaaccgcgccgccaacgagggttggccgatcaacgcgcagaacgaactgccgccgatcatcgcccagctggcgccgggcgaggccgccgacttccgcctgctgctcgacgaacagctgctgcgcgagcacggcatcaccgccgacgtggtactggactacgagctgtcgttctacgacacccagtccgccgcggtggtaggtctcaacgacgagttcatcgccggggcgcgcctggacaacctgctgtcctgccacgccggcctggaagccctgctcaacgccgaaggcgacgagaactgcatcctggtctgcaccgaccacgaggaagtcggttcctgttcgcattgcggcgccgacggtccgttcctcgaacaggtactgcgccgcctgctgccggaaggcgacgccttcagccgggcgatccagcgctcgctgctagtctcggccgacaacgcccatggcgtacacccgaactacgccgacaagcacgacgccaaccatggcccggcgctgaacggcggtccggtgatcaagatcaacagcaaccagcgctatgccaccaacagcgaaaccgccggcttcttccgccacctctgccaggacagcgaagtgccggtgcagagcttcgtgacccgcagcgacatgggatgcggctcgaccatcggcccgatcaccgccagccaggtcggcgtgcgcaccgtcgacataggcctgccgaccttcgccatgcactcgattcgcgagctggccggtagccatgacctggcgcacctggtcaaggtgctcggcgccttctacgccagcagcgagctgccctga

SEQ ID NO: 320373 - DNA, 636 bp, Pseudomonas aeruginosa
atgccgctgtcccagatccgaatcgttcaccaggatgacgccctgctggtggtcgacaagcccaccctgctgctgtcggtgcccggtcgcgccgatgacaacaaggactgcctggtcacccgcctgcaggaaaacggctatcccgaggcccgcatcgtccaccgcctggactgggaaacttccggcctgatggtgctcgcccgcgacgccgacagccaccgcgagctgtcccgccagttccacgaccgcgagaccgagaaagcctataccgccctttgctggggcctgccggaactggacagcgggcgcatcgaactgccgctgcgctacgacccgccgaccaagccgcgtcacgtggtggacttcgagcacggccgccacgccctgaccttctggcgcgtgatcgagcgtcatgaacgctggagcagggtcgagctgacgccgatcaccggccgttcgcaccagttgcgcgtgcacatgctctccatcggccatccgctgctcggcgaccgcctctacgccaaccccgaagccctcgccgcccacgaacgcctgtgcctgcacgccagcctgctgtgcctgacccatccgcagagcggcgaacgcctgcgcttcgagtcgccggcgccgttctga

SEQ ID NO: 320374 - DNA, 255 bp, Pseudomonas aeruginosa
atgagccttttagacttctttcgcagtcggaaatcgcagaacagcgcttccatcgcgaaagaacgactgcagatcatcgttgcccacgaacgtggccagcgcgcacagccggattatctgccccagttgcagaaagacctgctggaagtgatccgcaagtacgtaccgatcgaccaggagcagatccaggtggaactggagaaccagggcaactgctcgatcctggaactcaacatcaccctgccggatcgttga

SEQ ID NO: 320375 - DNA, 816 bp, Pseudomonas aeruginosa
ttggccaaaattctcgtagtcacttccggtaagggtggcgtcggtaaaaccaccaccagcgcagctatcggcaccggcctggccttgcgcggtttcaagaccgtcatcgtcgacttcgacgtcggcctgcgtaacctcgacctgatcatgggctgcgaacgccgcgtggtgtacgacttcgtcaacgtcgtcaacggcgaggccaccctcacccaggccctgatcaaggacaagcgcctcgaaaacctgcatgtcctggccgccagccagacccgcgacaaggacgccctgaccaaggaaggcgtcgagaaagtcatggccgaactgcgcaaggatttcgaatacatcatctgcgactccccggcgggcatcgagaaaggcgcccacctggccatgtacttcgccgacgaagcgatcgtcgtgaccaaccccgaggtttcctcggtacgcgactccgaccgcatgctcggcctgctggcaagcaagtcgcagcgcgccgagaaaggcgaggagccgatcaaggaacacctgctgctgacccgctacaacccggagcgcgtcaccaagggcgagatgctcggcgtcgacgacgtcgaggagatcctcgccatccgcctgctcggggtgatcccggaatcccaggccgtgctcaaggcgtcgaaccagggcgtgccggtgatcctcgacgagcagagcgacgccggccaggcgtacagcgatgcggtcgaccgcctgctcggcaaggaaataccgcatcgattcctcgatgtgcagaagaaaggattcctgcaaagactgttcggaggacgtgaatga

SEQ ID NO: 320376 - DNA, 792 bp, Pseudomonas aeruginosa
atgagccaagccgacctcctcgatcaagaccccgtattccagctcaagggcagcatgctcgcggtgaccatcctcgaactggcgcacaacgacctggcgaggctcgaacggcaactcgccgacaaagtggcgcaagcgcccaacttcttccgcgacacccccctggtcatggccctcgacaagctgcccgaaggcgaaggtcgcctcgacctgccggcgctcctcgaggtctgtcgccgccacggcctgcgcaccctggcgatccgcgccgggcgcgaggaggacattgccgccgcccaggccctggacctgccggtgctgccgccctcgggcgcccgcgaacgaccgctggacatcaaggacagcgccccgcgcaagcctgccgaagagcccagcccgagcgccggtgaagccaggcccgagccggccaaggcggaagagaagcccgccgagcccgtcagccgcccgaccaaggtggtgaagaccccggtgcgcggcggcatgcagatctacgccgccggcggcgacctgatcgtgctggccgcggtcagtcccggcgcggaacttctcgccgacggaaacatccatgtgtacggcccgatgcgcggacgcgcactggccggcgtgaaaggcgacgccacggcgcgaatcttctgccagcagctggccgccgaactggtctccatcgccggtaactacaaggtcgcggaggacctgcgacgcagcccgcagtggggcaaggcagtgcacgtcagcctgtcgggtgacgtgttgaacatcacccgcctttaa

SEQ ID NO: 320377 - DNA, 939 bp, Pseudomonas aeruginosa
atggatcgcccccgtttctccagcgctttcctccatccccgctactggccgctctggttcggcctggggctgctctggctggtggtgcagttgccgtatcccgtcctgctgatgctcggccgtggcctgggggcgctgatgtaccgcttggtcggctcgcgccgcgagattgccgcgcgcaacctcgaactgtgctttccggaaaagtcgcccgccgaacgcgagcgtctgctgaaggagaacttcgcctccagcggcatcgccttcttcgagatggccatgagctggtggtggccgaaggcgcgcctggcccgtcttgcccatatagaaggcctggagcatctgcgcgaggcccaggcgcagggcgagggggtgatcctcatggccctgcatttcaccaccctggagatcggcgcggcgctgctcggccaggtgcacaccatcgacggcatgtaccgtgagcacgacaacccggtgttcgactacatccagcgccgtggccgcgagcggcacaacctcgatgccaccgccatcgagcgcgaggacgtgcgctcgatgctcaaggtgctgcgtggcggccgcgccatctggtacgcaccggaccaggactacggcgccaagcagagcctgttcgtgccgctgttcggcatcccggcggccaccgtcaccgccaccaccaagttcgcccgcctgggccgggcgcgggtgttgccgttcacccagagccgcctggccgatggcagcggttatcgcctgaccatccacccgccgctggaggacttccccggcgagagcgaggaagccgattgcctgcggatcaaccagtgggtcgagcgctgcgtgcgccagcagcccgagcagtacctgtgggcgcaccggcgtttcaagacccgcccgccaggcgaagccaagctctatccgaaacggcgcaagcgctga

SEQ ID NO: 320378 - DNA, 1170 bp, Pseudomonas aeruginosa
gtgtccgatccccttgccccacgtccgccgctcaccggcctgatcctttccgggggcggcgcccgcgcggcctaccaggtcggggtcctggccgccatcgccgacctgctgccggacagcgccggcaatcctttcccggtcatcgtcggtacctccgccggcgccatcaacgccgttggcctggcttgcggcgccctgcaattccgccaggcgatccagcgcctgaccgcggtctggcagggattccgcaccgaacatgtctatcgcagcgactggccgggcgtgacccgccaggcctcgcgcttcctcggccatagcctgctcggcctggggcggcgggtgccggtggcgttgctggacaaccggccgttgcatgagctgctggcacgtgagctggatttttccgggattcatgcggcggtgcgccagcgccagttgcgcgcggtggcggtgaccgcgttcggctacgagtcggggcaggcggtgaccttctaccaggggcgcgcgaccatcgatccctgggtacgccatcggcgcctgggcattcccacccgcctggagcttcggcacctgctggccagcgcggcgatcccgctgctgttcccgccggtgcggatcaaccgcgaatacttcggcgacggcgcggtgcgttcccaggcgcccatcagcccggcgttgcacctgggcgccacgcgggtgctggtgatcggcgtcagcggcaacccggccaccggtggcgacagtgccatgaccggcctgccgccgtccgaccgaccgccgagcctggcgcagatcggcgcccacctgttgaacagcaccttcatcgacagcctggaaggcgacatcgagcagttgcagcggatgaaccagatcggccagttggtggcgccggaggtgcgccgccaggcgggtgggctggagccggtggaggtattgctggtgtcgccgagccggccgctggacgagatcgccgcgcggcactaccgggagctgtcgcgggtgctgcggcttttcctgcgcggtcccggagcgacccgcgccagcggggcgggggtattgagctacctgttgttcgagcgcggctattgcagcgaactgatcgaactgggctaccacgatgcgatgggcaagcgggcggaactggagcgcttcctgcggatcgagcggtaa

SEQ ID NO: 320379 - DNA, 858 bp, Pseudomonas aeruginosa
atgacccgctaccgtgatgtcctcgaactgcataccggccaccccgcctccgatggcgccggcgtccgcctgacccgcgtgatcggcggcccttccccggaacgcttcgacccgttcctgatgctcgaccagttcgatacccagaacccggacgactatgtcgccggtttcccttcgcacccgcaccgcggcttcgagaccgtgacctacatgctcgaagggcgtatgcgccacgaagaccacctcggcaatcgcggcctgctcaagcccggcggcgtacagtggatgaccgccgcccacggcatcatccacagcgagatgccggaacaggtggaaggcgcgatgcgtggcttccagctgtgggtcaacctgccggcgaagaacaagctggccccggccggctatcgcgatatcgagccggaagacgtgccgcgcctggaaaccgccggaggcgtgaaggtcacggtgatcgccggtcgcttcgacgatggccaggcgcagcagatcggcgccgtggaaaggccggacaccgagccgcactactacgacctgcaactgcctgccggcggccgcatcgccccgcgcctgccggacggccatcgcgtgctgctgtacgtctacgaaggcagcctgacggtggaaggcgaacgcccggtggaaatcgccaccaatcgcctggctcggctgtccgaagaaggggaactgagcctgcgcagcgaagccggcgcccgggtactggtgctcgccggcaagccgttgcgcgagccgatcgtccagtacggtccgttcgtgatgaacagccgcgaggaaatcgagcaggcgctacgcgactatcgcgacggtgtcctggccgtctga

SEQ ID NO: 320380 - DNA, 804 bp, Pseudomonas aeruginosa
atgagccgaaccgcacactggatgttcgcccttctgctgagcgctgccgccagcgcccaggccgacgaggccgccgcgccggccgaactgccgccacgccagctcgacggcgacggtttcagccgtccactggaccaactcaagttcaatcctggcctggatcaacgcgaattcgagcgcgccaccctcgacgcactgaacatgtacgatccctgggaatcctggaaccgccgggtctaccacttcaactatcgcttcgacgagtgggtgttcctgcccgtggtacgaggctacgaatacgtcaccccgcacttcgtccgcagcggcgtgagcaatttcttcgacaacctcggcgacgtgcccaatctgctgaacaacctcgcccaattgaagggcaaggcggcgatggaaaccaccgcgcggctgctgttcaacaccaccttcggtgtgctcggcctgtgggaccctgcgaccaggatgggcctgcacaagcgcagcgaggatttcggccagaccctcggcttctacggcgtgggcagcggcccctacctggtgctgccgatcctcggcccgtccaacctgcgcgacaccggcggactggtggtggactacgtcggcgaataccaggtgaactacctcaacgttccccaggccagcggcgaccacccggagatcaccgccctgcgcgtggtggacaagcgctacaacaccagcttccgctacggccagatgaattcgccgttcgagtacgagaaactgcgctacatctataccgaggcgcgcaagctgcagatcgccgagtga

SEQ ID NO: 320381 - DNA, 1362 bp, Pseudomonas aeruginosa
atgccccacttcctccgtttcgctgccctgctcggcggcctcgccctcggttgtgccaatctggcgcaggcccgggacgtggacgccgcgagctacggctatccactgaccaacccgttcgaggcgaccatcgccaccacgccgccggaactgcgtcccgagcttccgcacagcgaggacatcgaccagaaggactacagcctgaaattgcgcccggagcgcgagttcgccctgccggacaacttctggccggtgaagaagctgcgctaccgcctggcccgccaggatcatgcggcgccgctgatcttcatcattgccgggactggcgcccactacgccagcagcttcccggaatacctgaagaagctcttctaccaggccggctaccacgtggtgcagttgtcctcgccgaccagttgggacttcatggccagcgcctcgcgcttcgccacaccgggcttttccagcgacgacgccgatgacctgtaccgggtgatgcaggcggtgcgcgcgcagcagcgcgacctgccggtgaccgactattacctcaccggctatagcctgggggcgctgaacgccgcgttcgtcagccacctcgacgaaagccgccggagcttcaacttcaagaaagtgctgctgctcaacccaccggtgaacctctacacctcggtgagcaacctcgacaaactggtggaaacccaggtcaagggcatcactgactcgcgcaccttctacgaggtggtgctgagcaagctgacccgctacttccggcagaaaggctacgtcgacatcaacgacgccatgctctacgacttccagcagtcaaagcaacgcctgagcaacgaagaaatggccatgctgatcggcacctcgttccgcttctccgccgccgacatcgccttcacctcggacctggtcaaccgtcgcggcctgatcaccccgccgaactacccgatcaacgaaggcaccagcctggagcccttcttcaagcgcgcgctacagtgcgacttcgagtgctacatgaccgagcaactgatcccgatgtggcgagcccgttacgacggcggcagcctgacccaactggtcaaccaggtcagcctctacaagctgcaggactatctgcacgacagcccgaagatcgccgtgatgcacaacgccgacgacgtcatcctcggcccgggcgacctcggcttcctccgccggaccttcggcgaacgcctgaccgtctatccctatggcggtcactgcggcaacctcaactacaaggtcaacgcgcaggacatgctggacttcttcgccacgcccgctgccggacagacccaggtcgccagcgcggccctcacccagcaggcaggaaactga

SEQ ID NO: 320382 - DNA, 222 bp, Pseudomonas aeruginosa
atgctcaagaccctgaccttcaccgtcatgcacttcatcatcgccttcagcgtggcctatgcgctgaccggcagcatagcggtcggcgggctggtggcggcggtcgagccgctgtgcaactcggtcggtttctacttccacgagaagatctggaaacgcttcgagaaagacggcgcgccgcgcccggctagcgcccatggctggctgcaccgccacgcctga

SEQ ID NO: 320383 - DNA, 858 bp, Pseudomonas aeruginosa
atgcgaatgatgcgacgactgttgtgctggagtgcgggcctggcaatgtcggcggctgtgggggtggcggccgcggcggacaagccggtgatcaccatcggttacgtggacggctggtcggacagcgtggcgaccacccatgtggccgccgaggtgatccgcgagaagctcggctacgaggtgaagctgatgccggtggcggcggggatcatgtggcagggcgtggcgcgcggcaagctcgatgccatgctctcggcctggctgccgggcacccacggcgcctactacgagaagatgaaggataaggtggtcaaccttgccatcaactacccggacgcacgcatcggcctgatcgtccccgaatacgtgagcgccaacagcatcgccgacctccaggcgcagaaggacgctttcggcggccgcgtggtgggtatcgatgccggcgccggggtgatgatcaagaccgacgaggcgatcaagcaatatggcctcgactacaagctggtggccagttccggcagcggcatggtcgccgagctgacccgtgccgagaacgagaagaagccggtggtggtgaccggctggattccgcactggatgttcgccaagtggaagctgaagttcctcgacgatccgaagaaggtctatggcgataccgagcatgtcgacaccgtcgccaacccggcgctggaggccaaggccaagccggtctgggagttcctgaagaagttcggctggaaggatggcaacgaggtcggccaggtgatgctggcgatccaggagggcgccaaacccgaggatgcggcgaagcagtgggtggcggccaacccgggacgggtcaaggactgggtgcagtag

SEQ ID NO: 320384 - DNA, 312 bp, Pseudomonas aeruginosa
atgaacgacagcatctaccagcggattgataccaatccgcgcttcaaggagttggtggccaagcgagagcgtttcgcctggatactttcttcgatcatgcttggcctctacgtgatattcatcctgctgatcgctttccagccgcagctgctgggcgcgcgtatcagtcccgattcgtccgtgacctggggcatcccgatgggtgtcggactgatccttgccgcgttcatcctgaccggcctgtacgtgcgtcgcgccaacggcgagttcgacagcctgaaccaggaaatcctcaaggaggcgcagcaatga

SEQ ID NO: 320385 - DNA, 1656 bp, Pseudomonas aeruginosa
atgatcgctcgtctccttgccgcgctcggccttgcggccttcgctccggccctctgggccgacgcgctgaccggcgacgtgcagcgccagccgctgaacgtctcggccatcgtcatgttcgtcgccttcgtcggcgcgaccctctgcatcacctactgggcatccaagcgcaaccgctcggcggccgactactatgccgcaggcggccgcatcaccggcttccagaatggcctggcgatcgccggcgactacatgtcggcggcatccttcctgggtatttcggcgctggtcttcacttccggctacgacggcctgatctactcgatcggcttcctggtcggctggccgatcatcctcttcctcatcgccgagcgcctgcgcaacctgggcaagtacaccttcgccgacgtcgcctcctaccgcctcaagcagaagcagatccgcaccctgtcggcctgcggctcgctggtggtggtggcgttctacctgatcgcgcagatggtcggcgccggcaagctgatcgagctgctgttcggcctcaactaccatgtcgcggtggtcctggtgggcatcctgatggtgctctacgtgctgttcggcggcatgctggcgaccacctgggtgcagatcatcaaggccgtgctgttgctctccggcgcctcgttcatggcgatcatggtgctcaagcacgtcaacttcgacgtcagcacgctgttctccgaagccatcaaggtgcatccgaagggcgaggcgatcatgagtccgggcggcctggtcaaggatccgatctcggcattctccctgggcttcgcgctgatgttcggcaccgccgggctgccgcacatcctgatgcgcttcttcaccgtcagcgacgccaaggaagcgcgcaagagcgtgttctacgccaccggtttcatcggctacttctacatcctgaccttcatcatcggtttcggcgcgatcctgctggtcagcaccaacccggacttcaaggacgccaccggcgccctgatcggcggcaacaacatggcggcggtgcacctggccgacgcggtgggcggcagcctgttcctcggcttcatctcggcggtggccttcgccaccatcctcgcggtggtcgccgggctgaccctggccggggcctcggccgtctcccatgacctgtacgccagcgtgttcaagggcggcaaggccaacgagaaggacgagctgcgggtctcgaagatgaccaccgtggccctgggcgtggtcgccatcgtgctcggcatcctcttcgagaagcagaacatcgccttcatggtcggcctggccttctccatcgccgccagctgcaacttcccggtgctgctgctctccatgtactggaagaagctgaccacccgcggcgccatgatcggcggctggatgggcctgatcaccgcggtgggccttatggtcctcggcccgaccatctgggtgcagatcctcggccacgagaaagccatctacccgtacgagtacccggcgctgttctcgatgatcgtcgccttcgtcggtatctggttcttctccatcaccgacaagtcggcggcggccgacgaggagcgggcgcgcttcttcccgcagttcatccgttcccagaccggcctgggcgcctctggcgcggtggcccactaa

SEQ ID NO: 320386 - DNA, 1800 bp, Pseudomonas aeruginosa
atgcctgacagtttcaacttcgcctcgccgcccttcgaccagttgcgtccccaacagcgcgagaccctcaagcaggccctcagcgtaggctactacgcgccgggggaaaccttgctggaggccggttcggcggtccccgggctgttcgtcctgctcaagggcgtggtcgaggagcgcggcgacgacgggcgagtgttcgcccagtacgccgcggacgacctgttcgacgtccgcgggctgttttccggcagcagcaagcatcgctacctggcgatcgaggaaagcatcgtctacgaactgccggccagttgcttccaccagttgtgcggggagaacccgggtttcgcccggttcttccaggccgacctggcggccaagcgccagttggcccagcgcgacgggcagaaccttgccgagttcatccttacccgcatcgcccgcgagcacttgctgccggcgctggaggtggaggcctcgctgtccctcggcgacgccgcgcgcctgcaattgagccacggcgccgatgccctgctggtgcggctggagagggacgggcccgagctcggcatcgtcacccgcaccgacctcatgagcgcgcacttccgcgacgggcgcagcgagctggaggcgatcgggccgttggcccatggtccgctggccagcgtcgaactgggcgatttcctgttcgacgcgatgatcctcatgacgcgccagcgtatcgagcgggtcgcggtcacggaggacggtcaggtgatcggcctgttgcacctgacccaggtgctcagcctgttctccacccattcccacgtcctggcgctgcgcatcgcccgcgccgacgacctcggcgacctgcgccgctgcgcggaaaccctggacaccctgatcgctaccctggccggcaacggtatccgcctgcgcttcatcatgcagctggtcagcgcgctcaacgagcaattgctcgaacggcttttcgaattgttgctgccgccaaccctgcgcgggcgctgctgcttgctggtgatgggcagcgaaggacgcggcgagcagttgctgaagaccgaccaggacaatgccctggtcctggccgacgatctgccgcaggaacaggccctggcgatgatgcagcgcttcagcgcggccttgctggagttcggttatccgccctgtcccggaggggtaatggccagtcggccggaatggtgcaagccgctggcggcctggcaggcggagctgcgcgggacgctgctggagggcaagccggagcagctgttgcgcctgtcgatcctggccgatgcctggccggtggccggcaacctgcagctgttcgagccgttgcgtcggcaactgcgcggtttcgccgacggcggcgagcgctggctggcggatatcgcggcggcggccctgcaattcgatacgccgctgaccttcctcggccagctgaaaacccaggacgcccgcctcgatctcaagcgcggcgggatcttccccatcgtccacggcatccgcaccctggccctgcgcgaaggcctggagacccgcgggaccctggcacggatcgaggcgctgaagcgacacaaggtcctcgaagcacgcctggcggacgacctgagcgagtctttcgagctgttcctgcaactgcgcctgacccgccagttggccggccaacgcgacggtcgccagcagggcctggacgtcagcggcatgagccgccacgatcgcgacatgctgcgctacggcctgcatgtggtgaagaagttcaagcagagcgtggcccgtcaattccacctggagacccgatga

SEQ ID NO: 320387 - DNA, 627 bp, Pseudomonas aeruginosa
atgaacaccatggtcaagttgcccgacagccgctggccgggctggcgccgccggctgtattggtggatgcacgaggcggtcgaggcggaggaagtgatctccctcgatctcgagaccaccagcctcgacccgcgtcgtgccgacatcctcagcatcggcgcggtgctggtgcggcgcggcaaactggtcatgggcgagcgcctggaactctacgtcgagccgccgccgagcctggatgcggagtcgatccgcatccacaagctgcgccgcgccgacctggagggacagttgcagctggagcaggccctgcgccaggtgctggcgttcatcggcgaccgaccgctgctgggctactatctgtcgttcgatgtcgccgtgctgaaccggcacctgcgccagctcctcgaccgacagttgcacaacccctccatcgagatttcgtcgctgtaccaccggaaggtcagccggcattttcccgacgcacacatcgacctgcgcttcgacaccctggcgcgggccctggatgtgccggtcagcggtcgccacaccgccctcggcgacgcccaggcggtggcgctgatgttcatgcgtctgctcaaggggccggcgcccaaggtcatccactga

SEQ ID NO: 320388 - DNA, 159 bp, Pseudomonas aeruginosa
atgagtctcggtacgattcttctgatcatcctgatcctgctgctgatcggcggtctgccggtctttcctcattcgcgcaactggggctacgggccctcggggatcatcggcgcattgctggtggtgctgttggtcctgttgctgctgggcatgatctag

SEQ ID NO: 320389 - DNA, 1125 bp, Pseudomonas aeruginosa
atgccgatccagacgcttgccacccttgccgatatcgacgccgccgagtgggacgccttgctgcctcccgcccagccattcctgcgtcatgctttcctgtccgcgctggaagacagccacagcgtgacgcccgctaccggctggcgcccggctcatcgcgtgctgcgcgatccgcaagggcggctgtgcgcggcgctgccggcctatgtgaaggcgcactcgtacggcgaatacgtgttcgactggagctgggccgacgcctgccagcgggccggtatccgctactacccgaagctgctggtaggggtacccttcaccccggtcgccggtgcgcgcctgctgggcgaggacgaagggttgcaggggctgctcgcgtcccttggcgaggaggccgaggcgagcggtctgtcgagcatccatgtgaatttcaccgacgcccgggcggacaccttgcttgccgcgcgtgacggttggctcgaacgcctgggttgccagtaccactggcacaaccgcggctatcgggacttccaggacttcctcgaggccctcagttcgcgcaagcgcaagcaactgcgcaaggagcgcgaacaggtcggcggacagggcatcgagttcgaatggcgggaaggcggccagttgtccgaactggagtgggatttcgtctatctctgctacgccaacacctacctggtgcgcgaccgcgatccctacctgagccgcgagttcttcggcctgctggccgagcgcatgccggaggcgatccgcgtggtcttcgcccaccagcgtggcaagccggtggcgatggcgttcagcctggtcgctggagataccctgtacgggcgctactggggatgcctggccgagttcgaccggctgcacttcgagacctgcttctaccagggcctggaattcgccatcggcgccggcctggcgcgcttcgacgccggcgcccagggcgaacacaagctgatccgcggtttcgagccggtgctgacgcgctcctggcactacctggcgcatcccggtctgcgcgatgccgtggcgcagttcctcgaacaggagcgggcgggtgtgcgcgcctacgccgaggaggcccacggcctgttgccctaccgccaggcctga

SEQ ID NO: 320390 - DNA, 267 bp, Pseudomonas aeruginosa
atgaaacttgcctctgtcgtgtccgccgtcatcaccagcctcgcccccatggccttcgcccaggacgtggacaaggacccgggccgcggcctgccggtcgaggaataccactacggcatgcaactggacgtgaagaatgtcctgcaccgtaccgacaattcgaccaggaccggcgtagtgccggtgaccgtggtctacgaggaccatagcggcgagctgcacaagatccgcttcctcgaatggggcggcagcaccagcaacggctga

SEQ ID NO: 320391 - DNA, 1833 bp, Pseudomonas aeruginosa
atgctttatcgtcgtttcgaacgtctgatcgacccgttccgcagtgcttccgaacgcatgccgcccagcgaagtgctgcgtttctatgtctacttcctgcgccaggtctggccggcgttcctggccctgctggtggtcggcctgatcgtcgcgctgatcgaggtggcgctgttcagctacctcggccgcatcgtcgatctcgcccagagcacgcccagcgcggagttcttccgcgtgcacgccaacgaactgatctggatggcggtggtggcgctggtcctgcgcccgctgttcaacgccctgcacgacatgctggtgcaccagagcatcaacccgagcatgaccaacctgatccgctggcagaaccaccgctacgtgctcaagcagagcctcggcttcttccagaacgatttcgccgggcgcatcgcccagcgcatcatgcagaccggcaactcgttgcgcgattcggcggtgcaggtggtggacgccctctggcacgtgctgatctataccgtcagcgccctggtgctgttcgccgaggccgactggcgcctgatgatccctctggtgctgtgggtgttcgcctacgtcggcgccctcgcctacttcgttccccaggtcaagcgccgctcggtggaggcctcggattcgcgctcgaagctgatggggcggatcgtcgacggctacaccaacatcaccacgctgaagctgttcgcccacacccgccaggaagaggactacgcccgcgaagcgatcggcgaccagaccctcaagtcgcaacgcgccgggcgcgtagtgacctccatggacgtgaccatcacggtgatgaacggcgtgctgatcaccggcaccaccggcctggccctgtggctgtggagccaggagctgatctcggtgggcgccatcgccctggccaccgggctggtgatccgcatcaacaacatgtccggctggatcatgtgggtggtcggcggcatcttcgagaacatcggccaggtccaggatggcatgcagaccatcgccctgccgcgcaaggtggtcgaccgcgaggacgcccagccgctgcgggtagagcgcggcgaggtggagttcgagcacatcgccttccactacggcaagggcagcggcgtgatccagggtctcgacctgaaggtccggcccggcgagaagatcggcctggtcggaccttccggcgccggcaagtcgaccctggtcaacctgctgctgcgcctgtacgacctggagagcggacgcatcctggtcgatggccaggacatcgccggggtgacccaggaaagcctgcgcgcgcagatcggcatggtcacccaggacacctcgctgttgcaccgctcgatccgcgacaacctgctctacggccgccccggcgccagcgacgcggaactcatggaagcggtgcgcaaggctcgcgccgacgagttcatcccgctgctcagcgacgccgagggccgccgcggcttcgacgcccatgtcggcgaacgcggagtgaagctctccggcggccagcgccagcgcatcgccatcgcccgggtgctgctcaaggacgcgccgatcctgatcctcgacgaagcgacctcggcgctggactcggaagtcgaatcggcgatccaggaaagcctggagaccctgatgcagggcaagacggtgatcgccatcgcccaccgcctgtcgaccattgcgcgcatggaccgcctggtggtgctggacaagggccacatcgccgaaagcggcacgcatgccgagttgctcgcccatggcggcctctatgcgcgcctctggcaacaccagaccggcggcttcgtcggcgtcgactga

SEQ ID NO: 320392 - DNA, 564 bp, Pseudomonas aeruginosa
atgctcaaacgtctcctgatcgccgcctgcaccctgctcttcgccggttccctgctggccgccacgcctgccgccaagccgcacgtcctgatcgccaccagcctcggcgagatcgaggtagaactcgatccggccaaggcgccgatcagcgtgaagaacttcctcgagtacgtcgacagcggctactacgacggcaccctgttccaccgcgtgatcccgggcttcatggtgcagaccggcggcttcagcgccggcatgcaggagaagaagacccgtgcaccgatcaagaacgaggccgacaacggcctgctcaacgagcgcggcaccctcgccatggcccgtaccggagtggtcgattcggccaccagccagttcttcatcaacctgaccgacaacgacttcctcaaccatggtgcccgcgacttcggctatgccgtgttcggcaaggtggtgcgtggcatgggcgtggtcgaccagatcgccaaggttcccaccacccgccgcaacggcttcgccgacgtgccgagcgacgacgtggtgatcctgtccgccaaacgcctctga

SEQ ID NO: 320393 - DNA, 828 bp, Pseudomonas aeruginosa
atgcctgacttccagcaccgcgactgcaccctcgtctacgacgaccaccccggtcccaccgagcgcgcgccggtcctgctgctgcacggtctcggttcgagcgcccgcgactgggaataccagttgccggccctgctgggccactaccgcctgctggtcccggacctgcgcggccacggccgctccggcaagccgcgcggcggctacagcatggccggcttcgccgaggactgcgcggcgctgctcgaccggctcggctgcggcccggtacacctggtcggcatcagcatgggcgggatgatcggcttccagttggcctgcgaccgacccgacctgctgcgcagcctgaccatcgtcaacagcactccggaagtcatcccgcgcaagcctcgcgaacatctggaggtggccaagcgcaagctcctctcgcgcctgctcagcctgcggaccatcggccgcgccctcggccggctgttgtttcccaaggcggaacaggccgggctgcgagagaagatcgaggcgcgctgggcggagaacgacaagcgcgcctacctggccagcctcgacgcgatcatcggctggggcgtgcaggaacgattggccgagatcgcctgtccgaccctggtgatcagcgcggatcgcgactacacgccggtatcgctgaagcaggcctattgcgagcggatcgccgacgcccgcctggtggtggtggaggactcccgccacgccacgccgatggaccaacccgagattttcaacaccaccctgctcggcttcctcgccgatatcgataaaaccaaggaacaaccatgctcaaacgtctcctga

SEQ ID NO: 320394 - DNA, 930 bp, Pseudomonas aeruginosa
atgaaagcgccacgcgtaaccctggaccaatggcggaccctgcaggcggtggtcgaccacggcggcttcgcccaggccgcggaagccctgcaccgctcgcaatcgtcgatcagctataccgtggcgcgcatgcaggaacagctcggcgtgccgctgctgcgcatcgacggacgcaaggcggtgctgaccgaggccggcgaagtattgctgcgccgttcgcggcaactggtcaagcaggccgggcaactggaggaactggcgcaccacatggaacagggctgggaacccgaggtgcgcctggtggtggacgccgcctaccccaccgcgcggatcgtccgctcgctgtccgccttcatgccgcagagccgcggctgtcgcgtgctgctgcgcgaggaagtgctctccggcgtcgaggaagcgctgatccagggcgccgccgacctggcgatcagcggcctgatcattcccggccacctcggcgccgacctcagcgtggtcgagttcgtcgccgtggcccaccccgaccatccgctgcaccgcctgcaacgcgaactgacccaccaggacctggaaacccagatgcaggtggtgatccgcgacagcggccggctacagccgcgcgaccacggctggctgggcgccgaacagcgctggacggtgggcagcctggctaccgcggcgaccttcgtcggcaacggcctgggcttcgcctggctgccgcgacacatcatcgagcgcgaactgcagagtggccagctcaagccgctgccgctgagccagggcggcgtgcggcagagccgcttctacctctacaccaacaaggaaaagccgctcggcccggccagccagatcctcatggaaatgctcaagtcgttcgccaacgtaccgctcaacgcgcccttcgcggcgcccgaaccggccgccgagtga

SEQ ID NO: 320395 - DNA, 318 bp, Pseudomonas aeruginosa
atgaaaaggctttgctgtttcgcactatcgctgctgcccctgtccgctttcgcctatccgatcgaggtcgacccgcaactcaacggcaccgaggtctcctacagcacccaggacatcgggcgcgacatgggcgcgatccttctcaccaacctgggaggccaggcggcagagtgcacggcggtgttccgcaacggcccggagaccccgaaagtgcgcaagggcgtgatccagcccgggcagaacagcaacttcaccgcgcaattcggccgcgacatcatcaagttgcggatcaagctgacctgcaagatcgcgaaatag

SEQ ID NO: 320396 - DNA, 642 bp, Pseudomonas aeruginosa
atgtcccgtgtcctggttatcgagagcagtgcccgccaacggggctcggtttcccgcctgctgacggcggaattcatctcccactggaaaatcgcgcatcccgctgatcgcttccaggtccgcgacctggcgcgcgagccgctgccgcacctcgatgaattattgctgggagcctggaccaccccctgtgatggccatagcgctgcggaaaggcgcgccctcgagcgttccaatcgcctgaccgaggagttgcggatggcggacgtgctggtgctggcggcaccgatgtacaacttcgccattcccagcagcctgaagagctggttcgaccatgtgctgcgcgccggcctgaccttccgttacgccgagcaggggccggaaggcctgctacagggcaagcgcgccttcgttctcaccgcccgcggcgggatctacgccggcggtggtctcgatcaccaggaaccctatctgcgccaggtgctgggcttcgtcggcatccacgacgtcaccttcatccacgcggagggcatgaacatgggcccggaattccgtgagaaaggcctggcgcgagcccgtgagcggatgcggcaggcgctggaaaccgacacctccctttgcgtccctctgccaacgctccggtga

SEQ ID NO: 320397 - DNA, 900 bp, Pseudomonas aeruginosa
atgaatcgacgttccgccctcgccgccctgcacggcggcgccctcctcttcggcctgaccggggtgttcggcaagctggccagcgcctcccccggggtgatcgtgttcggtcgtgcgctgttcgcggtgctcgccctcggcctcttcgcccgcctcgcgggccaggcctggcgcgccctgggacccgcgcaatggctgcgcctggcgctctgcggcctgctcctggccggccactgggtgagtttcttcatcgccgtgaagaccgccggcgtggccatcgccaccctcggcttcgccagcttcccggccttcacggtaatcctcgaagggctgctcttccgcgagcgcattcatctcgcggaaggactgctggtggtcctggtcagccttggcctggtgctggtcacgccgaacttcgacctcgccagcagcgccaccctcggcctgctctgggcgatcctttccggcctgctgttcgccctgctgtcgctggccaaccgtagcaacagcgggcaggtcggcccggtgcaggcggcgctctggcagaacctggtagtcgccctgtgcctgctgccattcgcggtcggcgaactaccggcgctacccgctctcgactggctctggctggccctgctgggcgtcttctgcaccggcctggcgcacagcctgttcgtggccagcctggcggtggtcaaggcccgcaccgcggcactggtattcgccctggagccggtctacgggatcgccttcgcctggctgctgttccatgagacgccggggccgcggatgttcctcggcggtgccctgatcatcctcgccatcgtgctgtcggcgcgcctcggtgcacggggcaggaaaaccgcagtcggcgacgaacgaggcgatcccgagcgcgcctga

SEQ ID NO: 320398 - DNA, 336 bp, Pseudomonas aeruginosa
atggacatcatcgaatggcaggatttcgaacgcgtcgaactgcgcgtcggcaccatcctcagcgccgctcccaaccccaaggcacgcaaacccgcctatgtcctcgaggtcgacctcggaccgctcggcctgcgcacctccagcgcgcaactgaccgcacactaccaggccgagcaactggtcggacgccaggtcctctgcgtctgcaacttcgctccgaagcagatcgccggggtgcgctcggaggtcctagtcaccggggtctacgatagcgaggacaaggtggtcctggccggcttcgacaagcccctgcccaacggtgcgcgcctggcctga

SEQ ID NO: 320399 - DNA, 765 bp, Pseudomonas aeruginosa
atgggttcgatcctttccctgcgccactacagccacgaccagatcgtccacagccatgaccatgcccaattggtcctgggcctcagcggctgcctcgacttcgaggtcgaggggcgcggcagccgcgtgttgcggcagaccttcgcggtggttccggcgcaagcccggcatgcctgctcgagtccctccggcagccgctgcctggtcctcgacctgccctgcgacggcagcctgctgctgggcctgggcgaacacgccgaagccggcaggcggctgttcgagcgaccgcaggcgctgtcgctgacgcccgcccagggccaactggtgaactggctggccagcggcccgatcaacgacccggtgatcgcccaccagggcgccggcctgctcctcgccagcctggccagcgagcgccagccgccgcgccagcagccccgcctgccactggccagcctcgacgcctacctcgaccgccatgccgcccatccgctacaggtagccgacctggcgcggctggccggtctttcggtggcgcgcttccacagcctgttcctcgccgagaccggacagacgcccatggactacgcgcgcagccgacgcctgcaccaggcccacgaactgttgctggagagcagcctggcggtgggcgagatcgccgcccgggtcggctacgcctcgcagagcgccttcaccgcagcgctggtccgcgagttcggcgtcaccccgcgacaactgcgtcgcgagtcccgcgacaaaaccggctag

SEQ ID NO: 320400 - DNA, 813 bp, Pseudomonas aeruginosa
atgagcaccgcgcaacgcttcacctcgaaccgcaagcagcgggtccggaccctgtggatctcggatgtccacctggggacgcgggattgccaggccgaacacctggcggcgttcctcaagcgctaccacgccgatcgcatctacctggtgggcgacatcatcgacggctggaagctgcgcggcggcatctactggccgcaggcgcacaccaacgtgatccgccgcctgctcaccctgagcaagcgcggcaccgaggtgatctacgtcactggcaaccatgacgaattcctgcgccgttattcgagcctgatcctcggcaacatccgcctggtcgacgaggcggtgcacagtaccgccgacggccgcaagctgctggtgatacacggcgaccagttcgacgtgatcacccgctaccaccgctggctggcgttcctcggcgattccgcctacgagttcaccctgctcctcaaccgttggctgaaccactggcggcggcgctggggctacggctactggtcgctgtcggcgtacctcaagcacaaggtcaagaccgcggtgaacttcatcagcgacttcgaggaagccatcgcccacgagtgccacaagcgcgggctcgacggggtggtctgcgggcacatccaccatgccgagatccgccgcatcgagggcgtcgattacctcaactgcggcgactgggtggagtcctgcacggcgctgatcgaacactgggacggcagcatccagctctaccgcctggccgaggagcaggcgcggctggcggcgcaggccgcggcggtcgagccggcggcatga

SEQ ID NO: 320401 - DNA, 1056 bp, Pseudomonas aeruginosa
atgaggctattgatcgtcagcgacgcctggttaccgcaagtcaacggagtcgtcaccagcctgctggccctgcagcgcgagctggaactgctgggccaccaggtacgggtgctgtcgcccgccgacttccgctgcctgccctgtcccagctatccggaaatccccctggcctggaacctctggcgcctcggcgggctgatcgaggccttcgccccggatgccgtgcacctggccaccgaggggccgctcggctgggccgcgcggcgctggctgggcaagcgcggcctggacttcacctcggcgatccatacgcgctttcccgaatacctgcgtgaccgctgtccgtggctgccgttgtcctggggctatgccttcctgcgcaccttccatcggccgagccgggcggtgctggtgagcaccccgcgcctgcgcgacgagttctgcgcctggcgcttccagcacctgcggctgtggcgcaagggcgtcgataccgaactgttccatcccgccgagacacctccggcgaaagagcggccgccggtgttcctgtatgtcgggcggctggcgacggaaaagaacctggaggcgttcctcgatctcgaactgccgggcgaaaaatggctggtgggcgacggcccgcagcgggcggcgctggagcagcgctatccacaggcgcgttttctcggctaccgccatggccgcgcgctggccgacgcctaccgggcggcctcggtgctggtgttcccctcgctgaccgatacctatggcctggtgatgctcgaagccctggcctgtggcgtgccggtggcggccttcgccgtgccggggccgctggatgtattgcagcagggcgtgaccggggtcatgcacgaggatcttggcgaagcctgccgccaggcgctggcgctggatcgccaggcctgcgggcgctgggcgcgggagcagtcctggcgggtttcggcggaggagttcctggcgctgcaggcgagcggcccacggactgcgccggaatggcgcgacgaactgccggcggcgttcgacgaacttagaggatga

SEQ ID NO: 320402 - DNA, 1341 bp, Pseudomonas aeruginosa
atgcgtgaatactattcgcgcgtgctggcctatatcgcctgtggcgccagcatcgcggcgggaacctacacccagtatttcagctacggcatcctctggatggtgccctatgcgctgctctacccgcacctggcgtaccacctcggccagcgcttccgccagcacgacccgcgcaaggtgacccgcgccctgctcgcggtcgacgccgtgcactgtggcctgggcatggcgctgctcggcttctccgtggtgcccagcctgatgttcctgctggtgctgagcttcaccgcgctggtcatcggcggcctgcgcctgctcggcatggccttgctggtatcggccagcagcgccctgctggtcgccgtgctcgtcgccccgccgctgctgggcaataccccggtcgaggtggccgcggtcagcatcctgttctgcggactgtacatctgcatcaccgccttcttcggccaccagcagggcctgcgcctggcccaggtgcgccaggagatcgcccgcgagcaggaaaaggccgcgcggctcgcgcgcaacctggccaagtacctgtcgccgcaggtctgggaaatgatcttcagcggcaagaagagcgtgcgcctggaaacccagcgcaagaagctcaccgtgttcttctccgacatccgcggcttcaccgagctatccgaggaactggaagccgaggccctgaccgacctgctcaacaactacctcaacgaaatgtcgaagatcgccctcaagtacggcggcaccatcgacaagttcgtcggcgactgcgtcatggtgttcttcggcgaccccagcacccagggcgcgaagaaggacgcggtggcggcggtatcgatgggcatcgccatgcgcaagcacatgaaggtgctacgccagcagtggcgggcccagggcatcaccaagccgctggaaatccgcatgggcatcaacaccggctattgcacggtgggcaacttcggcgccgacacgcgcatggactacaccatcatcggccgcgaagtgaacctcgccagccgcctggaaagcgcctcggaagccggcgaaatcctcatttcccacgagacctactcgctgatcaaggacgtgatcatgtgccgcgacaagggccagatcgcggtcaagggcttcagccgcccggtgcagatctaccaggtggtggactcgcgccgcgacctcggcgccgcgcccagctacgtcgagcacgaattgcccggcttctccatgtacctggacaccaacaacatccagaactacgacaaggaacgggtcatccaggccctgcaacaggccgccgaacgcctgcgcgacaaggtcatcctctaa

SEQ ID NO: 320403 - DNA, 318 bp, Pseudomonas aeruginosa
atgagcagccctgatgacgagcgtttccacagtttcgccgagttctacccctactacctgcaggaacacagcaacgcggtgtgccgccgcctgcactacgtcggcagcctgctggtgctggcggtgctcttccacgccgtggccagccagcagtggctatggctgctggcgctgccgctggtgggctacggcttcgcctgggtcggccacttcgtcttcgagaagaaccgcccggccaccttcaagtacccgctgtggtcgttcatgggcgactgggtgatgctcaaggacgctttcaccggccgcatccgcttctga

SEQ ID NO: 320404 - DNA, 996 bp, Pseudomonas aeruginosa
ttgtccagctgggtccagggcatcgtcctcgccctggagctggaaggcctcgacggacgccagctgttcgccgagctgggcctcgactaccaggccttgcaggaccccgacgcgcgcttcccgcaggacgccatgagccgtctgtggcagcgtgcggtggcgctcagcggcaacccggcgatcgccctgaacatcgcccgggtccggcgcccggctttccacgtcgtcggctatgcgctgatgtcgagccgcaacctggcggaaggcttcgcgcgcctggagcgctaccagcggatcatcgcggaagcgtccgacctgactttccgccgcacgccgcagggctatcgaatcggcgtcacggtgcatggcgatcgcctgccggcgccaccgcagagtgccgaatgctcgctggcctacctggtggacatggtccgctggatcaccggccggtcgctggacccgctggcggtggaactgcccggcgcgccccgcgagccgctggcaccctatgtcgagctgttccgcgcgccgctgcgctttcacgccgaggagttcgcgctggtgttttcccgcgtcgacctcgagacgccgctaccctcggccaacgaggcgctggcccagttgcacgatcgcttcgccggcgaatacctggcgcgtttcagtaccagccgcattacccatctgacccggcagaccttgtgccggctgctgccgcagggagaacccaagcgcgaacgggtggcccaggcgctgcacctgtcgcagcgcaccttgcaacggcgcctccaggaagaaggcaccagctaccagcaactgctcgacgacacgcgccgggatatggccgaacagtatctccagcagcccggcctgaccttgctggaagtcgcctacctgctgggtttcgccgatccgagcaatttcttccgggcattccgccgctggttcggctgcacgcccaacgaataccgggcgcgccgccaggagcgcccgggctag

SEQ ID NO: 320405 - DNA, 645 bp, Pseudomonas aeruginosa
atgaggctcgcccttcgcccgctgcgtcgcctgtccctggccgccggcctggccgcgctcgccaccctcggcgcctgctcgatcctgccggaggcgcaggtcctccaggtctacctgctaccggtgcacaaccctccggccagcgccgccgcgcggccggtcgactggtcgctgcggatcgcccggccgcgtaccagcctggtgctggagagcccgcgcatcgcggtgcgcccgcacggcgacgaaatcagcgtgtaccagggcgcgcgctggagcgatccggcgccgtcgctgctgcgcgaccgtctgatgcaggcgttccaggccgacggccgggtccgcggcctgagcagcgacgacagcaacctgcaggccgatttcgaactgggcggcgaccttcgcgccttccagaccgagtacccgaacggccaggccagcgcgctgatccgctacgacgcgcgcctggtgcgtaccgacgacaagcgcgtggtcgccagccggcgtttcgaggtcagccagccggtggatggcaagaaggtcgcggcggtggtcagcgccttcggcaaggccggcgatacgctgtcggcccaggttctcgactggaccctgcgccaggcctcggcgcaacccgccgtgcagccctga

SEQ ID NO: 320406 - DNA, 939 bp, Pseudomonas aeruginosa
atggaaacccgagcccaccatgtgttgatcggcctgttcagcgtgatcgtgatcggtgccgccctgctcttcggcctgtggctggccaagtccggctcggagggcaagttcaactactacgacatcgtcttcaacgaagcggtcagtggcctttcccagggcagctcggtgcagtacagcgggatcaaggtcggcgacgtggccttcctccgcctcgatccgaaggacccgcgcaaggtctgggcacgcatccgcgtggtggccagcgcgccgatcaagcaggacaccaccgccaagctggcgctcaccgggatcaccggcacctcgatcatccagctcagcagcggcacgcccgccagcccgatgctggagggcaaggacgggaagatcccggtgatcgtcgccacgccctcgccgctgacccagttactgagcaacggcgaagacctgatgggcaacatcaaccagctcatcgcgcgcttcagcaacctgctctccgaggaaaacacagcgcgcatcagccgcaccctcgaccatctcgaccaggccaccggcgcgctctccgccgagcgcgagaacgtcagcgcggtgatgcagcagttggcccaggcgagcaggcaggccaacgccgccctggcccaggccagcgagttgatgcgcagcgccaacggcctgctcaacgagcaaggcaaggggatgctggaaaacgccaacaagaccatggcttcgctggagcgcaccagcgccaccctcgaccagttgatcagcgagaatcgccactcgctggacggcggcatccagggactcgccgagctgggcccggcggtcagcgaactgcgcgataccctggcggcactgcgcggaatcagccggcgcctggaagagaacccggcgaactacctgctgggccgggaaaaaaccaaggagttcaccccatga

SEQ ID NO: 320407 - DNA, 795 bp, Pseudomonas aeruginosa
gtgaaccaggacaacccgcaggcgatcatccaggtccgcgacctgtgcaaccgtttcggcgcccaggcggtccacgagcacctcgacctcgacgtccgtcgcggcgagatcctcggcgtggtcggcggctccggcaccggcaagtcggtgctgctgcgcagcatcgtcggcctgcgtcggccgacctccggcagcgtgcgggtgttcggcgaagacctgctgcaactgccagaggagcgccgctccctggtcgaacggcgcttcggcgtgctgttccagcagggcgcgctgttttcctcgcttaccgtggtggagaacgtcgccctgccgctgatcgagaacgccggcctgccgcgcgccgacgccgagcacctggcccaggtcaagctggccctggccgggctaccggccaacgccggcgacaagtatccggcctcgctttccggcggcatgatcaagcgcgccgccctggcccgcgccctggcgctggacccggacatcctgttcctcgacgagcccaccgccggcctcgacccgatcggcgcggcggccttcgacaacctgatccgtaccctgcgcgacgccctcggcctgacggtgttcctggtcacccatgacctggacaccctgtacaccatctgcgaccgggtcgccgtgctgtcgcagaagaaggtcctggtagtcgataccctggaacgggtcgccgccaccgacgacgcctgggtccgcgaatacttccacgggccgcgcgggcgcgccgcccaccaagccgccgccgtgccggagaatcactga

SEQ ID NO: 320408 - DNA, 1146 bp, Pseudomonas aeruginosa
atgacgacacagccgcaacccggccacgtgagcctggatagctccacccagcccgcccgcgtcagagccataggtgattggacgctcgcccactacacggctctggagcgcgaggtgacgcgcctgcgcagcgaagtggcgggcaacgccagcttcgacctgagccaactgggcgccctggataccgccggcgccgccctgctcgccgaattgctcggcgccgagcgcctggccgacctcgccgagctggagcccggcctgccgcgcgagcgccaggccctgctgaagaccgtcggccacgccctgcacgacttctgcgagccggagaaacccaagccgccaaccaccgccatcgaactgctggctcgcatcggttgtgccatggagaccttctggctgcacctcaaggcactcctcggcttcatcggcctgaccctggagaccctgttccgcagcctggtccgcccggccagttggcgggtcacgccgctggtggcgaacatcgagaagagcggcctggacgcggtgccgatcatcgccctgctgaccttcctggtcggcgcggtgatcgccttcctcggcgccacggtgctggccaacttcggcgcgaccatctacacggtcaacctggtggtgttctccttcctccgcgagttcgccgtgctgctcaccgcgatcctcatggccggccgcaccgccagcgccttcaccgcacagatcggctcgatgaaggccaacgaggagatcgacgcgatccgcgccctcggcctcaaccccatcgagctgctggtgctgccgcgggtgctggcgctgctggtatcgctaccgatgctgaccttcgtcggcatgctctgcggcatcgtcggtggcatgaccgtctgcgcctggaccctggacatcccgccggcgatgttcctgtcgatcatggaggacggaatcggcgtacagcatttcctggtcggtatcagcaaggccccgctgttcgccttcctgatcgccgtgatcggctgcctggaaggcttcaaggtcagcggcagcgcccagtcggtgggcgagcacaccaccaccagcgtggtccactcgatcttcgtggtgatcctgctcgacgccctcgccgcgctgttcttcatggagatgggctggtga

SEQ ID NO: 320409 - DNA, 1455 bp, Pseudomonas aeruginosa
atggccttgccgaccctacgtatcctcggtttcatcatcggcatcttcctgatcactctggccgccagcatgctggtcccgatcctgaccatgctcgccttcgaccgtaccgaaggcatccaggcattcatctggtccagcgtcgccaccttcgtcaccggcctcggcctggtcctgccggggcgtcccgagcatgtccacctgcgcccgcgggacatgtacatgctcaccgtatcgagctgggtgctggtatgcatcttcgccgccctgccgttcgtcctgcagcagcacatcagctacaccgatgccttcttcgaaagcatgtcgggaatcaccgccacgggctccaccgtgctcagcgggctggacgacatgtccccgggcatcctcatctggcgctctctgctgcactggctgggcggcatcggcttcatcgccatggccgtggcgatcctgccgatgctgcggatcggcggcatgcgcctgttccagaccgaatcctcggaccgctcggaaaaagtcctgccacgctcgcacatggtcgccaagtacatcgtcgccacctatgtcggcatcaccctgctcggcagcctggccttctggggcgcgggcatgagcccgttcgacgcggtcaaccacgccatgtcggcgatttccaccggcggtttctccacctccgaccaatccctggccaagtggaagcagccagcggtgcactggaccgcggtagtggtgatgatcctcggcagcctgccgttcgcgctctacgtcgccaccctgcgcggacaccgcaaggcgctgatcaaggaccagcaggtccgcggcctgctcggcctgctgctggtgacctggctgctgatgggcacctggtacgcggtaacctccaagctgccctggatggatgctttccgcatcgtcgcagtgaacgtcacctcggtggtcaccaccaccggcttcgccctcggcgattacagcatgtgggggcacttctcgatcatgctgttcttctacctcggcttcatcggcggttgctccggttctaccgccggcggtatcaagatcttccgcttccaggtcgcctataccctgctcaaggccaacctctaccagttgatccatccgcgcgcagtgctcaagcagaactacaacggccatcgcctggacgaggaaatcgtccgctcgatcctgaccttctcgttcttcttcgcgatcgtcgtctgcctgctcgccctcggcctgtcgctgatcggcctggactggatgaccgcgctcaccggcgccgccagtaccgtggccggcgtaggcccggggatggggcccatcatcggcccctcgggcaacttcgccagcctgccggacgccgccaagtggctgctggccgccggcatgctgctcggtcgcctggagattatcaccgtgctggtcctgctgacccccgcgttctggcgccactga

SEQ ID NO: 320410 - DNA, 372 bp, Pseudomonas aeruginosa
atgtccactgacaatccgtgtcttacctgcggcgcctgctgtgcgcattttcgtgtgtctttctattggggcgagtgccgttccgcaggcggcgtcgtacccgacgaactgaccgtccgcatcagcccgcagatggttgccatgagcggtaccgagaacaagccggcacgctgcgtcgggctgctcggcgaggtcggttgcggcgttcgctgcaccgtctacgagcagcgctcgagtacctgccgcgagttcgaggcggcctgggccaacggccagcccaacccggcctgcgatgccgcgcgcgccgcctacggcctgccgccgctgaccccgccgctgcagccgcacctggcgccgggacgggtcgcctga

SEQ ID NO: 320411 - DNA, 561 bp, Pseudomonas aeruginosa
atggaggctctcgacgccttgctcactcgcgtttcccacgcccgcctgagcgatcccgcgccctcgccggagcagctcgaccggctgttccgggtcgccttgcgtgccccggaccacgggcaactgcggccctggcgcttcatcctggtagagggcgaaggccgccgggccctgggcgacctctacgcccgcgccctggcgagccgccagccggacgccgccgaggaagcgctggccaaggcccgcaacatgccgctgcgcgcaccgctgctggtcgtggcggtcgcttgcctgcaggaccacccgaaggtgccgcacgctgagcaactgctggctgccggctgcgccgcccacggcctggtgctgggcgcctatgcccagggactgggggcgatgtggcggaccggcgagatggccaccgatccggtggtgcacgccggcctggggctcggcgagcaggagcggatcatcggcttcgtctacctgggtacgccgatgggcgagttgcgcacgccggcggaactcgacccgacggccttcgtcagcgcctggccgggctga

SEQ ID NO: 320412 - DNA, 480 bp, Pseudomonas aeruginosa
atgactcttcccgcttcgttgttcctcgatgaacgcccgctcgcccaggccatcgcgccgccgccggaacctcccggcgacgaaccgcaatcgctggtcctggcggtcgagctaggacaggtcgcccagcaactgcggcatcgctgggcgcgcctcgacctgaacctgccggaacgcggcacctggccgctggaaagctggcgcccggccttgcacgaggcgctctacggcctgctcggcggcgccgcgcaggcccgcccgtggcagcgcatcacactgaatccggcgctggacgcacgccacggccggctgcgcctggacatcctcggccaggcggaagaaggccggcgctggctgccggcggccgtggaagccgcccgacgactggccggctggcagggcggacgactgctctggcacgcccagggcgcgtattggtgcgtacgcctgctgttgccgctcagcccggccaggcgctga

SEQ ID NO: 320413 - DNA, 1338 bp, Pseudomonas aeruginosa
atgcgttcactcttctggcgaatcctcgccgccttctggctggccctgctgctggtcgccgggctgtccatcctgctgggtcgtgcgctgaaccaggacacctggatcatcgcccgccatcctggcctgaaggatctcgccgagcagtggaccgccctctacgaagaacagggcagctacgcggcccagggcttgctggagcaacgccgtcgcgactacgggatttccatccaggtgctcgatgaaagcggccagcgcctggtcgacggcacctacctgccgcgcccccaccaccgcccgccgcgcaccagcgaccgcaacctgccgcgcttcccctggcgccagctgagccaggaatacgtcagcccgcagagcaaccatacctatctgttcatctaccgcatcccgcacccggagctggaggcctggcaccgcggcagcctgctctggccgctcagcgcgctgggcatcgcactggtggtgctgaccctgttcagcctgctgctgacgctgtccatcacccgtccgctgaaccgtctgcggcgcgccgtgcacgacctcggccagaccgcctaccagaaggacagcctggcccgcctggcgcggcgcggcgatgaactgggcaccctggcgcgcgatttcaaccgcatgggcgaacgcctgcaaagcctgatcggcagccagcgtcagttgctccgcgacgtatcccacgaactgcgctcgccgctggcgcgcctgcgcatcgccctggccctggccgaacgcgccgaaccggaagcgcgggcgcagatgtggccgcgcctggaacaggaatgcgaccgcctggaagcgctgatcggcgagatcctcgccctcgcccggctcgacgccgaacccggcgcgagccaacggatcgccctgctaccgctgctccagcggctgcgcgaagacgccctgctgctggctccggaacaggatatccgcctggaggtggcgcctgacctgagcatcgacggctggccggacatgttcgaacgcgcggtggacaacctgctgcgcaacgccgtgcgcttcaaccccgtcggccaacccctggaggtgcgtgccagcagcgccggcgactacctgcgcctgagcgtccgcgaccatgggccaggcatcgccgccgaactgcaggagcagttgggcgagccgttcttccgcgcacccaaccagagcagcccgggacacggcctgggcctggccatcgcccgccgcgccatcgagcgccacggcgggcacctgcgcctgggcaaccatcccgacggcggcttcatcgccaccctcagcctgccgctacggcgcaaggcgaccgaatga

SEQ ID NO: 320414 - DNA, 441 bp, Pseudomonas aeruginosa
atgcgcaagacgctaaccgccctgttcatcgccgccgccctgccgaccttcgccatggccgcgcccgccgccaacgacctgccgcccccgccgatggaaggcggccacatgatgggccagcacggtccccggcatggcggcccgatgaaggaactgaacctgacccgcgaacagcgccagcagatgggcaaactgatgggcgaacagatgaaggcccgccacgagatcacccagcgctacctggccaagctgccggcggccgagcagaaggccctgaaggacgaactcaaggccagccacgagaagacccagaaagacatccgcgccctgctcacccccgagcagcagaagaagttcgacgaactgcagaagaagcgcgagcagcgcaaggcagagtgggccgaattccagcaatggaaggccgacaagaagtccaactga

SEQ ID NO: 320415 - DNA, 678 bp, Pseudomonas aeruginosa
atgagcgaactgctgttgatcgacgatgaccgggagctctgcgagctgctcggtacctggctggtccaggaaggtttctccgtgcgtgccagccacgacggcgcccaggcccgtcgcgccctcgccgagcagacaccggatgccgtggtgctcgacgtgatgctgccggacggcagcggcctggaactgctcaagcaactgcgcggcgaccatcccgacctgccggtgctgatgctgtccgcccgcggcgagccgctggaccgcatcctcggtctggaactgggcgccgacgactacctggccaagccctgcgacccgcgcgaactcaccgcacggctgcgcgccgtgctgcggcgaacccacccggcgcaacccagcgcgcagatgcaactgggcgacctgtcgctgaacctgacgcgcggcgtggcgcagatcgacggccaggagatcagcctgaccctttccgaaagccgcatcctcgaagcgctcctgcgccagcccggcgagccgctggacaagcaggccctggcgcaactggcgctgggccgcaagctgaccctctacgaccgcagcctggacatgcacgtcagcaacctgcgcaagaagctcggcagccaccccgacggcagcccgcgcatcctcgccctgcgcggccgcggctactactacagccactga

SEQ ID NO: 320416 - DNA, 360 bp, Pseudomonas aeruginosa
atgcgtccatccgctgcccattgcctgctgctgagcctgggagcttccctggccctggccgaggaacccgcgccagcaccgattccagccgcgcaaccttccattacgcaggctaccgccgaactggagcgccgcctggtggaaacggaacgccagcgcgacgaactggtcagtcgtatgcgccaggagaaccgccagttgcgcgagcagctgcaggcggcccaggcgcagcggcaaccgccgctgctcacggaagagcagacctggtatgtcgccggcgccgccacggccctgctcgcgttcgtcctcggtgccctgagccgcggccgccggcgacagcgacgcgaatggatcaattga

SEQ ID NO: 320417 - DNA, 300 bp, Pseudomonas aeruginosa
atgctctacgcgatcatcgcccgtgacatccccgcttcccaggaacgccgcctggccagccgcccggcccacctggcccgtctcgaacagctgaaggaagaaggccgcctggtactcgccggcccgcacccggcgatcgacagcaacgacccgggcgccgccggcttcaccggcagcctgatcgtcgccgaattcgattcgctggccgcggcgcagagctgggccgaggccgatccctaccgggccgccggggtgtacgccgaggtggtggtcaagccgttcaagaaagtcctgccctga

SEQ ID NO: 320418 - DNA, 588 bp, Pseudomonas aeruginosa
atgaagcaattcatcgatttcatcccactgatcctgttcttcatcgtctacaagatagaccctcagaacgtcgagttcgccgggttcaatctgagtggcatctacggcgcgaccgcgaccctgatcctcgcctcggtgatcgtctacggcgccctctggctcaagcaccgccacctggaaaagagccagtggttcaccctcggcgcctgcctggtcctcggcggcctgaccctggccttccacgaggacaccttcctcaagtggaaggcgccgctggtcaactggctgttcgccctggccttcgccggcagtcacttcatcggcgacaagccgatgatccagcgcatcatgggccatgccatccagttgccgcagggcctctgggtgcgcctgaacatcgcctgggtggtgttcttcctggtgtgcggcttcgccaacctgtacgtggtcttcacctatccgaacttctgggtggacttcaaggtgttcggcagcctcggcatgaccttgctgttcctgatcggccagggcctgttcctggctcgccacctgcacgacgccgataccggcgaaaagcccaaggactga

SEQ ID NO: 320419 - DNA, 888 bp, Pseudomonas aeruginosa
atgcgtgtcgatctgcattgccacagtaccgcctccgatggcgtgctcgcgcccgccgccctggtgcagcgggcccacgagaaaggcgtcgggctgctggcgctgaccgaccacgacaccctggaaggcctgccggaagcccaccaggcggccgctcgactcggtatcgaactggtcaacggtatcgagctgtcctgcacctggggcggtgccaccattcatgtgctgggctacggtttcgacctcgacgccgctcccctgcgccaggcgaccgaagccctgcaccggggccgctgggcgcgcgccgaggaaatcgaccggcggcttgcggccaagggtatgcccggtgcgctggagggcgcgcgggcgatccagcgggccctgggcgacagcggcaacgcgccggcgcggccgcatttcgccgagttcctggtccagggcggctgggtcaaggatcgcgccgacgcgttccgcaagtggctgggggccggcaagctgggagacgtcaagcagcactggccgaccctggaggaagtggtcggctgcctgcgcgaggcgcgcgcctggatcagcctggcgcacccgtatcattatgatttcacccggaccaagcgccggcgcctggtcgccgactttctccaggccggcggacacgccatcgaggtggtcaatggcgtgcagccggccgaacaggtcggtaccctgtcgatcctggcccgcgagttcggcctgatggtcaccgccggcagcgatttccacgcgccgggcgactggtccgaactgggcatgtaccgtgcggttccagaggaccttccggccatgtggccgcgtttcgccaggcattttcgcgataccgaacgtcattccgaagccaagggggccgaatga

SEQ ID NO: 320420 - DNA, 630 bp, Pseudomonas aeruginosa
atgagccagttcttccagatccatccggaaaatccccagccgcggctggtcaagcaggcggtggaaatcgtccgccagggtggggtgatcgtctatcccaccgactcgtcctatgccctgggctgccgcatcggcgaaaagaccgcggtggatcgcatccgccgcatccgccaactggacgacaagcacaacttcaccctggtctgccgcgacctttccgagctgggggtctatgccaaggtcgacaccggcctgttccgcctgctcaaggcgcacacccccggtccctacaccttcatcctcagcgccacccgcgaggtgccgcgcatgctcctgcaccccaagcgccgcaccatcggcctgcgcgtgccgaactgcccgatcgcccgtgcgctgctggaagagctgggcgagccgctgatgagcgtgagcctgatcatgcccggcagcggcgagccgctgaacgatccctatgaaatgcgccaggtgctggaacaccaggtcgacctgatcgtggacgggggctatggcggcggcgaggcttccaccgtgatcagcctgaccgacaccgatcccgaagtgatccgcgtgggttgcggcgatcctgcgccgttcatgcagccggcctga

SEQ ID NO: 320421 - DNA, 891 bp, Pseudomonas aeruginosa
atgcaggacgataacccggccaacgccgacacccctccagccgaacccgccgccgagcgggtgccgctgcaactggcgctggtctacggcgaggcggtcaccgagctgccgcaggacctctatatcccgccggacgcgctggaggtcttcctcgaggccttcgagggcccgctcgacctgctgctgtacctgatccgcaagcagaacatcgacatcctggatatcccggtggcggaaatcacccgccagtacatgggctatgtcgagctgatgaaggcggtgcgcctggagctggccgccgagtacctggtgatggcggcgatgctggcggagatcaagtcgcgcatgttgctgccgcgctcggcggaagccgaggaggaagaggaagatccacgggccgagctgatccgccgcctgcaggagtacgaacggttcaagaaggccgccgaagacctcgacgaactgccccgggtcggccgcgacgtgctggtgccggcggtggctgctcccgaggcgcgggcgcgcaagctgctgccggagctggcgctgcaggagctgatgctggtgatgggcgagatgctgcgccgcgccgacctgttcgagagccaccaggtgatccgcgaggtactgtccacccgcgaacgcatgagcgaagtgctggagcgcctgaaaggcggcgccttcgtgcccttcatccagttgttcaccctggaggagggcaagctcggcgtggtggtcaccttcatggcgatcctcgaactggtcaaggagcagatggtggagctggtgcagaacgaggctttcggcgccatccatgtgcgcctgcggatagcccgcgaagcggaggaaggcgaaaccctggaggaagccctggaagacgatttcgagtga

SEQ ID NO: 320422 - DNA, 999 bp, Pseudomonas aeruginosa
atgaacctgtccgatccccacgaactcgccaccctgctcgaaggcatcctcctcgcggccggcaagccgctgtcgctggaacgcctggccgagctgttcgacgaggcagagcggccggagccggggcagttccgcgacgccctggcgatcctggcactgtcctgcgcagggcgctccttcgagctgaaggaagtcgcgtccgggtatcgcctgcagattcgcgagcgtttctcgccgtgggtcggccgcctctgggaggagcgtccgcagcgctattcgcgcgcgctgctggaaaccctggtgctgatcgcctaccgccagccgatcacccgtggcgagatcgaggagatccgtggcgtggcggtgaacacccagatcgtcaagacgctgatggagcgggagtggatccgcatcgttggctaccgcgaggtgccggggcgcccggcgatgctggcgactaccaaggcgttcctcgattatttcaacctgaagagcctcgacgagctgccgccgctgtcggcgctgcgcgagatggagcccgagccggaaccgccggtcgaagtggcgcccgcggcgcagccgccgcgcgacgatctcgacgaggatgcgattcctgcctcgatccaggccctggccgatcgcgccatcgccgaggccggggaaagcctcgaggagatcgagggggaggccggcgagccggagaagccgcgcgaggaaaccagcttccgcagcctgctgctggaactggacgagatggagcagggcctgaagaccgacttcgacgacctgctcgaccctccggagccctcggagcagggcgacgagtccgccgagccagcggctgggccgattcccgtggtcgcggagcgagccgtcgagcctgccgtcgcggaggctgtcgcgggcgccgatcccgatgacgaagagcgcgccctggcggaggccatgcgcgaggagcgcgaggcactggacgccgacgacgactggccgcgccgctga

SEQ ID NO: 320423 - DNA, 531 bp, Pseudomonas aeruginosa
atgaaagagaccctgaacgaactgatcaccctcatcagcaccggctgcatgggcgccgaggagatccggcggatcgccgacgaggcggcccaggcctacgccgatccggcagggttcctcgccgccaacccggacatcaactacgacgacagtttcccgatcccgctcggcgagtgggtggtggtcggtagcctgccggatatcgtgctgttccaggccgacacctatgccgagctgttcgcccggatcgtcgcctccttcggcaaggacgtggcgttcaacatcaagccgaagcagttgctcaagaccgagccgctggtcgccctcaaccgtatccaggtgcaactgagcagcatgtatccggaaaagggcggttacgtgctggtggatttcagcgagccgctggacgacgagttgcaggcggtgctggtctatacccaggacctgccgcgggtcatggcgctctgcgtcgaggccggcatctatgccgcgcctgcctacgaaagcctgcgcgacgccgaggccgagtga

SEQ ID NO: 320424 - DNA, 213 bp, Pseudomonas aeruginosa
ttgcggtccgcgccgaaaaagggggaacgcttgaaaagtccttgcatcaatatctgtgagttcgatgccgacgtgtgccgtggctgcgggcgtacgcgccaggaaatccgtgcctggaagcgcgcggacaaggccgagcagcgactgatcctcgccgaggccgacctgcgcctgctggcgttgcaggcgcgcggtcggcgcaagttccgctga

SEQ ID NO: 320425 - DNA, 1005 bp, Pseudomonas aeruginosa
atgactatccgcctggccatcaacggcttcggtcgcatcggccgaaacgttcttcgcgccctgtataccggccactaccgcgaacagttgcaggtagtggcgatcaatgacctcggcgacgccgcggtcaacgcccacctgttccagtacgacagcgtccatggacgctttcccggcgaggtcgagcacgatgccgaaagcctgcgggtgatgggcgaccgcatcgccgtcagcgccatccgcaacccggcggaactgccctggaagagcctcggcgtggacatcgtgctcgagtgcacggggctcttcaccagccgcgacaaagccgctgcccacctgcaggccggcgccggcaaggtgctgatctcggcgcccggcaaggacgtcgacgccaccgtggtctacggcgtcaaccacgaggtgctgcgcgcctcccatcggatcgtctcgaacgcctcctgcaccaccaactgcctggcaccggtggcccaggtgctgcatcgcgagctgggcatcgagcacggcctgatgaccaccatccatgcctacaccaacgaccagaacctctccgacgtgtaccacccggacctgtaccgcgcacgttcggcgacccagtcgatgatccccaccaagaccggcgccgccgaggcggtcggcctggtcctgccggaactcgccggcaagcttaccgggctggcggtgcgggtgccggtgatcaacgtgtcgctggtcgatctcaccgtgcaggtggcccgggataccagcgtagacgaggtcaaccgcctgctgcgcgaggccagcgagggctctccggtgctcggctacaacacccagccgctggtgtcggtggatttcaatcacgacccgcgctcgtcgatattcgacgccaaccacaccaaggtcagcggccggctggtcaaggcgatggcctggtacgacaacgagtggggcttctccaaccgcatgctggacagcgccctggcgctggccgccgcccgcgactga

SEQ ID NO: 320426 - DNA, 1827 bp, Pseudomonas aeruginosa
atgcaccctcgtgtgctcgaagtcacccgccgcatccaggcccgtagcgcggccactcgccagcgctacctcgagatggtccgggctgcggccagcaaggggccgcaccgaggcaccctgccgtgcggcaacctcgcccacggggtcgcggcctgtggcgaaagcgacaagcagaccctgcggctgatgaaccaggccaacgtggccatcgtttccgcctacaacgacatgctctcggcgcaccagccgttcgagcgctttccggggctgatcaagcaggcgctgcacgagatcggttcggtcggccagttcgccggcggcgtgccggccatgtgcgacggggtgacccagggcgagccgggcatggaactgtcgctggccagccgcgacgtgatcgccatgtccaccgccatcgcgctgtctcacaacatgttcgatgcagcgctgtgcctgggtgtttgcgacaagatcgtgccgggcctgctgatcggctcgctgcgcttcggccacctgcccaccgtgttcgtcccggccgggccgatgccgaccggcatctccaacaaggaaaaggccgcggtgcgccaactgttcgccgagggcaaggccactcgcgaagagctgctggcctcggaaatggcctcctaccatgcacccggcacctgcaccttctatggcaccgccaataccaaccagttgctggtggaggtgatgggcctgcacttgcccggtgcctccttcgtcaacccgaacacccccctgcgcgacgaactcacccgcgaagcggcacgccaggccagccggctgacccccgagaacggcaactacgtgccgatggcggagatcgtcgacgagaaggccatcgtcaactcggtggtggcgctgctcgccaccggcggctcgaccaaccacaccctgcacctgctggcgatcgcccaggcggcgggcatccagttgacctggcaggacatgtccgagctgtcccatgtggtgccgaccctggcgcgcatctatccgaacggccaggccgacatcaaccacttccaggcggccggcggcatgtccttcctgatccgccaactgctcgacggcgggctgcttcacgaggacgtacagaccgtcgccggccccggcctgcgccgctacacccgcgagccgttcctcgaggatggccggctggtctggcgcgaagggccggaacggagtctcgacgaagccatcctgcgtccgctggacaagccgttctccgccgaaggcggcttgcgcctgatggagggcaacctcggtcgcggcgtgatgaaggtctcggcggtggcgccggaacaccaggtggtcgaggcgccggtacggatcttccacgaccaggccagcctggccgcggccttcaaggccggcgagctggagcgcgacctggtcgccgtggtacgtttccagggcccgcgggcgaacggcatgccggagctgcacaagctcacgccgttcctcggggtcctgcaggatcgtggcttcaaggtggcgctggtcaccgacgggcgcatgtccggggcgtcgggcaaggtgcccgcggccatccatgtgagtccggaagccatcgccggcggtccgctggcgcgcctgcgcgacggcgaccgggtgcgggtggatggggtgaacggcgagttgcgggtgctggtcgacgacgccgaatggcaggcgcgcagcctggagccggcgccgcaggacggcaatctcggttgcggccgcgagctgttcgccttcatgcgcaacgccatgagcagcgcggaagagggcgcctgcagctttaccgagagcctcaacggctggcgctga

SEQ ID NO: 320427 - DNA, 996 bp, Pseudomonas aeruginosa
atgaataacgacaacaagagaagcgccggcggcctcggcctggtcggcgatatcggcggcaccaatgcgcgtttcgcgctctggcgcgggcagcgcctggaatccatcgaggtgctcgcctgcgccgactacccgcggcctgaactggccgtgcgcgactacctggcgcggatcggcgaatcggtggcgaacatcgactcggtctgcctggcctgcgccggtccggtcggggcggccgatttccgtttcaccaacaaccactgggtgatcaatcgtgccgcgttccgcgaggagctggggctggatcacctgctgctggtcaacgacttcagcaccatggcctgggccgcctcgcggctaggtgcggacgagctggtgcaggtccgcgccggcagtgcccaggcggatcgcgcccggctgatcatcggtcccggcaccggccttggcgtcggcagcctgctgccgctgggcgggggacgttgggaagtgctgccctgcgagggcgggcacgtcgacctgccggtcacttcgccgcgcgacttcgcgctctggcagggcctgcaggcgcgctacggacatgtctccgccgagcgcgcactgtccggcaacggcctgctcgccctctatgaaatcagctgtgccctggacggggtcgccgtacgcgcgagcagtgcggcggaagtcggtgccctggccatggccggcgacgcccaggcggacgccgtgctggagcacttcttcctgtggctggcgcgggtcgccggcaacgcggtgctcaccgtcggcgcgctcggtggcgtctacattaccggcggcatcgtcccgcgtttcctcgagcgtttcatcgccagcggcttcgccgaggccttcgccagccgtggcaagactagcggcgcttacctgcaggacgtaccggtgtgggtcatgaccgccgaacatccgggcctgctcggcgccggggtcgccctgcagcaggccctggacgccgagggttga

SEQ ID NO: 320428 - DNA, 729 bp, Pseudomonas aeruginosa
gtgagcgcgaacggacgatcgatcctgctggtggacgatgaccaggaaatccgcgaattgctggagacctacctgagccgcgccggcttccaggtccgcagcgtctcgcggggcgccgacttccgccaggcgctgtgcgaggaggaggcgagcctggcgatcctcgacgtgatgctgccggacgaggacggcttcagcctctgtcgctggattcgctcccaccagcgcctggcctgcatgccgatcatcatgctcaccgccagttccgacgaggccgaccgggtgatcggcctggaactgggtgccgacgactacctgggcaagccgttcagcccgcgcgagctgctggcgcggatcaaggccctgctgcgccgcgcgcagttcacccaggtgcgcggtggcgacgtactggctttcgaggactggcggctggacacggtcagccaccggctgttccacgaggacggcgaggagttcttcctcagcggcgcggatttcgccctgctcaagctgttcctcgaccatccgcagcagatcctcgaccgcgacaccatcgccaacgccacccgcggccgcgaggtgctgccgctggagcgcatcgtcgacatggcggtcagccgcctgcgccagcgcctgcgcgacaccggcaaggcgccgcggctgatccagaccgtgcgcggcagtggctatctgctggcggcgcaggtgcggccgcacctgcagccatga

SEQ ID NO: 320429 - DNA, 1449 bp, Pseudomonas aeruginosa
atgagcgaacggcggcgctggtcgccggtgccgcgctcgctgctcgggcgcatgctgctcctgaccctgctcgcggtgctggtcgcgcaagggctttccagcctgttctggctgtcgcacctgcgctccagccagcgcgagggcctgctcaccagctcgcgcagcctggcctactcgatggcggccagcgtcagctacttccgttccctgccgctcggctaccgtccgctggtgctcgaccagttgcgcagcatgggcggtacgcgcttcttcgtctcgctgaacgaccggccgctggagatgcgtgccctgccggacacgccgaacaagcaggcggtgctggagatcgtccaggacgtgttgcaccaacgcctgggcaaggaggtcgagctgcaggtcgaattcgtcagtcccgacgagctgcgcctgtttaacggcgcgctgaagctcgacgagctgccgcgttcctgggcgcactacgcgctgaccctggagccggtgaacccgccggtgctggtgacccagatccgcatcggcgacagcgagtggctgtacatcgccagcctgatgccggcgccgtacgtcagcctggaacccgagggactgcaaccgcagcaggtgctctcgatcgttttcaccagcctgttgctgctgcttttcaccggtttgctgatgcattggcagagccgtccgctcaagcgcctggcgcgcgccgcccgcgacctggccctgggcagtccgtcggcagcgctggaggagcgcggcgccagcgaactggtggaggtggcgcgcgccttcaacaccatgcatgagcgcatcgaccgctacctgaacgagcgcgggcagttgttcagcgccatctcccacgacctgcgcacgccgatcacccgcctgcgcctgcgggtagaactcctcgaggacgagcgcttgcaggagaagttcgggcgcgacctggacgagctggaactgctggtgaagggcgcgctgcagtgcgtgaaggacaccgatatccacgagaacgtcgagccggtcgacctcaacctgttgctccagcacatcgccgagccctacctggccgatggccgggtggaggtcgtcggtcgcgccgcggagccttatccgggcaagcccctggcgctcaagcgctgtatcggcaacctgctggacaatgcgctgaaatacggcgaacgcgcccgcctgagcctggaggacgggccggaagcggtggcgctgcacgtcgacgacgacggccccggcgtgcccgagcagcgcctggaacagatcttcgagccgcgcttccgtctgtctccgcgagggcagggctacgggctgggcctgggcattgcgcgcaacatcgcgcacacccatggcggcgaagtcagtttgcagaaccgtcgcgagggcggcctgcgggtcagcctgcgcttgccgcgcctggggctggagtga

SEQ ID NO: 320430 - DNA, 1263 bp, Pseudomonas aeruginosa
atgaatgcgatccgtcgcctctctgccgtcatctgtctttcctccctctgcctctccccgctgctggcccaggccggcgaagtcgaagtgctgcactggtggacctccgccggcgagaagcgcgccgccgaaaccctgaagaagctggtcgaagccaagggccacacctggaaggacttcgccgtggccggcggtggcggcgaggctgcgatgaccgtgctgaagacccgcgcggtgtccggcaatccgccggccgcggcgcagatcaaggggccggatatccaggagtggggcgaactgggcctgctcgccgacctcaacgcggtggccgccgaaggcaagtgggacagcctgctgccgaagcaggtggcgcagatcatgaagtacgacggcgactacgtagcagtgccgatcaacgtacaccgggtgaactggctctacatcaacccggaagtgttcaagaaggccggcgccaccccgccgaccaccctcgacgaactgttcgtcgccgccgacaagctcaaggccgccggtttcacgccgctggcccatggcagccaaccgtggcaggacggcaccgtgttcgagaacctggtgctgagcaagatgggtccggaaggctatcgcaaggccttcgtcgaacaggacaaggcgaccctcaccggagcgcagatggtcgaggtgttcgccgcgctgaagaagctccgcggctatgtcgatgccgacgccgccggtcgcgaatggagcgccgccacggcgatggtgatcaacggcaaggccgggatgcagatcatgggcgactgggcgaagagcgagttcaccgccgccggcaaggtgccgggcaaggactaccagtgcctgccgttccccggcacgcagaaagccttcgactacaacatcgactcgctggtgatgttcaagctgagcaacgcggagaaccgcaaggcccaggaagacctggcgcgcagcgtgctcgacccgtccttccagaaggacttcaacctcaacaagggctccatcccggttcgcctggacgccgacatggcgccgttcgacagttgcgcccagcagtcgatgaaggacttcaagcaggcttcccaggacggcaacctggtgccgagcatggcccacagcatggccgcttccagctacgtgcagggggcgatcttcgacgtggtgaccaacttcttcaacgaccccgccgcggatccgcagaaggccgcccagcaactggcggccgccatcgaggcggcggcgcagtaa

SEQ ID NO: 320431 - DNA, 933 bp, Pseudomonas aeruginosa
atggcgaccaattcccctgtctatcccacggctccggtagcgcctcgtcgcgtctcgccactcgatcgcctgcaaggctggctgccgaagctggtgctggcgccaagcgtggtcgtggtgctgttctgcatgtatggctacatcggctggacgctgctgctgtccttcaccaactcgcgcttcatgcccagctacaagtgggccgggctgagccagtaccagcgcctgtgggacaacgaccgctggtgggtggcgagcaagaacctgctgctcttcggcggctcgttcatcgccatctgcctggtgctcggagtgttcctcgcagtgctgctggaccagcgcatccgccgcgaaggcttcatccgcaccctctacctgtatcccatggcgttgtcgatgatcgtcaccggcaccgcctggaagtggctgctcaatccgggcctgggcctggacaagctgctccgcgactggggatgggaaggtttccgcttcgactggctggtggacccggagcgggtcgtctactgcctggtgatcgccgccgtgtggcaggcctccggcttcgtcatggcgctgttcctcgccggcctgcgcggggtcgacccggccatcgtgcgcgccgcccaggtcgacggtgcgagcctgccgaccatctacctgcgcatcgtcctgccgagcctgcgcccggtgttcttcagcgcgctgatgatcctcgcccatatcgcgatcaagagcttcgacctggtggcggcgatgaccgccggcggcccgggttattcctccgacctgccggcgatgttcatgtatgcgcataccttcacccgtggccagatggggctcggcgcggcgagcgcgatgctgatgctcggcgctgtactggcgatcgtggtgccttacctgtattccgaactgcgaggcaagcgccatgcgtga

SEQ ID NO: 320432 - DNA, 846 bp, Pseudomonas aeruginosa
atgcgtgacgcgtccctgaacccgagcttcagcgtcagccgcctggccgtgcacctgaccctctggggcgcctgcgcgctttacctggtgccgctgctggtgatgctgctgaccagcttcaagacgccggacgacatccgcaccggcaacctgctgtcgctgcccgacaccttcaccgtcatcggctggctcaaggcctgggacagcgtcggcgcgttcttctggaactcggtgctgatcaccgtgcccggcgtgctgatctccaccttcatcggcgcgttgaacggctacgtgctgtcgatgtggcgcttccgcggttcccagctgttcttcggcgcgctgttgttcggctgcttcctgccgttccaggtgatcctcctgccgatgtccttcaccctcggcaagctcggcctggccaataccaccagtggcctggtgctggtccacgtgatctacggcctggccttcaccacgctgttcttccgcaactatttcgtggcgatcccggatgccctggtcaaggccgcgcgcctggacggcgccggcttcttcaccatcttcctgcgcatcctgctgccgatgtccacgcccatcgtgatggtctgcctgatctggcagttcacccagatctggaacgacttcctgttcggcgtggtgttcgccagcggcgattcgcaaccgatcaccgtggccctgaacaacctggtgaacatcaccaccggggtcaaggaatacaacgtcgacatggccgcggcgatgatcgccgcgctgcccacgctggtggtctacgtactggccggcaagtacttcgtgcgcggcctcaccgccggcgccgtgaaaggctga

SEQ ID NO: 320433 - DNA, 1161 bp, Pseudomonas aeruginosa
atggcaaccctcgaactgcgcaacctgcacaagagctacggcagcggcctggcggataccctcagggacatccggctgaagatcgactccggcgaattcctgatcctcgtcgggccctcgggttgcggcaagtcgaccctgatgaactgcatcgccgggctggagagcatcaccggcggtgcgatcctggtggacggccaggacatcagcggcatgagccccaaggaccgcgacatcgccatggtcttccagtcctacgccctgtacccgaccatgagcgtgcgcgagaacatcgccttcggcctgaagatccgcaagatgccccaggccgccatcgacgaggaggtggcgcgggtggccaggctgttgcagatcgagcacctgctcgaacgcaagccctcgcagctctccggcggccagcagcagcgggtggccatgggccgggcgctggcgcggcggcccaaggtctacctgttcgacgagccgctgtccaacctcgatgccaagctgcgggtggaaatgcgcaccgagctgaagctgatgcaccagcggctgaagaccacgaccgtgtatgtcacccacgaccagatcgaggccatgaccctcggcgacaaggtggcggtgatgaaggacggcgtcatccagcagttcggcacgccgcagcagatctacaacgccccggccaacctgttcgtcgccagcttcatcggttcgccgccgatgaatttcattccgttgcgcctgcagcgccgggacggacgctggaccggcctgctcgatagcggccaggaccgtatcgaactgccgctgagcctggagcccggcctggaggaggggcgcgagctgatcctcggcgtacgatcggagcagatcgccctgggcgatggcagcgctgcccatgacctgcgtaccgaggtcgaggtgctcgaaccgaccgggccggacaccctggtcttcgtcaccgtcaaccaggtcaaggtctgttgccgcctggcgccggacgtcgcgccggccgcgggcagcggcatgagcctgcgcttcgatcccgcgcgggtcctgctgttcgacgcgcagagcggcgagcgcgtggccgtgcgcacggcgggcgtggtggcggagaaggtcaccgccttgaacggcaatcgccagaagaactcctga

SEQ ID NO: 320434 - DNA, 963 bp, Pseudomonas aeruginosa
gtgatcgccgtcggcagcaccaccaacgacttcggcaccgagggcgctgcggaacactgcattttcctcgatacccgcgcccaggccgaacgcttccaccgccagctgctcggccagtacctgcgtgcgcataccgggcacgacgcgaacaacaacgcagtgagtatcgccatcatcggcgccggcgccaccggcgtcgaactggctgcggaactgcaccacgccgcgcagatgctggccgcctacgggctcgaccggatccgcccggaagacctgcacatcagcctggtcgaagccggcccgcgagtgctgccggcgctgcccgagcgtatcagccagccggtacaccagaccctgagcaagctcggcgtacgggtgatgaccggctccgcggtgagcaaggtagatgcggacggcctctggaccggcgacggcgaattcgtcccggcgacgctcaaggtgtgggcggcgggcatccgggctccggccttcctcaaggaactcgacggcctggaaagcaaccgtatcaaccaactggtggtccgcccgaccctgcagaccacccgcgacgacgacatcttcgccttcggcgactgcgccgcctgtccccagccggcgcaaccgggagagcaaccgcgcaacgtgccgccacgcgcccaggccgcgcaccagcaggcctcgctgctggtgaaatcgctgcgtgcccgtctcgaaggcaagccgctgggcgaatatcactaccgcgactacggttcgctgatctcgctgtcgcgcttcagcgcggtcggcaacctgatgggcaatctgatgggtagcgtcatgctcgaaggctggctggcgcggatgttctacgtatcgctataccgcatgcaccagatggcgttgtacggtccgctgcgcaccgcgatgctgatgcttagcggccgcctgcgcagcaccgagccacgcctcaagctgcactga

SEQ ID NO: 320435 - DNA, 1059 bp, Pseudomonas aeruginosa
atgaccggcaccaagcccacaacgcccgtagcccgctatttccaccaagaggcgcaacggcgcggctatgtgctggacgcagcccagggcaatgccattcttcatctcgatcgattggcggagcgcttgcgtcgaggtccgtcgctattccggcaagcgccgcgcagcctctacctgtgggggccggtcgggcgcggcaagagctggctgatggatggcttctttcgcagcgccgatttgcagggcctgcgccggacgcatttccatgcgttctttcgccggcttcatgacggcatgttccgccgccaggggcggcccgatgccctgggcggtgcgctcgacgaactgctaggagattgccggctgctttgcttcgacgaattccatgtccacgacattggcgacgcgatgctgataacacgcctgttcagggagctgttccgcaggaagatcaccctggtctgcacctccaactacgcgccgcggcaactgctgcccaatccgctctaccacgaacgcttcctgccggcgatccggttgatcgagacgcgcatggaagtgctggaagtagccggcgcccgggactaccggacgatttcgccgcggcaggagatcgcttccggttatgccagcggcgggtattgctggccagcctcatgcgcttgcctggacgagctgggcttgtccgcgcccgagccctcgcaacgcgtgaccctgcaaagcggcgcgaggacgttgcaggcgcgcgcggtgtgcggcgacctggtgtggttcgccttcgccgacctttgcgaggcgccaaccgcggtgatggactaccttgccctcggcgaacgcttctttacctgggtgctggagggcgtaccgccgatggcgcgctgttcggtcgccgcccagcagcgcttcatcaatctcgtcgacgtcctttacgacaatgaccggcgttttttcctgagtgccgaaaaggcgctgccggacctggtcgagggcagcgacctgcctgcggacatgcagcgtaccgccagtcggctggcgcagttgcgccagcttcgctgttga

SEQ ID NO: 320436 - DNA, 1626 bp, Pseudomonas aeruginosa
atgctgtcgtcctgccttgccaatgccgccccggatgcggggcaggcgctgcgtgacgtggaaagccgacgcctgaacctgcccgcgccggtggaactggacgccgagcgccccagccccgaggacggcgtatcacgggctgccgaaaagggcggcccgacggtgctggtcaagcgcttccaactcagcggcaacaggcagttcgacgatcgacgcctgctggcgctcctgcacgacctgccgggccaggaactcaatctgagccaattgcacgctgccgccgcccgcatcggcgatttctatcaggaaaaaggatatgtgctggcgcgcgccttcctcccggcacaggaaatccaggatggaacggtacgcatcgaagtgctcgagggacgctacggcaggatcgaactgcataacacgtcccgaacgctggaccgcgttctactccgccccttgagcgcactcgaacgagataccgcggtccagggctcggagctggagcgtgcgcttctgctcctgagcgacattcccggcctccaggccaaaggcaccctgctgccgggccaggcgcagggaaccacggacttgcgcgtcgaggcccgccccggcccgctggtcggcggcaggctggaggcagacaactatggcggccgctacatgggggaatatcgcctgggaaccaccctcgacttcaacagcccgctgcgactgggcgaccaggcgagactgagcctgctgggcagcgaccggcaccaacgctactaccgtgcagcctatcaactgccccttggttcccgaggcacgcgcatcggactggcccacgccgagacgacctatcgactggtacgcgatttctcgcgcctggacgcccatggccgggccattaccgacagtctgttcgtcagccagcccctgctgcgtagccgcagcttaagcctgtccacccagttgcaatatgaaaacaagcgacttcgcgatgaccaggagcgtaccgggaggcatagccgcaaggagatccgcctgtggaccgccagcatcagcggaaacgcccaggaccgcttgttcggcggtggacagagcggcttctcgctggcctatgcccacggccagctcgccatcgactccggcgaagagcggctgctggaccgctacaccatcggtaccgccggcagcttcgacaagatcatgctcaacgccgtacgcctgcagcacctgggcgaccgcctgcagttgttcgcccaactcaacgcccagtggagcggcggcaacctcgacagcgcggaacagttcgacatgggcggcccctacggcgttcgggcgttccccctgggcagctacaagggctacggcgacgaaggctggcaagccagtgcggagctgcgctacagcctggctccgggctggcagctgagttcgttcgtcgaccagggcgcggtgaaattcctcaagcaccccaacaccacggaaggcaatcgcaaccgcatggccgccgtcggcagcggcgcaacctggtacggaacggatcaccaggtcagcctgaccgccgcctggcccctgagccaggaaaacaacatcgagcccgagcgcactccccggctgtggttgcaagcgacccgctacttctga

SEQ ID NO: 320437 - DNA, 4092 bp, Pseudomonas aeruginosa
atgaacaagagctatacgctggtctggaaccaggccacaggctgttggaacgtcgcaagcgaaggtacccgtcggcgcagcaagagcggacgcggcaaggcgctcgtagtcgccggagcgtcactgctcggcctgttctgccaggcccccgccttcgccctgcccagcggcgccacggtcgtttcaggcgatgccggattccagacatccaccgatggccggcatatggtcatcgaccagcagagccacaagctgatcaccaattggaacgagttcagcgtccgtgccgatgagcgggtcagcttccaccagccgggccaggacgccgtcgccctgaaccgggtgatcggccgcaacggcagcgatatccaggggcggatagatgccaacggcaaggtcttcctggtcaatcccaacggcgtggtcttcggcaagtccgcccaggtcaacgtaggcggcctggtggcttccaccctggacctggccgacagggacttcctcgccggcaactaccagttctccggcgactccggcgcaaccgtaagcaatgccggcagcctgcaagccagcgaaggcggcagcatcgccctgctgggcgcccgggtcagcaacgacggcgtgatccaggcgcaactcggcgacgtggccctgggcgcaggccagggcatcaacctcaatttcgacggcgacggcctgctcaacctgcaggtggacaagggctcggtcgacgctctcgcacacaacggcggcctcatccgcgccgatggcggccaggtgctgatgagcgcccgcagcgccgacagcctgctcaagaccgtcgtcaacaaccagggcactctcgaggccaggacgctacgcagcgcggaaggacgcatcgtcctcgacggcggcgaacagggtaccgtgcgggtggccggcaagcaggacgccagcgccatcggcggaggcaatggcggcctggtgctgaaccagggcgcgaacgtcgagatacagcgaaccgcgcaggtggacacccatgccgaccagggcgcaaccggcacctggaggattctctcgcacgaggtcagcgtagccgctgtcggccaggcaaacgctgccggtgatggttccggccaggtccatgtagcgcagggcccagccggggccaatgcgtccgatagcaacggcgtgaccatcgttcagcagcagccggccgtcgacctcgccgccggcgccaacggtacctccgcagtgcagagccagagcggcgccaacatcggctcgggcgcgagtggcatcagcgtcgtgcagagccagaacggtgccaatatcggttcgggcgcaagtggcatcaccgttgtgcaaagccagaatggcgcaaatatcggttcaggcgcgagtggcatcagcgtcgtgcagagccagagcggccccagcatcggctcgggcgtcaatggcgtcacaatcgtacagagccagagcggtgccaacatcggccccggcgtcagcggaatcgatgtcgtccagacccagactctccccaacctgagcccaggcgccaatggctccagcatcgtccaggtccagacgctacccgatatcgccgccgacgccggcaatgtgcatgtcgtgcaggtccagaccggcggtaacaaggtcttcggcaactccgccaccaacgtcaggtcacgtaccgttcaggcccggagtagcgagaatgtcggttccggcctggcgaatccaagcagcgcgggaaaaggcccgacgttgcatgccgataccctggcccgcaacctttccacaagcaacgtcgaagtggtcgccacccggggcaacgcgcatgtcggcgcgccgctgtcctgggacagcggcaacggcctgacgctaaccgccgagcgcggggacctcaggatcaatggcgcgctgacggcccagggagaaaacgccagccttactctcaatgccgggcagcgccctctccgtatcgacaacagcctctctctcactggccagggagcccgggtcgaattcaattcggacaagggttatgccctggccgaaggcacccggatcaccctgtccggcaagaacgcaggattccgcgccaatgggcgggactacagcgtgatccaggacctgcagcagttgcgcggcatcgataggaacctgggcggcagctatgccctcggcaatcgaatcgcaggcggccattccagcttcctgtcgataggcaacgccagcgccttcggcggtaccttcgacggcctgggcaacaccatcgataatctcgccgtctacggcaccggcgcctactccggcctgttcagcgtcaaccggggcacccttcgcaacctgaacctggaacgcatttccgccgatggagcacaggccacccactacaacgtccaggtcggtagcctggccgccgtcaacctcggtcgcatcgacaatgtgaacgccagcgacatccgtatcgccgcggcctcgcagctgaacagcctcggcgggctggtcgcgctgaacctgggcagcatcgacaacgccagcgccagcggcacgctggtcggcaaccgccacacctatgctctgggcggactcgcagccgaaaacatcagcacagccaggggcgtggccagcatctccaacagccgggccgattttgccatctccggccagttgaaggaccatgccagccactacggcgcggggggcctggtaggcaggaaccgcggcggcctcatccgcagcagcggcagtcagggaacgctgtcgctgagcggtcacgggatgaacctgggaggactggtcggatacagctccgccggcggactggcggacgtttccgcctccgtcgacgtctcaggcaacggacagcgcggcctgtacggtgggctcatcggcctcaacgtaaacagtggtatcgcccacgccacggccagcggcaaggtccggggcacagacgcggaagcactgggcgggctgatcggccggaacctgaacgcggccatcaacaacgccagcgcccatggcgatgtcagcctgcaagccggtcgctacctgggaggcctgatcggccacaaccaggcaggcaacctggccaacgtcagtgccagcggcaacctgagtggtgggtcgctgctccaggccggcggcctgatcggtctcaacgccaatgcctcgctggtcaatgcctccgccaagggcaatgtcgctacccgcggagcagaagcggttggcggtctgctcggagaaaacctgtacggctccgtcatcaacggttccgccagtggcgaagtcaccgacggcagcggcaaaaccctgggtggcctgatagggtccaacctcggcggcaatcattccaacctgaaggcctccgggtgggtaaacgcaggggcgaacagtgacgtgggagggctgatcggccacaaccggggcggcaaccacagcaccctggcggcatccggcaatgtcaccgggggcaagggcagtcgcgtcggcggactcgtcggctataacgatgccgcctcgctgacgaacgtctcggcttcgggcaacgtcagcgccagtggttccagggccatcggcgggttgatcggcagtgacctgcgaggttcgctgatgctcgccagcagtcatggaatcgtgaacgacaagaccggccacaacctgggagggttggtcggccgcggtgaaaacacctcgatccgctccgccaaggccagcggtgcggtgagcggaggcgccgggatcagggccggcggactggtcggctccctggagggctggcaggctctcatcctgggggcctcggccggcggcgatgtgacggcgggctacgatagctatattggcgggctggtgggcttcagcaccgccaccatcagcggcgcttccgcttccggcaaggtcggaggctcgggtctgctgggcggcctggtcgcctggaaccaggggaatgtcatgggttcttcggccagcggcaggctggagccacaaatccccaaccagatccatggcggactgatcggcatcaattttggctggcagtcctggaactcggtatacggggctgcggcgaccgttccaatgataggtcgccactacaacctgtga

SEQ ID NO: 320438 - DNA, 2565 bp, Pseudomonas aeruginosa
atgcgaatagaccgtttgaccagcaagctgcaactggcgctctccgacgcccagtccctggccgttggccatgaccatccggccatcgagccggtgcacctgctttccgccctgctcgagcagcaaggcggttcgatcaagcccctgctgatgcaggtcggcttcgatatcgccgccctgcgcagcggcctcaacaaagaactcgacgcgctgccgaagatccagagcccgaccggcgacgtgaacctgtcccaggatctcgcacgcctgctcaaccaggctgaccgcctggcccagcagaagggcgaccagttcatctccagcgagctggtattgctggccgcgatggacgagaacaccaggctcggcaagctgctgctcggccagggcgtgtcgcgcaaggcgctggagaatgccgtggccaacctgcgtggcggcgaagcggtgaacgacccgaacgtcgaggagtcgcgccaggcgctggacaagtacaccgtcgacatgaccaagcgcgccgaggaaggcaagctcgacccggtgatcggtcgcgacgacgagatccgccggaccatccaggtcctgcagcggcggaccaagaacaacccggtgctgatcggcgaacccggcgtcggcaagaccgccatcgtcgagggcctggcccagcgcatcatcaacggcgaagtgccggacggcctcaaggacaagcgcctgctggccctggacatgggggcgctgatcgccggtgccaagttccgcggcgagttcgaggaacgcctgaaggcggtcctcaacgaactgggcaagcaggaaggccgggtcatcctgttcatcgacgaactgcacaccatggtcggcgccggcaaggcggaaggcgccatggacgccggcaacatgctcaagccggctctggcgcgcggcgagctgcactgcgtcggtgctactaccctcgacgagtatcgccagtacatcgagaaggatgccgcgctggagcgccgcttccagaaggtgctggtggacgaaccgagcgaggaagacaccatcgccatcctccgtggcctcaaggaacgctatgaagtgcaccacggggtgagcatcaccgacggcgcgatcatcgccgcggccaagctgtcgcaccgctacatcaccgatcggcaactgccggacaaggccatcgacctgatcgacgaggccgccagccgcatccgcatggagatcgactccaagccggaggaactggatcgtctcgaccgtcgcctgatccagctgaagatcgagcgcgaggcgctgaagaaggaagacgacgaagccaccaggaagcgcttggccaagctggaggaggatatcgtcaagctcgagcgcgaatacgccgacctcgaggagatctggaagtccgagaaggccgaggtgcagggctcggcgcagatccagcagaagatcgagcaggccaagcaggagatggaggcggcgcggcgcaagggcgacctcgagagcatggcgcgcatccagtaccagaccatcccggacctggaacgcagcctgcagatggtcgaccagcacggcaagaccgagaaccagttgctgcgcaacaaggtgaccgacgaggaaatcgccgaagtggtttccaagtggaccggtatcccggtgtcgaagatgctcgagggcgagcgcgagaagctgctgcgcatggagcaggagctgcatcggcgagtgatcggccaggacgaggcggtagtcgccgtgtccaacgccgtgcgccgttcgcgcgccggcctcgccgatccgaaccggccgagcggctcgttcctcttcctcggcccgaccggggtgggcaagaccgagttgtgcaaggcgctggccgagttcctcttcgataccgaggaggcgctggtgcggatcgatatgtccgagttcatggagaaacactcggtggcccgcctgatcggcgcgcctccgggctacgtcggctttgaggaaggcggctacctgaccgaggcgatccgccgcaagccctactcggtggtgctgctggacgaggtggagaaggcccatccggatgtattcaacattctcctccaggtgctcgaggacggacgcctgaccgacagtcacgggcgtacggtggacttccgcaacaccgtggtggtgatgacctccaacctcggttcggcacagatccaggagctggccggcgaccgcgaggcgcaacgtgccgcagtgatggacgcggtcaatgcgcacttccgtccggaattcatcaaccggatcgacgaagtggtggtattcgagccgctggctcgcgagcagatcgccggcatcgccgagatccagctcggtcgcctgcgcaagcgcctggccgagcgcgagctgagcctggaactgagccaggaggcgctggacaagctgatcgccgtcggcttcgacccggtctatggcgcacgcccgctgaagcgggccatccagcgctggatcgagaacccgctggcgcaactgatcctggccggcaaattcgcgccgggtgccagtatctcggcgaagttggaaggagacgagatcgtcttcgcctga

SEQ ID NO: 320439 - DNA, 729 bp, Pseudomonas aeruginosa
atgaacgcctggctgacccccgactggccggcgccggcccgtgtgcgggcctgcgtgaccacgcgcagtggcggggtcagccaggcccccttcgacagtctgaacctcggcgcccacgtcgacgacgatccgcgcgccgtggaagaaaaccgccgacgcctgaccgagcgtctggaatgccggccgagctggttggaccaggtgcacggagtgacggtggtggaggccgacccgagccgggtgctcagggccgacgccagctggagcgcgatgccgggcgtcgcctgtacgatcatgaccgccgactgcctgccggcgttgttctgcgaccgctcgggcacccgcgtggccgcggcccatgccggctggcgcgggctggcggcgggcgtgctggaggcgacggtggacagcctgggcgtgcccggcgacgaactgctggtctggctggggccggcgatcggcccgcaggccttcgaggtcggcggcgaggtccgcgatgcattcgtcgctgcgcacgccgaggcgcgctcggctttcgtacctagcgccaatccgggccgcttcatggccgacatctaccgactcgcgcggatccgcctgggcgcccatggcgtcaccgccgtgcatggcggtggcttctgcaccttcagcgataccgcgcgcttctattcctaccgccgctcgtcgcgtaccggccgttttgccagcctggtctggctccaggactag

SEQ ID NO: 320440 - DNA, 963 bp, Pseudomonas aeruginosa
atgtccgatatgattcaacgcgcggccgaggtgccgttcgagctgggtggccagcgtctcgaccagatcgccgcccagctttttcccgaacactcccgctcccgtctggccggctggatcaaggacggtcgcctgaccgtcgacggcgccgtgctgcgcccgcgcgacatcgtccacagcggcgcgcaactggtcctggaggccgagcaggaagcccagggcgagtggctcgcacaggacatcgagctggaaatcgtctacgaggacgagcacatcctggtgatcgacaagcccgccggcctggtggtccatccggctgccggccatcaggacggcaccctgctgaatgccttgctctaccatgtcccggacatcgccaatgtgccgcgcgccgggatcgtccaccggctggacaaggacacgaccggcctgatggtggtggccaagacgctggaggctcataccaagctggtggcgcaactgcaggcgcggtcggtcagccgcatctacgaggcgatcgtgatcggcgtgatcacctccggcggcaccatcgatgcgccgatcggacggcatggcgtgcagcggcagaagatggcggtggtcgacgccggaaaggtggcggtcagccattaccgcgtgctggaacgcttccgtgcgcacacccatacccgggtcaagctggagaccgggcgtacccaccagatccgcgtgcacatgagccatattggctatcccctggtcggcgatccggtctacggtgggcgcttcaggattcccccggtggccagccagaccctggtccagactcttcgcgaattcccccggcaggcgctgcacgcgcgcttcctcgaactggatcacccggccaccggcgtgcgcatgaagtgggagtcgccgctgccggaagacttcctctggctgctcagcctgttgcgccaggatcgcgaggcgttcgtcggatga

SEQ ID NO: 320441 - DNA, 1026 bp, Pseudomonas aeruginosa
atgcaagtgaaacacctgctgctgatcgccatcctcgccctcaccgcagcctgctcctcgaacaaggagactgtcgacgagaacctgagcgagagccagctgtaccagcaggcgcaggacgacctcaacaacaagagctacaacagcgccgtcaccaagctgaaagccctcgagtcgcgctatcccttcggccgctacgccgagcaggcccagctcgagctgatctacgccaactacaagaacatggagcccgaagccgcccgcgccgccgccgaacgcttcatccgcctgcatccgcagcaccccaacgtcgactacgcctactacctcaagggcctgtcgtccttcgaccaggaccgcggcctgctggcgcgcttcctgccgctggacatgaccaagcgcgacccgggcgccgcccgcgactccttcaacgagttcgcccagctcaccagccgcttccccaacagccgctacgccccggacgccaaggcgcgcatggtgtacctgcgcaacctgctggcggcctacgaagtgcacgtcggccactactacctgaagcgccaggcctatgtcgccgccgccaaccgcggtcgctacgtggtggagaacttccaggaaaccccggccgtcggcgatggcctggcgatcatggtcgaagcctaccgtcgcctgggtctcgacgacctggccagcaccagcctggaaaccctcaagctgaactatccggataacgccagcctcaaggatggcgagttcgtcgcccgcgaaagcgaggcagacacccgctcctggctggccaaggccaccctgggcttgatcgaaggtggcgagccgccgccgcacatggaaacccaggccgccaaggacgtgatcaagcagtacgaggatgccgagcgggagatccccgccgaactgaagccggaaaaccaggatcacagcgccgacgacgagaagccggagagcgatgacgacgaggactccggtcgctcctggtggagctacatgaccttcggtctcttcgactga

SEQ ID NO: 320442 - DNA, 246 bp, Pseudomonas aeruginosa
atgggccttttccgcctcctgttctggatcgccctgatcgccatcgcgttctggctctggcgtcgttttacccgccccactccgcgccaacagcaacgtccgcaggacgagccgagcgcatcgccgatggtccgctgcgcccattgcggcgtccacgtgccgcaggccaacgccctcgcccacgaacaacgctggtattgcagccaggcgcacctgcgccaggaccagggcgaccgtgcgcgctga

SEQ ID NO: 320443 - DNA, 1593 bp, Pseudomonas aeruginosa
gtgcgcgctgaacggctacggctgagcgaggagcaggggcaacggatcctccgtctgtaccacctgtaccgcctgaccatcggcctggtactggtcctgctgatctccagcgaactggaagatcaggtcctcaagctcgtccaccctgaactgttccatgtcggcagttggtgctacctggtcttcaacatcctggtcgcgctgttcctgccgccgtcgcggcaattgctgccgatcttcatcctcgcgctcaccgacgtgctgatgctttgcggcctgttctacgcaggtggcggcgtgcccagcggcatcggcagcctgctggtggtggcggtggccattgccaacatcctgctgcgcgggcgcatcggcctggtcatcgcggcggcggccagcctcggcctgctctacctgaccttcttcctcagcctgagcagtccggacgccaccaaccactacgtccaggccggcggcctcggcaccctgtgcttcgccgccgcgctggtgatccaggccctggtgcggcgccaggagcagaccgaaacgctggccgaagaacgcgccgagacggtcgccaacctggaggaactcaacgcattgatcctgcagcgcatgcgcaccggcatcctcgtggtcgatagccgtcaggccatcctcctcgccaaccaggccgccctcggcctgctcaggcaggacgacgtgcagggcgccagcctcggccgccacagcccgatgctgatgcactgcatgaagcaatggcgcctgaatcccagcctccgtccgccgacgctcaaggtggtgccggacggcccgacggtgcaacccagctttatcagcctcaaccgcgaagacgaccagcacgtgctgatcttcctcgaagacatttcgcagatcgcccagcaggcgcagcagatgaagctggccggtctcggccgcctgaccgccggcatcgcccatgagatccgcaacccgctgggcgcgatcagccacgccgcccaactgctgcaggagtcagaggaactggatgccccggaccgacggctgacgcagatcatccaggaccagtcgaagcggatgaacctggtcatcgagaacgtcctgcagctctcccgtcgccgccaggccgaaccgcagcagctcgacctgaaggagtggcttcagcggttcgtcgacgaatatcccggcaggctgcgcaacgacagcgaactgcacctgcagctcggtgccggcgacatccagacccgcatggacccacaccagttgaaccaggtgctgagcaacctggtgcagaacggtcttcgctacagcgcccaggcgcacgggcgcggccaggtctggctgagcctcgcgcgcgacccggagagcgacctgccggtgctggaagtcatcgacgacggtcccggcgtaccggcggacaaattgaacaacctgttcgaacccttctttactacagaaagcaaaggcaccggcctgggcctctatctctcccgcgaactctgcgagagcaaccaggcacggatcgactaccgcaatcgcgaggaaggcggcggctgcttccgcatcaccttcgcccacccgcgcaaactcagctga

SEQ ID NO: 320444 - DNA, 1338 bp, Pseudomonas aeruginosa
atgagccgacaaaaagccctgatcgtcgacgatgaaccggatatccgcgaactgctggaaatcactctcggccgcatgaagctggacacccgcagcgcccgcaacgtcaaggaagcccgcgagttgctggcccgcgagccgttcgacctgtgcctcaccgacatgcgcctgccggacggcagcggcctcgatctggtccagtacatccagcagcgccatccacagaccccggtggccatgatcaccgcgtacggcagcctggacaccgcgatccaggcgctcaaggccggtgccttcgacttcctcaccaaaccggtcgacctcggtcgcttgcgggagctggtggcaaccgccctgcgcttgcgcaacccggaagccgaggaagcgccggtggacaaccgcctgctcggcgagtcgccgccgatgcgcgccctgcgcaaccagatcggcaagctggcgcgcagccaggcgccggtctacatcagtggcgagtccggcagcggcaaggaactggtggcgcgcctgatccacgagcaggggccacgtatcgagcggccgttcgtgccggtgaactgcggcgcgattccctccgagctgatggaaagcgagttcttcggccacaagaaaggcagcttcactggtgctatcgaagacaagcagggcctgttccaggccgccagcggtggcaccctgttcctcgacgaagtcgccgacctgccgatggccatgcaggtcaaactgctccgggcgatccaggaaaaggccgtgcgcgcggtcggcggccagcaggaggtcgccgtcgacgtgcgcatcctctgcgccacccacaaggacctcgccgccgaagtcggcgccgggcgcttccgccaggacctctactaccgcctcaacgtcatcgagctgcgcgtaccgccgctgcgcgaacgccgcgaggacatcccgctgctcgccgatcgcatcctcaagcgcctggccggcgacaccggcctgccggccgccaggctgaccggcgacgcacaggagaagctgaagaactaccgcttcccgggcaacgtccgcgagctggagaatatgctggagcgcgcctacaccctgtgcgaagacgaccagatccagcctcacgacctgcgcctggccgatgcgccgggtgccagccaggaaggcgcggcgagcctgagcgaaatcgacaacctcgaggactacctggaagacatcgagcgcaagctgatcatgcaggcgctcgaggagacccgctggaaccgcaccgccgcggcccagcgcctgggcctgacgttccgctcgatgcgctatcgcctgaaaaagctgggcatcgactga

SEQ ID NO: 320445 - DNA, 1095 bp, Pseudomonas aeruginosa
gtgtcggaaagagttgtggtagtgggcgctggcgtcatcggcctgttgaccgcccgggagctggcgcttgccggactgcgggtgaccctggtggagcggggcgagagtgggcgtgaggcatcctgggcgggaggcgggatcgtctcgccgctctatccgtggcgctacagcccggcggtgaccgccctggcgcactggtcgcaggacttctacccggccctggggcagcgtttgctcgacgagaccgggctcgatcccgaggtccataccgttggcctgtactggctggacctggacgaccagaccgaggcactgcagtgggcacgcaaccacacccggccgttgaaggaagtgccgatcgaggaggcctacgcggcggtgcccgggctgggcgcgggcttccagcgggcggtctacatgtcgggcgtggccaatgtgcgcaatcctcgcctggcgcgctcattgcgggcatccctgcaacaattcgccaatctcgagttgcatgaacagacggaggtgcgcggctggttgcgcgacggcgatcgagtggtcggcgtggcgacctcgcgtggcgagatccgtggcgacaaggtgctgctggcggcgggcgcctggagcggcgagttgttgaagccgcttggcctggaactgcccgtggtaccggtgaaagggcagatgatcctctacaagtgcgcggcggatttcctgccgcgcatggtgctggccaaggggcgctacgcgattccgcggcgcgacggccacatcctgatcggcagcaccttggaacattcgggcttcgacaagacaccgaccgacgaggcgctggaaagcctcagggcgtctgcggcagaactgttgccggaactggcggacatgcagccggtggcccactgggcagggttgcgcccgggctctcccgaaggtatcccctatatcggtccggtgcctggcttcgacgggctctggctgaataccgggcactaccgcaacgggctggtgctggcgccggcgtcgtgccgtctgctggcggatctcatgagcgggcgggaatcgatcatcgacccggccccctacgccccggctggtcgcctctga

SEQ ID NO: 320446 - DNA, 510 bp, Pseudomonas aeruginosa
atggtcgaaaggtcgcagagagcgttcacgctcactgagctgctgtttgcgctggctctgctggggatactgggaagcctcgcgctgcccgggatggcagcctggctggacggcaatcgccagcgaagcgtgttgcacgaactgagtgcgagcatccagctgggcagagcgcatgccgtcgcctaccagcgcgcggtgacgctctgtccgtcgaccgatggccgtcactgcggcagcgactggggagagggctggctgcttgcggaagacggtggggaacggcttctcgtgggacgcgcgcttgcaaagaaggaaaggctccgctggaaccgttcgaaccacctcaggttcctccccagcggccagctcaacattcacaacgggcggtttctgctctgcggaaggcataccgttgcctggcaactgatcctcaaccggcagggccggctccgtaccgcgagcgccagggagaaccgggagaaacgtgagctatgcagcacttccggatga

SEQ ID NO: 320447 - DNA, 507 bp, Pseudomonas aeruginosa
atgtcatatcgttccaactcgaccggcttcaccctgatcgagttgctgatcatcgtcgtcctgctggccatcatggcgagcttcgccattccgagcttcaagcagctgacagaacgcaacgaactgcagagcgccgccgaggaactcaatgcgatgctgcagtacgctcgcagcgaagccgtgtcccagaggcgcgcgatcagcatccaggcgctgaaggacaaggactggggcaagggcctgagcataggtgtcctggcctccggctcgatcgccgcgcccctgcgcaaacacgacggcttccgtgccgccacgctgacagcgaaggaaaagagcgccgtggaacatctgaccttcacggccaacggtaccctcgtaccgccaacggaacgaaccttcgccatctgccagaacggcaagaccgacggcggccgcgtgctgagcatcagccaggccggccggatccaactcgaaccttcctccaaggcgcctcagtcatgctattga

SEQ ID NO: 320448 - DNA, 558 bp, Pseudomonas aeruginosa
atgctattgaaatcgcggcacaagccgctgtaccaatccggcttcagcatgatcgaagtgctggtcgccctgctgctgatcagcatcggcgtgctgggcatgattgccatgcagggcaagaccatccagtacaccgccgactcggtcgagcgcaacaaggcagccatgctcggcagcaacctgctggaaagcatgcgggcgagcccgaaggcgctgtacgacgtcaaggaccagatggccacgcaatccgacttcttcaaggccaaggggtcggcgttccccaccgcgccgtcctcctgcacgccattgcccgacgcgatcaaggaccgcctgggatgctgggcggaacaggtgaagaacgaactgccaggcgctggcgacctgctgaagagcgactactacatctgccgcagctcgaagccgggcgactgcgacggcaagggctccatgctggaaatccgccttgcctggcgcggcaagcaaggcgcctgcgtcaacgccgccgacagcagcgccgacacctccctctgctactacaccctcagggtcgagccatga

SEQ ID NO: 320449 - DNA, 825 bp, Pseudomonas aeruginosa
atgagcatgaacaaccgctcccgacggcaatcgggcctgtccatgatcgaactactggtggccctcgccatcagcagcttcctgattctcgggattacccagatctacctggacaacaagcgcaactacctgttccagcaaggccaggcaggcaaccaggaaaacggacgcttcgccatgatgttcctggaccagcaactggccaaggtgggtttccgtaggcgtgcggacgaccccaacgagtttgccttcccggcgcagcagaaaaccgcctattgcgaggcattcaaagccggctcgaccctggtgcccgccgtggtcaaggccggccagagcggattctgctaccgctatcaaccggcgccaggcgaagcctacgactgcgaaggcaactcgatcaccacccctagcgatcccttcgctaccgcccaggccatcaccgcacgcgttctgttcgttcccgcgaccgccgatgtccccggcagcctcgcctgctccgcgcagacaatcaaggaaaaaggccaggagatcgtaagcggcctggtcgacttcaagctcgagtacggcgtcggcccgaccatggccggcaaacgcgaggtggaaagcttcgtcgaacaggccaacatcgccgaccgtccggtgcgtgccctgcgctactccgcgctgatggccagcgacaagaacctgcgccagggcgacagcaagaccctggacgattggatcacgctctacccctcgtccaagaccagcctgcaaggcaatgacaaggaccgcctctaccagatcgccaagggcagccagacactcaggaatctcgtgccatga

SEQ ID NO: 320450 - DNA, 588 bp, Pseudomonas aeruginosa
atgaacaacttccctgcacaacagcgcggcgccacgctggtcatcgccctggcgatcctggtgatcgtcaccctgctggcggtctcgagcatgcgcgaagtggtactggaaagccgcatcaccggcaacgtcatcgaacagactcgcttgcagaacgccgccgagtccggactccgcgaaggcgagcggcgcttcgtcaacaccctgcgtccgccggagcccggcaccggttgtacggccgacaacgtggcccgcccctgcctgctggacctcgccgcgctgaacctgaagctggcggacacccaccagaatccggtcggcgtgctgaagggcatcgccaatacctggatgagttaccgcggcagcgacatcagcagcgcgaccaccgcgggcacgctctacagcgtgcagtggaacaacctgcccattccctcgggcggccaggtcaacgaagcggaaagccccgaatacggcaacctgatgcgcggcatcggcaccttctactacgagaccaatagcgtcgcgcgcaaccagaccaacagcgaaaccgtcctgcagaccgttctcgcccgtctctataccaactga

SEQ ID NO: 320451 - DNA, 3492 bp, Pseudomonas aeruginosa
atgaaatcggtactccaccagatcggcaagacctcgctggcagccgcgctcagcggcgccgtcctgctctccgcccagaccacccacgccgccgccctgtcggtcagccagcagccgctgatgctgatccagggcgtcgccccgaacatgctggtgactctcgacgactcgggcagtatggcttatgcctatgcaccggatagcctggtcaacagccgcaacaacgtctatttcgcgtcgaacagctacaacccgatgtacttcgacccgaatacccagtacaagctgccgaaaaaggtgaccctttccaatggccagatccaggtgcaggactattccaagcccagcttcaccgcggcatggcgcaacggtttcactcaggaaggccgggtaaacctttcccgtgactacaggccaacggtgcagtaccagggcggatcgggagcaggcaccgagtccagcatcgactggtacggggctcctgccttctactaccaatacagcgggggccgcggttgcagcctcaccacttcgagttgctacacccgtgtggaaatcagcggcgcggcccagcagcagaacttcgccaactggtactccttctatcgtacccgcgccctggccacccagaccgccgctaacctggcgttctacagcctgcctgaaaacgcccggatcagttggcaactactgaacagttcctcgtgcctgatcggcagtggctccagtaactgttacaacaactacctgagagacttcaccgggcaacatcgggtgaacttcttcaactggctggagaacctgtcggtcggaggtggtactccgctgcgtcaggccatgactcgagcaggggagtttctcaagaagaccggcgtcaacggcccctatgcctatcgacctggtacccagacctcgccggaatacagctgccgtggcagctatcacattctgatgaccgatggtctttggaacaacgactcggccagcgtaggcaatgccgacagcacgagtcgtagcctccccgatggcaagagctacagcagccagacgccttacagggatgctgcgtccaataccctggccgaccaggccttccattactgggccaccgatgcccggccggatatcgacgacaatatcaagccgtacattccctacccggaccaggccaatccctcggcggagtactggaatccgcgcaacgatccggcgacctggcagcacatggtgacctataccctgggcctgggcctgaccaccagcctcaccagcccgaagtgggagggttccacctactccggcggctatgacgaaatcgccgccgggcgcctcagctggccgaacgcttcgaataaccatagcaacaacgtctatgacctgtggcacgccgcagtgaactcccggggcgagttcttcagcgccgactcgccggaccaactggtcgcggccttccaggacatcctcaaccgaatttcgggcaaggacctgccggcatcccgccccgccatcagctcgtccctgcaggaagacgacactggcgacaagctgacccgcttcgcctaccagaccagcttcgccagcgacaagaactgggctggcgacctgacccgctacagcctgaccacccaggacaaggccaccgtgcagaccaagctgtggagcgcgcagagcatcctcgacgcgatgcccaacggtggagctggccgcaagatcatgatggccggatccggtacctcgggcctcaaggagttcacctggggcagcctcagcgccgaccagcagcggcagttgaaccgcgatccggaccgcaacgatgtcgccgacaccaagggccaggaccgcgtggccttcctgcgcggcgatcgcagcaaggagaacagcgacaacttccgcacccgcaactcgatcctcggcgatatcatcaactcctcgccggcgacggtcggcaaggcccagtacctgacctacctggcccagccgatcgagcccagcggcaactactccacgttcgcagaagcacagaaaacccgtgccccgcgggtatacgtcggcgccaacgacggcatgctgcacggtttcgataccgacggtaacgagaccttcgccttcatcccaagcgcggtcttcgagaagctccacaagttgaccgcccgcggctaccagggcggcgcccaccagttctacgtcgacggctcgccggtggtcgccgacgccttcttcggcggcgcctggcataccgtgctgatcggcagcctgcgcgccggcggcaagggcctgttcgccctcgacgtgaccgatcccgccaacatcaagctgctctgggaaatcggcgtggaccaggagcccgaccttggctacagcttccccaaacccacggtcgcccggctgcacaacggcaagtgggccgtggtcaccggaaacggttattccagcctgaacgacaaggccgcgctgctgatcatcgacctggagaccggggccatcacccgcaaactggaagtcaccggcaggaccggcgtacccaacggcctatccagccctcgcctggcagacaacaacagcgacggcgtagccgactacgcctacgccggcgacctgcaaggcaacctctggcgcttcgacctgatcgccggcaaggtcaaccaggacgatccgttcagccgagccaacgacggcccggcggtggcctcgagcttcagggtgtctttcggtggccagccgctctattcggcagtcgactccgccggcgcggcgcaagcgatcaccgccgcgccctcgctggttcgccatccgacacgcaagggctacatcgtgatcttcggtaccggcaagtatttcgagaacgccgacgcccgggccgataccagccgcgcccagacgctctacggcatctgggaccagcaaaccaagggcgaagccgcgggcagcacaccccgactgacgcgcggcaacctgcagcagcagacactggacctccaggccgactcgaccttcgcctcgaccgctcgcaccattcgcatcgccagtcagaacccggtcaactggctgaacaatgacggcagcaccaagcagtccggctggtatctggacttcatggtcaacggcaccctgaagggcgagatgctgatcgaggacatgatcgccatcggccaggtggtgctgctgcaaaccatcaccccgaacgatgacccctgtgccgacggcgccagcaactggacctatggcctcgatccctataccggcggtcgcaccagcttcaccgtgttcgacctggcacgccagggcgtcgtggactcgaaatccgactacagctacaacaagcagaacgtcgcggtatccggtaccgagcagaaaggcctgggaggcttgacgctgagcaccaacgaacagggcaatccggaagtctgctcctcgggcgaatgcctgaccgtgaaccccggtccgaacacccgtggccgccagaactggcgccccatcgaaggaaagaactga

SEQ ID NO: 320452 - DNA, 348 bp, Pseudomonas aeruginosa
atgaaagtgctgcctatgctgctggccctggccgttcccggcctctgctgggccgaagatccccagaccttcgaaggcgctggcgtggtcttcgaagtccaagtcgagaagaacctggtggacatcgaccaccggctctaccgcctgcccaacagcaccgtcaggaacggcatgcccagcctgttccaggtcaagccgggctccgtggtgtcctactctggcaccgtcagccagccgtggtccaccatcaccgatatctacattcacaaacagatgagcgaacaggagctggccgagatgatcgagaaagaacagccccgccaggacggggaggagcagccccgatga

SEQ ID NO: 320453 - DNA, 426 bp, Pseudomonas aeruginosa
atgaggacaagacagaagggcttcacgttgctggaaatggtggtggtagtggcggtgatcggcatcctcctcggcatcgccattcccagttaccagaactacgtgatccgctccaaccgcaccgagggccaggccctgctctcggacgcggccgcgcgccaggaacgctactactcgcagaaccccggggtcggctacaccaaggacgtggccaagctgggcatgagttcggccaactcgccgaacaacctgtacaacctcaccatagcgacgcccaccagcaccacctataccctgaccgccacgccgatcaactcgcagacccgcgacaagacctgcggcaagctgaccctcaatcagctcggcgaacgcggcgcagccggcaagaccggcaacaacagcaccgtcaacgactgctggcgctga

SEQ ID NO: 320454 - DNA, 945 bp, Pseudomonas aeruginosa
atgcaaatcaaactcgccaatccccgcggcttctgcgccggcgtggatcgcgccatcgagatcgtcaaccgtgccctcgatgtcttcggtccgccgatctacgtgcgtcacgaggtggtgcacaacaagttcgtcgtggacaacctgcgccagcgcggcgccatcttcgtcgaggaactcgatcaggtgccggacaacgtcatcgtcatcttcagcgcccacggcgtttcccaggcggtccgcaaggaagccgaggggcgcggcctgaaggttttcgacgcgacctgcccgctggtgaccaaagtgcacatggaagtggtgcgctacagccgcgacggccacgaatgcgtgctgatcgggcatgaagggcaccccgaggtggaaggcaccatgggccagtacgatgccagcaacggtggtgccatctacctggtggaggacgaggccgacgtcgccgcgctggaggtgcgcaagcccgaagccctgcactacgtgacccagacgaccctgtcgatggacgacacctcgaaggtcatcgatgccctgcgcgccaagttcccgcagatccagggaccgcgcaagaacgacatctgctatgccacccagaaccgccaggatgccgtgaaggaactggccgaccagtgcgacatggtcctggtggtgggcagccccaacagttccaactccaaccgcctgcgcgaactcgccgagcggatgggcacgccggcctacctgatcgacggcgccgaggacatgcaacgcggctggttcgacggtgtgcgtcgcatcggaatcaccgcaggcgcttccgcgccggaagtgctggtgcgcggcgtgatcgcccagctacgcgagtggggggcgtcggaggagcaggaactggaggggcgggaggagaacattaccttctcgatgcccaaggaactgcgggtcaaggctttgtga

SEQ ID NO: 320455 - DNA, 441 bp, Pseudomonas aeruginosa
atggctgagtcgacccgcattggccaggagagccgcgtcaccctgcatttcgccctcaagctggaggacggcaacgtcgtcgacagcaccttcgacaagcagccggcctcgttcaaggtcggcgacggcaacctgctgccgggcttcgaacaggcgctgttcggcttgaaggctggcgacaagcgcaccctgagcattcttcccgagcagggtttcggccagccgaatccgcagaacgtgcagatcatgccgcgcgaccagttccaggacatggagctggccgagggcctgctggtgatcttcaacgacgcggccaagaccgaactgccgggcgtggtcaaggcgttcgatgagcagcaggttaccgtcgacttcaatcatccgctggccggcaagaccctggccttcgaagtcgagatcatcgacgtccagccggcctga

SEQ ID NO: 320456 - DNA, 510 bp, Pseudomonas aeruginosa
atgcctgacgtcgatcgtttcgggcgcttgccctggttgtggatcaccgtgctggtgttcgtcctcgaccaggtcagcaaggcgttcttccaggccgaactgagcatgtaccagcagatcgtggtgatccctgatctgttcagctggaccctggcctacaacaccggtgccgccttcagcttcctggccgacagctcgggctggcagcgctggctgttcgccctgatcgccatcgtcgtcagcgcgatcctggtggtctggctgaaacgcctgaagaaaggcgagacctggttggccatcgccctggcgctggtgctcggtggcgccctgggcaacctctacgaccgcatggttcttggccacgtggtggacttcatcctggtgcactggcagaaccgctggtacttcccggcgttcaacctggccgatagcgccatcaccgtcggcgccgtcatgctggcgctcgacatgttcagatcgaagaaatccggagaagccgcccatggctga

SEQ ID NO: 320457 - DNA, 2832 bp, Pseudomonas aeruginosa
atgaccgactacaaagcgacgctaaaccttccggaaaccgccttcccaatgaaagccggcctgccccagcgcgagccggaaaccctgaagttctggaacgacatcggtctgtaccagaagctgcgggccattggcggcgaccgtccgaagttcgtcctgcacgatggccctccgtacgccaacggcagcattcacatcggtcacgcggtcaacaagattctcaaggacatcattgtccgctccaagaccctggcgggctacgacgcgccctatgtgccgggctgggattgccacggcctgcccatcgagcacaaggtcgagaccacccacggcaagaatcttccggcggacaagacccgcgaactgtgccgcgaatacgcagccgagcagatcgaagggcagaaggccgacttcatccgcctgggcgtgctcggcgagtgggacaacccctacaagaccatgaatttcgccaacgaggcgaacgaaatccgcgccctcgcggaaatggtcaagcaggacttcgtgttcaagggcctgaagccggtcaactggtgcttcgactgtggttcggcgctggccgaggccgaggtcgagtacgccgacaagaagtcgccgaccatcgacgtcggcttcccggtggcggatgccgacaagctggccgcggccttcggcctggcggccctggacaagccggcgcagatcgtcatctggaccaccacgccctggaccatcccggccaaccaggcgctgaacgtgcatccggagatcgactacgcgctggtcgatgccggcgatcgttacctggtgctggccgaggccctggtcgagtcctgcctggcgcgctaccagcgcgagggcaaggtggtcgccaccgccaagggcgaggcgctggaactgatcaacttccgccatccgttctacgagcgcctgtcgccggtctacctggccgactacgtggccctcgatgccggcaccggtatcgtccactcgtcgccggcctacggcgaagacgacttctatacctgcaagcgctacgggatgagcaacgacgacatcctcagcccggtgcagagcaacggcgtctacgtcgactcgttgccgttcttcggcggccagttcatctggaaggccaaccccaacgtggtggccaagctggaagaggtcggcagcctgctggcccacgaaaccatcaatcacagctacatgcactgctggcggcacaagacgccgctgatctatcgcgccaccgcgcagtggttcgtcggcatggacaagcagcccaggcagggtgcttccctgcgcgagcgagcgctggaagccatcacccagaccgaattcgtcccgggctggggccaggcgcgcctgcacggaatgatcgccgggcgtcccgactggtgcatctcgcgccagcgcaactggggcgtaccgatcccgttcttcctgcacaaggccagtggcgaactgcatccacgcaccgtggagctgatggaagaggtcgcgcagcgagtcgagaaggaaggcatcgaagcctggttcaagctcgacgccgccgagctgctcggcgaggaggccgcgcagtacgagaagatcaacgacaccctggacgtctggttcgactccggcaccacccattggcacgtgctgcgtggttcccaccggatcggccatgccagcggcccggtcgccgatctctacctggaaggttccgaccagcaccgcggctggttccactcctcgctgctgaccggctgcgcgatcgacaaccatgcgccgtaccgccagttgctgacccacggtttcaccgtcgacgagtccggccgcaagatgtccaagtcgctgggcaacaccgtggtgccgcagaccgtcatcgataccctgggcgccgacatcctgcgcctgtgggtggcttcgaccgattactcgggcgagatcgcggtatcccagcagattctccagcgtagcgccgatgcctaccggcggatccgcaataccacgcgcttcctgctgtccaacctgaacggtttcgatccggccacggatctgctgccgccccaggaaatgctggccctggatcgctgggcggtcgatcgcgccctgctcttgcagcgcgagatcgaagaggcgtaccgcgagtaccgcttctggaacgtctattccaaggtgcacaacttctgcgtacaggagctgggcgggttctacctggacatcatcaaggaccgccagtacaccaccggcgccaacagcgtcgcccggcgctcctgccagaccgcactgttccacatcgccgaggccctcgtgcgctggatcgccccgatcctggcgttcaccgccgaggaagtctggaaattcctgcccggcgagcgtgccgagtcggtaatgctcgccacctggtacgacggcctcagcgaactgccggccgacgtgacgctgaatcgccagtactgggagcaggtcatggcggtgaaggccgcggtcaacaaggagctggagaaccagcgcgcggccaaggccgtgggcggcaacctgcaggccgaggtcaccctgtatgcggaagacgcgctgcaggcccaattggccaagctgggcaacgagctacgcttcgtcctgatcacctcgaccgcgaccctggcgccgctgtcggcggctccggccgacgcggtggacagcgaagtcgccggcctcaagctgaaagtggtcaagtcgacccacgccaagtgcggtcgttgctggcaccatcgcgaggacgtcggtcagcacgctgcgcatcctgacctgtgcggtcgctgcatcgagaacatcgaaggcagcggcgaggttcgccactatgcctga

SEQ ID NO: 320458 - DNA, 939 bp, Pseudomonas aeruginosa
atgcagctgcttcgcggactacacaacctgcagcccctggccgggggctgcgtcgccaccatcggtaacttcgacggcgtccacctcgggcaccaggctatcctggcgcgtctgcgcgagcgctcgctggagctgggcgtacccagctgcgtggtgattttcgagccgcagccgcgcgagttcttctcccccgattcggcgccggtgcgcctgacccgcctgcgcgagaaactcgagttgctgcgtgggcagggcgtcgacgtggtgctctgcctggccttcaaccgccgcttgcgcgagctgtcggcagccgagttcgtccgccaggtcctggtcgatggactggcggtgcggcatcttgaagtgggcgacgatttccgtttcggctgcgaccgctccggtgacttcgccttcctggtgaacgccagtcgcgagcaggggttcaccgtcgaggcggccaccaccgtcgaactggacggtgtgcgggtgagcagcacgcgggtccgccaggccctggccgagggcgacctgcatctcgccgagcgccttctggggcgtcccttcagcctgagcggacgggtcctgcatggacagaaactcggccggcaactgggctcgcccacggccaacattcaactgaaacggcgcaaggcgccgttgaacggggtctacctggtcagtacgctggtcgatggtcagcgttgccagggggtggcgaacatcggcacccgcccttcggtgaacggcgacggccgtccccatctggaagtgcacctgctcgatttcgccggcgatctatacggccggcatctgcaggtgaccttccaccagaagctgcgcgacgagcagcgttttgcctccctggaggcactcaaggcggcgattctcgcggatatcgccgccgcccgggcctactggctgggccaaccgcttgattga

SEQ ID NO: 320459 - DNA, 1497 bp, Pseudomonas aeruginosa
atgctgtcgcgggtcctcggtttcgtccgcgataccatcctggcgcggatcttcggtgccggcctcgccaccgacgcctttttcgtcgccttcaagctgcccaacctgttgcggcggatcttcgccgaaggggcgttttcccaggctttcgtgccgatcctggcagagtacaagaaccagcagggcgaggaggcgacgcggaccttcatcgcctacgtttccggcttgctcacgctggtgctggcgctggtcacggcgctcggcatcctcgccgcgccctgggttatctgggtcaccgcgccgggcttcgccgataccccggaaaagttcgccctgaccaccgacctgctgcgggtgacctttccttatatattgctgatctcgctgtcgtccctggccggcgcgatcctcaacacctggaaccgcttctcggtgccggccttcgtgccgaccctgctgaacgtcgcaatgatcggcttcgcgctgttcctcacgccttatttcgatccgccggtcatggtgctgggctgggcggtgctggccggcggcctgttgcagctcctctatcaactgccgcacctgaggaagatcggcatgctcgtgctgccgcgcctgaacctcagggacagcggcgtctggcgggtgatgaagctgatgctgccggcgatcctgggggtctcggtgagccagatctcgctgatcatcaacaccatcttcgcctcgttcctggcagccggttcggtgtcctggatgtactacgccgaccgcctgatggagctgccttccggcgtattgggcgtggcgctggggacgatcctcctgccgatgctggcgaagacctattcgaacaaggatcgccatgagtactcgcgcctgctcgactggggcctgcgcctgtgcttcctgctggtgctgccctgttcgctggccctggcgatcctcgccgaacctctgaccgtctcgctgttccagtacggcaagttcaccacggtggacgcggcgatgacccagcgcgcgctggtcgcctactccgtcggcctgctcggcatcatcctggtcaaggttctggcgccgggcttctatgcccagcagaacatccgtacgccagtgaagatcgcgctcttcaccctggtttccacccaactgatgaacctggccttcatcggcccgcttcagcatgccggcctggccctgtccatcggcctggccgcctgcctgaatgccggcctgctctactggcaactgcgcaagcagcgtctgtacctgccgcaaccgggctgggcgaagttcctggtcaagctggtggtcgcggtgctggcgatgtcggcggtgctgctggccacgatgcattggctgccggcctgggagcagggcgccatgctggagcgattcctgcgcctcggcctgctggtggttgccggtctcctggcctatttcggtatgctcgcgctgctgggtttccgcctgcgcgacttttcccgccgggcggtgctgtga

SEQ ID NO: 320460 - DNA, 276 bp, Pseudomonas aeruginosa
gtggccaacacaccttccgccaaaaaacgcgccaaacaggctgagaagcgtcgcagccacaacgccagcctgcgctccatggtgcgcacctacatcaagaacgtcgtgaaagccatcgacgccaaggacctggaaaaagcccaggccgccttcaccgccgctgtaccggtgatcgaccgcatggctgacaaaggcatcatccacaagaacaaggctgctcgtcacaagagccgtctgagcggccacatcaaggccctcagcaccgctgccgcctaa

SEQ ID NO: 320461 - DNA, 465 bp, Pseudomonas aeruginosa
atgcgcaagctcgcggggttgctgggtggtctgctgctgttgccggcgcttgccggggcggaggagatcggcgaggtttccacggtgttcaagtgggtcgggccgaacgacaagattgtcgtcgaggctttcgacgatcccaaggtgcagggcgtgacctgctatctgtcgcgcgccaagaccggtggggtcaagggcggcctggggctggcggaggatcgcgccgaggcgtcgatcgcctgtcgccaggtggggccgatccagttcagtggcgaactcaaggatggcgaagaggtgttcaagcagcgcacttcgctggtgttcaaaagcatgcaggtggtgcgcttcttcgatcgcaagcgcaatgccttggtctatctggtctacagcgaccgggtgatcgaaggtagtccgcagaacgcggtgacggcgattcccctcatgccatggccgaccgctcgctga

SEQ ID NO: 320462 - DNA, 1119 bp, Pseudomonas aeruginosa
atgcgggacaaggtgactggcgcgcggcgctgggtggtgaagatcggtagcgccctgctgacggccgatggccgtgggctggatcgcaatgccatggccgtttgggtcgagcagatggtggcgctgcattgcgccggcatcgagctggtgctggtgtcgtccggcgccgtcgccgccggtatgagccgcctgggctgggtgtcccgacctagcgcgatgcacgaactccaggccgccgcctcggtggggcaaatggggttggtgcaggcctgggagtccagcttcgccctgcatggcctgcagaccgcccaggtgttgctgacccatgacgacctctccgaccgcaagcgctacctgaacgcccgcagcaccctgcggaccctggtcgagctgggcgtggtcccggtgatcaacgagaacgacacggtggtcaccgacgagatccgcttcggcgacaacgacaccctggcggcactggtggccaacctggtcgaggccgacctgctggtgatccttaccgatcgcgacgggatgttcgacgccgatccgcgcaacaatcccgatgcccaactgatctacgaggcgcgtgccgatgatccgcagctcgatgcggtggccggcggcagtgccggcgccctggggcgcggcggaatgcagaccaagctgcgggcggcgcgcctggcggcgcgttccggcgggcatacggtgatcgtcggtgggcgtatcgagcgtgtcctcgaccgcctgcgcgccggcgaacgcctcggcaccctgttgacccctgatcgcagtcgcaaggcggcgcgcaagcaatggctggccggccacttgcagatgcgcggcaccctggtgctggacgatggggcggtgaaggcggtgagccaggatcacaagagcctgttgccggttggggtcaaggcggtccagggcagcttccgtcgcggcgagatggtggtctgtgtggaccagggcgggcgcgaagtggcgcgcggcctggtcaactacagtgcgttggaggcgcagaagatcctcggtcagccgacggatgccatcgaggccttgcttggctacgtggatgggccggagctggtgcatcgcgacaatctggttctggtctga

SEQ ID NO: 320463 - DNA, 1221 bp, Pseudomonas aeruginosa
atgaaattcgtcgatgaagtatcaatccacgtgaaagccggtgacggcggcaatggcctcatgagctttcgtcgcgagaagttcatcgaaaagggcggtcccaacggcggcgacggtggcgacggcggttccatctacctggaagccgacgtcaacctgaacaccctggtcgactatcgctacacccgccgtttcgatgcccagcgcggcgagaacggcggcagcaaggactgcaccggggccaagggcgacgacctgatcctgccggtgccggtcggtaccaccgtgatcgacgccaatacccaggaaatcatcggcgacctgaccgagcccggtcagcggctgatggtcgctcaggggggctggcacggcctcggtaacacccgtttcaaatccagtaccaatcgggcgccgcgccagaccaccccgggcaagccgggtgaggcgcgcgacctcaagctggaactgaaggtgctggccgacgtcggcctgctgggactgccgaatgccggcaagagcactttcatccgtgcagtgtccgcggccaagccgaaggtggccgactatccgttcaccaccctggtgccgaacctcggcgtggtcagtgtcggtcgctacaagagcttcgtggtcgccgacattcccggcctgatcgaaggtgccgccgaaggcgccgggctgggcatccgcttcctcaagcatctggcgcggacccgcatcctcctgcatctggtggacatggcgccgctggacgaaagcgatccggccgatgccgccgaggtcatcgttcgcgagctgggtcgcttcagtccggcgctgaccgagcgcgagcgctggctggtgctgaacaagatggaccagatcctcgatccggccgagcgcgaggcgcgcaagcaggcggtgatcgagcggttgggctgggaaggcccggtctatgtgatctccgccctggagcgcgatggcaccgaggcgctcagccaggacatcatgcgctatctcgacgagcgtaccctgcgcctggaagaagatccgcagtatgccgaggaactggccgaactcgaccggcgtatcgaggacgaggcgcgggcccgtctgcaggccctggacgatgcgcgcgcgctgcggcgttcgggtctgaagaacgccggtgcggtggatgacgatgatttcgatgatgaggaagacgacggcgacggtccggagatcttctacgttccctga

SEQ ID NO: 320464 - DNA, 258 bp, Pseudomonas aeruginosa
atggcacacaaaaaagctggcggttctacccgcaacggccgcgactcagaaagtaaacgccttggcgtgaaactgttcggcggccaggctgtaaaggctggcaacatcctggttcgtcagcgcggcaccaaattccacgccggttacggcgttggcctgggcaaggaccacaccctgttcgcgaaagtggacggcgtggtcaagtttgagaccaaaggcgcctttggtcgcaaatacgtgagcatcgttgctgcctaa

SEQ ID NO: 320465 - DNA, 312 bp, Pseudomonas aeruginosa
atgtacgcagtgattgttaccggtggcaagcagcacaaagtcaccgaaggcgaattcctcaaggtcgagaaactcgacgtcgctaccggcgaagcgatcgatttcgaccgcgtcctgttggttgccaatggcgaagacgtgaaaatcggcctgccggtcgtcgaaggtgcgaaggttaccgctgaagtggtttcccacggccgtcacgacaaggtccgcatcatcaagttccgccgtcgtaagcaccacatgaagcgtcagggccaccgccagtggttcactgaaatcaagatcaccggcattcaggcctaa

SEQ ID NO: 320466 - DNA, 969 bp, Pseudomonas aeruginosa
atgcaaccccaggccttctaccgcgtggtggcggaagatttcaccgccgtcgacgggatcatccgtcgccaactcacctcccgcgttcccctggtggaaaagatcggcgactacatcatctccgccggcggcaagcgcctgcgcccgctgctggtcctgctcgccggcaagaccctgggctacaagggcgacgacctctgcctgctggccgccaccatcgaattcctgcacacctccactctgctgcacgacgacgtggtcgacgcctccggcctgcgccgcggccgctccaccgccaatgccctgtggggcaacgcgccgagcgtgctggtaggcgacttcctttatgcccgctccttcgaaatgatggtcgagctgggttccatgccggtcatgcgcatcatatcccaggccacccgggtgatcgccgagggcgaagtgctgcaattgtccaaggtacgcgacgccagcactaccgaagagacctacatggaagtgatccgcggcaagaccgcgatgcttttcgaggcctcgacccacagcgccgccgcgctgtgccaggccggcgaggaacagtccgaggcactgcgccgcttcggcgactacctgggaatcgccttccagctggtggacgacctgctcgactaccgcggcgacgccgcgaccctcggcaagaacgtcggcgacgacctcgccgaaggcaagcccaccctaccgctgatcgtcaccatgcgcgacggcaccgaggagcaggccgcgctggtacgcaaggccatccagcaaggcggcagccaggacctggagagcgtctgtgccgccgtcgaggctgccggcgccctggactataccgccaacctcgcccgcgactacgccgcccgcgccatcgcctgcctggatacgctgccggacaacgaataccgctccgccctggtcgaactcagcgaattcgctgtcgcccggacccactga

SEQ ID NO: 320467 - DNA, 225 bp, Pseudomonas aeruginosa
atgacttatttgatcgatgcctggcttgatcggccacacccctacctgcggatcctgcaccgggaaaccggggaaatctgcgcagtcctggaagaagacgcgctggacgaactgcgtgaccagggcggcctggacctgcacgagttgaactcgagcgaaccgctgatcctcaaggagctggtacgcaacctgttcctcttctgctacgcccgcgccctgcgctga

SEQ ID NO: 320468 - DNA, 2028 bp, Pseudomonas aeruginosa
atgcctgcttctttcccgcgcctcggcttgctcggcgcgctgtgctccatcgttcccctgctccatgccagcgaaccgaccacggacgctgcgctcatcgaaaaaggccgctacgtggcccagctcggcgactgcatcgcctgccataccggcccgcagggcgcgccgatggccggcggcctggagctgaagacgccaatgggtaccatctactcgaccaacatcactcccgaccgggagaccggcatcggccgctacagcttcgaagagttcgaccgcgccatgcgcaagggggtgaccgccgagggagtgaatctctatccggcgatgccctacccgtcctacgccaagatcagcgaagaagacatgcgtgcgctgtacgcctacctgatgcacggcgtgcaacccgtcacccaggcgaatacgccgagcgcgatgagctggccgttcaaccagcgctggggcctgtcgctgtggaactgggcgttcctcgacgacgcgccgttcatcccctccagcgacgcggacccggcgatcaaccgcggcgcctacctggtacaggggctcggtcactgcggcgcctgccatactccgcgcggcatcgccttccaggaaaaagccatgagcgaagccggtcgttccgggcagttctacctcgccggagaaaccgtcgaacaatggcaagccctgagcctgcgcaacctgtggacggtggaggacaccgtgcagttgctgaagaccgggcagaaccgcttcgccacggtgtccggcagcatgaccgatgtcatccaccacagcacccagcacttcagcgacgacgatctgctggccatcgccagctacctgaagtccctgccggccggcaaggacgacctgcccatgcccgacagcgaacgcccactggcagcaccggtcgacctgtacagctcgcggggcggtctcggctacgcgcagttctgctccgactgccaccgcaaggacggcagcggcgtcccgggcatgttcccgccgctggccggcaaccccacggtcgcttcggccaacccgagcacgctactgcatatcacccttaccggttggaaaaccgcgcagaccgcaacccactcgcgggtctacaccatgcccggcttcgcccagctggaagaccgcgaaatcgccgagatcctcagcttcgtccgcagcagttggggcaaccagggttcgtcgatcgatgccggccaggtgaagaaactgcgccagcggatcgaggccggcaacggcccggccacgaccttcgtctctccacgcctggcggacatgctcgcggcgccgaacgccgaacaggtggtacgcggcatgcgcctgcacctggagacccgcgagctgctgccggcgaacgtcggcaaccagttgaactgcaccagttgccacctgaacgccggaaccgtagccgacggctcgcccttcgtcggcgtctcggcgttcttccccagctacgcgccccgggcgggcaaggtcatcggcctggaggaacgcatcaacggctgcttccggcgctcgatgaacggtaagcctctgccaccggactctgccgacatgcaggcgatggtggcctacttcgactggatgaagaacaacacccggccgcaggacaaggtcgccggccgcggcgtcggcaaggtcgacccggcgctgaagcccgacccggagaacggccgcaaggtctacgcccgacaatgcgcggtgtgtcatggcgagaatggcgaggggctgaggaacagcgccggcgagatgctcttcccaccgctgtggggcgacgagtcgttcaatattggcgccggcatggcgcggaccttcaccgctgccgccttcgtcaagcacaacatgccgatcggcttccaggaacgcttcccgctcggccagggcggcctcagcgaccaggacgcagtggacgtcgcggagtacttttcgcaccagccgcgcccggacttcccggacaagatcaaggactggccgaaggacaagcgtccgctggatgcccgctactga

SEQ ID NO: 320469 - DNA, 618 bp, Pseudomonas aeruginosa
atgagcgaactcaacctgaccactgacgaagcccgtgtcagctacggcatcggccgtcaactgggcgaccaactgcgcgagaacccggttccgggcatgaccctggacgcagtcctggccggcctgtccgatgcgttcgcaggtatcgacagccgggtttccggcgaggcgctgtcggccagcttccaggtgatccgcgagcgcatgcaggccgaagcccaggccaaggccgaagccgccgctggcgaaggccgcgcctacctggccgagaacgccaagcgcgaaggcgtgaccgtgctgccctcgggcctgcagttcgaagtgctgagcactggcgagggcgccaagccttcccgcgaggataccgtgcgcacccactaccacggcaccctgatcgacggcaccgtattcgacagctcctaccagcgcggccagccggccgagttcccggtgggcggcgtgatcgccggctgggtcgaagcgctgcaactgatgaacgccggctccaagtggcgcctgcacgtaccgagcgaactggcctatggcggccaggcggtcggcagcattcccccgcacagcgtgctggtgttcgacgtcgaactgctggaaatcctctga

SEQ ID NO: 320470 - DNA, 306 bp, Pseudomonas aeruginosa
atgaacatgcaggatctcgccggccgggtccaggccggacatatcgacgccttgcacctggtgtcgctggagggcggcatctatgtcctggaggcgcagatgggcgaccgcgcctatccggtggaggacgatctcggccagccggtcagcctgcgctccgtggagcatgcgcgccaggtactgcgcgggctgaacagggttccggtggagttggtgtgcgccgatgtcgatgacgagatgtgtggactcctggccgagtcgggttcgtttatcggcgggctgccgctgtcgatccgccagggttga

SEQ ID NO: 320471 - DNA, 489 bp, Pseudomonas aeruginosa
atggaacgctttttcgaaaacgccatgtacgcctcgcgctggctgctggctcccatctacatgggcctgtctctggcgctgctggcgttgaccatcaagttcttccaggaaatattccacgtcatcccgaacatcttcgcgatggccgaggccgacctgatcctggtcctgctctcactgatcgacatggctctggttggcggcctgttggtcatggtgatgatctccggctacgagaacttcgtttcgcaactggacatcgacgaaggcaaggaaaagctcagctggctgggcaagatggattccggctcgctgaagaacaaggtggccgcctccatcgtggcgatctcttcgatccacctgttgcgcatcttcatggacgcgaagaatgtgccggacaacaagctgatgtggtacgtgatcatccacatgaccttcgtgctctcggcgttcgccatgggctacctggataagcagacccgtcactga

SEQ ID NO: 320472 - DNA, 342 bp, Pseudomonas aeruginosa
atgccgcgtaacctctgcctcatccgcccttgtctggggctgaccacgcgaatcgaatgcgtggtcaggccgctggccggagagaacggactctggaccctgctttgcgccgccggcatgtccggctcccagccttcggcgatcaaggcccagggccccttccacggaccgctggtggccgaaggggtgttgcaggcgattgccgactgcctggcccagcaaggctatatcgaagccgtcgacccgccgatctggcgcttgcacctgcagggcgaactgcgccgactcaatggcgaacgacggccgcatgtcggcgactacctgtttcgcccggaatcctga

SEQ ID NO: 320473 - DNA, 2454 bp, Pseudomonas aeruginosa
atgcccgattccgtcgctgccggcctgcgcctggcgccagaagaactgacccgcccgttcgctcccgagcaattcgccttcgacaccaccgatgacctggagcccttccgcggcgtgctgggccaggagcgtgcggtcgaggcgctgcagttcggtgtggcgatgccgcgtccgggttacaacgtattcgtcatgggcgagccggggaccggacgcttctccttcgtcaaacgctatctgcaagccgagggcaagcgcgtcgccacgccctccgactgggtctacctgaacaatttcgacgagccgcgcgaacctcgggtgatcgagctgccgccgggcagcgcgaccgaattcagcgccgacatcgaccgtctgatcgacaacctgatgtcgaccttcccggcggtcttcgagcatccggcctaccagcagaagaagaacgccgtcgaccgcgctttcaaccagcgctacgaccgcgccctggactcggtggagcggcgcgccctggagaaggacgtggcgctgtaccgcgacagcgccaacgtcgccttcaccccgatgaaggacggcaaggccctcgatgaggccgaattcgcccagttgcccgaagccgagcgcgagcgtttccacaaggatatcgccgccctcgaggagtacctcaacgaggaactggcgagcctgccgcagtggaagcgcgagtcgagcaaccagttgcgcgagctcaacgaggaaaccatcaccctggccctgcagcccctgctggcgcctctggtggagaagtacaacaacaacccgggcgtctgcgcctacctgcaggcgatgcaactgaacctgctgaagaccgtggtcgaccaactggtcgacgacagccgcaccgacgcccagcgcaagcaagggctgatcgagcagtacgcgccgaaccaggccatcgtccaccacgcgaccagcggcgcgccggtggtgttcgagtcgcacccgacctacgacaacctgttcggccgcatcgagtacagctccgaccagggggcgctctacaccagctaccggcagttgcgtccgggggcgctgcaccgggccaacggcggcttcctgatcctggaagcggaaaagatgcttggcgagccgttcgtctgggacgcgctcaagcgtgccctgcagtcgcgccagttgaagatggagtcgccgctggccgaactcggccgcctggctgcggtttccctgaccccccaggtgatcccgctgcaactgaaggtgatcatcatcggctcgcggcagatctactacaccctgcaggacctcgatccggacttccaggagatgttccgggtgctggtggacttcgacgaggacatcccgctgggcgaggacagcctcgaacagttcgcccagttgctcaagacgcgcacctcggaagagggcatggcgcccctcagcggcgcggcggtggcgcgactggcgacctacagcgcgcgcctggccgagcaccaggggcggctttcggcacggatcggcgatctgttccagttggtcagcgaagccgatttcatccgtcagctggcgaacgaggaggtgatccagctcggccacatcgagcgtgccctcaaggccaagcagacccgcaccggacgggtgtcggcgcggatcctcgacgacatgctggcggggatcatcctgatcgacaccgctggcgccgcggtcggcaagtgcaacggactgaccgtgctggaggtgggcgactcggtgttcggcgtgccggcgcggatttccgcgaccgtctatccgggcagcagcggcatcgtcgatatcgagcgcgaagtcaacctcggccagccgatccactccaagggcgtgatgatccttaccggctacctgggtagccgctacgcccaggagttccccctggaaatctccgccagcatcgccctggaacaatcctacggctacgtggacggcgacagcgcctcgctgggcgaggtctgcacgctgatctcggcgctgtcgcggacgcccttgaagcagtgcttcgccattaccggctcgatcaaccagttcggcgaggtgcaggcggtcggcggcgtcaacgagaagatcgagggcttcttccgcctctgcgaagcgcgcggcctgaccggcgaacagggtgtgatcatcccgcgcgccaacgtcactaccctgatgctcgacgagcgcgtgttgcaggcggtgcgcgccgggcagttccacgtctacgcggtgcgcgaggtggacgaggcgctggcgctgctggtgggcaagccggtcggtgcccaggacgagaagggacgcttcccgaaaggcagcgtgaacgatctggtcgtggcgcgcttgcaggagatatccgaactcggcatggaagaggacgacaaggaaaaggacaaaccggcggagaaagagaccgtcgtggcgaaggacaaggccgcggcgaagaaggactga

SEQ ID NO: 320474 - DNA, 327 bp, Pseudomonas aeruginosa
atgagcgctttcgaccccgctaccgccctggaaaccctggcgaccgagtacgcggcacgcgccgcggcgatccgccgggacctggcgcgcagccattcgccggactttgccgagcaggcggtgcagcgccagaacgacgaagtgctcgaaggcctgctcgccgaggcggaggcggggatgcgccaggtcggcctggcccgcctgcgcctggcggaaggtcgctacggccagtgcgagcgctgtggcgaggctatcgaaccggcgcgcctggccgccctgcctgcggcggaatactgcctgcgctgcgccgacctggtacatcggtga

SEQ ID NO: 320475 - DNA, 489 bp, Pseudomonas aeruginosa
atgaaacggattctgctcggtaccctgttcgccgccgcctccttcaacgctttcgccgacgctcccggcggcgccggctgcggctggggcaacatgctcttcaaaggccagcgcggcgtggccacccacgtggtcgcggcgaccaccaacggtacttccggcaacaacaccttcggcatgaccaccggcaccaacggctgccataccaacggcgcgctgtcctatggcggcaagcccctgctggtgctcggcagcatgatggacgagctgtccgaagacatggccaagggcaatggcgaagcgctgaccacctatgccgtggtgctgggcgtgcaaccgcaggaccgcgagcacttcgccgccgtcacccatgagcatttctccgagatcttcaacaagtccgacgccaccgccgccgacgtctatgccaacacccaggcgatcctgaaacaggacgcccgcctggccaagtacgccgagcaggcctga

SEQ ID NO: 320476 - DNA, 1857 bp, Pseudomonas aeruginosa
atgccgaaacgcctgttgccctggatggcgctgtgcgcctgctccccccttctggctgcgcccacggttcccgaggcccgcctccagcaactggccgccgatccctactggatcgccctcggccactacgaacgcggcaagctcggcggttggcgcagctacgtcgacgacgagcggttcttcctcgccgacaacggcgagagccacccggacgccgaactggcggccacgctaaaggcgctctatgcctcgcccagccttggcgacaagcacgctcagtgcgtctacccggcgcgcacccgctggctgcgccagcaactgcaactcgacgacctgccgcagccgcagtgcggcgaatacgacaactggtaccgcgacatcaacccgcacagcgcggtgctggtgttccccgcggcctacctgaacagcccgtcgtcgatgttcggccacaccctgctgcgcatcgaccaggccgacgtcaccagcaacaacactgccctgctcagctacgcgctgaacttcggcgcctacatcgaaggcatggacaacagcatcctctatgcctggaaaggcctgatgggcggctatcccggcctgttcgcgctggtcccgtaccgggagaagctggccgaatacagccgcctggagaaccgcgatctctgggaatacaagctgaacctgacgcccgaggagaccgggcgcatggtcgaacacgtctgggaactcaagcaggtccgcttcgactactacttcttcgacgagaactgttcgttccgcctgctcgaactgatggagatcgcccgcccgggcatcgagctgaccgagcagttcccgcttaccgcgatccccaccgacaccgtccgcgcggtgaagaacgccgggctgatcgagcgcatcgactaccggccgtcgcgcgagaaggaactgctcgcccgcgccgaaccgctcgaccatgccgagcgcgactgggccaagcgcctggcggacgacgacagcctgctcgacgctcccgacttcaaggccctgccgatgccgcgccaggcgctgatccaggacgccgccttccgcctggtgcgctaccgcgccaccggccaggcgcgtgacagcggcatcgcctcgcgcagctacaacctgttgcgagcgatcaaccgcaacccgccgccggacctccaggtcgagcgccccggccagccggaagacggccacgagtcacggacctggcagttcggcgtcggcagccgcgatgaccgcgccttcgccgagtacggcctgcgcatggcctaccatgacctcgccgataacgcctatggcttccccctcggcgcgcagatcgagatcggccagctcaagctgcgccagtacgaaggcaaccgctggcagatgcagaatctcgacctggtcaccatccgctcgctgaccccgcgcaaccagttgctcaagccgctgtcctggcaggtcgccggcggcctggagcgggtgccgggcgaggacggcgacgaaaacctagtcagccacctcaacggcggcgccggcggcagctggatgttcggcgacgacttgctgctctacgccatgggcaccgcgcggatcgagaacaacagggacttcgccgccgccatcgccccggcggtgggcttcgacagcggcttgctgtggcgcaacccgctgggcaacctgaccctggaggccaagggcgactacttccacaacggtgaagtgcgccgcagtttgggcttcgtccagcaggtggagctgggccgcgacctcggcctgcgcctgagcgccgaacgcgagttcagccatgtcggcaagccgatcaacgaggtgaagctggagctgcgctggtactactactga

SEQ ID NO: 320477 - DNA, 555 bp, Pseudomonas aeruginosa
atgagcgagataatggacgtcgagcgactgcgccagcgctgcgcggccggcgaaagcttcaaatacctgtatttctggggacatcgcccggcgacggatgacaaggtcggcaagagctgtttcagccagtggtacgaggcttcgttcaagctcgacggggtgcgctacgccagcgccgagcattacatgatggcggccaaggcacgcttgttcgacgaccctaggttgctcgagcgcatcctggcggcgcgcagcccaggcgaggcgaaggccctcggccgcgaagtcgccggcttcgacgaggcacgctggaacgccgagcgggtgggaatcgtgatcgaaggcaacctcggcaagttcggccagaacgcttcgctgaagaaataccttctgggcaccgccgaccgggtgctggtcgaggccagcccggtggacgcgatctggggcatcggcctggccgcgagcgatcccctggcagccgagccggcgacctggcaaggcctcaacctgctcggcttcgccctgatggaggtgcgccggaggctggctcagtag

SEQ ID NO: 320478 - DNA, 1596 bp, Pseudomonas aeruginosa
atgaaacgcacggtcgccatcggcttcatcggcgccaccctcgaccgtctcggcaagggcgcggcgcgctggcaaaagtggcggccgagcatcggcctgtgccagcagccggacctgctgatcgaccgcctcgaactgatccacggcaacgacgcccgcgacctcggcctggccgagcggattcgcgccgacatcgccgcggtgtcgccgcataccgaggtccgcctgcagcagatggaactgcgcaacccctgggacttcgaggaggtctatggcgccctgcacgatttcgtcagcgcctaccccttcgacaccgagcgcgaggactacctggtgcatatcaccaccgggacccatgtcgcgcagatctgctggttcctccttaccgaggcgcgctacctgccggcccggctggtgcagacctcgccgtcgcggcgcaaggacgaggcgcgccatcccgagggctcggcgacgctgatcgacctcgacctgtcccgctacgaccgcatcgcctcgcggttccgccgcgaacaggaggaaagcctggctttgctcaagtcgggaatcgccacgcgcaatgccgctttcaaccgctccatcgagcagatcgagcgggtcgccgtgcgttcgcgggcacccatgctgctggtggggccgaccggtgccggcaaatcgttcctcgcccggcgcatctatgaactcaagcgcagccggcaccagctcgacgggcgtttcgtcgaggtcaactgcgccaccttgcgcggcgacggcgcgatgtcggcactgttcggtcacgtcaagggcgccttcaccggcgcgcagaatgcgcgcgaaggcctgctgcgcgcagccgacggtggcatgctgttcctcgacgagatcggcgagctgggcgccgacgaacaggcgatgctgctcaaggctatcgaagagaagcgcttcttcccgctgggttcggaccgtgaggtggagagcgacttccagcttatcgccgggacccaccgcgacttgcgcggacgagtggccgaaggcctgttccgcgaggacctgttcgcccgcatcaacctttggaccttcgagctgccgggcctggctggacgccgcgaggacatcgagccgaacatcgacttcgaactggagcggcacgcccgcgagcaagggcggcaggtgcgtttcaacctggaggccaagcgtcgctacctggccttcgccggttccagcgaagcgcgctgggccggcaacttccgcgagctgtcggcttccatcacacggatggcgaccctggccgacagcgggcggatcgacgaggcgctggtcgaggaggagatcctccgcctgcgccaggcctgggggctcgatgcgggccgggagccactggccgatctgctggggcagcgggtggaggccctggatctgttcgaccgcctgcaactgcaggcggtgctggaggtgtgccgcggggctaagaccctttccgaggcgggacgccggctgttcgccgtttcgcgccaggacaagcgcaaccccaacgacgccgaccggctgcgcaagtacctggcgcgtttcggcctggactgggcgcagatacgcgcctga

SEQ ID NO: 320479 - DNA, 1146 bp, Pseudomonas aeruginosa
atgaaaatgctgaagcgctttatcgtgaagaagaacgaacgcggcctgctgtattccgaaggcgacttcctcgccgtgctcgaaccgggcacctaccgccgcttcgatccgtacgaccgcctgagcctggaaagcttcagcctgaacaccccgcagttcgaacaccgcctggccggctacctgcggcagagcgaaccgcaactggtggagcgctacttcacccggatggacctgggcgacaacgaggccggcctgcgctacgaggacggcgtgctggtggagttgctcgcaccgggcagccgccgactgtactggaaaggccagaccgagcagcgcctggagcgcatcgacctgacccaggactatcgattgtccgccgcgctggtcgcccagttgcaccagccgaacctgcgcgaccgcgccctggcgggcctggacgcagtgttgctggtccaggtgccggcgttccaggtcggcgtgctcaaggtcgacggcgcccttgccggcctgctgcaagctggacaatacggtttctggcgctacaaccggcaagtcagcgtggaactggtcgacacccgtatccaggcgctggaggtcagcggccaggagatcctcacccgcgacaaggtcagcctgcgcctgaacctcgccgccaattggcgctacagcgacgtgctcaccgccttctcgcggctgagcaaaccgctggagtatctgtatcgcgagctgcagttcggcctgcgggcggcagtgggcacccgtaccctcgacgaactgctggagaacaagcagtcgatcgacgaagcggtcagcgcccacctggccgccaagctggaagacaacggcctggaagtgagcggcctgggcgtacgcgacatcatcctcccgggcgaaatgaagaccctgctggcgcaggtggtggaggcggagaaggcggcccaggccaatgtgatccgccgccgcgaggaaacctcggcgacccgctcgctgctgaataccgcgaaggtcatggaggaaaacccgaccgcgctgcgtctgaaggaattggaaaccctggagcgggtggccgagcgcatcgaccggatttcggtattcggtggcctggaccaggtattgaacggactggtcacgctgaagcaggcctga

SEQ ID NO: 320480 - DNA, 1215 bp, Pseudomonas aeruginosa
atgaaagacatgaatatcctcgaagtggccggcggcaagccgatcaagctctggacccagggcgtcccggtggaggaggaagcgcgccagcagttgctgaacacggcgaagatgcccttcatcttcaagcacctggcggtgatgcctgacgtacacctgggcaagggctcgaccatcggtagcgtgatccctaccctcggcgcgatcatcccggccgcggtgggcgtggatatcggctgcggaatgatcgccgcgcgcacctcgctggtcgctgccgacctgccggacaacctgcacggcctgcgcagcgccatcgagcaggcggtaccccacggcaagaccttcggccgccgcgaccgcggcgcctggcacgaggtaccggaggccgccgaccaggcctggaaggcgctcgccggtcgcttcaaggcgatcaccgacaagcacccgaggctggagaagaccaacaaccgccagcacctgggaaccctcggcaccggcaaccacttcatcgaggtctgcctggacgaggccgaccgcgtctggttcatgctgcacagcggttcgcgcggggtcggcaacgccatcggcaacctgttcatcgaactggccaaggcggacatgcgccagcacatcgccaacctgccggacaaggacctggcctacttcgaggaaggcagccggcacttcgacgactacgtggaagcggtcggctgggcccaggatttcgcccggcagaaccgcgcgctgatgatgcacgcggtgatcgaggcggcgcgccaggtgatccgcaagccgttcgaagccaacctggaggcggtcgattgccaccataactacgtgcagaaggagcgccacttcggccaggaggtactggtcacccgcaaaggcgcggtgtccgcgcagaagggccagctcggcatcattcccggctcgatgggggcgaagagcttcatcgtccgcggcctcggcaaccaggaagcgttctgctcgtgcagccacggcgccgggcggaccatgagccggaccaaggcgaagaaggtcttcagcgtcgccgaccaggcgcgcgccaccgcccacgtcgaatgccgcaaggacgccgacgtgatcgacgagatcccgatggcctacaaggacatcgaccgggtcatggaagcccagcgcgagctggtggaagtgctgcacaccctgcgtcaggtggtgtgcgtgaaaggatga

SEQ ID NO: 320481 - DNA, 813 bp, Pseudomonas aeruginosa
atgaacagggaagaacgccatccgctccccgccgccatgcgcgagcgggtactggatgagctggaacggatcgaacgcgagcacgacgtagtcgtgctctacgcctgcgagtcgggcagccgggcctggggcttcgcttcgccggacagcgactacgacgtacgcttcgtctatgtgcatcagcccgagtggtatcagcgcgtcgaggaacctcgcgacgtgatagaacgtccgctgagcgacgagctggacatcagcggctgggaactgcgcaaggcgttgcgcctgatgcgcaaatccaacccggccctgctggagtggctcggctcgccgctggtgtatcgggaagagcctggcgtgcgcgaggaactgctctggctgggcagcgcctttcactccgtaccaggcagtcgccatcactacctgtcgatggcacgcaagaactaccggggctacctgaagggcgacagcgtccggctgaagaaatacctctacgtcctgcgtccgttgttcgcggtgcgttggctggatgcaggcctgggcttgccgccggtggcgttcgagaggctagtggaagccacgctggacgatccgtcgctgcgcgaagaactggatgccctgctgagcctcaagcgtcagcgcgacgaatcggcctacggccctccgcgcctggcgctgcaacgcttcatcgaagcggagttgctccaggccgaacgaggggccacccaaccaaccggcgcgcgccaggacagccgactgctggatcgctacctccacgacaagatatggcaatacacaagggaaacctcatga

SEQ ID NO: 320482 - DNA, 1026 bp, Pseudomonas aeruginosa
atgagaaaggacctcatcgaactcgacggcagcgaaggcggcgggcagatcctgcgtagcgccctgagcctgtcgatgaccagcggccagccgctgcgcatccgcaacatccgtggccggcgcagccgtccggggctgctgcggcagcacctcaccgcggtgcgcgcggcggcggaaatctgcgcggccgaggtcgagggtgccgagctcggctcacgcgagctggcgttccggcccggtgcgatccgcgccggcgactacgccttcgccatcggctccgccggcagttgctcgctggtactgcaaaccctgctgccggcgctgctcgcggccaacggcgaaagccgggtgaggatcagcggcggcacccacaatccactggcgccgccggcggactttctccgcgacagctggctgccgctgttgcagcggatgggcgcggaagtcgacctggaactgctgcgccacggcttcgtacccgccggcggtggcgagctgctggcgcgggtacgcccggcacgctggcggccgctgcaactggagcatcccggcgcggcgctgcggcgccaggcgcgggcgctgctcgccgggattcccgggcacgtcggcgagcgtgagctggagagggtccgccagcgcctcggttggagcgacgaagaacgccagctggagttcctcgcggaggaccaggggccgggcaacgccctgctgctgcggatcgactgcgagcacatctgcgcgaccttctgcgccttcggccaggccggcgtcagcgccgaacgggtggcggaacaggtcgcgacgcaagccatcggctggatggaaagcggctgcgcggcggacgagcacctcgccgaccaattgctgctgcccatggccctggccggcgccggcagcttcaccacgccgcggctgagcgcccatctgcaaagcaaccgccgggttatcgaacgcttcctgccggtgaggatcggcgaccaggcgctggacggcggcggtcatcgcatcgtcatcacatcggcttga

SEQ ID NO: 320483 - DNA, 378 bp, Pseudomonas aeruginosa
atgtcttcttcgcgtctcggcgtgcttgtcctcgccctgatcctgctcaccgccaccctgctcggcggctgcgaaagcacccaccagtacctgctcgccaagggctacccgcccgcctatgccgacggtttcgacgatggctgcggtagcggccgccaggcggccggctcgatcagcggcgaattccgcaaggacgtcccccgctacctgcgtgaggcgatctacgccagcggctggggcgacggcttcgagcaatgccggtcgatggcgcggagcgaagagcggcggcgtttcgaggagcgccagtgggacgaccgcgacgacgattggcagcgcgaccgcgaccgcgcgttggcccgggccttgcgcgagcgctga

SEQ ID NO: 320484 - DNA, 1041 bp, Pseudomonas aeruginosa
atgcagtcctcgcaactgctcccgcttggcagcctgttgctgtcgttcgccacgcccctcgcccaggccgatgccctgcacgaccaggccagcgcgctgttcaaacccatccccgagcaggtcaccgagctacgcggccagcccatcagcgagcaacagcgcgaactcggcaagaaactgttcttcgacccgcgcctgtcacgcagccatgtgctcagctgcaacacctgccacaacgtcggcaccggcggcgccgacaacgtaccgacgtcggtcggtcacggctggcagaaggggccacgcaattcaccgacggtcttcaacgccgtgttcaatgccgcgcagttctgggatggccgtgccaaggacctgggggagcaggccaagggtccgatccagaacagcgtcgagatgcacagtaccccgcagttggtcgaacagaccctgggcagcatcccggaatacgtggacgccttccgcaaggccttccccaaggccggcaagccggtcagcttcgacaacatggcgctggccatcgaggcctacgaggcgaccctggtgactccggactcgcccttcgacctgtatctcaagggcgacgacaaggccctcgacgcacagcagaagaaaggcctcaaggcattcatggacagtggctgcagcgcctgccacaacggcatcaacctgggcggccaggcctacttcccgttcggcctggtgaagaagcccgacgccagcgtgctgcccagcggcgacaagggccgcttcgccgtgaccaagacccagagcgacgagtacgtattccgcgccgcgcccctgcgcaacgtcgccctcaccgcgccgtacttccacagcggccaggtctgggaactcaaggacgcggtggcgatcatgggcaacgcccagctcggcaagcagttggcgccggacgacgtggagaacatcgtcgccttcctgcacagcctgagcggcaagcagccgcgcgtcgaatatccgctgctgccggccagcacggagaccacgccgcgtcccgcggaataa

SEQ ID NO: 320485 - DNA, 1338 bp, Pseudomonas aeruginosa
atgacgcaatccgtcgacgctttcctcgagcgcctgaagcggcgcgatcccgatcagcccgaattccaccaggcggtggaagaggtgctgcgttccctctggccgttcctcgaggccaacccgcactacctggaagccggcatcatcgaacgcatcgtcgaacccgagcgggcgatcctgttccgcgtaccctgggtcgacgaccagggccgggtacgggtcaaccgtggctaccgggtgcagatgagcagcgccatcggcccctacaagggcggcctgcgcttccatccctcggtcaacctcggggtgctgaagttcctcgccttcgagcaggtcttcaagaactccctgaccactctgcccatgggcggcggcaagggcggctccgacttcgatccgaagggcaagagcgacgccgaggtgatgcgtttctgccagtcgttcatgagcgagctgtaccgccacgtcggcgccgacctggacgtgccggccggcgacatcggcgtcggcgcgcgtgagatcggctacctgttcggccagtacaagcgcctgtccaaccagttcacctcggtgctgaccggcaagggcctgagctatggcggcagcctgatccgcccggaggcgaccggcttcggctgcgtctacttcgcccaggaaatgctcaaggatcgtggccgcggcttcgacggccagcgggtggcgatctccggctcgggcaacgtcgcccagtacgcggcgcgcaaggtcatggaaatgggcggcaaggtgatctcgctgtccgattccgaaggcaccctgtatgccgaggcggggctctccgacgagcagtgggaatacctgatggagctgaagaacgtgcgccgcgggcgcatccgcgagatggcggagcagttttccctgcagttcctcgaagggcgccggccctggggcctggcctgcgatatcgcgctgccctgcgcgacccagaacgaactggatgccgaggatgcgcggcgcctgctggccaacggctgcgtctgtgtcgccgaaggcgccaacatgccctcgaccctggaagccgtcgacctgttcctcgaggccggcatcctctacgcgccgggcaaggcgtcgaacgccggcggggtggcggtgagcggcctggagatgtcgcagaacgccatgcgcctgcgttggagcgagggcgaggtggataccaagctgcacggcatcatgcagtcgatccaccatgcctgcctgctgtacggcgaggagcaggggcgggtcaactacgtgaagggggcgaacatcgccggcttcgtcaaggtcgccgatgcgatgctggcgcagggcgtggtctga

SEQ ID NO: 320486 - DNA, 1437 bp, Pseudomonas aeruginosa
ttgaacaacaaaaacgatatttcctgcctgtttgccagaaaaccattgccattgctctgcgccctgatcgtcggcggactgttcggcacgtcccaggcgcaagccggcggcttcatggtgccgaccaccaacacggcgggctggggccgtgcgatggcaggcggctcgctgtttcccaacgatccgagcgccgcgttcaacaacccggcggccatggcgttcatcgacaagcggatcgcccagttgacggtcaactacgccgatatcgacatcaagtacaacggcgatgcctacgactaccagggtaatcccatgaccggcggctaccaggacgggccgggcacccccgagctgggtaccaacgatggcggccaggccggattcggcgcgtggctgccgaccggcttcctggtcgtaccgatcaacgaccgcttcgccttcggtctgagccaggtcgttccgatgggaatgcgcagcacctgggacccgaactggaaaggccgcgatttcgcggtggacaccaagatcgagacgatcggcctgaccggctccctgtcgttcaaggtcaacgacaacttctccctgggcgccggggtgatcatccagcgcacctccggcttcgtcagccagaacctcgatctctatgcctcggccgccaactccccgggcatgggcgggattccgttcccggcctcgaactcgtccgcgctgatgcgggtcaaggtggacaacacctcgcccggcttcttcgccggcgcggtgtggaagccgaccgaccgcgacaccctgggcttcgcctaccacgcgaagatccgcaacaagctgaaggggcactacaacctctacgaccacgacggtggactgaccgagggcgccatcgagggcggcaccccgggcctggcctatccgggcctggacctgcgcatgggcgcttccgcctcggcgcgcctggatatccccgcctacgcctcgctggattgggtacaccagttcaacgaccgtctgagcctgggcgccagcgccacctggaccgagtggtcgtcgttccaggacctgaccctcaagtcccacggcaacacgatcgtctccatcccctacacctaccggaacacctggaccctggcggtgggcggcgactacaaggtgaccgaccagtggaccatgcgcgccggggtcgcctacgaccagacgccgacccacaatgccacccgcgacccgcggattcccgacggcgatcgctacttcgcctccctgggcgccggctatcgcttccagtcgatgccggagttgtcgatcgacgcggcctactcgcggcaattcgtcaaggaggtgccgttgaagacggtcaaccaggatcgcctgggcggcgggcggctggatggcagggcaaccagcaagggacaggtgttcagcctgtccgcgacctacgacttctag

SEQ ID NO: 320487 - DNA, 489 bp, Pseudomonas aeruginosa
atgaaatccatcaagtccctgccgtcctttgctgctcttgctctctgcctgagcgtttcgtccatggccagcgcggccaccatcaccccggtcaactcggccttcaccgcacctggcaccatcagcgtgagctcgccggcgtcgctcaatctgccagtgacctgcaacatcaccttcaagggcaagaccgccgccgatggttcctatgcctcgatcgacagcgtcaccgtcagcggcagcaacaccctgtgcagcgtgccgcagatgaccggcctgccgtggaagctgaccgtttccagcaccaccgccggcaaggtcgatggcgtcggcttcaagattctctcctctacctgtggcccgagcaccgtcaacggttcctggagcaacgccaccaataccctcagcgccagcaatcagtcgctggcaggcaactgcaagatcaacagcctgagcgtgaagccgaccccggccttcgtagtcaacccgtaa

SEQ ID NO: 320488 - DNA, 1278 bp, Pseudomonas aeruginosa
atgaccactgaccggttttccttcctgcgccggcccgcattgccgctcgccgtcggcctggcggttgtcgcggcgctggcctggctggtcttcgccggcggtaccgcgaaacgcacggaaggggagcgctgggtcgccgtgcgggcggccccgctggtgcatcagatcggcctggtcggacgcctggagccggggcgcgtggtgaccctggcggcgcccttcgccggcaatgtcgaggcgctgctggtggagccgggacagcgggtcgcggaaggacaggagctgctgcgcatggacacccgcgagatcgccgtgcaggtgcgcgaggcacagtcggcgttgctcaaggcccgtcgcaccctgcaggacctgcgcgactgggagcgtggcgaggacatggcgcgggtccgtcgtgccctgcgcagcgcgcagctggcgcagagcagcaccgagcgcaagttgcgcgagacccgcgagctgttccagcgcgggatcgtcccgcgcaacgaactcgacgatctcgaacaacaggccagccagcagcgcatggacctggaggcggcccggcgggaagtggagtcgacccgcgccaaggggcagggcgagaatcgccagatcgccgaaatggacctggccaacgccagcgtgaaatacgagacgctgcaggcccagctggatggccgtacggtgcgcgcgccctttgccggtatcgtcgtcgcggcgcccggcctggctggcgagcagggcagccgcgaaccggtgcaggccggtagcaagctggggcagggccaggcgttgttcggcctggccagcgtcgagcggctgaaggtatctgcgaaggtttccgaactggatatcaaccagttacgcgaagggcaggcggtggaaatcagtggcgacggcttcgagggcaccacgctggcgggcgtcatcgccgccctcggtggtcaggctctgcccggcatggcccagggaggtagcccgcagttcgaggtgacggtgtcggtagcgccgctcgatccccgccagttgcagaagattcgtctgggaatgagcgccaagctgacggtcaccacctatcgcaacgaacaggccatcgtcgtgccgccggaggcgatacgccacgagggtgaccggctgttcgtggacgttcgccaggctcccggcgccagcgtgatggcgcaacaggtcaagatcggacgctccacgccggagggcgtggaggtgttcgagttgcagccgggtctcgttcgcgtgccgtcctcgtccaaccgatag

SEQ ID NO: 320489 - DNA, 1482 bp, Pseudomonas aeruginosa
atgaataggtggggcctgggcgtgctgtggctggtcgccgctcttccggtggcggccagcgtcaacccggcgctgagtccggacgtaccgagcgtggcccgcgagcagggcaggtcggtactgctcagcgagcaggtgatcgacctcagcctgagcgacgcggtctatcttggcctgcgcaacaaccgtggaatccgtagcgcctacctgcaacggatcgcgcagaagttcgacctgcgggtcgccgccgacgccttcaacccgaagctggtggtgcgcggcgactatcgcgccaaccgcgccaccgaagaccgcacgaggaccagcaatgtctcgcccaccgcgaccctgcttggcgaatatggcactcgcttcagcctggcctgggtgaagcagttccgcaccgccgacgaggccgggcgctaccgcagcgatggcctcgacctgaccgtcgtccagccgttgctgcgcgatgcgggctgggacgtcaccaccgcgccgctgcgcctggcacgtctctccgaagacgccaatcgcctgcaactcaaggccagcgtgtcgcagaccatcagccaggtcatcggtgcctaccgggagctgctgcgcgcccaggagcaggcgcgcatctctcgcgaagccctggcgcggacccaggagctgctcgaggtcaaccgggcgatgatccgcgccgggcgaatggccgaattcgagatcgtgcagaccgaggccgacgtcgccagccaggagctcaacgtcgaggagtccgccaaccaggtcgacagcgcacgcctggccctgctgcaactgctggcgctggacctgtcgacgcagatccgcgccagcgatgcgctggccgccacgccgatcgaggtcgaccgccagcaggcgatcaggaccgccctgcagcagcaaccggaatacctgcaacgcctgatcggcagtcgccaggccgacctcaacctggtgctggcgaagaaccagcgcctgtgggatgtctcgctggtgggcggcgccagccagatccgcgaccgctacagcgagggcggtggcgacaattcacgcagctgggacagctacgccggggtacaggtggaaattcccatcggcgacctcagccgccggcaggccgaggtgcgcgcccaggtcgacgtggagaaccagaagatcctgatcgaggatgcccggcagaccctggagcagaacgtcatcgatgcggtgcgcgacctcggcacgcgctggcgccagtaccagatcgcccagcgcgccaccgccttgtcgcggcgcaagctggagatcgagcgggaaaagctgcgcgtcgggcgttcgagcaacttccaggtgctgagcttcgagaccgacctgcgcaacgtcgagaacacccaattgaatgccctgatctcgtttctcaatgcgcagacgcagctcgacctgatcgtcggcatgaccctggatagctgggagatttcgctcaatgaccactga

SEQ ID NO: 320490 - DNA, 1194 bp, Pseudomonas aeruginosa
gtgagcgccagcccgtcgccccggcaattgcttcacgaggccctcgccagtcttcgcgggctggggcgccgctcgctgctggcgttgctgggtatcgtcatgggctgttcatcggtgatcgcgatgctgaacatcggcagcaacgcgaccgacgaagcgatgagcatcttcaaggacatgggcaccgacaccctggtggtgcagttcccgttcgccccgcaggcgccgatgccgatgccggcgtcgctcgacaccgaaccgctgctccgcgacgtggccggtctggagcacctggcggcgctgggcctgtactcggcgccggtgacctttcacggacgcaccagcaacgccagtatcgtcggcgccagcgccgggctcgcggctgccgccaggctgcggctgcgcgaaggacgtttcctctcgcgcttcgacgatcacgacacctacgtggtggtgggcgcgacaatcgccgaggccctgggggcgcccggcgatccgctgcgcctcggcgagcaactgacggtcaacgactatctgttccgcgtgatcggcattctccagccgcaggccagcgccgctctcttgccgttcgccgccaacgactcgctgttcgtgccggcgccgggcatgccgcgcctgcagccggccgccgaggtcagccatgtggtggcgcgggtctcgccgggagcggacgtctatagcgtcggcgcggccctgggcgcggcgctgacggcgcggttgcccggccacgaggcgcaggtccaggtctcgcagcaggtgctcgatggactcaagcggcagacccggaccttcacctacctgctggccggactggggatcatctccctgctcggcggcggcgtcggagtgatgaacgtgatgctgatgagtgtcgccgaacgccgccgggaaatcggcgtgcgcatggcgctgggcgcgcgccagcgggacatccgcaacctgttcctgatcgaggcggtgaccctgaccgccgcgggcgcgctgtcgggcgcggtgctcggcgtggcggctgcgtatctctacgccaggttctccggctggaccttctccctggcctacgcggccctgccgctggggatgggcagtaccctgctggtggggctgttcttcgggctctatccggcggtctcggcggctcgcctgcaaccggtcgaggcgctgcgcgatgaatag

SEQ ID NO: 320491 - DNA, 717 bp, Pseudomonas aeruginosa
atgccaacaacaaacaagcacgaatcattgatctccctgcgggggatcggcaagggctacctcctggggggggggcagccgctgcagatactgaaagacgtctgcctggacatctttcccggagaaagctgcgcgatcgtcggcgcgtcgggctcgggcaagagcaccctgctgaatatcctcggcctgctcgaccgcccggacagcggtgcctaccgcttcgccgagcacgacatcttcagcgtcgacggggaccgactggcggcgatccgcaaccgcctgatcggcttcgtcttccagagcttcaacctgttgccgcggctgaacgcgctggacaacgtcgcgctgcccctgagctatcgagggatgccgcgccgcgaggcactggagcgggccgaggcgatgctcgcccgggtcggcctggccgagcgcgccggccatcgtccggcggacctttccggcggccagcggcagcgcgtcgccatcgctcgcgcgctggtcggcgagccggcgctgatcctcgccgacgaaccaaccggcaacctcgacgcgagcaccgcgaaagaagtgctggagctgctcctcaccctcaaccgcgagcgccaggtgaccctggtggtggtcacccatgatcccagcctggccgcccgtctcgggcgccaactgacagtacggcatggcgaggtgcacgaggacctggcggaggcctgccggtga

SEQ ID NO: 320492 - DNA, 1665 bp, Pseudomonas aeruginosa
ttggctcagtacgtctacaccatgcatcgggtcggcaagatcgttccgcccaagcgtgaaatcctcaaggacatctccctgtcgttcttccccggcgccaagatcggcgtgctcggcctgaacggcgcgggcaagtccaccctgctgcggatcatggccggcgtcgacaccgagatcgaaggcgaggcccggccgatgccggggatcaacgtcggctacctgccgcaggagcccaagctggacccgcaggccaccgtgcgcgacatcgtcgaagaggccgtcggccagatcaagcaggcccaggcgcggctggacgaggtctatgccgcctatgccgagccggatgccgacttcgacgccctggccgccgagcaggccaagctggaggcgatcctgcaggcatccgacggacacaacctggaacgccagctggaagtcgccgccgacgccctgcgcttgccgccgtgggatgccaaggtcgagcacctgtccggcggcgaaaagcgccgcgtagcgctgtgccgtctgctgctgtcggctcccgacatgctgctgctggacgaaccgaccaaccacctggacgccgactcggtggcctggctggagcatttcctgcacgacttccccggcaccgtggtggcgatcacccacgaccgctacttcctcgacaacgtcgccggctggatcctcgaactcgaccgtggccatggcatcccgttcgaaggcaactactccggctggctggaatccaaggccgcccgcctggcccaggaagccaagcaggaagcctcccacgccaaggccatgaaggccgagctggagtgggtacgccagggcgccaagggccgccaggccaagtccaaggcgcgcctgcagcgcttcgaggaactgcagtcgcaggaattccagaagcgcagcgagaccaacgagatctacatcccggccggtccgcgcctgggcgacaaggtcatcgaactgcacaatgtgaccaagggctacggcgaccgcgtgctgatcgacaacctgtccctgagcattcccaagggcgccatcgtcggtgtgatcggcggcaacggcgcgggcaagtcgaccctgttccgcatgcttaccggcaaggagcagccggactccggcaccatcgagatcggcgagaccgtgcagatcgccagcgtcgaccagagccgtgacagcctggaaggcaacaagaccgtgtgggagcaggtttccgacggtttcgagcagatcaagatcggcaactacgaagtcccgtcgcgcagctatgtcggtcgcttcaacttcaagggcgccgaccagcagaagttcgtcaaggacctctccggcggtgagcgtggccgtctgcacctggccctgaccctgaagcagggcggcaacgtgctgctgctcgacgaaccgtccaacgacctcgacgtggaaaccctgcgtgcgctggaagaggcgctgctggacttccccggctccgccatcgtgatctcccacgaccgctggttcctcgaccggatcgccacccacatcctctcctacgaggacgatggcaaggtgaccttcttcgaaggcaactacaccgagttcgaggcggaccgcaagaagcgcctgggcgacgccgcggcccagccgcaccgcgtgcgctacaagaaactggcgtaa

SEQ ID NO: 320493 - DNA, 156 bp, Pseudomonas aeruginosa
gtgacgctgagcagcgtactggccgcccttactgtctccgctaccctcgtcctgtcaaaggcgttctgcctgagcgaggcggcgaccatcgccccgtgcgaggtctgggtgggcctggcactgctcgcggccatggtgctgccgctcaagacctga

SEQ ID NO: 320494 - DNA, 636 bp, Pseudomonas aeruginosa
atgacactcgctcccagatccgcccagctacccgactccccgcacagggacagtctcgacccagcgccaaccccgtcgtctcaggaccagcgcctgctcaaggccctggccaccgcgatggtcaatcatccgcgcgccaccatgggagaactggcggaactggcaggagtgagcagggcaaccctgaaccgtcattgcggtacccgcgaaggtctcaagcggcgcctggaaagccatgccaggagtaccctcgaacgcctcacccacagcgccgccctacagcggctggagccgcgggaagcgctacgcgagctgatccgggaacacctcgcccagcgcgacctgctggcgctgctgatgttcgagcagaacccgggacgccaggccgggcatggggacgccagttggcagtcctatgtcgaagccctggacgccttcttcctgcgcggccagcagaagcgtgtgttccgtatcgatatcagcgcggcgaccttcagcgaactcttcatcgtcctgatctacggcatggtcgatgccgagcgccgcggtcgcgcggccagcgccgggttgtccgccacgctggaggagctgttcctgcgtggcgcgtcgaaccccgcacaacctgccagcccttga

SEQ ID NO: 320495 - DNA, 1440 bp, Pseudomonas aeruginosa
atgcgcaaacctgctttcggcgtatcggcgctgctgatcgccctgaccctcggcgcctgctccatggcgccgacctacgaacgtcccgccgcgccggtggccgacagctggagcggcgccgccgcccagcgccagggcgcggcgatcgacacgctggattggaagagtttcatcgtcgatgccgagctacgccgcctggtggacgtggccctggataacaaccgctcgttgcgccagaccctcctggatatcgaggcggcccgcgcgcagtatcgaatccagcgcgccgaccgggttccgggcctgaacgccgctgccaccggcaaccgccagcggcagccggccgacctgtccgccggcaatcgctcggaagtggccagcagctaccaggtcgggctggccctgccggagtacgaactggacctcttcggtcgggtcaagagcctgaccgacgcagccctgcaacagtacctggccagcgaggaggcagcgcgcgcggcacggatcgccctggtcgccgaggtcagccaggcctacctgagctatgacggcgccctgcggcgcctggcgctgacccgtcagaccctggtcagccgcgagtattccttcgccctgatcgaccagcgccgcgcggccggcgccgccaccgcgctggactaccaggaagcccttggcctggtggagcaggcgcgcgccgagcaggagcgcaacctgcggcagaaacagcaggcattcaacgcgctggtgttgctgctgggtagcgacgatgccgcgcaggcgattccgcggagtccggggcagcggccgaagctgctgcaggacatcgctcccggcacgccgtccgagctgatcgagcgacgcccggacatccttgccgccgaacatcgtttgcgggcgcgcaacgcggatatcggcgcggcgcgcgcggcgttcttcccgcgcatcagcctgaccggcagcttcggcacctccagcgcggaaatgtccggcctgttcgatggcggctcgcgctcctggagcttcctgccgacgctgacgctgccgatcttcgatggcgggcgcaaccgtgccaacctgagcctggccgaggcgcgcaaggattcggcggtggccgcctacgaggggaccatccagaccgctttccgcgaggtcgccgacgccctggcggccagcgataccctgcgtcgcgaagagaaggccctgcgcgccctggcgaacagcagcaacgaagccctgaagctggccaaggcacgctacgagagtggcgtcgacaaccacctgcgctacctcgatgcgcagcgcagcagcttcctcaacgagatcgccttcatcgacggcagcacccagcggcagatcgccctggtcgacctgttccgcgcgctcggcggaggctgggacgagggacggagcctggtggtacatcgaggcggcaggagttga

SEQ ID NO: 320496 - DNA, 3132 bp, Pseudomonas aeruginosa
atgtccgaattcttcatcaagcggccgaacttcgcctgggtggtggccctgttcatctccctggccggcctgctggtcatttccaaattgccggtagcgcagtaccccaatgtcgcgccgccacagatcaccatcaccgccacctatcccggcgcctcggcgaaggtgctggtggactccgtcaccagtgtgctcgaggagtcgctgaacggcgccaagggcctgctctacttcgagtcgaccaacaactccaacggcaccgccgagatcgtcgtcaccttcgagccgggcaccgatccggacctggcccaggtggacgtgcagaaccgcctgaagaaagccgaggcgcgcatgccgcaggcggtgctgacccagggcctgcaggtcgagcagaccagcgccggtttcctgctgatctatgcgctcagctacaaggaaggcgctcagcgcagcgacaccaccgccctcggcgactacgccgcgcgcaatatcaacaacgagctgcggcgcctgccgggcgtcggcaagctgcaattcttctcttccgaggcggccatgcgggtctggatcgatccgcagaagctggtgggcttcggcctctccatcgacgacgtgagcaatgccatccgcgggcagaacgtgcaggtgccggccggcgccttcggcagcgcaccgggcagttccgcgcaggagctgacggcgaccctggcggtgaagggcaccctggacgatccgcaggagttcggccaggtagtgctgcgcgccaaccaggacggctcgctggtccggctcgccgatgtcgcgcgcctggaactcggcaaggagagctacaacatttcctcgcgactgaacggcacgcctaccgtgggcggggcgatccagctgtcgcccggggccaacgcgatccagaccgctaccctggtgaaacagcgtctcgccgaactgtcggcgttcttccccgaggacatgcagtacagcgtgccctacgacacctcgcgcttcgtcgacgtggccatcgagaaggtgatccacaccctgatcgaagcgatggtcctggtgttcctggtgatgttcctgttcctgcagaacgtccgctacaccctgatcccgtccatcgtggtgccggtgtgcctgctgggtacgctgatggtgatgtacctgctggggttctcggtgaacatgatgaccatgttcggcatggtcctggcgatcggcatcctggtggacgacgccatcgtggtggtggagaacgtcgagcggatcatggcggaggaggggatttccccggccgaggccacggtcaaggcgatgaagcaggtatccggcgccatcgtcggcatcaccctggtgctctcggcggtgttcctgccgctggctttcatggccggttcggtgggggtgatctaccagcagttctcggtgtcgctggcggtctcgatcctgttctccggcttcctcgccctgaccttcaccccggcgctgtgcgccacgctgctcaagcccattcccgaagggcaccacgagaagcgcggcttcttcggcgccttcaaccgtggcttcgcccgcgtcaccgagcgctattcgctgctcaactcgaagctggtggcgcgcgccggacgcttcatgctggtgtacgccggcctggtggccatgctcggctacttctacctgcgcctgccggaagccttcgtgccggcggaagacctcggctacatggtggtcgacgtgcaactgccgcctggcgcttcgcgcgtgcgcaccgatgccaccggcgaggagctcgagcgcttcctcaagtcccgcgaggcagtggcttcggtgttcctgatctcgggcttcagcttctccggccagggcgacaatgccgcgctggccttcccgaccttcaaggactggtccgagcgaggcgccgagcagtcggccgccgccgagatcgccgcgctgaacgagcatttcgcgctgcccgacgatggcacggtcatggccgtgtcgccgccaccgatcaacggtctgggtaactccggcggcttcgcattgcgcctgatggaccgtagcggggtcggccgcgaagcgctgctgcaggctcgcgatactcttcttggcgagatccagaccaacccgaaattcctttacgcgatgatggaaggactggccgaagcgccgcaactgcgcctgttgatcgaccgggagaaggcccgtgccctgggggtgagcttcgagaccatcagcggcacgctgtccgctgccttcggctcggaggtgatcaacgacttcaccaatgcggggcgccaacagcgggtggtgatccaggccgaacagggcaaccggatgaccccggaaagcgtgctcgagctatacgtgcctaacgctgctggcaacctggtaccgctcagcgccttcgtcagcgtgaaatgggaagagggaccggtgcaattggtgcgctataacggctacccgtcgatccgcatcgtcggtgacgccgcgcccggcttcagtaccggcgaagccatggcggaaatggagcgcctggcctcgcagctgccggccggcatcggctacgagtggaccggcctgtcctatcaggagaaggtctccgccgggcaggccaccagcctgttcgccctcgccatcctggtggtgttcctgttgctggtggcgctctacgagagctggtcgatcccgctgtcggtgatgctgatcgtgccgatcggcgccatcggcgcggtgctcgcggtgatggtcagcggtatgtccaacgacgtgtatttcaaggtcggcctgatcaccatcatcggtctttcggcgaagaacgcgattctcatcgtcgagttcgccaaggaactctgggagcaggggcatagcctgcgcgacgccgccatcgaggccgcgcgcctgcgcttccggccgatcatcatgacttccatggcgttcatcctcggcgtgatacccctggccctggccagcggtgccggcgcggcgagccagcgtgccatcggcaccggagtgatcggcgggatgctcagcgccaccttcctcggcgtgctgttcgtacctatctgtttcgtctggctgctgtcgctgctgcgcagcaagccggcacccatcgaacaggccgcttcggccggggagtga

SEQ ID NO: 320497 - DNA, 1065 bp, Pseudomonas aeruginosa
atggtgttgccggtggaggtcctgacggtgcaggccgagcccctggcgctgagttcggaactgcctgggcggatcgaaccggtgcgtgtcgccgaggtgcgcgcgcgggtggccggcatcgtcgtgcggaagcgcttcgaggagggcgccgacgtcaaggctggcgacctgctgttccagatcgatccggcaccgctgaaggctgcggtgtcgcgcgccgagggtgagctggcgcggaaccgcgcggtgctgttcgaggcgcaggcgcgggtgcgtcgctacgagccgctggtgaagatccaggcggtcagccagcaggacttcgataccgccaccgccgacctgcgcagcgccgaggcggcgacccgctcggcccaggccgacctggagaccgcgcgcctgaacctcggctacgcctcggtcactgcgccgatctccgggcgcatcggtcgcgcgctggtgaccgagggcgcgctggtcgggcagggcgaggcgacgctgatggcgcgcatccagcagctcgatccgatctatgcggatttcacccagaccgcggccgaggccctgcgcctgcgcgacgccctgaagaaaggcaccttggccgccggcgacagccaggcgctgaccctgcgcgtcgaagggacgccctacgagcgccagggcgcgttgcagttcgccgacgtggcggtggatcgcggtaccggccagatcgccctgcgcggcaagttcgccaaccccgacggggtcctgctgccgggcatgtacgtgcgcgtacgtacgccccagggcatcgacaaccaggcgatcctggtgccgcaacgggccgtgcaccgctccagcgacggcagcgcccaggtgatggtggtgggcgccgacgagcgcgccgagtcgcgcagcgtcggtaccggcgtcatgcagggttcgcgctggcagatcaccgagggcctggagccgggtgaccgggtcatagtcggcggcctggctgcggtgcagccgggggtgaagatcgtgccgaagccggatggtgcccaggcgcaagcccagtcacctgcgccgcaacagtaa

SEQ ID NO: 320498 - DNA, 564 bp, Pseudomonas aeruginosa
atgaccctgatttcccatgacgagcgactcatcaaggcgctggcagtcgctatcgtcgaccgcccgcgagcgacgctgaaggaactggccgaggcggccggcgtaagcaaggccaccctgcaccgcttctgcggcacgcgggacaacctggtgcagatgctcgaggaccacggagagaccgtactgaaccagatcatccaggcctgcgacctggagcatgccgagcctctggaggcgttgcagctcctgatcaaggaacacctcacccaccgcgagctgctggtattcctggtattccagtaccgcccggacttcctcgacccgcacggcgaaggcgcacgctggcagtcctacctggaagcgctggacgccttcttcctgcgcggacagcagaaaggcgtgtttcgcatcgacatcacggcggccgtgttcaccgaactgttcatcaccctggtctacggcatggtcgatgcggaacgtcgcggacgggcggccagctccaattccgcgcataccctggagcagatgttcctccatggcgcctccaatccggcgcgctcctga

SEQ ID NO: 320499 - DNA, 4248 bp, Pseudomonas aeruginosa
gtgtcgaccccctcgctaaccccgtcgccgcctcccgccggcgacccactgaccgtacccgaccgaccggcagccaaggctggcctgctgttgctggtcctgttgatgctcggcctgctgctctggcagatgagccaggagctgcgccagcaggaacgcttcgaacacgagcgagccgcggcccagctcgatcgtctcaacgaccgcctgtccctgaccctcgaactcaaggcgcgcaccgccctcgccctgctcccgggcgtgccccccagcgagcgtggcgagatacagggcaggctgttgccgcgcatcagcgatgcgctgccgcaggtgcgccagttgcaatgggtggacagcgccccgcagacggacagcccgtcgccggaaacgacgctgcccgagcagttgcgccagcacgccggctccggcctctaccactattgcctcgacccgcgcgacggcgaatccctctacctgaccctgcgcgaacccggcagccgccgcgacagtggcttctggctgttgcacctggccagcgacagcctcgcccagtggagtcccgacctgcccaccggcaacctgctctggcgcctggaagaccaatacgccgggcgggtgctctggcataccccggggagcacggcgctgctcgacgacatgcagaccctcggcgtggaaccgctgcgcaacagcgactggcagcttcgcgggctctacgacagcacgcgagtgcggctcggcctgctgccgggaatcggcggcgagctggcgatcttcctcctgctggtcggcgtcaccgtgtacatgctgctgcgcctgcaccgcgagcaacagggcctgcgcgccatgaccctggcctcgcagcgcagcctgcgccaggcggccacggcactggcggcgatcgacgagcgggtgctggtgacccgcgccgacggccgcctcagctacctcaatccccaggccgaacgcctcttcggcatcagttcggcccaggcccgccagcatcatctgctgggcctgctgccggacctcgagccaggctggctgacggacgccggtggcgacggcgagacccgtagcgagctgctgccgctgcgggtgcgcggcgagccgcggacgttcaccctcagccgccatccgctggccagctatccggcgctcgccgaccaggcctggaccctccgcgagcagatcctccagggcgggcaggtctgggtgttgcgcgacgtcaccgaggaacagcacgccctcggcgtcctggaggaaacccggcggcgctaccaggacatcttcgaaggggtcggcgtggccctctgcgtgctcgacctctccgccctgcgccaggctctggtggagcaaggcctggacagctgcgccgcactgcgcgcctggctcgccggcgaacccgggcggcagcaggcgctgctggagcggatccgcatcaccgagatcaacgatgtcagtcgccgcctgctacagatcgattccaccgaacaggcctggcagcgcttgctcgaccacggcccgctacaaccggacagcctgcgcctgcaggtgatcgaggcgctcatcgagcgccgaccggtactcgaacttgaagccacgctgcgctgcggcaagagcacgccgcggcacctgtggttgcaactgcgcctgccggaaaaccccggcgaatggcatgcggtgaccctcagcctgtccgacgtcaccagtcgcaaggaggtcgaactgtcgctgatcgagcgcgagaagttctggtcggacgcggtccaggcggtgcccgataccctctacatccacgacctgcacgcgcgccgggtgatcttcagcaaccatcacctgggccagcaactgggctacaaccaggaagaactggcgcggatgggcgagaacttctgggaaaccctgctgcaccccgacgaccaggaatactactggcgcatccgcaacctgcagcacgtggtcggcgacggcctgctgctcgacagccaactgcgctggcgccaccgcgacggccgctggcactggttcgacatccgcgagcaggccttcagccgcgaccgcagcggtcgcgtggcgcgcctgatcggcgtggccaaggacatcaccttcaccgtcgaggcgaacaacgcgctgcgcgagaacggccgacgctaccgcatgctggcggaaaacatcagcgacgtgatcttctccaccgacgccgagctcaacgccagctacgtcagcccctcggtacagcacgtgttcggctacagcccggaatgggcgctgctcaacggcctccaccagaccgccaccaacccgcgccagctcggccgcctgaacggcctgctgcgccgcgtgcggcacgccatcggcgaccgccagaagctcgccgagctgcgggaaaaccctggccagcatctgttcgccctcgactgcctgcgcgccgacggacgcaagattcccatcgaactgcggatcgtcctgatgtgggacgagcacgaccgcttcgaaggcctgctcggcatcgcccgcgacatcagccagcagcgccgcgccgaacgcgagctgcggatggcggcgacggtattcgaacactccacggcggcgatcatggtcaccgacccggccggctacatcgtccaggtcaacgattccttctcgcgcctgaccggctacagcccggccgacgtgctcgaccagcagccgcgcctgctcaccgccgaccgccaggaagccaaccagctcaagcacgtgctcgccagcctgcagcacagcggcagctgggaaggcgagatcctgcagaagcgcaagaccggcgaactctatccgtcctgggtcggcatcaccgcggtgcgtgacgaggaaggcgacctggtcagcttcgtctgcttcttcagcgacatcagcgagcgcaaggccagcgagcggcgcatccaccgcctggcctactacgacgccctcacccacctgcccaaccgcacgctgttccaggaccgtctgcataccgccctgcagcaggccgagcgcaacggccagtgggtggtgctgatgttcctcgacctcgaccgcttcaagccgatcaacgactccctcggccacgccgccggcgaccgcatgctgcaggaagtggcgacccgcctgagcgcctgcgtcagccaggacgataccgtggcgcgcatgggcggcgacgaattcaccctgctgctgccttcccagggcgaccgcgagatcgccctgaaacgggcgatccaggtcgccgagctgatcctcggccgtctggcccggccgttcaccctggaaggccgtgaattcttcgtcaccgccagcatcggcgtggccttgtcgccccaggacggcgccgaactgagcctgctgatgaagaacgccgacacggcgatgtaccacgccaaggagatgggcaagaacaacttccagttctaccaggccgagatgaacgctcgcgccctggagcgcctggaactggaaagcgacctgcgccgcgcccttgaactgggcgagttcgtcctccactaccagccgcagttcaccggcgacggccgccgcctgaccggcgccgaggccctgctgcgctggcagcatccgcgccgcggactggttccgccgagcgagttcattccggtgctggaggagatcggcctggtggcccaggtcggcgactggctgctggcggaagcctgcaagcagttacgcagctggcacaaggccaaggtgcgggtgccaaaggtctcggtgaacctctcggcacggcagttcgccgatggccagttgggcgagcggatcgccgcgatcctctacgagacaggcatcccgccggcatgcctggagctggaactgaccgaaagcatcctgatgagcgacgtcgccgaggccatgcagatcctctccgggctcaagcgcctcggcctggccatcgcggtggacgacttcggcaccggctactcctcgctgaactacctcaagcagttccccatcgacgtgctgaagatcgaccgcagcttcgtcgacggcctgccccacggcgaacaggacgcacagatcgcccgggcgatcattgccatggcccacagcctgaacctgatggtgatcgccgagggcgtggagagccaggcccagctggacttccttcgcgagcacggctgcgacgaggtgcaaggctacctgttcggccggccgatgcccgccgagcagttcggcatgctctacgccagcgacgtgctgttcatgttcaacgagggctga

SEQ ID NO: 320500 - DNA, 1254 bp, Pseudomonas aeruginosa
atgttcagccgtgatttgaccctcgcccgctacgatgccgaactctttgccgcgatggagcaggaagcccagcgccaggaagagcacatcgagctgatcgcctccgagaactacaccagcccggcggtgatggaagcccagggttcggtgctgaccaacaagtacgccgaaggttatccgcacaagcgctactacggcggctgcgagtacgtcgatatcgtcgagcaactggccatcgaccgcgccaagcaactgttcggcgccgattacgccaacgtccagccgcacgccggctcccaggccaacgccgcggtctacctggccctgctgtcggccggcgacaccatcctcggcatgagcctggcccatggcggccacctgacccacggcgccagcgtctcctcctccggcaagctgtacaacgccgtgcagtacggcatcgacgccaatggcctgatcgactacgacgaagtcgagcgcctggccgtggagcacaagccgaagatgatcgtcgccggcttctccgcctattcccaggtcctcgatttcgcccgcttccgcgccatcgccgacaaggtcggcgcctacctgttcgtcgacatggcccacgtcgccggcctggtcgccgctggcgtctacccgaacccggtgccgttcgccgacgtggtcaccaccaccacccacaagaccctgcgcggtccgcgcggtggcctgatcctggcgcgcgccaacgaggagatcgagaagaagctcaactccgcggtattccccggcgcccagggcggtccgctggagcacgtgatcgcggccaaggcggtgtgcttcaaggaagccctgcagccggagttcaagacctaccaacagcaggtcctgaagaacgcccagagcatggcccaggtcttcctcgaccgcggtttcgacgtggtttccggcggcacccagaaccacctgttcctgctctccctgatcaagcaggacatcaccggcaaagacgccgacgccgccctcggccgcgcgttcatcaccgtgaacaagaactcggtcccgaacgacccgcgctcgccgttcgtcacctccggcctgcgcatcggtaccccggccgtgaccacccgcggcttcaaggaagccgagtgccgcgagctggccggctggatctgcgacatcctcgagaacatgggcgacgagtccgtggtcgacggcgtacgcgagaaggtcaaggcgatctgcgccaagttcccggtctacggcaactaa

SEQ ID NO: 320501 - DNA, 375 bp, Pseudomonas aeruginosa
atggacaggaacgcattgatcggcgcctggcgggactgcatccgtggcgcggacaaatcctgggtgctgttcgcccagggcacttgcgtgatcctcacgcagccggagccggacctcgcggcccaggcgcgggcattgctggccgagtggggagcggtacaggtcggcacgccggcgggcgacttcggtgtgatcaccctggacaacggctgcggctgggtggtgaccgggcatcacccggacatccttaccttcgtccctcgcgaggaactggaggaggacgccggcgagctgctcgtcggcatgcacggccgctcccggcggggcgaggatgccgaggccttggcggtgatccatgtcgaggaccggcgataa

SEQ ID NO: 320502 - DNA, 1005 bp, Pseudomonas aeruginosa
atgtccgaagtagccaacgacaaccacgccccgatccccgtcaccgtgctcaccggcttcctcggcgccggcaagaccaccctgctcaagtacctgctgcaggccgagcacggcatgaagatcgcggtgatcgagaacgagtacagcgagacgccgatcgacggccagttgctcggcgtcgagccggtgcaggtgatgacgctgtccaatggctgcgtctgctgctcgatcaacaccgacctggaaaaggccctgttcctcctgctggagcgccgcgacaacggcgagatcgacttcgaccgcctggtgatcgagtgcaccggcctggccgatccggcgccggtggcgcagaccttcttcgccgacgaggaactctgccagcgctacgtgctggacggcatcatcaccctggtggacgccgccaacgccgagcgtcacctgcaggaaaccatcgcccaggcccaggtcggcttcgccgaccgcatcctggtgagcaagaccgacctggtcgacgccgccaccttcgaggccctgggccagcgcctgcaacggatcaaccggagggcgctggtgcatgtggtcgagcacggccgcatcgacctggcgcacctgctcgacgtacgtggcttcaacctcaacgccgacctcggtcctggcatcggcctgcgcccgctgcgagcggtggcagccaaggacagccgcgatcgcatcggcaccctggtactgcgcagcgacacgccgctcgatctcgaaaggctgagcgagttcatggacgacctgttgcagtggcatggcaattccctgctgcgctacaagggcgtgctgaacatcgccgacgagccgcgtcgcctggtgttccagggcgtgctgcgactctacggcttcgactgggatagcgagtggcgggacgacgaggcgcgcgagagcgtgatcgtgttcatcggcgacaacctgccggaggacagtatccgcgagggcttcgaacgcatcgtcgaaggccgctga

SEQ ID NO: 320503 - DNA, 204 bp, Pseudomonas aeruginosa
atgttcaacgacctcagccgcatgggcaaatacctgggccaggccgcccggatgctggtcggcatgcccgactacgacacctatgtcgagcacatgcgcaacaagcacccggacaagccggtgatgacctacgaggagttcttccgcgagcgccaggaggcgcgctacggtggcggcaagggtcggccgatccgctgctgctga

SEQ ID NO: 320504 - DNA, 2067 bp, Pseudomonas aeruginosa
atgaacaataacaatagcctgctacgtcacctcgcctggctggtggtggcgatcgtgggcgccgcggccctgggcgtcgtcgccctgcgtcgtggcgaagcgatcaacgccttgtggatcgtggtggcggcggtggccatctacctggtcgcctaccgttactacagcctgttcatcgccagcaaggtgatgcaactggaccccaaccgcgccactcccgcggtactcaacaacgatggcctggactacgtcccgaccaacaagcacatcctcttcggccaccacttcgccgccatcgccggcgccggtccgctggtcggtccggtccttgccgcgcagatgggctacctgcccggcaccctctggctgatcgccggcgtagtcctcgccggcgcggtgcaggacttcatggtcctgttcatctccagccgccgcaacggccgctcgctgggtgagctggtgcgcgaggaaatgggccaggtggccgggaccatcgcgctgttcggcgccttcctgatcatgatcatcatcctcgcggtgctcgcgctgatcgtggtgaaggctctggccgacagcccctggggcatgttcaccgtcctcgcgaccattcccatcgcgctgttcatgggcgtctacatgcgcttcatccgccccggccggatcggcgagatctcgatcatcggggtgttcctcctgctcggttcgatctggctcggcgggcaggtcgcggccagtccggaatgggcgccgcatttcaccttcagtggaatccagatcacctggatgctgatcggctacggcgccgtcgcctcggtactgccggtgtggctgctgctggcgctgcgcgactacctgtcgaccttcctcaagatcggcaccatcatcggcctggcgatcggcatcctgatcgtcatgccggaactgaagatgccggccctgacccagttcaccgacggcaccggcccggtctggaaaggcagcctgttcccgttcctgttcatcaccatcgcctgcggcgcggtgtccggcttccacgcgctgatctcctcggggaccacgccgaagctgctcaaccgcgagcccgacgcccgctacatcggctacggcggcatgctgatggagtccttcgtggcgatcatggcgatggtcgccgcctcggtgatcgagccgggcatctacttcgccatgaacagcccgccggcggtggtcggcgccgacgtcaacgcggtggccgcgaccgtcagcagctggggcttcgccatcacgccggagcaactcacccagaccgcccaggacatcggcgagaccaccatcctggcccgtgccggcggcgcgccgaccctggcggtggggatcgcgcacatcctccaccaggtgctgccgggcgagaacaccatggccttctggtaccacttcgcgatcctcttcgaggccttgttcatcctcaccgcggtggacgccggcacccgtgccgggcgcttcatgctgcaggacctgctgggcaacttcgtgccggcgctgaagaagaccgagtcgtggaccgccaacatcatcggcaccggcggctgcgtggcgctgtggggctggctgctgtaccagggcgtggtcgacccgctgggcgggatcaataccctgtggccgctgttcggcatttccaaccagatgctcgccggcatcgcgctgatgctcgccaccgtggtcctgatcaagatgaagcgccagcagtatgtctgggtcaccatcctgccggcggcctggttgctgatctgcaccaccaccgcgggcctgatcaagatcttcgacagcaacccggcggtcggcttcgtcgctcttggcgagaagtacgccaccgcgctggatgccggccaggtgctggcgccggccaaggatatcggccagatgcagcacgtggtgctgaacgcctacatcaacgccggtctgaccgtgctgttcctgctggtggtgttcagcgtactgttctacgccatcaaggtcggcatcgcggcctggggcaagagcgagcggaccgacaaggaaaccccgttcgagcccatccccgacgcctga

SEQ ID NO: 320505 - DNA, 507 bp, Pseudomonas aeruginosa
atggacaagcgacttttgagcaaggggttggttctggggctgctgagcctgggcagcatgacggcacacgccgacgcggcaggcggtaatggctgtggttggggcaacatggtgttcgagggccagcgcggcctgttcccgcacctgctggccaccaccaccaacggtacctcgggcaacgccaccttcggcatgacctccgggaccaacggttgcaacaccaatgcacgcctgggctacggcggccgctcgatcttcgccatgaacgggatgctcgacaacatcgccgaggacatggccaagggccagggcgaagcgctcgacgcctatgccgtgctgctcggcgtggaagccaaggaccgggcgcacttcgcccaggtcacccagcagcatttcggcgagatcttcgcgagcaaggatgcgacgggcgaacaggtcctgagcaacaccctggcggtgatgagtcgcgacggcaccctggcgcgctacgccaagcaaccggcctga

SEQ ID NO: 320506 - DNA, 378 bp, Pseudomonas aeruginosa
atgagtgaccagcacgacgaacgtcgacgtttccaccggatcgccttcgacgccgacagcgagatcctccagggcgaacggcgctgggaggtcttgctccacgacgtctccctgcacggcatcctggtcggccagccgcaggactggaacggcgacccgcaacggcccttcgaggcccgcctgtacctgggcctggatgtactgatccgcatggagatcagcctggcctgggctcgcgacggcctgctcggcttcgaatgccagcacatcgacctcgactccatcagccacctgcgccgcctggtggaactgaacctgggcgacgaggaactcctcgagcgcgagctggccctgctggtcagcgcccacgacgactga

SEQ ID NO: 320507 - DNA, 1362 bp, Pseudomonas aeruginosa
atggccaaggccaagcgcatgtacggctgcaccgagtgtggcgcgaccttcccgaaatgggccggccagtgcgcggactgcggggcctggaacaccctggtggagaccgtcgtcgaggccgcgccgagcggctccggccgcggcggctgggccggccagcaggccaacctgaagaccctggcggaggtcagcgtcgaggaaatgccgcgcttcacgaccggctccaccgaactggaccgggttctcggcggcggcctggtggacggttcggtggtgctgatcggcggcgatcccggcatcggcaagtcgaccattctcctgcagaccctttgcaacctggccagccgcgtcccggcgctgtacgtcaccggcgaggaatcccagcagcaggtggcgatgcgcgcgcggcgcctgtcgttgccggaagacaagctcaaggtgatgaccgagaccagcatcgaaaccatcatcgccaccgcgcgccaggagcagccgcgggtgatggtgatcgactcgatccagaccatcttcaccgagcagttgcaatcggcgccgggtggcgtcgcccaggtccgcgagagcgccgcgatgctggtgcgctatgccaagcagagcggcacggcgatcttcctggtcggccacgtgaccaaggaaggcgccctggccggcccgcgggtgctcgaacacatggtcgacaccgtactgtatttcgagggcgaatcagacggccgcctgcgcctgctgcgggcggtgaagaaccgcttcggcgcggtcaacgaactgggagtgttcggcatgaccgacaaaggcctgaaggaagtgagcaacccttcggcgatcttcctcacgcgggcccaggaagcggtgcccggcagcgtggtgatggccacctgggaaggctcgcggccgatgctggtggaggtccaggcgctggtcgacaccagtcacctggcgaatccgcggcgggtgaccctgggcctcgaccagaaccgcctggcgatgctgctggcggtgctgcaccggcacggcggtatcccgacctacgaccaggacgtgttcctcaacgtggtgggtggggtcaaggtgctggaaaccgcctccgacctggcgttgatggcggcggtgatgtccagcctgcgcaaccgcccgctgccgcacgacctgctggtgttcggcgaggtcgggctgtccggcgaggtgcgtccggtgccgagcggccaggagcgcctgaaggaagccggcaagcatggtttcaagcgtgccatcgtacccctcggcaacgcgccgaaggaggcgccggcgggattgcaggtgatcgccgtgacgcgcctcgagcaggccctggacgccctcttcgagtga

SEQ ID NO: 320508 - DNA, 435 bp, Pseudomonas aeruginosa
atgcgcacactgctgttcctgcacctgctgggtgccgcgacctgggtcggcgggcacctggtcctggccctcggcatcctccccggcgccctgcgccgccgcgatccccaggcgatccgcgccttcgagcaggtctacgagcggatcggcatccccgccctgctgctgcaggtggtcagcggcctgtggctggccagcctgtggctgccgttcgaccactggttcggcgccacgtcggtggcccgtgccctgcagctcaagctgctgctcctggcggcgaccgccgccctgggcgtgcatgcgcgcctgcgcctgatcccgaacctggacgccgagagcctgccgaagctgggctggcacatcgccgcgatcaccctggtgggcctgggtttcgtcgcggtcggacagagtttccgtttcggcggcgccttctga

SEQ ID NO: 320509 - DNA, 255 bp, Pseudomonas aeruginosa
atgccgctcgagcaacatccgctttcccgggagtttccggattttcatgccgaactgaagcaacttcatggcaacgacgcccacttcactcgcctggcggcggactatgagagcctcgacaagcgcatctatgaggtcgagggcggtcgcgaacccctcgacgacctggcgctgcaggggttgaagcagcaacgggtgcaactcaaggacgaaatcgccgagaggctgaggaaggccaacggaaaaggccattga

SEQ ID NO: 320510 - DNA, 543 bp, Pseudomonas aeruginosa
atgcgaggttggattctggcaggcttgctgctcgcggcgctggccgcgcaagctggcgaggtgcatggggtcgaggtcgaagcgcggttgcgcgactacttcttcgatgccgcccgacgcggtgaccaggccatgctgaaggagttcgtcgaggccggcttcgacctcgatgtgcaggatgccaagggctataccgcgctgatcctggccgcctaccacggccatggcggagcggtggaacaattgctggaggccggggccgacccctgcgtccaggatgcgcgcggcaacaccgccctgatgggcgccatcttcaagggcgaggtccgcatcgcccggcgcctgatcggcgcgcaatgcagccccgaccagcgcaacggcgcagggcagaccgcggccatgtacgcggcgctgttcgagcgcgaggagctgctccaggcgctgtcggcgcgcggtgccgaccttggcgcccgcgatgcgctgggcaacagcgtggaaagcctgcgacgcggcgaactgaacggcactgcggcggcgaggtga

SEQ ID NO: 320511 - DNA, 1542 bp, Pseudomonas aeruginosa
atgaacccttccctgaacgccttccgtcccggccgcctgctggtggcggcaagcctgaccgccagcctcctgtcgctgtccgtgcaggccgcgaccctgacccgtgacaacggtgcgccagtgggcgacaaccagaactcgcagaccgccgggcccaacggttcggtgctgctgcaggacgtgcaactgctgcagaagctgcaacgtttcgaccgcgagcgtattcccgaacgcgtggtgcatgcccgcggcaccggcgcccatggcgagttcgtcgccagtgccgatatcagcgacctgagcatggccaaggtcttccgcaagggcgagaagaccccggtattcgtgcgcttctccgcggtggtgcacggcaaccactccccggaaaccctgcgcgatccgcgcggtttcgccaccaagttctataccgcagacggcaattgggacctggtgggcaacaacttcccgaccttcttcatccgcgatgcgatcaagttcccggacatggtccatgccttcaagccggacccgcgcagcaacctcgacgacgactcgcgacgcttcgatttcttctcccacgtgccggaggcgacccgcaccctgaccctgctgtattccaacgagggcaccccggccagctaccgggaaatggacggcaacagcgtgcatgcctacaagctggtcaacgccaggggcgaagtgcgctacgtgaagttccactggaagagcctgcagggccagaagaacctcgatccgaaacaggtggcggaagtccaggggcgcgactacagccacatgaccaatgacctggtgagcgcgatccggaagggcgacttcccgaaatgggacctgtacatccaggtgctcaagcccgaggacctggcgaaattcgacttcgacccgctggacgcgaccaagatctggccgggcattcccgagcgcaagatcggccagatggtgctgaaccgcaacgtcgacaacttcttccaggaaaccgaacaggtcgccatggcgccgtcgaacctggtgccgggcatcgagccctccgaggatcgcctgctccagggacggctgttcgcctacgccgatacccagatgtaccgggtcggcgccaacggcctgggcctgccggtcaaccgcccgcgcagcgaggtcaataccgtcaaccaggacggcgcgctgaacgccggacacagtaccagcggggtgaactaccagccgagccggctcgatccgcgcgaggagcaggccagcgcccgctacgtgcggaccccgctgagcggcaccacccagcaggcgaagatccagcgcgagcagaacttcaagcagaccggcgagctgttccgctcctacggcaagaaggaccaggccgacctgatcgccagtctcggcggggcgttggcgatcaccgacgacgagagcaagtacatcatgctttcctacttctacaaggctgacagcgactacggcacgggcctggccaaggtggccggggccgatctgcagcgcgtccggcaactggcggcgaagctccaggattga

SEQ ID NO: 320512 - DNA, 414 bp, Pseudomonas aeruginosa
atgggtcttctgagtgaattcaaagcctttgccgtcaagggcaatgtcgtggatatggctgtcggtatcatcatcggcgcggccttcggcaagatcgtctcgtccttcgtgggcgatgtgatcatgccgccgatcggactgctgatcggcggagtcgacttctccgacctggcgataacgttgaaggccgccgaaggcgacgtgccggcggtggtgctggcctatggcaagttcattcagaccgtactcgacttcgtcatcgtggccttcgccatcttcatgggggtcaaggcgatcaaccgcctcaagcgcgaagaagccgtcgcgccgtccgaaccgccagtgccgagtgccgaggaaaccctgctgaccgagatccgcgatctgctgaaagcccagcagaacaagtcgtga

SEQ ID NO: 320513 - DNA, 777 bp, Pseudomonas aeruginosa
atgaccgccagcgaagagaaattcacccgccagacgctgctcgacgtgcagcctctgactcccaacctgttcaccctgcgtaccagccgcgacgcgggattccggttccgcgccgggcaattcgcccggctcggcgtgtacaagcccagcggcagtatcgtctggcgcgcctactcgatggtttcggcgcctcatgacgaattcctcgacttcttttccatcgtcgtcccggacggcgagttcaccagcgaactcagccgcctgcgcgagggcgaccagttgctggtcgatcgccaggccttcggcttcctcaccctcgaccgcttcgtggatggtcgtgacctttggctgctggccaccggtaccggtgtggcgccgttcgtctcgatcctgcaggacttcgaagtctgggagcgcttcgaaagcatcaagctggtctacagcgtgcgtgagagcaaggagctggcctaccgcgagctgatcgccggcctcgccgagcgcgaatacctggccgagcatgcccacaagctgcagttcattccggtggtgacccgcgagcaggtacccggttgcctgaacggacgtatcaccacgctgatcgagaacggcgatctggagcgtgccgccgacctggaactgaccccggagcattcgcgggtgatgctctgcggcaacccgcagatgatcgaggacacccgcgccgtgctgaaggctcgcggcatgaacctcagtctgacccggcgtcccgggcaggtggcggtggagaactactggtag

SEQ ID NO: 320514 - DNA, 999 bp, Pseudomonas aeruginosa
atgttcaagccgtttgtcggtgtggcgctcgccgcactgttcgccgtttccgccgtcgcccatgccgaggacgccggcccgatcgtgatcaagttctcccatgtggtctccgacgacacgcccaagggcaagggggcgctgttgttcaagaagcttgccgaggagcgtctgccgggcaaggtcaaggtcgaggtctaccccaactcgacgctgttcggcgacgccgacgagatcgaggccctgcgcgccaacaaggtgcagatgctggccacctcgctgtccaagttcgagccctataccaagcaactccaggtgttcgacctgccgttcctgttcgatgacctggaggccctgaagcgtttccagaagcgcgacaagagccgcgaactgctgcgctccatggccaagcacggtatctatggcctggcctactggaacaacggcatgaagcagctttccgccactcgcgagctgcaccggccggacgatgccaagggcctggtcttccgtatccagccgtcgtcggtgctggaagcgcagttcgccatgctcggcgccaccgccaagcagttgtcctacgccgagaccctcaaggccatgcaggccggcagcgtgcagggcaccgagaacacctggtcgaacctcgccggacagaagatcgacagcgtgcagccgtacatcaccgagaccaatcacggcgcgctcagctacatgctgatcaccagttcggcgttctggaccggcattccctaccagacccgcaccgaactggagagcatcgtcgacgaggtcaccctggtggtgaacaaggaagccgaagcgctcaaccagaaggagcgcgagcacctgctggcagccggcaagagccgcctggtcagcctcagcgcggaagagcacgaggcctggcgcaacgccatgaagccgctgtggaagaactacgaggcgcagatcggtagtgacgtgttgcgcgcggcccaggtggtcaaccgcaagcgctga

SEQ ID NO: 320515 - DNA, 1125 bp, Pseudomonas aeruginosa
atgcctctattcgccacccccttcgcccagctcgacctggtccgccagcccgagcaggacggcgagcccctccaggcgttcgacgccgccgacgaatacctgctcaaccagttgcacgaacggggcgtgacggcgcaatgccgggtgctggtcctcaacgacgccttcggcgccctcgccgcgagcctggcgccgcacgttcaggtcaccagcagcggcgattcgcacctgggcttcctcgccctgcgcaagaacctcgcgcgcaacggcctcgacctgggctcggtgcgcttcgtcccggccagcgaaaccgccgtggggcccttcgatcacgtgctggtcaaggtgccgaagaccctcgcgttgctggaggagcaactgatccgcctgcacggccaactggcaccgggcgcgcaggtcgtcgccgcggggatggtcaagcacttgccgcgcgccgccggcgacctgctggaacgctacatcggcccgatgcacgcttcgctggcggtgaagaaggcccgcctgctgatcgccgaggcagcggagcgcccgcagccgcgctcgccctatccgacccgctatcgcctggagcagccgccgctgacgctgctcaaccacgccaacgtattctgccgggagggtctcgacatcggcacccgcgccttcctcccgcacctgccacgcagcctcggcgcgctacgcgccgccgacctgggctgcggcaacggggtgctcggcatcgcctacgcgctgctcaacccgcaggccgagctggccctggtggatgagtcgtacatggccgtgcagtcggcgcgggaaaactggcgagcggcgctgggcgagcggccggcgacgttccgcgccgacgatggcctggccggccaggcggcgggctcgctggacctggtcctgtgcaacccgccgttccaccagcagcaggtggtcggcgacttcctcgcctggcgcatgtttctccaggctcgcgatgccctggcggcgggcggcgaactgtggatcgtcggcaaccgccacctgggctaccacgccaagctcaagcggctgttccgcggggtcgagcaggtcgcggcgaatccgaagttcgtgatcctgaaagcgggaaaatag

SEQ ID NO: 320516 - DNA, 576 bp, Pseudomonas aeruginosa
atggtcgccgccgacgaggtgctgtgcctggtcctggcggccgggcaggggcgccgcttcggcagcgacaagcgcctggcgcgcctggctgatggcacgaccctgctggcggccagcgtggcgcgggcgcgcgaggcgttcgccgaggtgcgggtggtggtgcgtgccggagacaccccggcgagcctgggcctgccggcgcagcagcggcttgtccacagcctcgatgcatcgttgggcatgggccacagcctggccgccggcgtcgcggcggcgaggaacagcacggcccgggccatcgccgtcctgctcggcgacatgccctggatcgccgccgataccctcgagcgtctggccgcgatggccactcccgaagccatcgtgtttcccctgtacgacggtcagcgcggccatccggtgctgttcggccgcgctttctgggacgcgcttgcgcaactggacggcgaccagggcgcgcgccgtgtgctgcaggcccatcgtccggcctggtgcgaggtgccgtgcgacgatccgggcgtactccgcgacgtggacaccccggcggcgctcggctga

SEQ ID NO: 320517 - DNA, 972 bp, Pseudomonas aeruginosa
gtgcaacacctcgatctacaggtggtccgcaaggcgctgaagtggtccgtgggcggcgaacgggtgtggttctgtaccgtgctcacgacctatggctcggcgccccgcgcgccgggatcgctgctggcggtgaacgccagcggtgaatggatcggctcgctgtccggcggctgcgtcgaggatgatttcctcgaacgggtcgccgccggcggtttccccgatcccgcggtgatcgtgcgctacggcgagggcgacgacccgaactcgaacatccgcctgccctgcggcggcatcctcgacgtactggtggaaaacctggcgccggactgcgatgtccaggcccatctgcgcgagctggagtcggcgttgcttggtcagcgccgcctgctgcgcgaggtcgagctgggcagcggcgcgcgcagcctgcgcgacgattccagccacggccctcgggctgaacgcgacggcgagtgcgtgcgcttgcgcgtcggcgctgcccagcgcctgctgctggccggctattccagcgtcgcccatgcctgcgccgagttcggcaagggcctgggcttcgaggtgatcctctgcgacccgcgcgaagaagccttgcgcggcgtggtgctggagggcatcgagatccgtcgcgagctgccctcgctgttcatcgccgacggcggttgccacgccgatacggcggtggtggcgttgacccacgatccgaagatcgacgacctggcgatgctcgaggcggtgcgtaccgaagccttctatatcggcgtgatgggatcgcgggcgacctcggagaaacgcttcgagcgcctgcggcgcatcggcggcctgggcgatgccgaactggcgcggatccacgcgccgatcggcctcaacctcggcagcaagacgccggcggaaatcgccctggcggtgctggcggacattcttcgcatccgcaacggcattccccgcgagcggctctga

SEQ ID NO: 320518 - DNA, 1248 bp, Pseudomonas aeruginosa
atgaagcggaccctttccggcctcgccctggcgctggccgcgctgtcgccgttcctggcctccgccgccagcgccgacgcggcgctggtcaagcgcggcgaatacctcgcccgcgccgccgactgcatggcctgccataccgccgagggcggcgcgccgttcgccggcgggctgccgatccagtcgccgttcggcaccatctacggcaccaacatcaccccggacaaggaacacggcatcggcgcctacagcgccgacgagttcttcgccgctcttaccgagggcaagcgcaaggacggcgcctacctctatccggcgatgccctacacctcctatcacctgatcgagcgcgaggatgccgacgccatctacgcctacctgatggcccaggagccgatcgcccggccggcgccgcagaccagcctgagcttcccgttcaacgtgcgcatgggcctggccggctggaacctgctctacggcaagagcgtgcgcttgcagccggaggaagggcgcagcgaggcctggaagcgcgggcagtacatggtcgaggtgctcggccactgcggcgagtgccataccccgcgcaacctggccggcgccctggagcaggacaagcgcctgagcggcggcctgctcaacggctacctggcgcccagcctgctgcccggcgaccttgccgcgcgcggttggacccagccggacctggcgagcttcctcaagcacggcatgagcgcccagggcagcatgttcaacgagatgttcccggtggtgcaccacagcacccagcacctcgacgacagcgacctggcagccatggccacctacctgctcggcgaccagccgccgccggccaaggtggtccaggcgctgcccgaggcgcagctgaacgacagcggcaagcgcggtcgccagcagtacctcaacgtctgcgccggctgccacggcggcgaaggcgagggcaagccgcatatcgcggtggcgatgaacggcaacactaccctgcgcctgcaagacccgcgtaatctgttgcgagtgatcgaagacggcatcgtcgaacagcagttcaccggcttcgaacgcatgcaaccgatgcccggtttcgccgggaaactcgacgacgagcaactcacggacctgctcaactacctgcgtcagacctggggcggattgcccggtgacctcggtccccaacaggtcgcgcaattgaagatggagagcgcttcggcgcataccgtcaaggtgaagtga

SEQ ID NO: 320519 - DNA, 540 bp, Pseudomonas aeruginosa
atggctaaccgcaagctccagatgaccctcaacggtcaagccgtcggtccggtggaggtcgccgaagacctgccgatgatcgactacctgcacgaataccagaacctcaccggctcgcgcctgggctgtggccagggcatctgccatgcctgcgtggtgatcgtcgacaatccggacggcaccagcgaggaagtgcgcacctgcatcaccggcgcgcactacttcgacggcaagaaggttcgcaccatcgagggccatgcccagcgcgacgagaatggcgacatccgcgagctgaacccgatccagcagaagttcgtcgaccagttcgccttccagtgcagctattgcgcgccgggcttcgtcaacgccgccaccgtgctggtggaaaaagcccagcgccagccgatcaagcgcagcgagctggagcaggcgatcgaggacagcctcggccatcacatctgccgttgcaccggctacgtgcgctactacagcgccacccgcgacgtgctcgacgaactcggcctggtcaaggaggcttga

SEQ ID NO: 320520 - DNA, 2832 bp, Pseudomonas aeruginosa
atgtccaaccgtgatatatcccggcgcgcctttctccagggcgggttgatcgccggcgtgggtgtcaccctggcgccgctcggcagccaggcgttcgctgccttgttcgagaaccaggtgaccgtttccgcccagcgctggatggcgggcaacggtcaggtccgtttccgtaacgacgccttgtccaaggtctgcggcaacaaggtgttcgcccgcgatatccgcgccagggacatgcccggctggccgcagcagcaaggccacgccatgttgctgaagaccgttcgcgccgaccgcatctacgaaggccacgacctttcctggctgggcgccgagttgcagccggaccgtatcgtcaccgccgccgacctggagaaggacggcatcgtcttccccgaggcgcattcgcccgatccgctcctgccgccgggcaaggtgccgatgttcatcggccatccggtggcgatcctgatctggaacgacttcgagcgcttccgccgggccaagctcaagctcaagttcaacgacaaggcgatccgctatggcgcccaggccccgctgtaccagggcgatccctacggcagctatcgcttcgtccgggtcggcggcaagacaccctacgaggacgacgagttctccagcctgaaggactcgatgctgttccccaccatcctcaaccgcaaaccggtatggaccagcgagccgaagctgcacggcgacctcaccgagcaggggctgttccatgccaagcgcatggccgagcaactggaaaacccgccgcaggactggctggtcttcgacgagcgctacaagactccatcgatcgagccggcggcattggagccggacaacggcaacggctggtacgacgcggcgagcaagaccttgcacttcgtggtcgccacccagtgcccgttcgaagtcgcctacgaaagcgtgcacatgatcaagccgtcgcgcttcgccctggagaagctcaacatccatccgggctataccgtcggctacggctccaaggacaacaacatcttcgtcttctatgccgcgctcgccgcgctgtatggcgagggtgtgccggtgcgcctggccaacgaccgctacgagcagttccagagcggcatcaagcgccacccgttcgacatccgctaccaactggcggtagacaggaacgacctcggcttccgcatcttccgcgccgacatgagcgccgacggcggcgggcgcgccaactacagcgcctcggtggcggcggtgggcgccaccgccgcgcagtcgatctactacatgccgcagaacgacttggcggtcaccgcctatcattcgcgcggcgtggaggccggctcgatgcgcggctacggtaccctgcagaccatggccgcgaccgagatgatggtcgacgagatcgctggccggctgggcgtcgacgccatcgacctgcgtcgtcgcaacgccctgcgctcgggcatgaagaacacccagggcgcggtcccggccggtgccctgcgcctgcacgagatcctcgacaaggccgctgcccacgaggtctggaaggaccgcgacgcacgcaagaagcgcttcgacgcggaggacccggacaactggtatggggtcggcttcgccatttgccagaaggacttcggcaccggtgccgaggcgccgatggcgagcatcgagttcagcgccgacgggcgcatcagcctgcgccacatcggcaccgagatcggtaccgggatgtccacctcgcaggccttcgtggtcggcgacttcctcggccgtccggcggacgaggtgaagaccgccgagaccgaatggcccgagctgcggctcaccaccaagggcaatccctacctgatgagccaggccgagcaggacgccgcgctacgcgatccgcgctgggtcggcaagctggcctcgccgtcgtcggcgaccaactcggcgttctatttcagccacgccacccgcgaagccgcgcgcgtgctgttcaaccacggcctgtggccggcggccctggagctgtggcgcagcggtccgttcggcggccaggccaatccctatgtggtgcgccgcgaaaacgcggtatgggtcgacggccagttgaccggcaacggcctggcgccgattcccttcgccgagctggcgaagaaggcccacgagatgggcctggtcaccggcgtcagcgtccacggcttcaaccgctggagctgggccgaggcggacttcgtcatcgatggcgtgcgcgagcgcctgccgctcgacgccatggcggtgaagtacggcgacggcgcgccgggagtgaagaaggcgatgatgaacagcgccggcttccacctgctcgaccggcagaatccggcttatccggcgacccagctgaacaacgcgatggtcacctactacagtccggtggcgaccctggtcgagctgaaggtgaacaagggcagcggcgaggtgcaggtgctcgaccaccattcctggatcgagtgcggccgggtgctggtgccggagctggtcaagggccagctggagggcggcatcgccatgggtatcggccatgcgctgctggaggaaatgccgctctacgagggcggccctgcggaaggggactggaacttcaaccgctaccggttgccgcgggcgaaggacgtggcggtttggaaccagacggcggagatcctcccgccgctgtcgccgaccgatccggccaaaggcatcgccgaggtggtgatgatcccggtggtcggcgccatcgccaacgccgtggcgcacgccaccggcaagcgcgtccgcgacctgcccatcactcccgcccgcatcaaggaggccctccatggctaa

SEQ ID NO: 320521 - DNA, 1212 bp, Pseudomonas aeruginosa
atgtccagccaacccagctccctgctccgccatcgtcccttcctcgccttctggctggcccgcgtctgcaccgccagcggcttccagatgctcaccgtggccatcggctggcacatctacgaactgaccggcaatgtcctcgacctgggcctggtaggcctggtcgaattcctcccgcgggtactgttcatgctccacaccgggcatgttgccgaccgctacgaccgacgcaggatcgccgccctctgccaggccggccaggccctggtggcggtggcactggtgctcggcgcggcttcgggagagatcacccgcaacatgatcttcgtcctcgccttcgccctcggtaccgcccgcgccttcgaaatgccgaccacccaggcgctgctaccgaacctggtaccggccgggctgttcccgcgcgcggtggccgcttcggcttcggcgatgcaggcggcgaccattgccgccccggccctcggcggcctgctctatgcgttcggtgcctcctgggtctacgtgccgaccgcgactctctacgtcctcgcgtgcgtcctgacgctcagcctgccggtacgcaaccagccgctcacccagggcaaggccaccctcgactcgctgctcgccggcatccgtttcatccgcagccgaccggacatcttcggggcaatctccctcgacctgttcgccgtgctcctcggcggcgccaccgccctgctcccggtgttcgccaaggacatcctgctcaccgggccctggggcctcggcctgctgcgctcggctccagcggtgggcgccctggcgatgtcgttctggctggcgcacttcagcatcgaacgcaacgtcgggcggatcatgttcctctccgtgggcatcttcggcctggcaaccatcgccttcggcctgtcgaaatcgttctggctgtccctcggcgtgctggtggtactcggcgccgcggacatggtcagcatggtcatccgcggcgccttcgtgcagctcgaaacccccgacgagatgcgcggccgggtcagcgcggtgaacggcctgttcatcggcgcctcgaaccagctcggcgagttcgagtccgggctcaccgcacattggttcggcacggtaccggcagtggtcctcggcgggatcggcaccctggtggtcaccggagcatggatgaagctgttccctagcctggcgcaacgcgaccgcctgcactga

SEQ ID NO: 320522 - DNA, 390 bp, Pseudomonas aeruginosa
atgaaacgcccgctgatcctcgccatcgcccttgctaccctgaccgccaatgccgccttcgctgcaccgcgggtcgaatccatcgccctgcgcggtgcccaacaactgatcgcctccgacggttccgaccgtaccctcgaacgcctgcgcaagacccaggcgccgcgcgtccaggaagaacgccgggtcgccgaaagcggcagcgagcagaccatcgatcgcttgcaccgcgacatgaccagccgcgaggcgcgcctggccgagaacggcagcgaacagaccgtcgaccgtctgcacaaggacatggggcgcgtcgatctgcgcctggccgacaacggtagcgagcgcaccgtcgaccgcctgcatcgggagatgcggcgccccgcctga

SEQ ID NO: 320523 - DNA, 1707 bp, Pseudomonas aeruginosa
atgaaaccttcgcaatggacgcttcgctgggtgacgctctgtggctgcgggatgctggctgcttccgccgccgccgtggagttgccagggactgtacagccatcccagctcgatgaacgcttcaagccccgcagcgagccgcaagccaagcccgaggcgccgctggtggtgcccaagcaggtcgcgccgcaaggcagcgaacagatccgcttcgaactgcgcgagatacgcatcgaaggcaacacccgctatgacaaggcggtgctcgagtcctattaccagcatatgctcggcaagcaggtgtccctggccgaactggtcgacctggccaaccgcctcaccgccaagtaccgccaggacgggtacctgttgacccaggtagtggtgccggagcagagcatcgagggcggcaaggtacgcctgcaggtgatcgagggttacctcgaacacgtgcagatcaagggaaccgtcgatgggccgcgggtgcgggtggaggaactgctcgcaccgctgaccgaaaaacgtccgctggatgccgataccctggagcgcggcctgctgctggtcggcgacctgccgggggtcaacgtgcagagcgtgctcagcccgggtcaggcgctgggctcgtcgaacctcgacgtggccttgcagcagcagcgatacgaaggcttcgtcagcctcgacaaccgcggttcgcactacaccgacccgaccaccctggccttcggcgccaccgagttctcccgcctgggcttctacgagcagatcgacgtgctcggtgcgatctcgccgttcagcgatgccacccgctacatccagttgcgcggcacgttgccgctgggtggcatgttcgccggcgataccctgcagatcatgggttcctattcgaaggtcaacccggacattccggactcggtattccccttcgacagcgtcagcaagagcaccgaaggcagcatttcctacaaccatcccttcatccgctcgcgctcgcagaacctgagcggcggcctggcgttgcagtggaaggataccgagacccgcctgcgcgacttcgccagcgacgcctcgaaccccggtcgtgaccatgtgcgggtgttccagcaacgcctgacctatgactgggtcgaccgctggatgggcatcaacctggcggaggtgcgcaacaacatcggcctggacatgtggggcgcgaccaagaaggacgatgaacgtcgttcccgcgaagtggccgacggacgtttcgtctatctcaacggcaacatcgggcgtctgcaagggctcggtggaccctggtcggtgtatggcgaattgcaatggcagtacagcttcgacccgttgctgccgagcgagcgcttcggcgtcggcggcagcgggatcggtcgcggcttcgccccgggcaacatcaccggtgaccgtggcttcgccctgaagctcgaaccgcgctatggccaggcggtgggctatagctggctgcgcagctaccaggcctacgctttctacgactggggcaagacctacaacctcgacgtggacgatgacgagcagcagaagctcggctcgatcggtgccggggtgcgcttcaacctcaccgaccagttgtcgttcaacccggagattgcccgccaggtcatcggcgagccagccgaccagcgcgatgggaagcgcgagacgcgggtcctgttcaacgtggtggcgcgcttctga

SEQ ID NO: 320524 - DNA, 1164 bp, Pseudomonas aeruginosa
gtgtatggcatcaaccagggcgacctggcattgaacagcggcaactacgatctgagctaccagggcaacaacctgaccattaccaaggcactgttgaatgtgatcgccgacggcaagaccaaggtctacggcgatgccgatccgagcctgacctaccaggtcagtggcctgaagaacggcgataccgctggcgcggtgctcaacagtggcagcctgagccgcgtggctggcgagaatgtcggcgtgtacggcatcaaccagggtggactgggcctggtcagcggtaactatgacctggcttaccagggcaacaacctgaccatcaccaaggcgctgctcaatgtgatcgccgacggcaagaccaaggtctatggcgacgctgacccgagcctgacctaccaggtcagcggcctgaggaacggtgacagcgccggctcgatcctgaccggcgggctgaaccgcgacgcaggcgagaacgtgggtgtgtatggcatcaaccagggcggcctggtgctgaccagtggcaactatgacctggcctaccagggtaatgacctgaccatcaccaaggcgctgctcaacgtattcgccgatgccaagagcaagcaggtcggcaccgccgacccggcgctgacctatcaggtttccggcctgaagaatggcgatagcgccggtcaggtgctcgccggcgggctcggtcgggtgggcggcgaagccgtaggccagtacgacatcctccagggtgggcttgccctcaccagcggcaactaccagctcaactaccagggcaacctgctgagcatcctgccgctgccggtcacgccgggcgacctggggcaactggcagcgctctccgacttgcgcgaactgcagaaggggcgcgatccggatacccccggggatgcggtctaccgcaccaccacgctggaaaacccgttcctcgaaaacccgttcctgcgcgcctacgctctgggcatggacgtcagcgatcctaacctgctgccggctaccgccgcgggtccggcggaggacgccagcgccaagcgggtggggcagttcaccgatcgtccgctcagggcagaggccgagagtggggcgggttgctcgaaccagagctacctggccgactactggagctgcttcaacaagcctctgaatttctaa

SEQ ID NO: 320525 - DNA, 489 bp, Pseudomonas aeruginosa
atgagcctgggctacgacgccctgcgcgatttcctctaccgcgaggcgcgctatctcgacgacaaggattgggacgcctggctggcgttgtacgccgcggacgccagtttctggatgccgtcctgggacgaccgcgaccagctcaccgaggacccgcagcgggaaatctcgctgatctggtacggcaaccgcggcggcctggaggaccgggtattccgcatccgcaccgagcgctccagcgcgaccctgccggacacccgcacctcgcacaacctgagcaacatcgaactgctcggcgaggacgacggcatctgccgcgtgcgctgcaactggcacaccctgagctatcgctacaagaccgtggacagctacttcggcaccaccttctacgacctcgacgtacgcggcgagagtccgctgatcaaggccaagaaagtgatcctgaagaacgactacgttcgccagctgatcgacgtctaccacgtctga

SEQ ID NO: 320526 - DNA, 1368 bp, Pseudomonas aeruginosa
atgaccctgggtagcgattacttgcgttctctgctcgaggaagaccccgagcgcggcgtctaccgctgcaagcgggagatgttcaccgatccacgcctgttcgaactggagatgaagcacatcttcgagggcaattgggtctatctcgcccacgaaagccaggttgccggagtcaacgactacctgaccacccagatcggccgccagtcgatcgtcatcgcgcgcaaccgcgacggccagctcaacgccttcatcaacgcctgcagccaccgtggcgcgatgctctgccggcacaagagcggcaatcgcagcagctatacctgtccgttccacggctggaccttcaacaactccggcaagctgctcaaggtcaaggacccggccgaggccggctacccgcagggcttcaactgcgagggctcgcacgacctgacccgggtggcgcgcttcgagtcctaccgtggcttcctgttcggcagcctcaaccccgatgtcaggccgctggccgagcacctgggcgagtcggcgaagatcatcgacatgatcgtcgaccagtcgccggaaggcctcgaggtgctgcgcggctcttccagctatgtctacgaaggcaactggaagctcaccgccgagaacggcgccgacggctaccacgtcagctcggtgcactggaactacgcggcgacccagagccagcgccagcagcgcgacgccgcggacccgctgcggaccatgagcgccgccggctgggcccggcagggcggcggcttctactcgttcgagcatggccacatgctgctctggagtcgctgggccaaccccgaggaccggccggccttcgagcgccgcgccgagcttgcccgcgacttcggtgaggcccgcgccgactggatgatcgagaactcgcgcaacctctgcctgtaccccaacgtgtacctgatggaccagttcagctcgcagatccgcatcgcccggccgctgtcggtggaccgcacggaaatcaccatctactgcatcgcgccgaaaggcgagagcgccgaggcgcgcgcccggcgcatccgccagtacgaggacttcttcaacgtcagcggcatggccaccccggacgacctggaggagttccgttcctgccagcagggctaccagggcagcgtggtcggctggaacgacctgtcgcgcggcgccgaacactggatagagggcgccgacgcggcggccgcggccatcgacctgcggccgcgcctgagcggcgtgcgcaccgaggacgaagggctgttcgtattgcagcatcgctactggcaggaggcgctgctcgccgccctggagcgcgaacggacgcagcgcgtggcgctgcgggaggtggcgtcatga

SEQ ID NO: 320527 - DNA, 957 bp, Pseudomonas aeruginosa
atgaatgcctccttgctcagcgagcgcagccgggtgttcgaacgtgccgacccctatgcggtgtccggctatgtcaaccggcacgtcggtacgcactgcatacgcctgccggccgccggcaggccgcaagccagcctcgaccaccgcaccttcgccagcctcgacctgtgccggatcagctacggtgcggcggtacgggtcacctcaccggcgctggagagcatcttccacctgcagatcctcctgcgcggccactgcctgtggcgcggcggcgggcaggaacacgccctggcgccgggcgagctgttgctgatcaacccggacgatccggtcgacctgacctattcggcggactgcgagaaattcatcgtcaagctgccctgcgcgctgctcgaagcgatctgcgccgagcagcgctggagccatccggcgcgcggcgtgcgcttcctcgaacatcgctatcgcctggaccagctggaaggcttcgtcggcctgctcgccctggtctgccgcgaggccgagtccggcgagcggctggcgcgggtcgacagccacttcgagcagatcctcggcagcaagctgctgaccctgctgaagaccaacgtcagccgcgaggaccccggcgatgcgcaggtcgtcttcgcccgcctcgatgcctacatccgccgccatctgcagagcgagatcgaggtcgcggcgctggccgagcaggcgcacatgagcacccgttcgctgtacgcgctgttcgagcgccagcttggcgagagccctcggcaatacattcgccggctgcgcctggagcgcatccgcgcctgcctggaagaccccggctgccgggtacgcaacctcaccgaactggccctggacttcggtttcgcccacctcggccgcttcgccgagcaatatcgccggcagttcggcgagctgccttcggaaaccctgcgccggcgcgcctag

SEQ ID NO: 320528 - DNA, 3156 bp, Pseudomonas aeruginosa
atgttcgaacgcatcatccaattcgccatcgagcaacgctggctggtcctgctggcggtgctggggatggccggggtcggcatcggcagctaccagaagctgtccatcgacgcggtcccggacatcaccaacgtccaggtgcagatcaataccgccgcccccggctactcgccgctggaagtggagcagcggatcacctacccggtggagaccgtcatggccggcctgccgggtttgcaggaaacccgttcgctgtcgcggccggggatttcccaggtgacggtgatcttcgaggagggcaccgatatctacttcgcccgccagcaggtcaacgaacgcctgagcacggcgcgcgagcaactgccggaagacatctcgccgaccctcgggccgatctccaccggtctcggcgagatctacctgtggacggttgaggccgaggagggcgcgaccaaggaggacggcagcgcctacacgcccaccgacctgcgcaccatccaggactggatcatccgtccgcagttgcgcaacgtgaagggcgtggccgagatcaacaccatcggcggctacgccaagcaattcctcatcgccccggatccgaagaagctcgcggcctacaagctgaccctcggcgacctgcagaacgccgtgctgcgcaacaacgagaacgtcggcgccggctacatcgagcggcgcggcgagcagttgctgatccgcgcgccgggccaggtcaaggacatggacgatatccgcgggataatcgtttccaacgtcgacggcgtgccgatccgtatccgcgacgtcgccgaggtcggcctgggcaaggagctgcgcaccggcgcggccaccgagaacggccgcgaagtggtgctcggcacggtgttcatgctgatcggcgagaacagccgggaagtggcccaggcggtcggccagcgcctggaggagatcaaccggaccctgcccaagggggtcaaggcgatcaccgtctacgaccgcaccaccctggtggacaaggccgtggccacggtgaagaagaacctggtggaaggcgcggcgctggtgatcgcggtgctcttcctgttcctcggcaacatccgcgcggcgttgatcaccgccaccatcatcccgctatcgatgctgttcaccttcaccgggatggtcggcaacagggtcagcgccaacctgatgagcctcggcgcgctggacttcggcatcatcgtcgacggcgccgtggtgatcgtcgagaacgccatccgccgcctggcccacgcccaggcccaccacggccgccagctgacccgcgcggaacgtttccacgaggtcttcgccgcgtccagggaggcgcgccgggcgctggtcttcggccagatcatcatcatggtggtgtacctgccgatcttcgccctcaccggggtcgaggggaagatgttccacccgatggcgttcaccgtggtcaccgcgctgctcggcgcgatgatcctctcggtgaccttcgtcccggcggcgatcgcgctgttcatcaccggcaaggtcaaggaggaggagaacttcgtcatgcgccgcgcgcgtctggcctacgaaccggcgctgcgctgggtgctcgggcaccgcgcgctggtggtcggcggcgccctcggcgcgatcctgctcaccgggctggtggcctcgcggatgggcagcgagttcattcccagcctcagcgagggcgacttcgccatgcagggcctgcgggtgccgggcaccagcctgacccagtcggtcgagatgcagcagaccctggagaggaagctgatgggcaagttcccggagatcgagcgggtcttcgcccgcaccgggaccgccgagatcgcctccgacctgatgccgccgaacgcctccgacagctacgtgatgctcaagccgcagagccagtggccggacccgaagaagtcgcgggaggcgctgctggaagaattgcaggccgcggcccttgaggtgccgggcagcgtctacgagttctcccagccgatccagttgcgcttcaacgaactgatctccggggtgcgcagcgacgtcgcggtgaaggtcttcggcgacgacatgcaggtgctcaacgacaccgcggagaagatctccaaggtgctgcaaggcatcgacggcgcctccgaggtgaaggtcgagcagaccaccggcctgccggtgctgacggtggacatcgaccgcgacaaggcggcacgcttcggcctcaatgtcggcgacatccaggacaccgtggccaccgccctcggcggacgcaacgccggtaccctgttcgagggcgaccgccgcttcgacatcgtcatccgcctgccggaaaccctgcgcgccgacctgccggcactgtccaacctgctgatcccgctgccgccgaacaacctggcgcggatcgacttcatcccgctgtcggacgtggcgcgcctcgacctctcgccgggaccgaaccagatcagccgggagaacggcaagcggcgcatcgtggtcagcgccaacgtgcgcggccgcgacatcggctcgttcgtgctggaagcgcaacagaagctgcaggacggggtgaagatcccggccggctactggaccacctggggcggccagttcgaacagttgcagtccgccgccaagcgcttgcaggtagtggtgccggtggcgctgctgctggtgttcaccttgctcttcgccatgttcaacaacgtcaaggacggcctgctggtgttcaccggcatccccttcgccctcaccggcggggtgctggccctgtggctgcgcgggataccgctgtcgatctcggcggcggtgggtttcatcgccctgtccggggtggcggtgctcaacggcctggtgatgatctccttcatccgcaacctgttgcaggaaggacgcagcctcgaccaggcggtgtgggagggcgccatcacccgcctgcgtccggtgctgatgaccgccctggtggcgtccctcggtttcgtgccgatggccctggccaccggcaccggcgccgaggtgcagcggccgctggcgacggtggtgatcggcggcatcctgtcctcgaccatgctgaccctgctggtgctgccggtgctctatcgctggacccacgggcgcgacgccggaccgcgcgaggagacgccggcggccggctga

SEQ ID NO: 320529 - DNA, 1455 bp, Pseudomonas aeruginosa
atgggcaagaagacgattatcgcggtgaccgcactggcactgctcggcctgggcggcggcgcctacctggagctgggcggcaaggcgccggccggcgccggcgaagcggccgccgagggcgagggcagcggaccgcgcggcggcatgttgttgcgccagggcgacctgaccctggaactgctggtgccggaggacggcagcccgctcaaggcctgggtcgagcgcggcggcaaggcgctggcgccgcaggaggtggtcctcggcgccgacgtcgagcgtgccaccggcgaggtcgaggacctgctgttcaaggccagcggcgatggcctggtggccaatgccgggatcgccgagccgcatgccttcaccgcgcgcctcaagctgatggccggcaagcagggctacgacttcgccttcacccgcgaggagggcaagctggagctggatgccgagcagatcgaggccgccggcatcaccctcgatacggcgcggacgatcagcctggcccaggtggtctcgctgcccggcgagatccgcttcaacgaggaccgcaccgcgcatatcgtcccgcgcctgccggggatcgtcgacagcgtgccggccaatcttggccaggcggtgaagcagggcgagctgctggcggtgatcagcagcccgcagttgtccgaccagcgcagcgaattcgccgccgcccagcgccgcctgagcctggcgcagagcacctacaagcgcgagcagcagctgtggaaggagggcatttccgccgagcaggaattcctgctcgcccgccagggtttgcaggaagccgagatcgcgctgaacaacgcgcgggcgaagatcgccgcgctcggcggcaatcccagcctgcagggcggcaaccgctacgagctgcgcgcgccgttcgccggggtgctggtggaaaagcacctgacccagggcgagccggtggacggcaccgccaacgtcttcaccctgtccgacctgtcctcggtctgggccaccttcaacgtgcccgcgcaactgctcggccaggtccgcgtcggcagcaaggtcaaggtgctcgcccaggcgctggatagcgaggtggagggcaccgtgtcctacatcggcgacctgctcggcgagcagacccgcgcggccaccgcccgggtcaccctgagcaaccccgagagcacctggcgcccgggcctgttcgtttccgtgcaggtggccgaggcgacccgcaaggaagtcctgacggtcgccgacggcgcggtgcagaacgtcgacggcgaggacgtggtgttcgtccgcgtggccgatggcttcgtggtccagccggtcaagctgggcatcagcgacggccagcgcgtcgaggtcctcgagggcctgcgcgccggcagccaggtcgccgccagcggcagcttcatcctcaaatccgaactgggcaagggctcggcggaacacggtcactga

SEQ ID NO: 320530 - DNA, 1287 bp, Pseudomonas aeruginosa
atgccgatacttcggccactggccagcgcggggaaacgcgcctgctggctactgatgggactctgcctgggcctgccggccctggcgaacgaggcgccggtgagtttcaacggcacttcgatcagcctcgagcaggcgttggagcgggccctgcggagcaaccccgagctggcggcggtggggcgcgagaccgagatcgccagcggcgcgcggcagcaggccgggctgatccccaacccggatctgtcctggagcgtcgaggacacccgccagggcaatcgccagaccagcgtcagcatcgcccagccgctggagctgggcggcaagcgcggtgcgcgggtggaggtggcgaaacgcggcagcgagatcgcctggacccaactggaagtccgtcgcgccgaactgcgcgcccaggtccgcggcgcctactacgcggcgctgaccgcgcaggagcgggtgcgcctggcgaagacctccctggacctggccaggcgcgcgctgcaggccgccgaccgacgggtcaaggccggcagcatctcctcggtggaacgggttcgcgcccaggtcctggcggacaacgcccagctcgacctgagccaggcggagctggagcagcagcgcacctatgtgcagctgtcgagcacctgggacgagccgcagccaggcttcgccagggtcggcggcgcgctcgacgcggtgccggcgagcatcacccgtggcgccttgctgcgccatctcgacgagtcgccgaccctgcgcctggcggcccaggaggtagcgcgcggcgaggcccaggtcgacctggagaagcgccagcgcatccccaacctgacggtcagcatcggcagcaagtacgaccagaccgcccgcgacggacgtggcgaacgggtcaacctgatcggcctgtcgatgccgctgccgctgttcgaccgcaaccagggcaacatctacgccgcccagagccgcgccgaccaggcccgcgacctgcagcgcgcgaccctgctgcgcctgcgcagcgaagcggtacaggcctacgaccagttgcgcacctcggaacaggagctggcgctggtccgtcgcgacctgctgcccggcgcacagagcgcgctggactcgatgacccgcggcttcgagatgggcaagttcaacttcctcgacgtgctcgatgcccagcgcaccctggtcggcgtccgtgcccagtacgtgcgcgcgctggacgccgcggcgcaggcgcgggtgagcatggagcgcctgctcggtgaagacatcggccacctcggccagtga

SEQ ID NO: 320531 - DNA, 675 bp, Pseudomonas aeruginosa
atgcgcatccttattatcgaagatgaagtcaagactgccgactacctgcaccagggcctgaccgaaagcggctacatcgtcgaccgcgccaacgatggcatcgacggcctgcacatggccttgcaacacccttacgaactggtgatcctcgacgtcaacctgcccggcatcgacggctgggacctgctccgccgcctgcgcgaacgcagcagcgcgcgggtgatgatgctcaccgggcatggcaggctgaccgacaaggtgcgcggcctcgatctcggcgccgacgacttcatggtcaagccgttccagttccccgaactgctggcgcgggtccgctcgctgctgcgccgccacgaccaggcaccgatgcaggacgtcctgcgggtcgccgacctggagctggacgccagccgccaccgggccttccgcggccgggtgcggatcaacctgacgaccaaggagttcgccctgctgcacctgctgatgcggcgcaacggcgacgtcatcacccggacgcagatcatctcgctgatctgggacatgaacttcgacaacgactccaacgtggtggaagtcgccatctgccgcctgcgggcgaagatcgacgacggcttcgacctcaagctgatccataccattcgcggcgtcggctacgtcctggaagcgcgccgatga

SEQ ID NO: 320532 - DNA, 1419 bp, Pseudomonas aeruginosa
atgacgccaccaggccgactgtcgctgcgcctggccctgctggtcggcgccctcggcgcgctgctggccctggcgctcggcgcaatggcgcactggaacctcggccgcgagctggaagcccgcgagcgggaaaacctgcaattgaagctggagcagatccgccacagcctggaagacgatctcgacctgcgcagcgacccggccgtacaggcgcatgccctgcaggaccaactggtggcgcacagcggcctgcacctgagcattctcgacagccgcagcggccagccgctgatgagcttcggcgaccaggccgcggccagcgtcgcgaccaaccgcgcgcttctcgcccgcttgcaggcggacgcccgccagccggtgttccagagctggagcaccggcaacgaccagcgcctgctgagcatcggcgcttccatgcgcatgaagaacggcaccccggtacaggtgttgctgagcagcgagcgcaacgccgacgagcgcctgctcgacggtttcctccgcgccaccctgctggccctgcccttcctcctgccattgatcgccctggccgcctggtgggtggtgcgtgccggcctcgaaccgttgaaccgcttccgccgggtggccgcccaggtcagcccgcaggatctctcctaccgcatccccgagcagaacctgccgcgcgaactggacagcctggcccgcagcttcaaccacatgctcggccgcctcgaggatggcgtacgccagctctcgcagttctccgacgacctggcccacgaactgcgcgcgccgatctgcaacctgctggtgcgcaaccaggtgctgctcagccagcatcgcgacggcgcggcataccgcgaagccctggagtccaatgccgaggaactggagcggctgtcgcggatcgtcaccgacatgctgttcctggtgcaggtggacaacccggcgatccaggcccagttcggctgcgtcgccctgcacgagcaggcggccaaggtcatcgacctgtacgagatggtcgccgaggacaagggcgtcgaactgcgcctgtccggcaacggcttcgcccacggcgacaacctgatgatccagcgcgccatttccaacctggtgtccaacgccgtgcgccacaccccgcaaggcgggcgcatcgacgtgcggatcggggaacgcgcggggcacaccgaggtgagggtcagcaacgacggtccgggcatcccgccggagtacctgccgcacctgttcgagcgcttctaccgccgcgccggacgccagactggagcccaggccggcaccggcctgggactggccatcgtgcaatcgatcatggcctaccacggcggccgcgccgaagcggaaagcgtaccgcagcagaagacccacctgcgcctgctgttcccttcgacgggcgctgcctga

SEQ ID NO: 320533 - DNA, 255 bp, Pseudomonas aeruginosa
gtgtcggggaagtttccggaaaagccctcgcgccgaggctactggctcggctggttgtgccgcctggccatgcttggcggcgtcgccgcgatgttctgggcgctgctgcaatgcttcgtcctgctgcacggtgaaccgccgctccagcgcgccccgctgcggacgccctggaccctgctggcgctcggcctggcgctgttcctcgccggtttctgcggcgagtaccggctgtggcggcgccgcgccggttgctga

SEQ ID NO: 320534 - DNA, 1500 bp, Pseudomonas aeruginosa
atgaaacacaccccctcgttgctcgccctggccctggtcgccgccctcggcggctgcgccatcggccccgactaccagcgaccggacctggcggtgcccgccgaattcaaggaagccgaaggctggcgccgcgccgagccgcgcgacgtgttccagcgcggcgcctggtgggagctgtacggcgaccagaccctgaacgacctgcagatgcacctggaacgttccaaccagaccctggcccagtcggtggcgcagttccgccaggccgaggcgctggtgcgcggcgcgcgggcggcgttcttcccgtcgatcaccggcaacgtgggcaagacccgcagcggccagggcggcggcgacagcaccgtgcgcctgcccgacggctccactgtgagcagcggcggtggttccggtgcgatcagcaacagttactcgaccagcctcggtgtcagctgggaggtcgacctctggggcaagctgcgccggcaactggaggccaaccaggcgagcctgcatgccagcgccgccgacctcgccgcggtgcgcctcagccagcagtcgcaactggcgcagaactacctgcaactgcgggtgatggacgaacagatccgcctgctcaacgacacggtgacggcctacgagcgttcgctgaaggtggccgagaacaaataccgcgccggcatcgtcaccagggccgacgtggcccaggcccgcacccagttgaaaagcacccaggcccaggccatcgacctgaagtaccagcgtgcccagctggagcacgccatcgccgtgctggtcggcctgccgccggcgcaattcaacctgccgccggtggcgagcgtgccgaagctgccggacctgccggcagtggtgccgtcgcaattgctcgaacgacggccggacatcgcctcggcggaacgcaaggtgatttccgccaacgcccagatcggcgtggccaaggccgcctatttccccgacctcaccctgagcgccgccggcggctaccgcagcggcagcctgagcaactggatcagcacgccgaaccgcttctggtcgatcggcccgcagttcgccatgaccctgttcgacggcggcctgatcggctcccaggtggaccaggccgaggcgacctacgaccagaccgtggcgacctaccggcagaccgtgctcgacggtttccgcgaggtggaggactacctggtgcaattgagcgtcctcgacgaggagagcggggtgcagcgcgaagccctggagtcggcccgcgaggcactgcgcctggccgagaaccagtacaaggccggcaccgtcgactacaccgacgtggtcaccaaccaggccaccgcgctgagcaacgaacgcaccgtgctgaccctgctcggcagccgcctgaccgccagcgtccagttgatcgcggcaatgggcggcggctgggacagcgccgatatcgagcggaccgacgagcggctcggccgggtcgaggagggcctgccgccttcgccctga

SEQ ID NO: 320535 - DNA, 3111 bp, Pseudomonas aeruginosa
atgagtctgtccacgcccttcatccgccgcccggtcgccaccacgctgctgaccctggcgttgctgctggccggcaccctgtcgttcggcctgctgccggtggcgccgctgcccaacgtcgattttccggccatcgtggtcagcgccagcctgccgggcgccagcccggaaaccatggcctcgtcggtggccacgccgctggagcgctcgctgggacggatcgccgggatcagcgagatgacctccagcagttcgctgggctcgaccaccgtggtgctcgtgttcgacctggagaaggacatcgacggcgccgcccgcgaggtgcaggcggcgatcaacggcgcgatgagcctgctgcccagcggtatgccgaacaatcccagctaccgcaaggccaacccctcggacatgccgatcatggtcctcaccctgacctcggagacccagagtcgcggcgagatgtacgacctcgcctcgaccgtgctggcgcccaagctgtcgcaggtgcagggggtagggcaggtgagcatcggcggcagctcgctgccggcggtgcgggtcgacctcaacccggatgccatgagccagtacgggctgtccctggacagcgtgcgcacggccatcgccgcggccaacagcaacggccccaagggcgccgtcgagaaggacgacaagcactggcaggtggacgccaacgaccagttgcgcaaggcccgcgagtacgagccgctggtgatccactacaacgccgacaacggcgccgcggtgcgcctcggcgacgtggccaaggtcagcgactcggtggaggacgtgcgcaacgccggcttttccgacgatctgccggcggtgctgctgatcgtcacccgccagcccggcgccaacatcatcgaggccaccgacgccatccacgcgcaactgccggtgttgcaggaactgctcgggccgcaggtcaagctgaacgtgatggacgatcgcagcccgtcgatccgtgcgtcgctggaagaggccgagctgaccctgctgatctcggtggcgctggtgatcctggtggtcttcctgttcctgcgcaacggccgcgccacgctgatccccagcctggcggtgccggtctcgctgatcggcaccttcgcggtcatgtacctgtgcgacttcagcctgaacaacctgtcgctgatggcgctgatcatcgccaccggcttcgtggtggacgacgccatcgtggtggtggagaacatcgcccgacgcatcgaggagggcgatccgccgatccaggcggcgatcaccggtgcccgccaggtcggtttcaccgtgctgtcgatgacgctctcgctggtcgcggtgttcatcccgctgctgctcatgggcggcctcaccgggcggttgttccgcgagttcgcggtgactctctcggcggcgatcctggtgtccctggtggtatccctgaccctcacgccgatgctctgcgcgcgtctgctgcgtccgctgaaacggcccgaaggcgcttccctggcgcggcgcagcgatcgcttcttcgccgccttcatgctgcgctaccgcgccagcctgggctgggcgctggagcactcgcggctgatggtggtgatcatgctggcctgcatcgccatgaacctctggttgttcgtggtggtgcccaagggcttcctcccgcagcaggactccgggcgcctgcgcggctacgcggtggccgaccagagcatctcgttccagtccctgagcgcgaagatgggcgagtaccgcaagatcctctcttccgatccggcggtggaaaacgtggtcggcttcatcggtggcggccgttggcagtcgagcaacaccggttcgttcttcgtcactctcaagccgatcggcgagcgcgacccggtggagaaggtcctcacccggctgcgcgagcggatcgccaaggtgcccggcgcggcgctctatctcaacgccggccaggacgtgcgcctgggcggccgcgacagcaacgcgcagtacgaattcaccctgcgcagcgacgacctgaccctgctccgcgaatgggcgccgaaggtcgaggcggcgatgcgcaagctgccgcagctggtggacgtcaacagcgactcccaggacaagggcgtgcagacccgcctggtgatcgaccgcgaccgcgcggcgaccctggggatcaacgtggaaatggtcgacgcggtgctcaacgactctttcggccagcgccaggtgtcgaccatcttcaacccgctgaaccagtaccgggtggtgatggaggtcgaccagcagtaccagcagagcccggagatcctccgccaggtccaggtgatcggcaacgacggccagcgcgtgccgctgtccgcgttcagccactacgaaccgagccgggcaccgctggaggtcaaccaccagggccagttcgccgccaccacgctgtccttcaacctggcaccgggcgcgcagatcggcccgacccgcgaggccatcatgcaggccctggagccgctgcacatcccggtggacgtgcagaccagcttcgagggcaacgccggcgcggtgcaggacacgcagaaccagatgccctggctgatcctcctggcgctgctggcggtgtacatcgtcctcggcatcctctacgagagctacgtgcacccgctgaccatcctctcgaccctgccttcggccggggtcggcgcgctgctcgcgctgatcctctgccgcagcgagctgagcctgatcgcgctgatcggcatcatcctgctgatcggcatcgtcaagaagaacgcgatcatgatgatcgacttcgccctggaggccgagcgcaaccacggcctgagcccgcgcgaggcgatcctcgaggcctgcatgatgcgcttccggccgatcatgatgaccaccctggccgccttgctcggcgccttgccgctgatcttcggcatcggcggcgacgccgcgctgcgccggccgctgggcatcaccatcgtcggcgggctgatcggcagccagttgctgaccctgtacaccaccccggtggtctacctctatctcgaccgcctgcgccactgggtcaaccagaaacgcggcgtacgcacggacggtgcgctggagacacccctatga

SEQ ID NO: 320536 - DNA, 3132 bp, Pseudomonas aeruginosa
atgaacccctcccgcccgttcatcctgcggccggtcgcgaccaccctgctgatggtggcgatcctgctctcgggcctgatcgcctaccgcttcctgccgatctcggcgttgccggaagtggactacccgaccatccaggtggtcaccctgtaccccggcgccagcccggagatcatgacctcgtcgatcaccgcgccgctggagaaccagctcgggcagattccggggctcaacgagatgtcttccagcagttccggcggcgcctcggtgatcaccctgcaattcagcctgcagagcaacctcgatgttgccgagcaggaggtccaggcggcgatcaacgccgcgcagagcctgctgcccaacgacctgccgaaccagccggtgttcagcaaggtgaacccggcggacgcaccgatcctgaccctggcggtgatgtccgacggcatgccgctgccgcagatccaggacctggtggatacccgcctggcacagaagatctcgcagatctccggggtcggcctggtcagcatcagcggcggccagcgcccggcggtgcgggtgcgcgccaacccgacggcgctggcggcggcggggctgagcctggaggacctgcgcagcacggtgaccagcaacaacctcaacggccccaagggcagcttcgacggcccgacccgtgcctcgaccctggacgccaacgaccagttgcgctcggccgacgcctaccgcgacctgatcatcgcctacaagaacggctcgccgctgcgcatccgcgacgtcgccagcgtcgaggacgacgccgagaacgtgcgcctggccgcctgggccaacaacctgccggcggtggtgctgaacatccagcgccagccgggggccaacgtgatcgaggtggtcgaccggatcaaggcgctgctgccgcagctgcaatcgaccctgccgggcaatctcgacgtgcaggtgctgaccgaccgcaccatcaccatccgcgcctcggtcaaggacgtgcagttcgagctggcgctggcggtggcgctggtggtgatggtcaccttcctgttcctgcgcaacgtctacgccaccctgattcccagcttcgccgtgccgctgtcgctgatcggtaccttcggcgtgatgtacctgtccggcttctcgatcaacaacctgaccctgatggcgctgaccatcgccaccggcttcgtggtcgacgacgcgatcgtcatggtggagaacatcgcccgctacctggagcagggcgactcgccgctggaagcggcgctcaagggctcgaagcagatcggcttcaccatcatctcgctgaccttctcgctgatcgccgtgctgatcccgctgctgttcatgggcgacgtcgccgggcggctgttccgcgagttcgccatcaccctggcggtggcgatcctgatttccggcttcgtctccctgacccttacgccgatgctcagcgccaagctgctgcgccacatcgacgaggaccagcagggccgcttcgcgcgcgccgcggggcgggtcatcgatggcctgatcgcacaatacgccaaggccctgcgggtggtcctgcggcaccagccgctgaccctgctggtggccatcgccaccctggcgctgaccgcgctgctctacctggccatgcccaagggcttcttcccggtgcaggacaccggggtgatccagggcgtcgccgaagcgccgcagtcgatctccttccaggccatgtccgagcgccagcgcgcccttgccgaggtggtgctgaaggacccggcggtggccagcctgtcctcctacatcggcgtcgacggcagcaacccgaccctcaacaccggccgcctgctgatcaacctcaagccgcacagcgagcgcgacgtcaccgccagcgaagtgatccagcgcctgcagcccgaactcgaccacctgcccgggatcaagctgtacatgcagccggtgcaggacctgaccatcgaggaccgggtcgcccgcacccagtaccagttcaccttgcaggacgccgacccggacgtgctcgccgagtgggtgccgaagctggtggcgcggctgcaggagttgccgcagctcgccgacgtcgccagcgactggcaggacaagggcttgcaggcctacctgaacatcgaccgcgacaccgcctcgcgcctcggcgtgaagctctccgacatcgacagcgtgctctacaacgccttcggccagcggctgatctcgaccatcttcacccaggccacccagtaccgcgtggtgctggaggtggcgccgcagttccagctcggcccgcaggccctggagcagctctacgtgccgtccagcgacggcacccaggtgcgcctgtcgagcctggcgaaggtggaggagcggcataccctgctggcgatcaaccatatcgcccagttcccctcggcgaccctgtcgttcaacctggccaagggttactccctgggcgaggcggtcgaggcgatccgtggcgtcgaggccagcctggagctgccgctgagcatgcagggcagcttccgcggcgcggcgctggccttcgaggcctcgctgtcgaacacgctgctgctgatcctcgcctcggtggtgaccatgtacatcgtcctgggcatcctctacgagagcttcatccatccggtgaccatcctctcgaccctgccctcggccggggtcggcgcgctgctggcgctgatgctggcggggcaggagatcggcatcgtggcgatcatcggcatcatcctgctgatcggcatcgtcaagaagaacgcgatcatgatgatcgacttcgccctcgacgccgagcgcaacgaaggcaagccgccccatgaggcgatctaccaggcctgcctgctgcgcttccggccgatcctgatgaccaccatggccgcgctgctcggcgcgctgccgctgatgctcgccggcggcgccggcgccgagctgcgccagccgctgggcatcaccatggtcggtggcctgctgctgagccaggtcctgaccctgttcaccaccccggtgatctatctctacttcgaccgcctggcccgtcgctgggcggcctggcgcaagcagcgcgggctggacctgaacaccgaggccgggttcgacggggacgccgggcgatga

SEQ ID NO: 320537 - DNA, 1281 bp, Pseudomonas aeruginosa
atgactccaacgaccggtaaatccaagttccgtaccctgcgcccgtggctgatcaccgccctggccttcgccgccgtgatcggcctggtgatgtggctggcggcgcccgcctcggcaccgtcctccgacgggcgacccggtcgcggcggcaagccgggcgccgcgctgcccaaggccaacgcgctcaccgtcggcgtggccagggtggagcagggcgacctggcgctgcatttcaacgcgcttggcaccgtcaccgccttcaacacggtgaacgtcaagccgcgggtcaacggcgagctggtcaaggtgctgttccaggaggggcaggaggtcaaggccggcgacctgctggcggtggtcgacccgcgcacctacaaggcggcgctggcccaggccgagggcacgctgatgcagaaccaggcgcaactgaagaacgccgagatcgacctgcagcgctacaaggggctgtatgccgaggactcgatcgccaagcagaccctggatacccaggaagcccaggtccgccagttgcagggcaccatccgtaccaaccagggccaggtcgacgacgcccgcctcaacctgaccttcaccgaggtccgcgcaccgatttccgggcgcctcggcctacgccaggtggacatcggcaacctggtcaccagcggcgataccacgccgctggtggtgatcacccaggtcaagccgatctcggtggtgttcagcctgccgcagcagcagatcggcaccgtcgtcgagcagatgaacggccccggcaagctgacggtcaccgcgctggaccgcaaccaggacaaggttctcgccgaaggcaccctgaccaccctggacaaccagatcgacaccaccaccggcacggtcaagctcaaggcgcgcttcgagaacgccgacggcaagctgttccccaaccagttcgtcaacgtgcgcctgctggcgcagaccctcaagggcgtgctgaccattccggccaacgccgtgcagcgcggcaccaacggtatctatgtctacgtggtcggcgccgacaacaaggtcagccagcgcagcgtcgccatcggcaccagcgagaacgagcgggtggtggtggaaagcggcctgaaggccggcgagcaggtggtggtggaaggcaccgaccgcctgcgcgacggtatggaagtgcgtgtcgccgaggcctccccgcaggtcctcgagggcgagccgcagaaaccgcagactggccgccccagcggcctccagggcgactcggtgggtagcgggagcgctgaatga

SEQ ID NO: 320538 - DNA, 1434 bp, Pseudomonas aeruginosa
atgatcgacccgttgaaacaccgcttcgcggcgctccgcagtcgcgccgaattccactccttgcgctacgtccagcgtagcggcgagtacctctcggtgcgccgcaacgtcagcgaaccgccgcacttcagccaggaccgcggcgccatgctctgcgtacggctgaacggcgtggaagcctacgccgccaccaacgatctctccgcggccggcctgcaggccgccctggagcaggccgaacggcaagccgagcggatcgcccggcacgccctgttcgacgtccgcggattgccgccggcaagcggccgctcgcagtatcgctcgccgaaccaggacgcccctttcccctccctcgccgagtgctacgaactgctcgccgaggaatccgccaaggtgccgcgcgacgagcgcctggtgaactggagcgtattcctcgaagtcagccgccaggaacagctctacctgaacagcgccggcgccgagcaataccacaagcagcgcttcgtctatcccggcgccagcgtcaccgcctacgacggccatgacagccagacccgcagtttcggcggccaccatgccggccagcagggcggcgccgaagtgatcgagcgcctcggcctggtcggcgccgcgccgcgcatcgccgaccaggccctgcaactgctggcggcgccgaacaccccgagcggccgctgcgacctgctgctgatgccggaccagatgatcctgcagatccacgagtcgatcggccacccgctggagctggatcgcatcctcggcgacgagcgcaactacgccggtaccagcttcatcaagaccgaggacttcggtcgctaccagtacggctccagcctgctcaacgtcagcttcgacccggaaatccccgaggagctggccagctaccgccaggacgacgacggcagccccgcgcgcaaggaatacctgatccgcgaaggccgcctgctgcgtccgctcggcggcgccctgtcgcaacaccgcagcggcctggagggcgtcgccagcagccgcgccagcagttggaaccgcgcgcccatcgaccgcatggccaatctcaacctggagcccggcgacaagagcttcgcgcagctggtggccggtatcgagcgcggggtgctgatgtcctacaaccgctcctggtcgatcgacgacgcacgcaacaagttccagttcggctgcgaatggggccagttgatcgaggacggcgaactcaagggcgtggtgaagaaccccaactaccggggcatctccgcgcagttctggcgcaacctcagcgcggtgggcgacgccggcaccttcgaggtgctcggcacgccctactgcggcaagggcgagccgaaccaggtgatccgtgtcggccacgcctcgccggcctgcgtattcagcgatgtggacgtattcgggggagatacctga

SEQ ID NO: 320539 - DNA, 1326 bp, Pseudomonas aeruginosa
atgcaccagagacagcatttcgaagccctcgccgaggacctgcgccggcatctggccgagggcgaggacttcaccctctggtacagcgccgaggactccgagttcatccgcttcaaccgggcgcgggtgcgccaggccggccgggtgcgccaggccagcgcgctgctccggctgatccgcgacgaacgccaggcgagcctcgacctgacgctctccggcgcgccggaagaagaccgccagcgtctggccgaaggccttcggcaactgcgccagagcctggcctggattcccgccgatccctatctgctgctcgacacctcggcctggcagcgagagaaccaggacctcggcgcagcgcccgacagcggcgcgctgctggccagcctcgaacgccgggcgcgcgacctcgacctggtcggcatctatgccgccggaccgctgttccgtggcttcgccaactcctggggcgccttcggctggcatgccggcagcagcttcaacttcgactggagcctgttccatggcaacggccaggcggtgaaggccgactacgccggccagcgctgggacgacgaagccttcgcccggcgcttcgaacaggcccgggagcagctcggccacctgggcaagccgctgcgccagttgcgccccggcgactatcgcacctacctggcgccggcggcgctcgaggaagtcatgcagatgctctgctggggcggtttctccgcgcgcgccctggctaccggcgaaagccccctgcaacgcctgcagaacggcgacgccctgctcagcccgctgctgaacctcgccgagcgccctgccacctcgccctccccggcattcagcgcggaaggctcgccgcgcgccgaggtcgaactggtcggcaacggccgcctgagcggacgcctggtgagttcgcgcagcgcccgcgaatacggcctggtagccaatggcgccggcgccaacgaggcgcccacggcgctggacatggccggcggcagcctggaacaggcgcgtatcctcgaggccctggataccggcctgtacatcggcaacctgtggtacctgaactactcggacatgcccgccgcacgcctgaccggaatgacccgcttcgccaccttctgggtggagaacggccagatccgggcgccggtcagcaccatgcgcttcgacgacagcctgtacagcttcctcggcgcccatctggaagacctcagccacgagcgcgaactgcgcctgtccagcaatacctacggcgaacgccagaccgactcgatgcacctgccgggcgcgctgaccgggcgcttcaccctcacgctctga

SEQ ID NO: 320540 - DNA, 1125 bp, Pseudomonas aeruginosa
atgcccgctttgagtcgtcgttcgttcgtgaccctgaccgccctggcctccagcagcatcctgctgagcccgcgagccttcgccgggagcggcgcgacaagcgccgccggcaagccgcaagagaccttcctggatttcaacgaaagcccctacggcccctccgccaaggccagggccgccatgcagcgagcggccgcgctctgcggtcgctacgactacgacgcgcaggacgccctggtcggcctgttcgccaagcagaacggcatccccgccgaatgcgtgcacgcctactgcggctcgcgccagccgctgcaatacgccgtcgcggcgttcaccggcaaggagcgcggcctggtcatcgccgatccctcctacgactccgtggttggcgccgcccaggcccagggggcgaaggtcgctgccgtgccgctggacgccgaggcggcccacgacatcgagcgcatgctcgccgccgcgcaacgcgacgccgggctgatctatatctgcaacccgaacaacccgaccggcaccctcaccccgcacgagcggatcgtcagggcgatcgaacgcaagcccgagcgcagcgtggtgctggtcgacgaggcgtatatccatttttccgacgcacccagcgtcgtcggcctggccgtccagcgccaggatgtgctggtcctgcgtaccttctcgaaactctacgggatggccggcgcccggctcggcctggccatcgggcatccgcagctgctggcgcggctggagcgcttcggcggccacaacgtggtgccctcgccgaccgcccacgccgggctggaaagcctgcgtgacgacgatctggtgccacggcgcaagcagcagaacgcagaggtccgcgagcgcaccatcgcctggctgcgccagcagggcttccgctgcaccgcctcgcagtccaactgtttcatggtggatatgcgccgtcccgccgagctggtcatcgccgaactggagaaacagcgggtgcacgttggccgcccgtgggcctcctggcccaactgggtccgcgtgacggtaggcagcgaggaagagatgcaggcgttccggagcgccttcgccagcgtcagccggcgccaccaggtcgccatgcgctag

SEQ ID NO: 320541 - DNA, 498 bp, Pseudomonas aeruginosa
atggctcaagtgactctcaagggcaacccggtcaacgtcgatggccagctcccgcagaaaggcgcccaggctccggccttcagcctggtcggcggcgacctcgccgacgtgaccctggaaaacttcgccggcaagcgcaaggtgctgaacatcttccccagcgtcgacaccccgacctgcgccacctcggtgcgcaagttcaacgtcgaggccggcaagctggccaacaccgtggtgctgtgcatctccgccgacctgccgttcgcgcagaagcgcttctgcggcgccgaaggcctggagaacgtagtcaacctgtcgaccctgcgcggtcgcgagttcctcgagaactatggcgtggccatcgccagcggcccgctggccggcctggccgcgcgcgccgtggtggtgctcgacgagcagaacaaggtgctgcacagcgaactggtcggcgaaatcgccgacgagccgaactacgcggcggccctggcggctctctga

SEQ ID NO: 320542 - DNA, 1350 bp, Pseudomonas aeruginosa
atggaaagcttgcagaagtgggtggtcgacctgaacggcgtggtctgggggccgttgatgctggtgctgattctcggcaccggcctgtacctgatgctggggttgaagttcatgcccctggtgcgcctgggagtcggctttcgcctgctctggcaggggcgtagcaaggatgacgagagcagcggcgagatcagcccgttccaggcgctgatgacctgcctggcggccaccgtcggtaccggcaacatcgccggggtggccacggcgatcttcctcggcggcccgggcgcgctgttctggatgtggtgcaccgcgctggtgggaatggccaccaagttctccgaagtggtgctggcggtgcactaccgcgagaaggatgagcgcaacgaacacgtcggcggtccgatgtatgccatcaagaacggtctgggcaagcgctgggcctggctcggcgcggccttcgcgctgttcggcgggctcgccggcttcggtatcggcaacatggtccaggtcaacagcatggccgatgccctggaggtttccttcggcgtgcccgactgggtcaccggggtcgccaccatgctcgtcaccgggctggtgatccttggtggcatccgccgtatcggcaaggtcgccgaagccctggtgcccttcatgtgcgtcggctacatcgtcgcctcggtgatcgtcctggtggtccatgccgaggcgattcccggcgcgttccaactgatcttcacccacgccttcacgccgatcgccgccaccggcggcttcgccggcgcagcggtgatggcggcaatccgtttcggcgtcgcacgcgggatcttctccaacgaggccggcctcggcaccgccggcatcgcccaggccgccggcacgacccatagcgcggtgcgttcgggcctgatcggtatgctcggcaccttcatcgataccctgatcatctgcagcctgaccggcctggcgatcatcacctcgggcgtctggaccagcggcgccagcggcgcggcgctgtcctcggcggcgttcgaggcggcgatgccgggcgtcggccactacatcctgtcgctggccctggtggtgttcgcctataccaccatcctcggctggagctactacggcgagcgctgctgggagtacctggcgggcacccgggcgatcctgccgttccggatcgtctggaccctggcgattccgttcggcgccatgacccagctggacttcgcctggctggtggcggataccctcaacgcgctgatggcgattcccaacctgatcgccttgctgctgctgagtccggtggtgttccgcctgacccgggagtatttcgccaaggccaggagttga

SEQ ID NO: 320543 - DNA, 912 bp, Pseudomonas aeruginosa
atggatcgtttccaggccatgcaggccttcacccgcatcgtcgagctgggcgccttcggcaaggccgcggacagcctggagctgccgcgcgccagcgtgacccaggcgatccagcaactggaggcgcaccttggcgtgcagttgctgcagcgcaccacccgccaggtcagcctgaccctcgacgggcaggcctactacgagcgttgcgtgcgcctgctggcggacctggaggaggcggaaagctgctttccacgcgtcctgaacaacccgcgcgggcgcttgcgggtcgacctgccgggcgcgctggggcggatgcgggtgattccgttcctgccggagttctgcgagcgctacccggaactggagctgcagttgagcagcaacgatcgcctggtcgacctgctgcgcgagggtgcggactgcgtgctgcgggtcggcgagctgcacgattccagcctggtcggccggcacctggccgacctgccgcaggtgacctgcgccagcgccgcctacctggagcgtcatggccatccgcggcagctcgccgagctcggcgggcacctcgcggtgaactaccagtcgccttccagcgggcgtaccttcgacttcgagttcagcgtcgacgggcgtctgcgcacgttgccgatgcgcagccgggtcagcgtcaacaacgccgatgcctacgtcgccgcctgccgggccgggctcgggctgatccaggcgccgcactatcacgtcgccgccggcctggccgacggtagcctccgacaagtgctcggagaatggttgccgccatcgctgccgctgcatgccgtgtatccctcgcagcgccagttgtcgccgcgggtgagggtgttcgtcgactggctggtggaactgttcggtcgccaggcggccggcgagacgcaatga

SEQ ID NO: 320544 - DNA, 996 bp, Pseudomonas aeruginosa
atgaaaacccgtcaactcggccacaacggcccttccgtctccgccattggcctcggctgcatgggcatgaccgacttctacaccaccggcggcgaccgccaggaggccatcgccaccctgcatcgcgccgtggaactcgggctgaacttcttcgataccgccgacatgtacggcccgcacagtaacgaggaactgctcggcgaggccctgcgcggcaaacgcgagcaggtgttcctggccagcaagttcggcatcgtccgcgaccctgccaatccccgggcgcgcggcgtcgacggcagcccggcgtacatccgccgcgccatcgaaggcagcctgaagcgcctcggtaccgaccgcctggacctgtactatcagcaccgcatggacccgcaggtacccatcgaggacagcgtcggcgccctcgccgacctggtgaaggccggcaagatccgccacatcggtctcagcgaagcctcggcggaaaccctcgagcgtgcccaccgggtgcacccgatcagcgcgttgcagagcgagtactcgctgtggacccgcgatccggaggacaccggggtgctcgccgcctgccgtcgcctgggcatcgccttcgtcccctacagcccgctgggccgaggtttccttaccggcaccctgaagcgcccggaagacttcgccgccgacgactaccgtcgtttcagcccgcgcttccagggcgagaacttcgcgaagaacctgaagctggtggacaaggtcggcgaactggccgcagccaagggcgtgaaaccctcgcaactggcgctggcctgggtgctggcgcagggcgatgacctgatcccgattcccggcaccaagcagcggcgctacctggaggagaacgtcgccgcgacggaattgcgcctgagcgcggcggaactggccgagctggatgcgatcttccccgccgaggcggtcgccggcagtcgctatagcgaggaaggcatgcgcctggtcaatctctga

SEQ ID NO: 320545 - DNA, 936 bp, Pseudomonas aeruginosa
atgaacgaacagacctggatgctcttcggcgggatcggcgcgctgctgctgctcgcctcgctggtcggcttcgtcctcaagtggcgcgccggtcccggcccgaacgcggtgatcgacaacctgaacgcacggatcaacgcctggtgggcgatggtcctggtgatcggtttcgccttctggcttggccaggcggcggtgatcctgctgttctatggcgtgtcgttctacgccctgcgcgagttcatcaccctcaccccgacccggcgcagcgactacccggcgctggtggcggcgttctacttcgtgctgccgatgcagtacctgctgatctacatcgactggtacagcatgttctcgatcttcatcccggtgtacgtgttcctgctgttgccgatcctcgcctcgctgggcggcgacaccaagcacttcctcgaacgcgcctcgaaagtgcagtggggcctgatgctggcggtgttctgtatctccttcgtgccggcgctgctgaccctcgacatccccggcttcgaggggcgcaacctgctgctgatcgcctacctggtgatcgtcgtgcagctctccgacgtgatgcagtacatctgcggcaagctgttcggcaagcgcaagatcgctcccaacctgtcgccgtcgaagaccgtcgaaggcttcgtcggcggcatcgccctggccaccgccatcggcgcctcgctgtggtggatcaccccgttcaacctctggcaggcggcgttgatcgcgctgctgatcaacctgctgggcttcttcggcggcctggtgatgtcggcgatcaagcgcgaccgtggggtcaaggactgggggcacatgatcgaaggtcacggtggcatgctcgaccgcctggactcggtgtgcttcgccgcgccgatcttcttccacgtggtgcgctactggtggacgccctga

SEQ ID NO: 320546 - DNA, 630 bp, Pseudomonas aeruginosa
atgctcgaatcagtcgtcgcctatggcatcatcgccggcgcccgcgccatcaccggcttgcgcagcctctggctgggcaccacgccgatccccaagcaacgcatctattacgccaaccacagcagccatggcgacttcgtcctgctctgggcctcgctgccgccggaggtgcggcggcgtacccggccggtggcgggcgccgactactggaacaaggccggcctgcgcagctacgtgatcaacaaggtgttcaacggcgtgctggtcgaccgccagcgcagcgaggccaatgccaatccgctcgaacctctcgaccgcgccctggacggcggcgattcgctgatcatcttccccgagggcacccgcaacctggacgacgaggtcaagctgttgccattcaagagcggtatctaccacctgtccctggcccacccggacgtcgagctggtgccggtctggctggccaacctcaaccgggtcatgcccaagggccgcatgctgccgttgccgctgctctgcaccctgagcttcggcaagccgctggtcgccacggcggaagaaggcaaggaggcgttcctcgaacgagcgcgcatggccctgctggacctggcgccggaagaggaggcctga

SEQ ID NO: 320547 - DNA, 453 bp, Pseudomonas aeruginosa
atgcctgagcaaaccctggccctggtggcggccctgctgcgccgtggccgcgagcttgaccggctgtccgccgcactgaccctgctggccatcgggctgggcctgtaccaggccgtgcagggcatcggctggcgctatttcgctgcggcgatgctggcgatcgccctgctcggcctgtggcagaagtactgggcgctgcgagtggccctggacgccgaactgttcgaacgtttcagccgcgtcggcgacaggctggaagcgcagacccaagacctggaccgggccctggccgatctcggcctggcccgagcggacgccgcagggcgcacctggaaccagcgcagccacggcgccctgcgcctgctacgctggcaggcgctggcctgtggcgcccagttcctgctggccttgtcgtgcctgttgtcgatccctctattcaacgctcaaacctga

SEQ ID NO: 320548 - DNA, 1350 bp, Pseudomonas aeruginosa
atggcgccgcgcgagccgggggtactgaagcgggcggtgctctggctgctgttcctcggcccgttcttcttcgccagctatggcctggccaactggttgaccagccagcgcggcgacgtcggcagcctggtcttcgactgggaacgcgggatgccgctgtggccctggaccatcctgccgtactggtcgatcgacctgctctacggcctgtcgctgttgttgccgcgggacaagcgcgagctggacacccactgcctgcgcctgctcagcgcccaggtgctgtcggtgacctgcttcctgctgttccccctgcgcttcaccttcgaacggccggaactgggcggcgtgttcggctggctgttcgacgtgctgatggggttcgacaaaccgtacaaccaggcaccgtcgctgcacatcgccctgctggtagtgctctgggtctgctacgcgcgctacgccagcggcgcctggcgctggctgctgcatggctggttcgcgctgatcgggctgtcggtgctgaccacctggcagcaccatttcatcgacgtgcccaccggcgcgctggccggttggctgtgcgtctggctgtggccgcaggcgcagcccgcgccgttcgcccgcgccagtctgagccgcgaccggcaacggcggcggctggccgctcgctacggcctcggcgcgctggcctgcgccgccgtcgcctttgccgtcggcggtgcggcgttgtggctgtgctggccggcgctggcgctggcgctggtggcgctgaactacctgctgttcggcgccgccggcttccagaagggcagcactggccgcctgagcgccgccgcgcgctggctgctggcgccatatctgcttgccgcgcggatcaacgcctggctctggacccgtcgccggccgcagccggacgaggtgctgccgggcctctggttggggcgcctgccgtcgtccgcggaactggccgacggccgcttccgcgcattgctcgacgctaccgccgaactttcctgcgagccgcaggggctggcctatcgcagcctgccgttgctcgacctggtcgcgccggacgtcgaggactgccggcgcgccgcggtgctgatcgacgaactgctggcgcaagggccgctgctggtggcctgtgccctgggctattcgcgcagcgccacgctggtcgccgcctggctgctgctcagcggccgcgcggcggacgtcgagtcggccgtggccgtgttacgtcgggcgcgaccgcaagtgctgctgggcgaggcccagcggcggaccctcgcggcgctgagcgggagcgtgccggagccatcggcggaactgggcgaggtgcgccatgcctga

SEQ ID NO: 320549 - DNA, 1761 bp, Pseudomonas aeruginosa
atgcgcgacgtacaggaactgcgtttcaccacccacgacggggtagagctcttctaccgccactggccggccagccgcccggcgccggacggcacgcgccaggcggtgctgctgttccaccgcggccatgagcactccgggcggatcgcccatctggtcgacgaactcgacctgccggaacacgacttcttcgcctgggacgcccgtggccacggcctctcgccaggcgcccgcggcgacagcccgagctttgccaccagcgtgcgcgacgtacagaccttcgtcgaccatatccaggccgtccacggtatcgccgaagagcggatggcggtggtggcgcagagcgtcggcgcggtgctggtttccacctgggcccacgactacgcgccgaaggtgcgcgcactggtgctggcttcgccggcgttccaggtcaagctctacgtgccgttcgcccgcagcgggctgaaactgatgcgcctgtggcgcggcaatttcttcgtcaacagctatgtcaaggcacgcttcctcagtcacgacccgcagcggatcgcctcctacgacagcgacccgctgatcgccaaggcgatctcggtgaacgtcctgctcggcctctacgaagctgccgagcgggtggtagcggacgcacaggcgatccagattcccacccaactgctgatttccggggccgacttcgtcgtccatcgtgcgccgcaggagcgcttcttcgagcgtctcggcagcctgcgcaaggaaaagcacatcctgcccggcttcttccacgacacccttggcgagcgcgatcgtcacctggccgtcggccgtgcccggcgcttcctcctcgaggcattcgccacggcccccgaacgaccgagcctgctcgatgccgaccgcctgggccatacctgcgccgaggccgaggcgctggccgcgccgttgccgaagaactcgccgcgcgatctctactggcgcgccacccgtgccgggctgcgcctgggcagcctgtggtcggacggggtcaagctgggcttcgacaccggtttcgattccggcagcaccctcgactatgtctaccgcaaccagcccagcggcagcggcccgctgggtcgcctgatcgaccgcaactacctggactccatcggctggcgcggcatccgccagcgcaagctgcacgccgaggagctgctgcgcctggccatgcagcggttacgcgaggagcagcgcgaggtgcgcatcgtcgacatcgccgccggccacggccgctacatcctcgaagccctgcaaggcgtcgagccgctgccggaaagcatcctcctgcgcgactacagcgagatcaacgtgcgtgacggcagcgccctgatcgaaagcaagggcctcgccggcatcgcccgcttcgtcaagggcgacgccttcgatcgcgccgacctgtcggcgctgcaaccgaagccgagcctcggggtggtttccgggctctacgagctgttcgccgacaaccgcatggtcggcgactccctcgccggcctcggcgaggcgctggaggagggcggctacctggtctacaccggacagccctggcacccgcagctggaactgatcgcccgcgcgctgaccagccaccgccagggccaggcctgggtgatgcggcgccggacccaggcggaaatggaccagctggtggccgccgccggcttccgcaagatcacccagcgggtcgaccagtggggcatcttcagcgtatcgctggcgcagaaggtcgcccgctga

SEQ ID NO: 320550 - DNA, 636 bp, Pseudomonas aeruginosa
atgatttccgtctatcaactcaaaccgcgctttcagaatcttcttcgtcccggcgtgcagcgcctctaccggcgcggcatcactgccaaccaggtgaccctggcggcctgcctgctgtcgctgctggtcggcgcgctggtcgccggtttcgccagccatctctggctgttcgccctcgttccgctgtggatgttcctgcgcatggcgctgaacgcggtggacggcatgctcgcccgcgagttcggccagaaatccgacctgggcgcctacctcaacgaactcaccgacgtgatcgccgacagcggcctgtacctgccgttcgccctgttgccgggagtcaacccgctatgggtggtgctggtggtgctgctggcggtgatcagcgaatatgccggcgcgctgggcaccatggtcggcgcttcgcgccgctacgacggcccgatgggcaagagcgaccgggcgctgtgtttcggcgtgatcggcgccggggtggccagcggcctgttgccgctggcctggatcgactggctgatgttgctgatcgcggccctgctgttgctgaccatcggcaaccgcgtgcgccagggcctggccgagctggccgcgagtcgacggggcagcgacggccaggcctga

SEQ ID NO: 320551 - DNA, 3666 bp, Pseudomonas aeruginosa
gtgaaggcgctgaagatcaccttgctggccatagtcgggctgctcctcgcgctgctcctgggactcgctgcgctgctcggcacccagaccggcagcgcctggctgctcggccgcgtgccgggcctgcaggtcagcggcttcgagggtcgcctcggtggcgcctggcaggcacagcgactgtcctgggcgcaggacggtacgcaactggtcgtcgagcggccggaactgcgctggtcgccggcctgcctggcggggctgcgcctgtgcctgcagcgggtggccgccgaacgggtcgcgctggacctgccgccgagcggcgacagcgccgacagcgggccgatcagcctgccgacgctgaaactgccgctgagcatcgagctcggcgaagtggcggtcggcagcttcctgctcgacggcaaccagcaggtcgccgaactcaagctggcggcccattggctggccgatggcctgcacatcgactcgctgacggcgcggggcttcggcctggacctggcgctccaggggcgcttgcagccgagcggcgactggcccttgcaggccgaagccacgctcggcctgcccgctcccgaaggcaagccgtggaagctggccgtccaggtcggcggtgagctgcagcaggcgctgaccctgaaaggccgcagcagcggttacctggacggcagcctggaaggacagttgcaggcgctggcggaaaacctgccggcacgattgctgatccgcgccgacggtttcaagggtgcggccggactaccggacaccttgaccctgaatgccatccagctcgatgccggcggcgatctcaagagcggttacctgatccgcggtggcgccagcctgccgggcgagggcggggcggtggcgttgagcctggacgggcgggtcgacgcccagggcgcggatatccgccaactgcgcctggacgctggcggcgagcagcgcctggagctggtcggacgcctggactggcgcgaaagcctggccgccgacgcgaccctggactggaaggatttcccctggctgcgcctgtatccgctggcggagccgccgccggtgacgctgaagaccttcaaggcggaagtgcattaccaggaccagcgctacctgggcaatttcagcgcggcggcgagcggtccggcgggcgacttcacgctggccagcccggtgtccggcgacctcgtccagctcaacctgccgtcgctgcagctccgcgccgggcaaggccaggccgaggggcgggtgacgttgcgtttcgacaatggcgtggcttgggataccgccctgcagctcagcgaactgaacccggcttactgggtcgccgagctgccgggttcactggccggtcccttgcgtagccagggaagtgttcgcgacgagcggctggcgttgggcgtggatctcgacgtcaagggccgcctgcgcggccagccggcgctattccaggcgcgcgccgaaggcgaggggcagcgctggacgctgggcaacctcgacctgcgcctgggggataacaaggttcagggcagcggggcgctcgaccagcgcctgcaaggccgcctggacatcgccctgaaccgtctcggccagctttggccgcaactcttcggtcgcctcgacggacgcctcgacctggctggtagcctcgcggcgccgcaaggcaggctgaacctcaagggacagcagatcgcctacgccgagcagcgcatcgccggcctcgacctgcaggcgaacctcgatgcccggcagaatggcaccctggcgctggtcgcttccggcctgcgcagcggcgaaaccgatctcggcctgttcaaggccaatgcccgcggcgaccaacgccgccagcaactggaactggacctgcaaggtgccttgctcaagctcggcctggccttcgacgggcaactggagcgcggcaactggcgcggtcgcctggcgcgcggcgagttgagcagtggcggccaggactggaagctacagcagccggcgcgcctggagcggttggccgacggcagggtcaatttcggcgcacattgctgggtatccggcgccgccagcctctgcggcggcgagcagcgcctgctgcccgagccgcggctgcgctacaccctgcgcgacttcccgctggacagcctgaagcaatggttccccgaggacttcgcctggcagggcaagctgaacggcgacctgcaactggacgttccggcccgcggcccgagcggcgtggtcagcctggacgccggcagcggtacgctgcgcctgcgcgaccagggccagtgggtcgacgtcggctacgacagcctgcgcctggagagccggttggcgcccaaccgcgtcgatacctccctcgacttccgcggaccgaagctcggcgagttgcgggtgcaggcgcagatcgacccgcgcccggcgagcaagccgctgagcggcgagttcagcctggccggcctcgacctgtcggtggcgcgcccgttcgtgccgatggtggagaaactgcaaggcaggctgaacggcagcggccggctgtccggcggcctgctggcgccgcgggtcgacggacgggtgacgctgagcgacggcaacatcggcggcggcgagctgccgaccagcttcgagaacctttccctcgacgctcgcatcgctggcgaaagcctggaactcggcggcggctggcgcagcggcaggtacggccagggcagcctgtccggcaacctgagctggggcgaggcgctgaacgtcgccctgaacatccgtggcaaccgcctgccggtggtggtcgatccctatgcgcaactggaggtggaaccggacctgaagatcggcatggccggccaggagctggcgatctccggcaaggtcctggtgccgcgtggcgacatcaccatccgccagttgccgccatccacggtcaaggtctccgacgacgcggtgatcgtcggctccgagcagcccgagcagcagccgctgaagatgaagatggacatcgatgtcgaggtcggccaggacaagctggcgttttccggcttcggcctcagcgccgaactggccggccacctgcacatcggcgacaacctggatacccgcggcgagctgaacctgaacaagggccgctatcgtgcctacggccagcgcctgacgatccgtagggcgcggctgttcttcgccggaccgatcgaccagccgtacctggatatcgaggcgatccgccgggtcgacgacgtggtcgccggcctgcgcctgaccggcagcgccgagcagccgaccagcgcggtattctccgaaccggcgatgagccaggagcaggcgttgtcctacctggtgctggggcggccgatgagcaccggcgaagacagcaacatgctcggcgaggcggccctggccctgggcctggccggtagcgcaccgctcaccggggaaatcgccaagcagctcggcatccaggacttccagctggacaccgagggcaccggcaacagcaccagcgtggtcgctagcgggaatatcaccgacaagctcagcctgcgctatggtgttggagtgttcgaaccggcaaataccatcgccttgcgctaccagttgaccaaacgcctctatctcgaagcggcgagcggcctggccagttcgctggacctgttcttcaagcgcgatttctga

SEQ ID NO: 320552 - DNA, 1740 bp, Pseudomonas aeruginosa
atgagactgactcaaggattgttccggttcccactggccgggctgctgtgcctgagtacggccgccttcgcggagagccagcttagcgtgcgcgtcacccccgccaatgccgccctgaaggccaatatcgaggcctacgtgggtagcctcggcgagcgggacgaggcggcgttgcaacgtttccgtcgcaatgccgaggcgcaggcggaaaaggcggcccaggcgctcggctacttccaggcgcagatcgacagcgaggtgaaggacggcaagccgccgaagctcacgctcaaggtagtgcccggcgagcccgtgcgcctgcgccaggtgaacatccaggtgctcggcgaggccgccagcctggagagcttccgcttgccgtcgggcaagcagctgaaaccgggcgcgaagctgaaccagggcgtctacgaggacgccaagcggctgatccagaaccaggcctcgcgctacggcttcttccagggccgcttcagcacccagcgcctgagcatcgatccgcgcgccggcatcgccgacatcgacttggtctacgacagcggccagcgctacaccttcggcaaggtgagcttcgacggcgactcgatcatcgaggaagaactgttgcgccgcatggtgccgttcaaggccggccaaccctatgactccgaactgatcgccgaactcaaccagaacctgcaatccagcggttacttcgagggcgtgcgggtcgacgccgcgccgacccaggcgcaggccgacggcgcgcgccaggcgatcccggtagcggtccggctggaggcgcgcaagccccggaccatgggcgtcggcctcggtttctcgaccgacgtcggggcgcgcgcgaggttcaactggacccgccattgggtgaatgccgaaggacatagcctgggattcgagtcggaaatctccgcaccacggcagaacgtcggcgcctggtacgagattcccctcgatccgccgctcaccgacaagctgcgcttcaccagcggctaccagttcgaagacctggtcgacaccgagagcaagctgctgacccttggcggcgaatggcacagcaagcggcccgatggctggcagcgggtggtttcgctgaactggatgcgcgaggagtacaagctgggcgacgactccgggctgagcagcttcctgatgccggggatcggctactcgctgctggagaccgacaacaaggtcgaccccagccatggctaccgcctgcagttcaacgtcaagggggcgaaggaaggcctgctggccgacgccgacgtcctccatgtcgacgccatggccaagggcctgaccagcttcgccggcggccatcgcctgctcggccgcctgcaggtaggcggaatcgccaccaacgactacaagtcgatcccgccctcgctgcgcttcttcgccggcggtgaccagagcgtgcgcggctacgactaccggacgctgtcgccggagaattccgatggcgacaagatcggcggccgctacatgatcgccggcagcgtcgagtatcaatatccgctggccgagcgctggcgcctggcgaccttcgtcgaccagggcaacgccttcaactcgctggacttcccgtcgatcaagaccggggtcggcttcggcgtgcgctgggtctcgccggtcggcccgttgcgcctcgacctggcccatgcgctcgacgacgacggcggtttccgcctgcacttctccatggggccagaactgtga

SEQ ID NO: 320553 - DNA, 633 bp, Pseudomonas aeruginosa
atgcctgatcaggtcaccgatgtccgtctgctcgacgacggctatagccgcgaagtccgctcgcttttctaccacgcctaccgccacgaaccgaccttcgcctacctgatggatgcgcagcgcgccggctacgaccagcgcgtgcgtgcctgcgtccgggagatggtcgagcgccatctgggcgaagagttgccggccatcggcctgttcatcgacgatcggctggtcgcggcggccctgatcacgccgccgcagcggcgcctggatatcaccgagagctggagctggcgcctgcgcatgctgttcagcgtcggcctggccgcgacccggcgctacctggattaccaccgggcggtgcaggcctgcctgccggtcggcccccaccaccagttgccgatgctcggcgtgcatcccgagtaccagggcaggcagatcggcgagcagctgctggcggccgtgcagcgctggtgcgccgaggactccgcttcgcaggggctggtcctggatactggcaatgcgcgctacctggacttctaccagcggcacggctaccgcgagatcggcgaggtgacgctgggagcggtgcgcgagcacgtcctcctgcatcctggcgagacgccggcggcgacctga

SEQ ID NO: 320554 - DNA, 813 bp, Pseudomonas aeruginosa
atgaaaatcgtctctttcaatatcaacggtctgcgcgcccggccgcaccagctggcggcgctgatcgagcggcaccagcccgacgtgatcgggctgcaggaaaccaaggtcgccgacgaccagtttccccaggccgagatcgaggcgctcggctaccacgtccactaccacgggcagaaaggccactacggcgtcgccctgctctcccgccaggcgcccctggaactgcaccgcggcttcccgagcgacggcgaggagtcccagcggcgcttcatctggggcaccttcagcgacgcccagggcaacccgatcaccgtgatgaacggttacttcccgcaaggcgagaaccgcgagcatccgaccaagttcccggccaagcagcgcttctacgccgatctccagtcgctgctggagaacagcttcaagcccgagcaggccctggtggtgatgggcgacatcaatatctcgccggaggactgcgacatcggcattggcgaggaaaaccgcaagcgctggctgaagaccggcaagtgcagcttcctgccggaagagcgcgaatggctggctaccttgaagaactggggcctggtcgacagcttccgggccctgaatccggaggtgaacgaccgcttcagctggttcgactaccgcagccgtggcttcgaggacacccccaagcgcggcctgcgcatcgatgtgatcctggccagccgggtgctgcagtcgcgcttcaaggacgccggcatcgactacgacctgcgcggcatggagaaaccctccgatcacgccccgatctggctggaactggcctga

SEQ ID NO: 320555 - DNA, 426 bp, Pseudomonas aeruginosa
atgcaacccttcgtcgttgaacgtctcgatcacatcgtcctgcgggtccgcgacctggaacgcagcatcgcgttctatcgcgatgtcctcggttgcgtggtggtgaagtggcgcgacgacctggagctggcccatctgcgcctgggcacgtcgatgctcgatctggtcgcggtgtccggggcgctcggccgggagggcggtgcggctccgggtggggaagggcgaaacgtcgaccatttctgcgtgcgcatcgagccgttcgacgaggccgcgctgatcgcccatctcgaggggttcggcctggtcccgcaggttcccgcggaaatccgcttcggcgccgagggcgacggctggtcgctgtacttcttcgatccggacggcaatcgagtggagctgaagggggcgcgggtggacaatcctgcctga

SEQ ID NO: 320556 - DNA, 906 bp, Pseudomonas aeruginosa
gtggatcacctcaccgctctcaaggtcttccgcgccgtggccgcgaatggcggcttcgccgccgcggcccggcagatgaatctctcgccggccgccgtgagcaagaacgtcgccgagctggaagcgcacctcaaggtgcgcctgatcaatcgcaccacccgcagcatgagcctgaccgaggccggcgaagtctaccggcagcgcctggagcgcatcctcgacgacctcgaggccgccgacgccgcgctcacttcgatgcagcagggccccagcggcctgctgcgggtcagcgccccgctgaccctcgccctcacctgcctgaccccggccattccggcttttctccagcgttatccggagctgcgcctggaactgctcctgcaggacggccgccaggacctgatcgccgaaggcatcgacctggccctgcgtggtagcgaccgggttgcggactccggcctggtcgcccgcccgctgctggtcctggagcacgtgctctgcgcggcgccggcctacctcagtcagcatggccagccgctgcggccggaggccctgcgcgaacacgagtgcatccgcttcagcctctctggccatgccgaccgctggaccttccgcaaggaccgcgagtgcatagcggtgcctatcgccggccgttaccgggtgtcctccagcctggcggtgcgcgatgccctgctcgccggcttcggcttgagcctgatcccacggctgtacgtacaggcggaactggccgaaggccgcctggttgaattgctggctgactggaaggccgacgagacggcgatccacgcggtctatccatcgcgccaactggccggcaagacccgggtgtttctcgacttcctgaccgagacaatggcgcagggccatgattccccaacgctgtaa

SEQ ID NO: 320557 - DNA, 1386 bp, Pseudomonas aeruginosa
atgccacaccgccagcgcgccagtgacaaagacctctggagccgtaccctgagcctggttttcctcggattcctctgttacgccttcccctggtcggtattcgccgcccccttgccgatccccacggacgacacgccggcgctgcgcatccagggttccaacaccatcggcgcgaagctcctgccggccctggtcgagggcctgatggaagaggaaggcctggaggatatccgccgtacccccggagaacgggaaaacgaactccatctgctcggcaagagccgcgacggccgcctggtgagggtggagctatccgcccacggttcgagcaccggcttcaccgccctcctcgaacgccacgccgaactcgccgcggcctcgcgtcccgtcaaggacagcgaagttcgcgccctggccggcttcggcgacctgcgcagcccatatgccgagcaggtgatcgccatcgacggactggcgatcatcctgcatccggacaacccgctggcctcgctggacaccgcgcaaatggcggcggtgttcgccggcgaggtgcatacctgggaagaactgggcggcaagggcggcgccatccgcctgtacgctcgcgacgagcagtccggcacctacgacaccttcaaggaactggtgctggccagtcacggcaaaagcctggccagcgacgcccgccgcttcgaatccaacgatcggctggcggccgcggtgagcgccgatccgcacgccatcggcttcgtcggcatcgcgtcggtgggccgggcccgcgccttggccatcgccgacggcgaatcgctgccgatggcgccccaggaaagcctgatcgccaccgaggactatccgctgtcgcgccgcctgttcctctacctgaagcccggcgagaagaacccctgggcccaggccctggtacgtttcgcccagggcccgcgcggccaggcgatcgtcacccgcagcggcttcgtcgcgcagaagatccaggcggtgcagatcgcaccgcgcccgcagatgcccgccgaataccgcaagctcgcggaacaggcgcggcgcctgacggtgaacttccgcttccaggaaggcagcgcgctgctcgacaacaaggcactgctcgacgtacagcgtttgctggactacctgcggcaaaatcggaagttgcaggagcgcaccgtgctggtgggcttcggcgatcccaagtccgacgccgagcgctcggtcctgctttcgcgcctgcgcgccatggccgtgcgccgcgaactggcccgcggcggcgtgagtttccgcgagatcgccggcttcggcgacgagttgccggtcgccagcaacgaccaggaactgggccgacagaagaaccggcgggtggaagtctgggtctactga

SEQ ID NO: 320558 - DNA, 1044 bp, Pseudomonas aeruginosa
atggcagctctgcatgcatttctcaccgaaccgttcctcggtacggctacctggttctggctggccttcctggccatcgtcatcgttctcctggtcctcgacctcggcgtgctgcaacgcgaccaccacgaaatcggcgtgcgcgaaagcctgctgctgtccgccggctacttcgcctgcggcctggccttcggcggctgggtctggtacgccttcggccccaccagcgcggtggagtactacaccggcttcctggtcgaacagtcgctatcgatggacaacgtgttcgtcatggcgatgatcttcagtttcttcggcatcccccgccgctaccagcaccaggtgctgttctggggcatcctcggcgccatcgtcctgcgggcgatcatgatcggcctgggcgccgcgctggtgaaggagttcgactggatcatgtacgtgttcggcgccttcctgctgttcagcggcgtgaagatgctgttcaacaagcacgaggaagaacccgacctcgagcacaacccggtgctgcgcttcctgcgcaagcacatgcgggtgaccaaggaactgcacgagcatcacttcttcgtccgcctgccggacgccagcggcaagctggtgcgctacgccaccccgctgttcttcgccctggtgctgatcgagctggccgacctggtgttcgcggtggacagcgtgccggcgatcttcgccatcacccaggacccgttcatcgtctacacctcgaacatcttcgccatcctcggcctgcgcgccctgtacttctcgctggcggcgatgatccaccgcttcgtctacctgaagtacgccctggccctggtgctggtgttcatcggtgcgaagatcatgctccacggtgtgatcggcaagattcccgccggcctctcgcttggcgtaaccttcggcctgctggcgggcggtatcctgctctccctgctgaagacccgcacgccgaaagccaccgtcgaggacaaggccgaaccgaatgccgaacacgctctggatcgaacgtctggacacccacgctga

SEQ ID NO: 320559 - DNA, 192 bp, Pseudomonas aeruginosa
atgccgaacacgctctggatcgaacgtctggacacccacgctgaacctttctggcgggtccgcctcggcacgcgtgggatctgcttccgcaacgagcgggcggcccgcgagttcgccgccctgctgcacagccgtcgcgcgtggcagctgcaacgcaacgccgaggaaaaaggggcagactccccggaatga

SEQ ID NO: 320560 - DNA, 1230 bp, Pseudomonas aeruginosa
atggatttcgcctattcccccaaggtccaggagctgcgtgaacgcgtcagcgcgttcatggaagcgcatgtctatcccgccgaggccgtgttcgagcgccaggtcgccgagggcgaccgctggcagccgacggcgatcatggaagagctgaaggccaaggccaaggccgaagggctgtggaacctgttcctgcccgagtccgagtacggtgccgggctggccaaccacgaatacgcgccgctggcggaaatcatgggccgttcgctgatcgggccggaacccttcaactgcgccgcgccggataccggcaacatggaggtgctggtgcgctacggcagcgaggagcagaagcgcacctggctggaaccgctgctgagcggcgagatccgctcggccttcgccatgaccgaaccgggcgtggcctcgtccgacgccaccaatatggaggcgcgcgccgagcgccagggcgacgactgggtgatcaacggacgcaagtggtggacctccggcgcctgcgatccgcgctgcaagatcctgatcttcatgggcctgaccaacccggacgcgccgcgccaccagcagcactcgatgatcctggtaccggtcgacacccccggggtgaagatcctccgtccgctgccggtgttcggctacgacgacgcgccgcatggccatgccgaagtgctgttcgagaacgtgcgggtgccctacgagaacgtcatcctcggcgagggccgcggtttcgagatcgcccaggggcgcctcggcccgggccgcatccaccactgcatgcgctccatcggcatggccgagcgcgccctcgaactgatgtgcaagcgcgcggtcagccgtaccgcgttcggcaagccgctggcgcgcctgggcggcaacatagaccacatcgccgactcgcggatggagatcaacatggcgcgcctgctgaccctgcaagccgcctacatgatggataccgtgggcaacaagatcgcccagagcgaaatcgcccagatcaaggtggtggcgcccaacgtggcgttgaaggtgatcgaccgggcgatccagatgcacggtggcgccggggtttccaacgacttcccgctggcctactggtacgccatgcagcgcaccctgcgcctggccgacggtccggacgaggtgcaccgcgcggcgatcggcaagttcgagctgggcaagtacgtgcccagggagatgctgcgcagcagccgctga

SEQ ID NO: 320561 - DNA, 933 bp, Pseudomonas aeruginosa
atgaacctgaacaaagtcgacctgaacctgttcatcgtgttcgatgcgatctataccgaagccaacctgacccgcgccgggcagatcgtcggcatcacccagccagccgtatccaacgccctttcccgcctgcgcgagaccttcaacgacccgctgttcgtgcgcaccgcccaaggcatggtgccgacccctatggcgcagaacatcatcggcccggtgcgcaacgcgctgcagttgctgcgggtttcggtgcaggagagccgcagcttcgatccgcagcaggcgaacaagacctaccgcatcagcatgaccgacctcaccgaagcggtcatcctccccccgctgttccagcgcttgcgccgcctggcgccgaacgtgcatatcgagagcttcctcgccaagcgccgcgagaccaccaaggaactcgccgccggccgcctcgacttcgccgtcgacgcgccgctgaacaccgatccccaggtgcgccacgtcaagctgatggaggaccgctacgtctgcgccatgcgccgcggccacccactggcgggcaagcctaagctggccctggacgattacctgggcctgacccacatccatatttccagccgccgcagcggcctcggctacatcgacctggcgctgggcaagatgggcatccagcgcaagatcgcgctgcgctcgcagcactacctgatggcctccacggtggtccagcagaccgacatggcgatgaccgtgccggaacgcttcgcccgtcaccacgacctgcactacgcggtgctgccggtgagcgacgtgccgaagctggaaacccacctgtactggcacgagagcaccgatcaggacccggccaaccgctggatgcgcgagcagatcatcgagctgtgccagcaggtcaccgcgcgcgagaacaaggcggcacagccggcgtga

SEQ ID NO: 320562 - DNA, 1128 bp, Pseudomonas aeruginosa
atgattccctgcgaagaagagatccagatccgtgacatggcgcggcagttcgcccaggaacggctgaaaccgttcgccgccgactgggaccgcgagcaccgtttcccggccgaggcgatccgcgagatggccgacctcggcttcctcggcatgctggtgcccgaggaatggggcggcgcgcagaccgggcacctggcctacgccatggccctcgaggagatcgccgctggcgacggcgcctgctcgaccatcatgagcgtgcacaactcggtcggctgcatgccgatccacaagttcggcagcgccgagcagaaggagcgcttcctccgtccgctggcccagggttcgatgctcggcgccttcgccctgaccgagccgcaggccggttccgacgcgagcttcctgaagacccgcgcccgccgcgacggtgaccactacgtgctgaacggtgccaagcagttcatcacttcgggcagccacgcggggatggtgatcgtcttcgcggtcaccgatccggatgccggaaagcgcggcatcagcgcgttcatcgtgcccaccgacacgcccggctacgaggtggtgcggatcgaggacaagctcggccagcacgcctcggacacctgccagctggccttcaacgacctgcgtatcccggccacgctgcgcctgggcgaggagggcgagggttaccgcatcgccctggccaacctcgaaggcggccgcatcggcatcgccgcccaggcggtcggcatggcgcgcgcggcgttcgaggcggcgcgcgactacgcccatgagcgggaaaccttcggcaagccgatcatcgagcaccaggcggtggccttccgcctggccgacatggccacccgcatcgccgtggcgcggcagatggtccaccacgccgccagcctgcgcgaagccggcctgccgtgcctgaccgaagcctcgatggccaagctgttcgcctcggagatggccgaggaagtctgctccgcggcgatccagaccctcggtggctatggctacctcaaggacttcccggtggaacgcatctatcgggacgtgcgggtctgccagatctacgagggcaccagcgacgtgcagcgcctggtgatcgcgcgcagcctgtag

SEQ ID NO: 320563 - DNA, 1191 bp, Pseudomonas aeruginosa
atgacccgcgaagatccgatcgtcatcgtcagcgccgtccgcaccccgatgggcggcttcctcggcgacttcaaggacgtcaacgccgctaccctcggcgccgcggcggtgcgcgccgcggtggagcgggcgcgcctgcaagccgacgaagtggacgaggccgtgctcggctgcgtgctcgccgcgggccagggccaggcgccggcgcgccaggcggtgcttggcgccggactggcgcgcggcacgccgtgctcgacgctgaacaagatgtgcggctcgggcatgaaggcgctgatgctcgcccacgacacgttgctcgccggcagcgccggggtcgcgctggccgggggcatggaaagcatgtccaacgcgccctacctgctggagcgcgcccgtagcggctgccgcatgggccacggcaaggtgctcgaccacatgttcctcgacggcctcgaagacgcctacgacaagggccgcctgatgggcaccttcgccgaggactgtgccgaggcctacggcttcacccgcgaagcacaggacgagttcgccgtggcctcgctgacccgcgcgcagcaagccatgcgcgacgggcgcttccaggccgagatcgtgccgctgacggtcaccgccggcaagaccgagcgcctggtggatagcgacgagcagccgccgaaggcccggctggacaagatcccgaccctgaagccggcgttccgcgaaggcggcacggtgaccgcggccaactccagttcgatttccgacggcgccgccgcgctggtcctgatgcgcctttccgaggccgagcgacgcgggctcgcgccgttggcggcgattcgtgggcatgcttcgttcgccgacgcgccgaacctgttccccaccgcgccggtcggtgcggtgaagcgcctgatgcagcgtaccggctggtcgctgggcgaggtcgacctgttcgaggtcaacgaagccttcgccgtggtcggcatggcggcaatgcgcgacctcgacctgtcccacgagcgcctcaacgtccacggcggcgcctgtgcgctgggccatccgatcggcgcgtccggcgcgcggatcgtcgtgaccctgctcaacgccctgcagcagtacgacctggaacgcggcgtggcggcggtctgcatcggcggcggcgaggcgaccgcgatcgccgtcgagcgcttgcgctga

SEQ ID NO: 320564 - DNA, 768 bp, Pseudomonas aeruginosa
gtgcgtatcgaaaatcgagtgttcctggttaccggcggcagctccggcctcggcgccgccaccgcgaagatgctggtggagcagggtggcaaggtggtgctggccgacatcaacgccgaggccggcgcggccaaggccgccgagcttggcgcccaggcgcgcttcgtcagggccgacatcgccagcgaggccggcggccgccaggccgtggccgctgcactggaggccttcggcggcctccatggcctggccaattgcgcgggcgtggcgccggccgagaaggttctcggacgcaatggcatccatgccctggagagtttccgccgggtcatcgacatcaacctggtgggcagtttcaacatgctgcgcctggccgccgaggccatgtcccagggccagccggacgagggcggcgagcgcggggtgatcgtcaataccgcctcggtggcggcgttcgacgggcagatcggccaggccgcctattccgcctcgaagagcggggtggtcggcatgaccctgcccatcgcccgcgagctggcgcgcttcggcatccgggtgatgaccatcgccccgggcatcttcgagacaccgatgatggccggcatgccccaggaggtgcgcgactccctcggcgccagcgtgccgttcccgccgcgcctggggcgtccggacgaatacgccgcgctggtccggcagatcatcgagaacagcatgctcaacggcgaagtgattcgcctcgatggcgccatccgcatggccgcccgctaa

SEQ ID NO: 320565 - DNA, 1668 bp, Pseudomonas aeruginosa
atgcgcgactacgccaccactgccgccgggttcgacttgcagcggaccgccgccgccacgctttccggtacgctccaggtgctcaacgcctgcgtcgaatgctgcgaccggcatgccctgccgggacggatcgcgttgttctgggagggcaaggatggcagtcgcgccagctataccttcagcgagctgaaagcgctctccggacgtttcgccaatttcctccaggcccagggcgtacgcccgggcgactgcgtcgccggcctgttgccgcgcacgcccgagcttctggtcaccatcctcggcgcctggcgcctgggcgcggtgtaccagccgctgttcaccgccttcggcccgaaggctatcgaacaccgcgtggcgaccgccggcagcaaggtgctggtcaccgatgcggccaaccgcgacaagctcgacgaactcgccgatccgcctctggccgtcaccgtcggcggaccgaaggggcagggcatccgtcgcggcgatttcagcttctgggccgagctggagcgctatccggccgaattcgagccggttccgcgcagcggcgaggatccgttcctgatgatgttcacctccggcaccaccggcctggccaaacaggtgccggtgccgctcaaggcgatcctcgccttcgtcggctacctgcgcgaggcggtggacctgcgccccgaggacgccttctggaacctcgccgatccgggctgggcctacggcctctactacgctgtcgccggtcccctcgccatgggccatccgaccaccttctacgaagggccgttcagcgtggaaagcacctgccggatcatccgtgactacggcatcaccaaccttgccggatcgcccaccgcctatcgcctgctgatggccgccggcgcggccgcggaaactgcgctgaaggggcgcctgcgcgcggtcagcagcgccggcgagccgttgacgccggaggtgatccgctggttcgccgacaggctcggcaccaccatccacgatcattacgggcagaccgagctgggcatggtgctgtgcaaccaccatgccctggcgcatccggtgcgggtcggcgccgccgggttcgcctgtcccgggcaccgggtagtagtgctggacgacgatctcaacgaactgccgcccggccagccaggcatcctcgccctcgaccggcggcgttcgccgctgatgtggtttcccggctaccagggcctggaaaccgcagccttcgtcggcgactactacctgagcggcgataccgtcgaactcaacgaagacggcagcatcagcttcgtcggccgcgccgacgacgtcattaccacctctggctaccgggtcggcccgttcgatgtggagagcgcgctgatcgaacacccggcagtgatggaggcggcggtgatcggcaagcccgacccggagcgcaccgaactggtcaaggccttcgtcgtgctctgcgccggccaccggccgacgccggaactggcggacgcattgcagcgatacgtgcgccagcgcctgtcggcgcacgcctacccgcgggagatcgagttcctcgaggaactgccgaagactcccagcggcaagatccagcgctttctcctgcgcaaccaggagatcgcccggcaacgcgaggcggccccacgggcggccgccgcgaactga

SEQ ID NO: 320566 - DNA, 1086 bp, Pseudomonas aeruginosa
gtgaagaacgacggcgagactcaggcgagcaccaagggcaccatctcggtgcgcctggtcggcgaggcgctggtggagtggcgccggcagggcggcgaggagggggaggtcctccaggccgccggtatcgatccgcagctgctcggcaaaccctacgcgcgggtcacctcgcacgcctattcgcggctctggctggatctcgctcggcgcatggacgatgagttcttcggcatggactcgcggcgcctgaagagtggcagcttcgctttcatgagccgctgcgcgatccacgagcagaccctggagccggcgctgaccggcatcctgcgattcctctgcctgcagttcgacgacttccagccgcgcctgcagcgccgcggcggcctggcggaaatcgtcctcgacgaggcgccgggccggtacgggcgagcgctgtcctacttcaccctatggatgatcacccatggcctggcctgctggctggtcggccggcgcatcccgatcctggccatcgacctgcgctgtccgcagccggactacatcgaggactaccgggtgatgttcagcgacaacctgcgtttctcccgtcccctcagccgcctgctgttcaatgccgactgcctggccttgccggtccgccgcgacaagcgggagctgcggcgcttcctgctcggcgcgccggccaacatcctggtccgctatcgcgatccgcagagcctggcggcgcggatcaaggcctacctgcgcagcctgcggccgggacgctggccggacgcggacgcgctcgccgggcatttcttcatggcgccctcgaccctgcgccgcaagctgtccctggaagggcagagctaccaggcgctgaaggaccagatccgccgcgacctggccatcgcgcggctggacgccggcgcggcgaatttcgccgaactggcgctggagctgggcttcgccgatggcagcgcgttccacaaggcgttcaagaagtggaccggctcgacccccgggcagtaccggacgcaggtcgcggcggaaaccgcgtcggccgagtcgtcaggcgtcttgtccgaaacgctcggccatcgatag

SEQ ID NO: 320567 - DNA, 1695 bp, Pseudomonas aeruginosa
atgaatcagccgagctatacctcgggtcgccaggatgtcgccttgctggcgaccaccgtcggcgacgccttcgatgccaccgtcgcgcgtcatgccgagcgcgaggcgctggtggtgcggcatcaacgcctgcgctacagctggcggcaactggcggagcgggtcgatgcctacgcccgcgccttcatcgccctgggcctgcgccccggcgagcgcctggggatctgggcgccgaactgcgccgaatggtgcattacccagttcgccagcgccaaggtcggtgcggtcctggtgaacatcaacccggcataccgcagcagcgagctggaatacgctctcaagcagtccggttgcagttggctgatctgcgccgacgccttcaagaccagcgactaccacgcgatgctcggcgacctgctgccggagctggcgcgggcgcgtccgggcgaactggccagcgagcgcctgccggaactgcgcggcgtgatcagcctggccgagcgggcgccggcgggcttcctgcactggcagggcctgccggggctggccgccgcggtaggcgccgaggaactgcgccagcgccaggcctcgctacagttcgacgagccgatcaacatccagtacacctccggtaccaccggcttccccaagggcgccaccctcagccactacaacatcctcaacaacggctacatggtcggcgaaagcctcggactcggcgcggaagaccgcctggtgatcccggtgccgctgtatcactgcttcggcatggtgatgggcaacctcggctgcgtcacccacggctcgaccatgatctacccggcgcccagcttcgacgccgaggcgaccctgctggccgtggccgaggagcgcgccaccgcgctgtacggggtaccgaccatgttcatcgccgagctggatcatccgcgccgccgcgaattcgacctttccagcctgcgcaccggaatcatggccggcgccacctgcccgatcgaggtgatgcggcgggtcattggcgacatgcacatggccgaggtgcagatcgcctacggcatgaccgagaccagtccggtgtcgctgcagaccggtccggacgatggcctggagctgcgcgtgaccactgtcggacgcacccagccgaggctggagagcaagatcgtcgaccagacgggcagggtggtgccgcgcggcgagatcggcgagctgtgcacccgcggctacagcgtgatgctcggctactggaacgacccccaggccaccgccgaggccatcgacccggcgcgctggatgcacaccggcgacctggcggtgatggacgacgacggctacgtgcggatcgtcgggcgcagcaaggacatgatcatccgcggcggcgagaacatctatccgcgcgaactggaggagttcttcttcactcacccggcggtggccgacgtgcaggtgatcggcatccccgacgagcgctatggcgaggaaatcgtcgcctggatcaagctgcatccgggccaccacgccgatgacgaacagttgcgggcgttctgcaaggcgcgtatcgctcacttcaagatcccgcgccacttcaagttcgtcgacgagttcccgatgaccgttaccggcaagatccagaagttccgcatgcgcgagatcagcatcgaagagattcgcctactcgcgctgcgccaggggcgcgattga

SEQ ID NO: 320568 - DNA, 693 bp, Pseudomonas aeruginosa
atgaccccggaaatcgccatcggcctggtgacggccctcggcctcggtgcgctggtcggtctcgagcgacaatggcgacagcgctcttccggcatggccacccacgcgatggtcgcactcggtgcggccagcttctcgatcctgccgctgttgctcgacaacgaggtcagcgtgacccgaatggcggcccaggtagtcagcggcatcggttttctcggcgccggcgtgatcatgcgcgacggcctcagcgtacgcggcctgagcactgcggcgagcatctggagcaccggcgcgatcggcgtactggccggcagcggtttcatcctggcggcctgcatgacgaccgcgctgatcgtcatcgccaacctgttcctgcccgctctcggccgggtggtggaccgccacacctcgggcgaggccgagcaggagcgcttctaccagatcagcgtgtcctgcgaggcgcgcaacgaagcgctggtgcgcatgcagttgctgcaacgcatgggcgacaaccgcctgaacctgcagagcctggaaagccacgcgctgaaaggcagcggcaacgtggaagtgaacgccgtggtgttcaccctgcacaaggaggactcgctggtggaacagatggtcggcgagctgtgcctggcaccgcaggtcaccgccgccagttgggtgatgaatcccgccgcggaatga

SEQ ID NO: 320569 - DNA, 147 bp, Pseudomonas aeruginosa
atgcgcttgcgttgtttcttgcgaggttgccgctgggacgaaggtagcctggtcacggtaggccccgacctgatgctgcgccaacgttgccggcgttgcggcgcccatcgctatctcagcgtcgaggcgccgcccgaggaagcctga

SEQ ID NO: 320570 - DNA, 543 bp, Pseudomonas aeruginosa
atgagaagcaaggcgtccggcttggcgctggtggtagtggcggggcttgtggcgggttgcgccagcagtggctatcagcccgaggtcgactggccggccggctggcaggtgatcaccgagagcatcccacccgaggccagcgacgtggagcaactgggctcccggcaactggcgaccaagctcgggccgggaggcgagaaggaagccagcatcgagttgctcagcctgaagatgatggaagaggagtcggtggagatcgacggccagttccagagtgtcttcgatgtcgtccaatcgggctaccgcaaggccgggctgggctcgcgctgcaccacaccgatccgctcgaacctcggcggcctggcatcgctggagacccactgccggatcagccagggcaacgaggtgctgctgacccagatcgtggcgatggccctgggacagcgcgcgatgtactccctggtatataccgccagtccggccaacagcgtggtctaccggcagagctacctgcgcacccgggccagcctggtcctgcgctga

SEQ ID NO: 320571 - DNA, 231 bp, Pseudomonas aeruginosa
atggctgaaccccaggacaagtacacccggcgcacaggcaggacctgggcggacgaccaggcgacctacaaccgtctgcgcgaagaagccgacgccgctcgccagaagctgcgcgaaagcggctacagcggcgccgagtacgaccagttgcgtcaagccgccttcgatctcaaccgcaaggccaaccagtactgggagcagatgctcagcgacctgcgccaggaagactga

SEQ ID NO: 320572 - DNA, 288 bp, Pseudomonas aeruginosa
atggatgtccctcccaccgttcaggatgaacaggccgtttcccgccagttgcactcgttgagtgtgcgcaatctcgctcacctggccgctgccctgacccagctcggcttcgagctgtcgcgcagctccgaccctggcacccgccaggcggccaatgccttcatcggccagttggccaatatcaaccaggacattgatcgacagatcgagctgctcagcgcgctggacgccgacaacgtggggtttcgcctgctggacgaggtgcaatacccggatgcgcccgaatga

SEQ ID NO: 320573 - DNA, 1617 bp, Pseudomonas aeruginosa
atgctgcaacaatccctacgtgcgcaaatccttgtcctgctcggcggcagcctggcggcgctgctactcatagccctggcctgcttcggctcgctgaccggcgacgtacgcgcctaccgcgagctgctcggcggccccgtgcgggcggcgcaactgatcgacgaggccaacctgcaattccgcggccaggtccaggaatggaagaacgtcctgctgcgcggacgccaggcagaggcccagacgaaatactggagccagttcgaagcccaggagcgagcggtgcaggacatcctcgggcgcctgggcagcgtggccgaaggcgagttgaaggatcgtgtcgagcgcctgcgcgaagagcaccggcgactcggtacggcttaccgacaaggcaggcaacggttcctcgaggcgggcgccgaccccatcgccggcgaccaggcggtgaccggcatcgaccgcgccaccaccgcgcagatgcaggccctgcgcgacgaactgcaccaggccagtgatctccattcctcctccatcagcgcggaggcccggcgcaccatgctgctcggcagcctggtgctgatcggcgccagcctggccgtcgccctgctcagcctgtggctggtcaaccgcaacctggtccgtccggtgcaacgcctgatcgagcacatcgcccagctcagccatggcgacttcggcgagcgcatcgagatccggcgcaaggacgaactcggcaagctggccctggccgccaacaccctgcgcgacttcctggtggacatcttcgaccggctgcggcgcagtacccgcgacctggacagcgccagcggctcgctgaacgcgatcgccagcctgatggcggccggtacccgcgagcagttcagccgcaccgaccaggtcgccacggcgatgcaggaaatgtccgccaccgcccaggaagtggcgcgctacgccggcgacgcggccagggccgccgacgaggcggacgattccgcccagcgcggcgaagacgtgatggaagaaacgattcgcagcatcggcgagatgcgcaaggagatcgaccatacggtggaggtcatccgccaattggaaagcgatagcggcaggatcggcaaggtcctcgacgtgatccgtggcatcgccgagcagaccaacctgctcgctctcaacgcggccatcgaagccgcccgcgccggcgatgccggccgtggcttcgcggtggtcgccgacgaggtccgcaccctggcgcagcgcaccgccgagtccatcgccgagatccaccagatcatcgataccgtgcagaacggcgcggtgaatgccgcgcgcgccatcgaaagcgggcagtcgcgcagcgaggccggtgccgagcaggttgccaacgccggcaccatgctgcgccagatcaccgcctcggtcgaatcgatccgcgacatgaaccgccagatcgctaccgccgccgaggaacagaccgccgtggccgaggacatttcccgcaacctcacggaaatcgcctcgatcgcctccagcaaccaggaacaggtggagcagaccgaagccgccagccgcgatctccacggcctctccgcgcaactgggcgatgccctgcaacgcctgcgggcctga

SEQ ID NO: 320574 - DNA, 513 bp, Pseudomonas aeruginosa
atgttcaacactcgttctgtgctcgcgctggtcgtgagcctgtccctgatcggcggtacgcctgccgtcctggccgacccgggcaatggcaagggcaacccgcacggtaaccagatggacggcggaaagggtaacaagggcaacaaaggcaaccagggtggccacgacaaccatggcggccccggcaacaagggcggcggcgccggccagaagggcaacggcggcggcaactgggactcgggaccgcgtatcgacgtcggcggggtacgggtgatcctcggcgacaaccgcggctactggaacccggggccggccctgccgcccggcatccagaagaacctggcgcgcggcaagccgctgccgcccggcatcgccaagaaactcgacggccgcctgctaggccggctgccgcactacgacggctacgagtggatgcaggccggcaccgacctgctgctggtggcggtggcgaccgggctgatctacgaggtgctggacaacgtcctcgactga

SEQ ID NO: 320575 - DNA, 1488 bp, Pseudomonas aeruginosa
atgctacagacgctgaaacagaactggttctccaacctccgcggcgacctgctcgccggcctggtcgtcgccctggcgctgatccccgaggccatcgccttctccatcatcgccggggtcgacccgaagatcggcctgtacgcctccttcagcatggcggtggtgatcgccttcgccggcggccgtccgggaatgatctccgccgcgactggcgccatggcgctgctgatggtcaacctggtgaaggaccacggcctgcaatacctactggcagcgaccctgctctgcggcgtgctgcagatactcgccggctacctgcgcctgggttcgctgatgcgcttcgtctcgcactcggtggtgaccggtttcgtcaatgccctggcgatcctcatcttcatggcccagctacccgaactcaccgatgtcggctggccggtctacgcgatgaccgccgcgggcctggcgatcgtctacggcttcccgcacctgccacggatcggccggctgctgccctctccgctggtatgcatcctggtcctcaccggcatatccatctacctgggcctggacatccgcaccgtcggcgacatgggtcagttgcccgacagcctgccgctgttcctctggccggacgtgccgctgaacctcgacaccctgctgatcgtcctgccctactccgccgccctggcggtggtcggccttctggagtcgctgatgaccgccaccatcgtcgacgagatgaccgacaccggcagcgacaagaaccgcgaatgcaagggccagggcctggcgaacatcgccaccggcctgctcggcggcatggctggctgcgcgatgatcggccagtcggtgatcaatgttaaatccggcgggcgcagccggctctcgaccctggtggccggcgtcgcgctgctgctgatggtggtgttcctcagcgactgggtcgggcggattcccatggcggccctggtggcggtgatgatcatggtatccatcggcaccttccgctgggagtcgatccgcaacctgaagcgctacccgctatcgaccaacctggtcatgctggtgacggtcggcgtggtcctcgccacccacaacctggccttcggcgtggtcgccggcgttctcctggcctcgctgttcttcgccaacaagatcgggcactacctcgatatcgacagcgaacgctccgccgacggcacccgccgccactaccaggtgagcgggcaggtgttcttcgcgtcgtccggcaggttcgtcgctgccttcgacctgaaagagacactggagcatgtgctcatcgacctgcgccacgcccacctgtgggacgtcaccgccgtcgcggcactggacaaggtggtcctgggctttcgccagcgcggcgtgcaggtcgacgtgctgggcctgaacgccgccagcgcgaccctggtcgatcgcttcggcgcctacgacaagccgggcgccgtggacattctctccgatcactga

SEQ ID NO: 320576 - DNA, 828 bp, Pseudomonas aeruginosa
atggtgcatgaccttctccgagatcgtgcggatctggaggcgcgttggaacccttccgcctacatgcagttcgcccggttgcgccagcggccggtggtcgagttgctggaccatatcgagctgtgctgtccggaacggatctacgatcttggctgcggaaccggcatcgccaccgaattgctcgcccgccgctggccgctggccgaactgcacggcgtggacagctccgtggagatgctcgaggaggccgcgcgcttgccgatcaaggccagttgggaacgcgccaacctgcgccactggtgcgccgagcgccctgccagcctgctgttcgcagcggcggtactgcactttctcgaagatcacggcaagctgctgccacgcctgctggggcaactgactccgggaggctgcctggcggcgcacatgccgaactggcgcgatgcttcctggtatcgcctgatgctcgatgcgctggacagtgcgggccccggtggtgcatcgctgggcagccccgcgttgcgctaccggctgcatcggcgcaatgtgctgtcgctggacaactactaccggctactggcgccgctgacggcggagctggacatctgggagaccgagtacctgcaagtggtggacggcaacgacccgatcttcgattggatcaaggtctccgccttgcgtccggtgctcggcgaactggacgaagaggcgcgtcggcgcttcctcgaccgttacctggaactgctgcaccgtcactatccacgggaactggatggacgaacgctgttcccgttccgccgagtattcatcgtcgccagtctcggccgctga

SEQ ID NO: 320577 - DNA, 426 bp, Pseudomonas aeruginosa
atggatagccatcagcagccatacgcgtcgcaggcgcaggccgataccaccctgtttcccgagcagacccgcgagagtctccaggccctggccgtcaagttgcagccgctgatcgagggccaccgcctggacaacctggtggatctgctgtcactgctttcggatatcgtcgatctgctggacccggccatggtggacaggctggcgcagctcttcgagcaggtcaccagcgtcggttggtcagtcggcaacgcggtacgcgtggccaaggcggagctgctccgagagcagccgccaagcctgaaagacctgctgcggttgttgcgcgacgccgatacccggcgcggcttggcgctcgtgctgggtagcttgcgcagcctggggcgccaactcgccgcggagcaggaggttgcccatggtgcatga

SEQ ID NO: 320578 - DNA, 1188 bp, Pseudomonas aeruginosa
atgcaacgaatcgtcatcgtcgggggcggagtgggcggcaccatgctcgccaacctgctggtcgtccggctctacccggagatactcggcggcgaggtgcaggtactgctgatttccgactcgccggatcactactacaagccggccttcatgtacgtcgccttcgagcaattcttcctcgaagatctgaaacgaccgcagcgctcgctgctgcggccggaagtgatgttccagctcgaccgggtcgaccgtttcgatttcccccgccaggaactgcagacccgcagcggcaggcgccatggctacgactacctggtgatcgccacgggttgcgtgccggctccggaacgtatcgaggggctgaaagaggctggcgaccatttctaccagtaccagccggcccgtcggttggccgagcggctggcgagcctggagtcggggcgggtattcatcacggtgagtttcccgaggacgccgaacgtgccccaccagtgcgggatcgcgcctgtggagacgaccctgatgctcgacgactacttgcgccgccggggtgtccgcgaacgtgtcgagatcgtctacacctatcccaccacggcccagttgctgcgcaactgtctgttcctgcaacgaccgacctgcgaaatcctgccgagcctgttcgagcaacgcggcatccgtttccagcgcggttttaccctggccagggtcgacccggagcggcgcatcgcctattcggaggagggcgacgagcagccgttcgacttgctcatggcgacaccgccgatccacgccgtggatgcggtcagggagtgcggcctgtcccaggccgccgccgatgaaggctggttgccgacgaaccatgaaaccttgcaggtgtatggcgtcgaccgggtgtataccctgggcgataccgtcgatctgccggtgagcaaggccggtggggcctgtcacaaccaggcgccggtagttgccagcaacatcgctgccgagattcgtctcggtaagccctgcgcgatctacgatggacgagtccaggctgtcgcgcagatgggcctgaacgccggaatgccgctctggtacgactatcggcacgacgtaaagccgaccccgccgaccaaacttggcgggttgttgcgccagggtttcaatcgcggcctgtactgggccgtagcccgtggaatgctttga

SEQ ID NO: 320579 - DNA, 210 bp, Pseudomonas aeruginosa
atgtccgacacgctctccttcgcctcgcgcctctgcaagttcgtcatccttctcgtcatcctgctgatcggcggcgccagcctcttcctgtggtggctggggcgaccttaccaggacgccatgtccgccttcgtcccgttgctcatgccgatgctcgtgctggtgctggcgttcgatacgttccgggccctcgcccgaacgaggcgctag

SEQ ID NO: 320580 - DNA, 1764 bp, Pseudomonas aeruginosa
atggcaaccccaccctatcccgaggacgagcattcgagacaggcctacgtcgaccaactcggtctgctggaagaaggtgcggacgaggtattcgaggaaatcctcgccgccgctacgtcctacttccagacgcccatcgcgctcatttccatcctcgaccatcagcgccagtggtttcgcgcgagcatcggcctcgatatccggcagacgccgcgacgggattcgttctgcgcctatgcgatcctgggcaagggagtcttcgaggtggccgacgccaccctcgacccgcgcttccgggacaatccctatgtgcaaggcgaaccgcgcatccgcttctacgccggggctccgctggccaccgcggaaggtctcaacctcggcagcctctgcgtcatcgaccgggaaccacgcgggccgctggccgagcgggacgtcgccatgctcgagcacttcgcccggctggtgatggcccgtatccatacgctccgctcgaccaactacatcgacgagccaaccggcctgtacaaccgtctccgcctgcaggaggacgtttccctgcgcctgcagcgcgacggcgccctcaccgtgatcgccgccgacctcctgcccctcgccctgctgaataccatcatccgtacgctgggctatcccttttccaacgacctcatgctcgaggcgcgcgaccgcatccgcgcggaactgccggatttcactctctacaagatcagcccgacgcgcttcggactgctcctgccacggcagcaacaggaagaaaccgagtcggtctgccttcgcctgctgcgggccttcgaaagccccgtcgtatgtcgcgggatcccgatcaaggccaacgtgggcctcggcgtactaccgcttgccgacgatctcctcgacggcgatcaggactggttgcgcctggtggtcagcgcggccgacgacgcccgcgaccgcggtgtcggctgggcccgctacaacccgccgctggaccaggcccagcagcgtgccttcacattgctgacctcgctgtcccaggcgatcggaaccgaagaaggcttccatctggtgtatcagccgaaaatcgacctgccgacaggcaggtgcacgggcgtggaagcgctgctgcgctggcggcacccgcaactcggcttcgtcagccccgccgaattcgtgcccctggcggagaaaaccgcactgatgcgccccctcagcgactgggtgctgcgccatgccatggcccagctggcgcaatggaacgcacggaacatcccgctcaggctggcgatcaacgtatcggcatcggacatggaagacagcagcttcctggaagaggccgtcagactcgccaaaacctacgacatcgacctttccgccctcgagctggaattcaccgaaagcgtactcatccgcgacgcctcggcggtcggctcggtgctgctgcgtgcccgggagcttggcatgggcatcgcggtggacgacttcggcaccggctacagcaactggacctacctgcgcgatctgccaatcaccgccatcaagctcgaccaatcgttcacccgcgacctcgccggctcgccgaaggcgcagagcgtcacccaggcggtgatcggcctggccagccagttgggttatcgggtggtcgcggaaggcatcgagacccacgacaccttccacctgctgcaggcctggggctgccacgagggccagggctatctgatcgcccagccgatgctgccggagcaactggaggactggctgcggcgttag

SEQ ID NO: 320581 - DNA, 408 bp, Pseudomonas aeruginosa
atggagcacccatacaagaccccagaggcggacctggccgaggagaagctgactgcgagaggtttcctttccggcgggcagccgctgtggaaggcattctggctgttcttcgctgcgggtttcttattgctcagcgtcgccgccaggcaggcgatggtggccattgtcgatccgctgatgcaggaagctcccggcgaacatgcggtggccctgaccttgtggggaatggtcggtgtcgagctggttaggctggcctacctgtgcctcagcctcgtcgtggtctggcgctgcgggcgcaattcccgctgggtggctgcgcgccatgccagcagggcggtgctgttggcactgatactcctgaccctttactcgatctatctggtctgggccttgctcgccagtccctga

SEQ ID NO: 320582 - DNA, 147 bp, Pseudomonas aeruginosa
gtgtgcctcagcatcgaggctggctgcgattacagttgcgatggcattctcagcgagaagggcggcacgcaatcgatcctggtttccggctcctgtcgcgatcacatccgcaaggtggaaggcacgcaggtctcctgcccgcgctag

SEQ ID NO: 320583 - DNA, 369 bp, Pseudomonas aeruginosa
atggcttggaaaggtgaggttctggctaataacgaagcagggcaggtaacgtcgattatctacaatccgggcgatgtcattaccatcgtcgccgccggttgggccagttacggacctacccagaaatgggggccgcagggcgatcgggagcatccggaccaagggctgatctgccacgatgcgttttgtggcgcactggtcatgaagattggcaacagcggaaccattccggtcaataccgggttgttccgttgggttgcacccaataatgtccagggcgcaatcactcttatctacaacgacgtgcccggaacctatggcaataactccggctcgttcagcgtcaatattggaaaggatcagtcctga

SEQ ID NO: 320584 - DNA, 1377 bp, Pseudomonas aeruginosa
atggaggcgttacccatcaggaaccggcgcttgctggtgatcgatgagcggcaggcggatcgagaccgtgtatgcgggttgttgcagggaacccgagaggccgaatcgcctcccgtggcgcctgagcggggctaccaggtggatacggcgggaagcgccgaggaggccttggggcggatacgctcggccctccaggccgatgcgccgtatgccgtggtgtttctcgggatgtcgtcggtaggcgcggatattcccgttctcgagcggttctggcgtctcgactcccgcttgcaggtcgtggtgcatgcgcctcccgccgattttccgctattggcgccgtgggctgcggaagagcgcctgctgctcctcggcctgcctttgcagggacaggaggtccgccagatggccggcaatctcagcgccaagtggaacgtgacggctcacctccagttgcagatgagccggatggaggctgccatccaggagatcacccgggaagtcggccaggccaaggaggcgctggagaaagagatcggcgagcgcaaggaactggaaagccaactggtgcagacggagaagcttgcctcgatcggccacctggccgccggcgtcgcccatgagatcaataaccccatcagctacgtttcctccaactacaccaccctggaggagcacgtcaggcgtttgctggaggtacttgaagcctatgaagaggctcgccccgcgatccgcgacgaggcgctggcaagacgcctggagcagctcggcgagcgggtcgaactggccttcgtcaaggaggatgtcgccgtgttgctgcgcgaatccagggaaggtatagggcgggtgcgcaagatcgtccaggacctgaagaacttctcccgcgtcgacgccgaggacgactggcagtggaccgatctgcaccaggggatcgagtcgaccctcaatatcgtcgccagcgaactgaagtaccgggccgacgtggtccgcgaatacggcgatctacccgaggtgaagtgtctgccgtcgcagatcaaccaggtggtgatgaacctggtgatgaacgcggcccaggcgatggggccggagcggggtcgcatcgtgattcgcacggggcataccgtggagcatgcctggatcgaggtggaagactcggggcagggtatctcccccgagatcctgccgcgcatcttcgatccgttcttcaccaccaagccggtaggcaaggggaccggcctggggttgtcgctctcctacggcatcgtccagaaacacggcggcaccatcgaggtacgcagccagccgggagtcggcagcgctttccggatcgtgcttcccctggaatcacccggcaacctgggcggagcccacggaaattaa

SEQ ID NO: 320585 - DNA, 1344 bp, Pseudomonas aeruginosa
atgaacgatagcgcacctccttccaacgagacggagatccgcttcagcgtactgctggtcgacgacgagccgctgatcctcagcagcctgcgccggctgctacgcaaccagccctacgacctgttgctggcggaaagcggcgaacaggccctgcaactgctggaaagccggcccgtggacctggtggtgtccgacgcccgcatgccgaacatggacggtgccgccctgctcgcggaaatccatcgccgcttcccggaaaccattcgcatcctgctcaccggccatgccgacctgccgaccatcgccaaggccatcaacgaagggcgcatccaccattacctgagcaagccgtggaacgacgacgagttgctgctgaccctgcgccagtcgctcgaatacctgtactccgagcgcgagcggcggcgcctggagcgacttacccaggagcagaacgaccgcctccagcaactcaacgccacgctggaaaagcgcgttcaggcgcgcacctccgaactgcagcagaccgccgacatgctcgacctcgcctatgaggagctaaagcgtagctacgtggtcggcaccgaggtcttctcgctgctggtcaaccagcgcctgcccaaggacaagcagaccaaccagcagatcatcgaactggtccgcgcctgctgtgccagcggtctcgtcgacgaatcggatggtcgcgacctggcgatggccgcggcgctctacaacatcggcaagctaagctggaacgacaccctgctcagctcgccctcggacctgctctatcaccacgaccgcgatcgtttccgcggctacccggagctcagcgagtcgctgctgatgtcgctggaaccgatgcaggacgccgcccgcctgattcgccatcaccaggagcactgggacggcagcggctatccggaccacctcaagggcgaggccattcccctgggctcgcgcctcttgaagctggcggtggatttcgtcgagctgcagcgcggactgatcctcgaacggcgcatgaatcgcgacgaagcactgatgtacatccgcaaatacgccggccggctgtacgaccccgagctgatcgaaccgttcatccaggtctgcgcgacgacccttgccgatgtcaccctggccgatccgcaagtccgtgcccatggcacccgcgacctggttccgggcatggtgctggcgcgcaacctcaccgccaacaacggcatgctgctgctcaacgcgggcaaggtcctgaacctggcgctgatcgagaagctgatcgccttcgaagcgatcgaaggcgcacgctacacgctgttcgtgcgcctcccggagtcgacgacctag

SEQ ID NO: 320586 - DNA, 1608 bp, Pseudomonas aeruginosa
atgaacattcggcagaggatcctcgcttcgggcgccatcggcatcgtggctgtggtgctgctcggcggggtcggcttctgggggcaattgcggttgggcaaggcactgtcggagaacgagctgagcgtcaatgcgctgcgcaaccacatggaaggcgacatgatgcacgacgccttgcgcgccgacgtcctcgcggcgttcgtggtccagcccggcgacggcgcggcggccgagcaggtccgccaggacctgcaggagcacagccagtggtttcgcaaggtggtcgagcagaaccaggggctgcctctcaacgacgccatccaccaggcgctggtcgagttgcggcccgacctggaagcctacatcggcgccgccgagagcatcgtcggcaaggcgttgctcgatcccgtggcggcacgggccgagctgccgcagttcgtccaggccttcaaggagctggaagggcgcaacgaagcgctcagcagcctgatcgagaaacacgtcgagcagaccaaccgggcgcgcgaagacagcatgcgctattccgcctggatgctcgcgggcggcatcctggtcgcctgcctggtccttggacagctctgtcgccagttgctgcgcgccgtcctgcagccgctacgcaaactggtttcatcggcccgggtgatcgcccagggcaacctgcaggagccgatcggtgtcgacagcgacgatgaggccggacagttgcagcgggccttgggcgagatgcaggagaacctgcggcagatgatcaccatcatccgccaggaaagcgaagagctccatgacacctcccaatccatcggccagacctcgcagtcgatcgtcgacggtgccagccaacaggccgacagcgccaccagcatggccgcgagcatggaagagatgatcaccaatatctcgcagatttccgaccacgccgacaacgccagggtgatctccgccaagtccgaggagctggccagcagtggcgggcaggtgatcctcaacgtggtggaagggatgagccgcatcgccgacgtggtcaaccagtcctccaccagcatcaccgctctcggccagtcgtcggacgagattcattcgatcatccaggtgatcaaggggatcgccgagcagaccaacctgctggcgttgaacgccgccatcgaggcggcgcgggccggagacgccgggcgcggtttcgccgtggtcgccgacgaggtgcgcgggctggcggcgcggaccacccagtcgacccaggagatcaccgcgatgatcgagcgcatccgcgccagcacggggcaagcgatcaacagcatggaggccggcgtgagccgggtcaacgagggggtgtcgttcgcccgccaggcaggggtgtcgatcaacgagatcctcgatggaacccgtcatgccgcgtcggtggtcgatgagatttcccagaccatccgcgagcagtcgcgcgccagtgatgaaatcgcccagcgcgtggaactcatcgcccagcgttcgcagcagaacacccaggcgatgcacgagatggccgccaccgccaggcgcctgaacgaggttgcagcgaccatgcgctcgtcggtggagcgcttcaagatctga

SEQ ID NO: 320587 - DNA, 1149 bp, Pseudomonas aeruginosa
atgtttgaaaatttctctcccagcaccatgctggccatcaagaagtacgcctattggctctggctgctgctggcgttgtccatgccgttcaactactggatggcccaggacagcgcgcatccggccttctgggcattttccctggtgattgcggtattcggcatcgggccgctgctggacatgctgttcggccgcgacccggccaaccccgacgaggaaacccagacgccgcagttgctcggccagggctattacgtattgctgaccctggccacggtgccggtgctcatcggtacgctggtgtgggccgctggcgtgttcgtcgctttccaggagtggggctggctcggccggttgggctggatcctctcgatgggcacggtgatgggagcggtggggatcgtcgtcgcccatgagctgatccacaaggactcggcgctggagcaggctgccggcggcattctgctggccgccgtgtgctacgcggggttcaaggtcgagcatgtgcgcggccaccatgtgcatgtgtctacgccggaggacgcttcgtcggcgcgtttcggccagtcggtctaccagttcctgccgcatgcctacaagtacaacttcctcaacgcctggcgccttgaagcggtgcggctgcgcaagaagggcctgccggtgttcggctggcagaacgaactgatctggtggtacctgctgagcctggcgttgctggtcggtttcggttgggcgttcggctggctggggatggttttcttccttggccaagcgttcgtcgcggtgaccctgctggagatcatcaactacgtcgagcactacggcctgcatcggcgaaagggcgaggacgggcgctacgagcggaccaaccatacccactcctggaacagcaacttcgtcttcaccaacctggtcctgttccatctgcaacggcattccgaccatcatgccttcgccaaacgcccctatcaggtcctccgtcattatgacgatagcccgcagatgcccagcggttatgccgggatggtggtgctggcgctgatcccgccgctgtggcgggcggtcatggaccccaaggtgcgggcctactatgcgggcgaagagttccagttgacggccgaacagagcgagcggccggcagcttcctga

SEQ ID NO: 320588 - DNA, 603 bp, Pseudomonas aeruginosa
atgtctgacgcattcctctcctccatcaagaaccgccgcaccatctacgccctggacaagcaactgcccgtctcccaggagaaaatcgtcgaactggtcaaggaggccgtctcgcacagcccttccgcgttcaactcgcagagctcgcgggtggtcgtcctgttcggcgccgagcacgagcagttctggaacatcgccaaggacgagttgaagaagatcgttcccgccgacgctttcgccgccaccgaaaccaagctcaattccttcgccgccggtgccggcaccgtactgttcttcgaagaccagacggtagtgcgccagcttcaggagcagttcgccctctacgccgacaacttcccggtgtggtcggagcaggccagcggcatggcccagttcgcggtctggaccgccctcgccgagcacaaggtcggcgccagcctgcagcactacaacccgctggtagatgcgcagacccacaagacctggaacctgccggaaagctggaagctgcgcgcacagatgcctttcggcgccatcgccgctccggcgggcgagaaagccttcatcgccgaaagcgaacgcttcaaggtcttcggcaactga

SEQ ID NO: 320589 - DNA, 900 bp, Pseudomonas aeruginosa
atgaacgatccgatccgtcgcggtacgctggaaatgacttcggccatgctgatctgcggcaccattggctggctggtgctgctctccgggcagcccgtgctggacgtggtgttctggcgctgcgtattcggtttcgccacgctgctggtcgcctgtgccgcgctgggtttcctgcgccgcggcagcctggggcgcgaggcgttcctgctggcgctcctcagcggggtgttcatcgtcggcaactgggtattgctgttcgcatcctactcacgggcttcgatcgccatcggtaccgcggtctacaacgtccagccgttcatgctggtggggctaggcgcggtgtttctcggcgagaaggtcacggcgcgcaagctgggctggctggggctttcgttcgccggcatgctggcgatcgtcagcgcccacggcgacagcgacgccccgcgcggggactacctgttcggtatcctcctggcgctcgctgccgcgctgctgtatgcctttgccgcgctgatcgtgaagcgcctgcaaggcacgccgccgcatcttatcgccttgatccaggtgggcaccggcgtgctgatgctcgcaccgctggcgaaccttgccgaactgccccgggacgttgctccctgggccagcctggcgaccctgggaatcgtccataccgggctgatgtacgtactgctctacggcgccattcagaaattgccgacggcgctgaccggtgccttgtccttcatctatccggtcgcggcgatcctggtggactggctggtcttcgaacatcgcctgagcctggcccagtggcttggcgtggctgccatcctgctcgccgcggcgggcatgcagcagggttggagtgtgcgcctgccgaggccggcggtgcgtcgcggctga

SEQ ID NO: 320590 - DNA, 438 bp, Pseudomonas aeruginosa
atgaccgacgacatcgaccaacgcctgatcaacgccctcatggctgactcgcgactgtccctcaaggctctcgcccaggtcagcgggctatcggccccgagcgtcgccgaacgcctgcgcaagctggaagaacgcggcgtgatccgcggctacaccctggatgtcgacccccgctgtttcggctaccagttccaggcgatcgtgcgcatccgccccctgcccggcaggctgcacgaggtcgagcgacagatccaggacatcgccgagttcaccgagtgcgacaaggtcaccggtgacgactgcttcatcgcccgcctccaggttcgttcgatggaacagctcgacacgctgctggacaggatcaacggctacgcggaaaccaacaccgccatcgtcaagaagtccccggttaaacgccggctccccccgatgacctga

SEQ ID NO: 320591 - DNA, 561 bp, Pseudomonas aeruginosa
atgcccacacccggcacgggttccgtcccggaattgcaactcgtcccgttccagctggaacacttcccaatcctgcaacgctggttcgccacggaaaaggagctggtgcaatgggccggccccgccctgcggcatccgctgagcctcgagcagatgcatgaagacctcgcggaaagccgccggcgaccgccgctgcgcctgctctggagcgcttgccgggatgaccaggtcatcggccattgccagttgctgttcgaccgccgcaacggcgtcgtccgcctggctcgcatagtcctggcgccaagcgcgcgcggccagggcctggggctaccgatgctggaggcgctgctcgccgaggccttcgccgacgccgacatcgagcgcgttgaattgaacgtgtacgactggaacgctgccgcccgtcatctctatcgacgcgcggggttccgcgaagaaggcttgcgccgctccgccacccgggtcggccgggaacgctggaatgtcgttctcatggggcttttgcggcaagagtgggcggcgggaggcgccggcaacgactga

SEQ ID NO: 320592 - DNA, 867 bp, Pseudomonas aeruginosa
atgtgtccttgccctcactcccaggcccagggagaaacggacggagaggctgagtggcataacgccgccctggacttcacccatgcgatgagctacggcgattacctgaagctggacaaggtcctggacgcccagttcccgctttcgcccgaccacaacgaaatgctgttcatcatccagcaccagacctcggagctatggatgaagctgatgctccacgaactgcgggccgcccgggagcacgtcaagtcaggcaagctcggtccggcgctgaaaatgctcgccagggtttcgcggatcttcgaccaactggtacacgcctgggcggtgctggccaccatgacgccgaccgagtacaacaccatccgcccgtacctgggccagtcttccggtttccagtcctaccagtaccgcgagatcgaattcatcctcggcaacaagaacgccaccctgctcaagccccatgctcaccgtgccgagctgctggcggccctggagcaggccctgcatacgccgtcgctatacgacgaagcgatccgcctgatggccgcccaggggttgccggtaagccaggagcggctcgcccgggacgcggcggccggcacctgttacgaggcctcggtggaggcggcgtggcgacaggtctaccaggcgccggaacgctactgggacctgtatcagctggcggagaaactgatcgacctggaggactcgttccgccagtggcgcttccgtcacgtgaccacggtggagcgcatcatcggtttcaaacccggcacgggcggaaccgagggagtggggtatctgcgcagcatgctcgataccatcctcttccccgaactgtggcggctccgttccaacctgtag

SEQ ID NO: 320593 - DNA, 1041 bp, Pseudomonas aeruginosa
atgaaaaccatcgctcggcgtctgagccccttcgcgatcctgctcccggcaagcctgttgtcagcctgcgcctccctaggcaacgccggactcggcggctcccagcagaaccccaccaaccagctcctgaacatgatcgatgaggctacccgcgaaggcatgtccgtggtgctggtaccggcactcatgcccaacaagagcgtgacggacctctccagctactcgcatcgggtcatattcaagaacaaggacgtgcccgggatcgcctacatgcaggcctttgccaacaacgacctggagaagatcaaggaagccgtctatctgtgggacttcctcgaggtcaacatcgtcccgccgggaacctacctgctgtccggagggatcgactacaagatcgacagcacccttgcccagatcaaggcgccaaaggggcagccggctgccagcccacttggttcggtgaacctgtccgccgtgctgtatcgccggttcgtgaaggagaactactggcgcgacgcctcctatgcagacaaaacctacacacagaatgtctgcagcgccgtgcacatggcctccggccaatgcgtgggctggaccgagcagcaatacagccagcgggaaatggtctcggatgccggttgggccgaaggcacgaagatcgaggatgttccctccatcaagctgcaagcgcagatacccgacgcctatgccccgctgtccttcaccattcagcctgggcagatcctgctcagcgatcggttccacttgaagaccccggccgtgagctatgacaggaagacctgcaaggccgtggacacgcaaaacatcaagtgcgccttgcaggatatccaggtcttcatgaggccagcgcccatggagctgacgaaaaggttcatcgatcgcgagcagccaaggctggatgaaacgggccgccaggtgctcgcgcgcatccagccgatgaaaaccgagatactcggcgaagcaggcatggaagacctgacctggggcctgccggtttccttgaaacgcaaggcaagatga

SEQ ID NO: 320594 - DNA, 534 bp, Pseudomonas aeruginosa
atgggttttgaacaacttgccgagctgagagaccgtctgcgcgcacaggcggcgcaggcgaaaccggctcaaaccaaaagctccgcgggacgcgcgaagaaacgtgaagccgtcgagccgggagtcgaggctatctggaggctgcaacggcattttccgctggcgtttccgaaaagtcccgcggccaaggttccgctcaagcagggcattctccaggatgcgcagcagcacctcgaactactgggaatcaccgccgaacaactgaaacaggccatcgccacctggtgccagggcagccgctactggagttgtatggtggaagatgcgccgcgactggatctgcaaggccaggttgccggcaaggtaaccgccgagcaggcggtgtatgcgcggcggcaggcgtctcgccggcagcgcgagcagatgcgcgagaagcgcgccaagcgtgcacaggcgggtggcgaagcgccggccgccacggaggcgccgacgcctgaagcgcccgcaaccgaagcgagccccgaggcgaactga

SEQ ID NO: 320595 - DNA, 2886 bp, Pseudomonas aeruginosa
atgctgacaaggtcgttgctgtccgcggtcttttgcctgttgctgatcgctctgcagccgctgcccgtcgaagccgaatccatcctgccggatgggcgtacgacgacaacgatgcgtccctggctcgataaacgagccaggcagtggctggatgcacgggagccgctgacggtaggcgtggtttcccccgactatccgccgttgtccatcttctacgcaggctcctacaagggcttcacggccgattacctggccctggtgttcgagcggccgttgcgcgtcagggactttccgtcgcggcaggcggcaatcgacgcgttgtcgcaaggggagatcgacctgcttggcgtcggtagcgaggtcgaggcccgacaacacggcttgctggcatccgctgcgtatctttccgaccggccggtactggtgtcttccagcggtgccccgttcgattcgcaggcggagtcctggctggccacggtcaagggctatcttcccgccgaacgtatcaaagctgcctatccgcacagcaggatcatctggttcgactcgccgcagcttgccctggaagcgctgagcatgggggatgtcgatggcgtgctgggggacgcagtttccacgcactacctcatccagacccattacctgctgaacttgcgcatcgagaacttcgcacccatcgacagccagggtttccgtttcctgctccggccaggtgacgaacctctgctcgcgctcatcgatcgcgccctgccgcatattagcgggcgctacggcgacgaactgttgcgcagctggagcgccgggcggcgcctgcgcttcgacgagccccgggtgacgctgtcgccggcggagcagcgttggctctccgcgcacccggtcgtgccggtggtgatcaaccattcccttggcgcgctcgggcaactggataacgaggggaggctgagtggtatcgggcgtgactatctggacctgatcggcaagcgcagtggcctgcggttttccttcactggagcacggaacttcgtcgagacgaaaagtcgactggatgcggaggaggcactggttacgccgaccatgccttcgtcggagcgcttcgattccggcctcgaagtgctgacgccctatctacgcagcgccacggtgctgatgggcgcccgccagggtggccgggatgaaagggtggggcgtgtccatggcctcgcggacctggcgggcaagcgattggcgacgacgattggctattttctcaacgacttcattcgacgcgaacacccggagatcaagctccaggtctatccgaccttcctcgccgccatgcgcagcgtagacgccggccagagcgaggccgccatcagcagcgactataccggtcgctatctgtccgcccagcatttcgacaaccggatccaggtcgtcggtatcctcgatgacctctccatcccgatcagcatcggcgtggcgaggaaccagccggagctgcggggcatcctggagaaggcccaggtggcgatcgctccggaagaagtggcggaaatcctccaccgctgggagcctcgcttcgccaagggagggacggacttctggcgcgatcaccggagcaagattctgcagatcggcggattgttcggcgtactgatttccatctccctcatctggggtttctacctgatgcgccaggtgcgcaagacccgccaggcagaagagcaagccgacgctgccaaccgtgccaagagcgtgtttctttcgacgatgagtcacgagattcgcacgccattgaatgcggtcatcggcctgcaggaactggtgctgaaaaagggcgagaagggcgtgttggacctggactcgctgagcattgcccaggaggccgcccaggggttgctgcttctgctgggcaatattctcgatttgtcgcggatcgaatccggtcggttcgattcagctcccgaaccagtgcttcctggcgagttgatcagaggaatcctgccgttggttggtgggctgacgcggcagaagaatctttccctggcactggaactcgacggggatctcgagcactgggtgctggtggatcccctgcatttcaagcaggtgttgttcaacctgctgggcaatgccatcaagttcaccgagcgcggaggggtaacggtgcgggcggtggggcggcgcgaggcggagaggcttcatttgctgctcgaggtaagcgacaccggcctcggtatttcggaggaggaccaggccaggctgttccggccattctcgcaggtcggctctcctgcgcttggccaggcgtccggcagcggcctggggctgtacatcagccgacgcctggtacacctgatgggcggccagatcagcctgcgcagcgaactgggcaacggctcctgcttctcggtcgagttcgatcttccgctgaccgagcctccgcccagcgagtccagcgaagcgcgttccggagttgtcgaggtcgaggagcggaaagaggcaagggcgctctcgatcttgcttgcggaagaccatccgttcaatcggctgaccctgaccatgcaattggaaagccttgggcaccgggtgacctccacggaagatggcgaggaagcattcgaacgttggcagggcgaagacttcgatgtcgtgattaccgacggcatgatgccgcggatggatggctacgagctggcgcgacgtatccggtcgcaagaggcccttggcggtcggcgtcgctgcttggtgatagcgcttaccgccagcgccgagaaggatgcgctggagcgttgcctggctgccggcatggaccgggtcctgttcaagccgactacgctcgatgagctcgctcgggcgctgaacgggggagagccgctcatgcctacgagcgtcgattcgaaatga

SEQ ID NO: 320596 - DNA, 1308 bp, Pseudomonas aeruginosa
atggcggaccagatgacgcccttcggcgcgcacggtgttgctgtgttccagcgggtggcatttgccttctaccgtgccgctcttcacgcccgtggcgcgtccggcggcgcctcacccacgacgacgcgcggcttcaccggccacgagatggtggacggcaccggtgtcatccacatgaacgggcgcatctacgacgcggcgctgggccggttcctgcaaccggacccgctggtgcagtcgccggacaatgcgcagagctggaacgcctacacctacgtgttcaacaacccgctggcgtatacggacccgacggggatgttctcgttccggcaggcgctgggattcgccattgcggtgatagggaccattctggcaccgcaaggtggcggcacctgggccaaactcggttatgccatcgccattggttttgccagtgggtacgtggccaccggtactttccgcggcggcgtcattggcgcgttcacggcagccgttgcctttggagtggcgggcctggacctgaccgggcgggtggcgttccagggcgtggccggcggcatcgtggaaggactgagtggaggacggttcgggcacggattcttctcggccggattgactacggccgtcatgccacaggtgggtcacgccgatacccgcgcaggtcgcacggcgctgggtgcagtgctgggcggcacgctgtcggtggcgaccggcgggaagttcgccaatggggccatcagtggggcgattcagggcgcgatggcccgtgttcagacccaaagacagtcttctcaggcctacgggactggtgatggaacagagggggcgccggaagagatcgcagtactgctaaaagacccaaagacgcgacaggaagggttaagggcgatggcgcgctcagtagatcgaggctatatggcgaatgatatctactataaggatcagttttacgtaaacagtgatggcgggattgaaccatacactggtgcggttactcagggacgaattatcaccttctacaagccggcgttctattgggactatgatgctctcgtgagcgacttggagcacgaagtcattcactggcatcagtatcgccagcgaggcggcgcaaaaacccacgtgcaaatgcttgagcgagagcttgcagcgtacaaatttcaagtggaatcgaacgcattcagacgagcccctgtggattttcagcgaggtaccattcgatcgtttcaactgcatattgacgcctatcggcaggcgacagagccgccgcgcattcgtatttgcagcgacatatcaaaggagtgttga

SEQ ID NO: 320597 - DNA, 1107 bp, Pseudomonas aeruginosa
atgcgctactgggagacgcatgcggccgactccccttaccgcatcgacaacctcacctacgatgagtacgaggagtatcgccaacagcatcccgagctcaacatgcctgagctcaaaccgccgccacccgcaacgaaccctcaaggcaacacccagggccgtgtgaatggcgagacgcccgcaaccggcaagtcggctgaagcatccaggactacggtagagtctgaaacgcccgcagaagatgacacgggcactaagatactggacggccttcagaccaccctggatgtcgccggcctgattcctggcgttggcgaaatcgccgacctggcgaatgccggcatcagcctggcgcgtggtgactacgctggcgcggcgctatccttggtctcggccattcctttcgcaggttggtttggcactgcgggcaaggccgcgcgacgaggcgccaaggcggctgaagaggcttcggaaaaggctgccaaagaggccgcggagcgagcggcacaggaagccgcggacaagtcagccaaggatgcggcccagaagaaggccaaggaagaagccgcacgcaaacagtcctcgggcgagaaaaagagcggaggtaagtcaaagggggaagatagggactgccgaccgagaaggtatggccagggttgcccgggaggaaagacccctcaccatattgttcccgatcgcgtcttcaaaatgccgtctggagcaaggattaaaggcgggatagctcacaaggatggcctgtgcatctgcgttgatggggggactcctgtcagaaaaggtccgaaggcgaacgagcatggtctgattcacgccatctatgatcctgcggaagcgatgataggaaagaagggtaatccaataggtacggcaccactcggagtactggagaccaacggggttatggccgcatccgcaattacagggtgcgacccaaagaaaatgctattcgccgtgaggggctaccatcaatctaaagggctctctccaaccgatatttttcgggcagatccttcgggaagaactatcaagccatctgctcttgcgagtattggcaaaggctcaactcccccaggaataaacggcctataa

SEQ ID NO: 320598 - DNA, 1035 bp, Pseudomonas aeruginosa
atgcgaaaaaagaagattaaaaagacacccatctctttcgggcatggatgcgcagtaaacgacgaattgttttgtgttgcttcgttcccagatgaaatcaacccagaaactgagtacacacgaatcttcattctaaacctgtcttcagccgtgccttggatgcaccatgacattgccggcagaacaattgtatcgatggcgctcaggcccgcctctcacaacaccccaagagcatgttatgcccttagcagctatggcgaactccagatattcaactctacggaggtagtagaggaggaaattcctgctactgggtccagatcaaacaggcgcgatggtctaaccttctcagccattagtcgcataggtacaaaagaatatgtatgtggagcgcttgggcgcatctaccggcgtgatggcgaccgctgggtacaggtcgctacagatgtttcgaacatggcctttcaggatcttcaatcagccatcggaagcgttgagctacgtgactccggaaatatctctgagatgacggcgaagcttcgcggaatcccaaattttgagcatattgcgggcacagcagaaaacgacatctacgcctgcggaaataacgggattatctttcattggaatggtatgcactggaacgctttgagaagcccaacccgacagcacttgcactatataaactgcaactcaccggatgaaatatacatttgcggccacaatggaacacttttgtccggaaacgctacgaatggatttcatcgcgttgcaattggaaaaaacgacctaaacctctggacggttcgcaaattcaatgaagcgatttatgtgggcactacatcagggctgtttcgagcagaaaaacagaagctgcaaccagtagatttggggctgagtgaatcactcgcaggctttacggttcaggctcttgattctaccgaacgagtactctgggtagtggcggataaatttttgctcaggcttgaaggcggagcttgggagaaaatcgaccacccggacaataccctatag

SEQ ID NO: 320599 - DNA, 255 bp, Pseudomonas aeruginosa
atgcgagaagacatcaagcaggccatcgaatgctgggcctcacgccccacttggttcagctcccatcccagcgacgccaaggaactcaggcaggcggtgtcaaagctcaagaagctgacaccccgccccacaaaagacgaactgcaagcggcaatctatctgcgagtgaaagacttgccggcattgatgggcacgcctggagatatcgagaaggtcgccggcgaattcgccgcgaagatggccgccaagctgtag

SEQ ID NO: 320600 - DNA, 399 bp, Pseudomonas aeruginosa
atgctgaactccatgacgtactccaggagtccaatagatggcgtgtatatttcagactggtcggcgctgagcaagttctttacggaaaggactatctctcggttcaatctggacaacggcaagaaggtcaacaagcagaccatccatacgctgtggaagggcaagcggccgactgcagaagaattgattgcctatctgtcgatgcccattcagctcaagctgttggggaagcatctgcgcttcaaccagtttgctcgtccgatgtctgagagctcaatcttcttcgcgccagagctcgatgtcgatgaagaggggatgctcagggcccgaagcgagcccctagccaaaaaggctggcaagaagaaggccaaggccaaggcgcgccgcaagaagcgctga

SEQ ID NO: 320601 - DNA, 1206 bp, Pseudomonas aeruginosa
  misc_feature (1150)..(1159): n is a, c, g, or t
atggttcggcttgaggatggtagtgtcgtcaactgggatgcggcctacagcaaccaggtggatgtgctcagcctgacgttgaagatgctcgccttcgagcagaagctgcttcacgctgggaagctggtggccccgccgatgccagcgattacagatgaccatgtctacaaggctggctcaatccagctctacgcggtttcatggaacgcccttgagaacgccgcgaaccgcacgctgttctttggtggggaaatagggagtgcgcaggatgcgaaagcgtccctggaccacttcccggacaattttcatgtgaagttcgcagaccccatcttcttctatcgcgaggtgtccgacgccgaagtttacgacttcatggccaatcgtaggctgcacacgtgggcgctgcaaaacacgttggcgatggcaacacaaacagaactgcgcagagccgtcatgagggacggcggggaagtgcctgatctcactgctggatttgtttccgaagacgaaggtatcaccctggcaaagctatcggagatcctgtcttatgatgtgttcgaggacaaagaactcttccacggacttactttgcgccaatgggtgcgaggatactgttcgctaaagctgatggccgcagcgaagaaagtggatgcctgccttgtcacgctcggaaaagcagaggttgagcaatggttccgcgaccacaagattccggaagagtgtatcgacaccttgatgggacatttgacattcggtgaggatagccgcgatttgtacgactcgccgttgattcagtcgcaggatggcaagtgcgcattgctcgccgatgtgctcacaagctgcaatgtcaccaacgttctgttttcaagattgagctcactcaagaccaaattcgacaaaaagggcaaagggtttgaaaagcgggtggtgtcgagctttaccaaatggggatatccatgcaagcctgcggagttcaagattgatggcagccagttcgagtacgacgccctggttttggttgatgacgcgctgctcttgattgagtgcaaaaataacttgctttcgagcaacaatgcagtccaggcgtttcgctattccgaggcgattgatgggaacgtcgagcaaatcaagcgtctggagcgcggcctgnnnnnnnnnngagttcgtcctgaccctggtcgagcgcggcctgagagagcggcctga

SEQ ID NO: 320602 - DNA, 1455 bp, Pseudomonas aeruginosa
atggctcgccagaatcgacaggggcaaactagacggtacacctacgccgaggttctacagccctcgtttcggcttgaaagcggcgtcaccgaggagggggaggagtacagagacctgtacctgcaaaccttcgaacgcgaccccgctggggagtaccgctggcggagccttcccgagtccaaatggcatcatctggctaggatatttcggacgaaagtagtcacgtatccggtcttcactaatccaagtgcaaagcgctatctgaaacctcggcacgcccagttcaaaaccgtaatctgtgagagatatgcgcgcgacttgccggaaactgctgatttggcggttagtgacgtcgagatggcgcatccctggaacgccttcaatgactgtacattcggtctaggcttcaccaaggatatggagggcctttggcacggcctgcggagtctgcagaagctcgacacgatagtggtggcccgagacgacacggttcgagtcgaagggaacgcggttcgaattccggaaggagacgtcgacaagattcgtcgtgcgtttgaccgcaccacccgaagaatgcgcgacattgtcaagcaggccaaagcgactcacattcgcaacgcgcttcttgccccactggatcccatccggttccctcccattgtccaggtcaacccggaaggtcaactggtcgaggtccgacttgaccatggaaggcaaagcagacaagccgcccgtgccggtcgtagtgccactgtcaaagccgtgcgaaccaacgtggagaccttggcagccgaagcgcctgaagagcttatcgagctgcacgccgaaattgagcgcgccaccctggctcagatgattgaacgattcgaggccatgctgcagaaggacctgccggagtcggcgtggcagaaattcttcgagcgcaatgccttcatcctcaccatgattttcgcccggcctgtgcggctactgcatacgcagttccacgcccaaggcggagggctggacggcgccggcgcgcaggtaggcgacttcctgctggcggagcagggattcgccatggccattgtggaaatcaagacgcccggaagtcccttgctgcgcgacaaggcgtatcggaaccgcgaagtcttcgctccgcatgacgacctcagcggcgctgtctcccaggtcctgtaccagcagagcaagtttcacgaaaactggctcaaccatcggatacgcccggaactgcgagactcgcgcccggacgccatcaagtgcgtggtcattaccgggatgctgccccaggacgaaatgcagcgcagaagcctggaggtgtttcgcaacgcctgcaagaacgtggaggtcgttacctttgacgagctgctgggcaagctgaagcttttgctggaacatctggctccgcgccaagaatcgccgaaagaagtgccagaagaagacctgcccttctag

SEQ ID NO: 320603 - DNA, 294 bp, Pseudomonas aeruginosa
atgaacgacccgcttgcgctgccgcccggattccatttcgagccctacctgggcgggcccgccctgcatctgtacaacaaccgagtagccagcgcctgcccggcacgcgacgaggcgggcgctccctggcgtctgtgcctgtgtccccggcggccgccgcgatacgagttcctggccaacgaggaggtttgccttcggtacatggccgcctgggcgcgccgctgggaggccgaaatccgcgcgcggtatccggtgcctgccggccggccttcggagtcacatgcggacagttaa

SEQ ID NO: 320604 - DNA, 1005 bp, Pseudomonas aeruginosa
atgtgctactccgcaatgattcaggccgactacgacaagttctgccgccaggtcggggccatcatgagcctggaggacttcgcggccaacgtgtgggatggccccaatcgggaccgcaagcgcaagcagcgccgcaagatgccgcgcgccgtcgagaactggtttttgggcccgcagagcgacccgctggccgcggacatcggccaggccatcctcgaagcccggcaggcggacatggaggtctggcgggccgacctggtgaagcagcgcgagcgcttggccgccaacgaggccaagatggcgaccaagcccacggcaacggccgccaaggaagtgcgcattgccggaaatcaaatcaccaagctcgaggggtggctggaggatgctcaatccacccagctgtcccccaaggactaccggttctacccgcactactggtgggtgccggtgatggtgatggaacacgggcggctggtggtaaagccgatgcgctaccagttgcgcaaggccggcaagaagcccgaggacgactacattcgcggcgctccttccggcacctactgcaatcgccgggaccagttgacgctcgcctggcgcaagcagttcggccgcacgcatggcgtggtgctcattgacagcttcctggagaacgtcaagcgccacgacatggagcaccgcgagttgcagcccggcgaggaaccggagaaggtggtgctggagttctcgtccgcgtcccgcaagccgttgctcatcgcgtgcccgtgggaccactgggaggggccgggcgaagcaccgttcgattcgttcggcttcatcaccgacgagccgccgccggagattgccgcggccggccatgaccgggtgcccatctggctggagcaggcgaatttgctggagtggttgacgccggaaggacgttcggaccagcaactgcaaagccttttggatcagcggcctgagaccgagttcgaccaccaggtgctggcggaagctcgcgcggcgtag

SEQ ID NO: 320605 - DNA, 519 bp, Pseudomonas aeruginosa
atgtctacccctgcctacatcagcatcaagggcaaaacccagggcaacatcacccagggtgccttcaccgccgactcggtcggcaacgtctatcaggaaggtcatgaggaccagattctggtccaggaaatcgagcatctggtggcaacccccaccgacccgcagagcggccagccgtccggtcagcgggtgcacaagcctttcatcttcaccgcgccgctgaacaaggccaccccgctgatgtatcaggcgctgtcctcgggtgaaatgctgccggaggtggaagtgaagtggtaccgcacctcgaccgagggcaagcaggagcacttcttcaccaccaagctggaagacgccaccatcgtgagcatcaacacggtgctgccgcacgcgcaggatccggccaaggcttcgtacacccaactcgtgaaagtcgccatggcttatcgcaaggtcacctggacccacgccatcgccggcaccgaagcctccgacgactggcgcaagccgcaagaggcctga

SEQ ID NO: 320606 - DNA, 1152 bp, Pseudomonas aeruginosa
atggccgctccacaggcgcagcaagcttgtcgcgcctggctggattctggaagttggaacaacacacctatggaagcagtatcaacaccccaggcgcctggccgcgcctcatggacctttgcggacctcgccagcacctaccgcttctgggccctgacggtcgccacgatggcggtcacgttcggcgcgctggctatcaatctcgcgcttcaatggctaccagacctacgcgagctcgcgaagcacgggcataccctctacacgtccacccaaatcatcgccggcgtggcgggcgttgcactgggtcttttgctggctcacagcagaaccgtagcaggcttgctgacggccattgcggtcagcgcggtgatttttggtgcacttgccgcgtatggcgaagatgctggcttgggcctcatctgcctcgcgggcttcgtcagccgtgcggtcgccgcggcatcctcgtttgccgtcttcgtctacctgtcgggtggctcagccgaccggctcgcgttcgctggcgcgctcgcggtggcgaccaccgcgtttgccctggccaactcgctcggcggagccatatccgccatgctgatgcaccacttcagcagcacgggctgcttcctcgcgggcttggccgcaatggcactagcgttgctgctgttggcacccgtacgaggagcgctgttcgaaacagcgccggttccacgccatcgcccactcaggccaaccgaccgagtgggtgcgaccgtcgcaatggtgacggcactgccttggctggcagcggtcggattggcattgctgggaggctttgggattggcagtttcgctttggtcggcgcggcggcaattgttgttggcatggtcgcaacggcctattggctgtatcgcgtccatggcgagtcagccagcctgtaccccacgcagaagctgttcacgccgcggggcgcgttgctgatgtacttgctggtgccgatggcgctgcccattctgctgttgtgcctagggggcgtgctgcgcgaagcccgcgcgcaacgcggggagcagccccgctccgctgcctggttcaatgcctggtgcgtcgtcttccctcccatcgccatggcgatggcgcaggaagcgctgaacgagcttgctgcccatcgcgagcagtga

SEQ ID NO: 320607 - DNA, 1299 bp, Pseudomonas aeruginosa
atgatctgcattgagtgcgttacgccggagcctctcaagaaactgttcgatacgcacggacaggaaggtgactgccagtactgtcagcgccacgggaaggtaattgagtcccgggtgctttttgagtacgtctatgaccgtgtcagagagaacattgcgcagcgggatgaccttacggatttcgagctgaacatgctctatgagtgcgggtccgacgaaattgccgtggcaagcattgatgtggttttgagtgaatggctgaaccttggggaggagagatacttcgatttgctggtcgatggagttcctgaagagttcaaggttgatgatgatgggcacgacgtccatttctttggcgatgatgggacgttggaaaagaacgtctacgatgcgaaatgggatgcgtttgtgtcaggagttcagtacacgcaccgattcttcaatgcgaatgccagcaagtttctggactctgttttctccccgttggtcaccaatgacgatgcgctcaagcctgaagtcatccgaaccatggcccatggcgacttgatgtaccgtgcgcgccacgtcaaagatttcggtgatgcgaaaaaaattatcatgaacccggctggccaattcggccccacgccgaggttcctggcaagcagtcaaagaatgacgccgaatggcatttccgccctctattgcgcgctggaacgggagacttgcctgagcgaaatccgctccattaccggggaccatgtggtgagcgcggcgctgactccggtcgcggaactgaagctccttgacctgacggtgctaaaccgggtggaacccccggagctgtcgtttctggatgtggggcttcgtgaggcgctgcatcgcaaggtcttcctggactcgctggtcaagaggatgtcccggcccaaggctcgcaatgatgaactgagctatctctcgacccaggtcgtgttcgagtaccttcggctgcgctttggcgagcaggtcgacggtctggtcttcccatccgtgcagacgggcgaggcgggtaccaacgttgtcttgttccccgaggccagccgactggcgtacatcctgccggcgagagccgaagaggacaaatttagggacgagcccgcacctgtcgaggtgccaatcgacatggataacccgctcatgccacccaccaaggtgatggtcttgcacggctctgtccggcttcacaaagtcactgcgattgagacccgggcccgtgagtaccgcagcatctacgacctgttcatgagcgacgagacgcgtagacgtctgaacttgaactag

SEQ ID NO: 320608 - DNA, 1335 bp, Pseudomonas aeruginosa
atgtccgcagataaatcccttgtcgcagccctgcaagcgctgtgggatatcccgccgcccggcccacagaacctgtggagcagccgggagtttgtcgcgctgaaggaggtgctcgtaaagctctaccgcaatggcaaggctaccttcgcgctggaggtacccatcggcaatgccctgaggtcgctcggctggccatgcagcaccccgcatctgcccagccaacccagaccggaactggaccaggtggctgcggcactggcgcatgagtttcaacggaccacgacgcggcgccgacacctctgcccgcttgatatggctgatgagcttccgaccttccagtttggcaatgccaagatgggtcgattcaccgctgccgagctggaagatttgttcgatgcgcccaggttggaacgctgctatccgggcattcgactggacgctcggaatctgtcccagtttcattggctggtcgtagaagaagacgtctcggttcgaagcgaatccggcaatcgtcagttctcctggctggacctccccatcggcaaggacctgggcgaggttgtcccccatcgcgggcgctttcccgcggtagtcgagcgggccctgttgttcctgctgctggcgccctgggaagactgggcagagatgcccgaggtggactggcgcggcttccgggtaccctggatttacacccttgaggatgacctgtgcgcgtttccgctccccccgccggctccggaacggctgtcgtgggtgccagacgcgtaccagggggacgacggcgagcatgtggactacgagcgccccctatgtcttcaactcctgaaatccgccgaggatgtgttgcagatcctagacgctacgtgggcgcagctccagacaacggctgcgctagaatccgaactgttctctacccctgtagagcacttcctggtccgcgcattcctttccgatggcatcgatgaagtgatggcccacctcatcgtggtcgaagccgcctttggcacagagagcgattacaaagccaagcagcgtttgccaactgacacccaccagcaaagagctactccgcgggtcgcagcacggctaagtgctgccatcgggaggccagaagcggcgaaggaatacctggacttgcacgacatgcgctgcacctacgttcatgggcgtcctgaaggccgcatcatctccaccaagcaacgcgtcttggctcgccgcctcgcccgcgaagcggcaaatgccctggtcggcctggcgcaagacgtgcggcagcctcgcgaggaaatcctgctcgacttgctcaatcgtggcgtgacgaacctccccaaacgctag

SEQ ID NO: 320609 - DNA, 972 bp, Pseudomonas aeruginosa
atgaaactcaagcgtttgatggcggccctgacgttcgtcgccgcaggcgtaggcgccgcttccgcggtagccgcgatcgacccggcgctgccggaatatcagaaagccagcggtgtgtcgggcaacctgtcgagcgtcggctccgacactctggccaacctgatgaccatgtgggccgaggagtacaagcgcctctatccgaacgtgaacatccagatccaggctgccggttcttccaccgcgccgccggccctgaccgaaggcaccgccaacctgggcccgatgagccgcaagatgaaggacgtcgagctgcaggctttcgagcagaagtacggctataagccgaccgccgtcccggtcgctgtcgacgccctggcgatcttcgtgcacaaggacaacccgatcaaaggcctgaccatgcagcaggtcgatgcgatcttctccgctacccgcctgtgtggcagcaagcaggacgtgaagacctggggcgacctgggcctgaccggtgactgggcgaagaagccggtgcaactgttcggccgcaactcggtttccggcacctacggctacttcaaggaagaagccctgtgcaaaggcgacttccgtccgaacgtcaacgagcagccgggttcggcttccgtggtgcagtcggtcagccagtcgctgaacggcatcggctactccggtatcggctacaagaccgccagcgtgaagaccgtggccctggccaagaaggaaggcgctgccttcgtcgaggacaacgagcagaacgccctgaacggcacctatccgctgtcgcgcttcctctacgtctacgtgaacaaggcgccgaacaagccgctggacccgctggaggctcagttcctcaagctggttctgtccaagaccggccagcaggtcgtggtcaaggacggctacatcccgctgccggccaaggtggccgagaaggcgatcaaggaactgggcctgtaa

SEQ ID NO: 320610 - DNA, 2286 bp, Pseudomonas aeruginosa
atgaacgacatggccaactccccgatgaactcctcccttgctcccgagcggattgacttcaatacgccagccctgcaacgcaagcgccgcatccgtgccctcaaggaccgcctgacccgctggtacgtgctggtcggcggcctggccgtgctggcggcaatcaccctgatcttcttctacctggcctacgtcgtgctccccctgttccgcggcgccgacctggagacccgcgaagcgctgactccggcctggatgcagcaggcgcaggtgcccctgctgctcagcatcgaggagcagaaccaggtggccatgcgcgtcggcggccagggcgagattctcttcttcaacgccaagaccggtgtcgaactgaagcgtgtcgctctgccgcttccggcgggcagcgagatccgctcgatcgcccaggaccagccgggcagcccgacggtcgccctgggcctgtccaacggacaggtgctggtgttccagcacacctacaaggtcacctacccggacaacaagaagaccatcaccccggagatcgccttcccctacggcgagaccccgatcggtctcgatccgcagggccgcccgctggagcatgtgagcatcaatgccggcgacgacagcctgctgctggctggctccgtcgacaagcaactgctgctgttgagcatgactcgggaagagaacatgctgaccggcgaaagcacgctggacgaggagcgcatcgaactcccgcagatcgccgaaccggtgaaagccatctacctcgacccgcgcaagcagtggctgtacgtgatcaacggacgtgccaccgccgatgtgttcgacctgcacagccgccagttgaacggtcgctacaagctgctggaagaccccaacgccgaggtcaccgcgagcacccaactgctgggcggcatctcgctgctggtgggcgactccaagggtggcatcgcccagtggttcatggctcgcgataccgacggcgaaccgcgcctgtcgcacgttcgtgacttcaacctggatggcgcgccgatcagcgccatcgctccggaacaacggcgcaagggcttcatcgccctggacgagaagggcaacctcggcgtcttccacagcacggcgcaccgtaccctgctggtccagccggtcgccgactcttccggggtcatcaccctgtcgccgcgggccaaccgactgctgctggagcagggtggcaagatccaccgcttcgccctgagcaacccgcacccggaaatctcctggagcgcgctctggggcaaggtctggtacgagagctacgacaagccggcctacgtctggcagtccaccgccgcgaccaccgatttcgaaccgaagctgagcctctcgccgctgaccttcggcacgctcaaggccgccttctacgcgatgatcctggcagctccgctggccatcgcggccgccgtctacaccgcctatttcatggctccggcgatgcgccgcaaggtcaagccggtgatcgagctgatggaggcgctgccgacggtgatcctcggctttttcgccggcctgtttctggcgccctacgtcgaaggccacctgccgggggtgttcagcctgctgttgctgacgccgctgggcatccttctcgccggcctgctctggagccgcctgcccgagcgtatccgcctgagcctgccggccggctgggaagccgcgctgctgatcccggtggtgctcgccgtcggcgccttcgccctgtggctgagcccgcacctggagaccaccttcttcggcggcgacatgcgcctctggctgagccacgacctgggcatcacctacgaccagcgcaatgccctgatcgtcgggctggcaatgggcttcgcggtgatcccgaatatcttctcgatcgccgaggacgccatcttcagcgtgccgcgcagccttacctacggctccctggccctgggcgccacgccctggcagacgctgacccgcgtggtgatcctgaccgccagcccaggcatcttctcggcgctgatgatcggcatgggccgcgccgtcggcgagaccatgatcgtgctgatggcgaccggcaataccccggtgatggaactgaacatcttcgaaggcatgcgcaccctggcggccaacgtcgcggtggagatgcccgagtcggaggtcggcggcagccactaccgcgtgctgttcctctcggcgctggtactgctgacgttcaccttcgtgatgaacaccctggcagagctgatccgtcagcgtctgcgcaagaaatacgcgtcgttgtaa

SEQ ID NO: 320611 - DNA, 1677 bp, Pseudomonas aeruginosa
gtgaaacagaaacaggaaaccgtcaaagcctggttcggcagcggctcgccctgggtgtggatgaacgccggcgcggtgtcgatcgcggtgatcatgaccatcggcctgctggcggtgatcgcggtacgcggcctcggccacttctggccggcgaacgtcatcgaggcgacttaccagatccctggcgaagccgccaagaccgtgatcggcgaggtggtccaggccgaggaagtgccgcgcgcgcgcctgcgcagcgccggcatgccggtcccggaggccggccccgaattcatgacccgcgagctgctcaagctgggcaaccgcgagctttacggcagcgatttctcctgggtcgtcggcgagtggctgcaggacatcaagcgtcccgaagcgctgatggttctcgaacgccgcgagtggggcaacttctacggctacctgctgagcgtcaaggagaacggccaggtggtcgccgaaggcgacgccgcggtaggcgaactgcagaagcgcatgcagcgggtggatgacctctacgccaagctctacaagctggagaagggcgacatcggcgggatcaaccacggtctcgagcgcctgcgcctgaaagagcgcaagttgcagttggacggcaagctggacgccgccgcccaggccgacctggccgccgagcgcagcgagttgcaggcgcgctacaaggtcctggaagagcagctcaacggcctgcaccaggagttcaaccgcgacagcgtggtaatgcgcgacgccagcggccgcgagagcgaaatcacccttggcaagctggtgcatgcctaccagcccaacgccatgggcctgggcaccaagatgacggtgtacttcaagaagctctgggagttcctcagcgacgatccgcgcgaggccaataccgagggcggtatcttcccggcgatcttcggcaccgtgatgatgaccctggtgatggcgctgatcgtcaccccgttcggcgtgatcgctgcggtctacctgcgcgagtacgccaagcaggggccgctgacccgggtgatccgcatcgccgtgaacaacctcgccggcgtaccggcgatcgtctacggcgtgttcggcctgggcttcttcgtctacgtgctgggcggttccatcgaccggctgttcttccccgaggccctgccggcgccgaccttcggtacccccggactgttctgggcctcgctgaccctggcgatcctcgccgtgccggtggtgatcgtcgccaccgaggaaggcctggcgcggattccgcgcgcggtccgcgaaggctccctggcgctcggcgcgaccaaggcggaaacgctgtggaagatcgtcctgccgatggccagcccggcgatgatgaccggcctgatcctcgccgtggctcgtgccgccggcgaagtggcgccgctgatgctggtcggcgtggtgaaactggcaccgtcgctgccggtcgacggtaactatccgtacgtgcatctcgaccagaagatcatgcacctcggtttccatatctacgacgtcggtttccagagccccaacgtcgaggccgcacggccgctggtatacgctacggcgttgctgctggtcgtggtgatcgcgctgctgaacttctccgccatcgcgatccgcaatcgcctgcgcgagaagtacaaggccctggaaaactga

SEQ ID NO: 320612 - DNA, 834 bp, Pseudomonas aeruginosa
atgcaaaacgagaccgccagccacggcatcaacttcgatgcgctcggccgcgaccgccagagcctcgacctggcttccgaaagtgtcgaactggaagtgcccgggctgaacctgttctacggcgccaagcaggccctgttcgacgtccggatgaacattccgaagcagcgcgtgaccgccttcatcggcccgtccggctgcggcaagtcgaccctgctgcgctgcttcaaccggatgaacgacctggtggatggctgccgcgtcgaaggcgagatccgcctcgatggccacaacatcttcgccaagggcgtcgacgtcgccgagctgcgccgtcgcgtcggcatggtgttccagaagcccaacccgttccccaagagcatctacgagaacgtggtctacggcctgcgtatccagggcatcaacaagaagcgcgtacttgacgaggccgtcgagtgggcgctgaaaggggctgcgctgtgggaggaggtgaaggatcgcctgcacgagtccgccctcggcctgtccggcggccagcagcagcgcctggtgatcgcccggaccatcgcggtggaaccggaagtgctgctgctcgacgagccgtgctcggcgctggacccgatctccacgctgaagatcgaagagctgatctacgagttgaagtcgaagttcaccatcgtcatcgttacccacaacatgcagcaggccgcgcgggtttccgactatacggcgttcatgtacatgggcaagctgatcgagttcggcgacaccgatacgctgttcaccaacccggcgaagaagcagaccgaagactacatcaccggccgctacggctag

SEQ ID NO: 320613 - DNA, 729 bp, Pseudomonas aeruginosa
atgatcaacaaagacagtctcacccatcacatctcccagcagttcaacgccgagctggaggatgtgcgcagccacctcctggccatgggcgggctggtggaaaagcaggtcaacgacgcggtcaacgcgctgatcgacgccgactccggcctcgcgcagcaggtccgcgagatcgacgaccagatcaaccagatggagcgcaacatcgacgaggagtgcgtgcgtatcctcgcccggcgccagccggcggcctccgacctgcgcctgatcatcagcatctcgaagtcggtgatcgacctcgagcggatcggcgacgaggcctccaaggtcgcccgccgcgccatccagctgtgcgaggaaggcgagtcgccgcgcggctacgtcgaggttcggcacatcggcagccaggtacagaagatggtgcaggaggcactggatgccttcgcccgcttcgatgccgacctggcgctgtccgtggcgcagtacgacaagaccgtcgatcgcgagtacaagaccgccctgcgcgaactggtcacctacatgatggaagacccgcgggcgatatcccgcgtgctcaacatcatctgggccctgcgctcgctggagcgcatcggcgaccatgcgcgcaacatcgccgagctggtgatctacctggttcgcggcaccgacgttcgccacatcggcctgacccgcatgaaggaagaggtcgagaacaaccgcggcgagtga

SEQ ID NO: 320614 - DNA, 903 bp, Pseudomonas aeruginosa
atgagcaaagtcagcgcgctagtggtggatgacgcccccttcatccgagatctgatgaagaaagggttgcgcgacaacttccccggccttcatatcgaggaggccgtgaacggccgcaaggcccagcaactgctcagtcggcagaacgtcgacctgatcctctgcgattgggagatgccggagatgtccggcctcgaactgctgacctggtgccgtgcccaggaaaacctcaagactaccccgttcatcatggtcaccagtcgcggcgacaaggagaacgtggtccaggcgatccaggccggggtgtcggactacatcggcaagccattctccaatgaccaactggtggccaagatcaagaaggccctgagccgcagcggcaagctggaagccctggcggcccacgcgccgcgccgggagatcgccagcggcatggccaacgattcgctggccgccctgaccggtggtcgcgccgaggtgatcaagcctgccgccagtccggcaaaaccggcccccgcgccgaagccggcttcggctccccaggccagcgcgcgtcccgccggcagcggcaacccgctggggcaggcgcaattgcgcctgccgcagagcagcatgccctgcgtgatcaaggcggtcagtctgaaggaagcgcaactggtggtgaagcgcgccgacccgttgccgcaggtgctggaaagcgcggtgctggacctcgaggaaaacagcgacgtggcgcgcctgaacggctacctgcacgccatcgccgcgctggagccgaagccggatagcgattggctgctgttgaccctgcgtttcgtcgaccgcgacccgcagaagctcgactacctgtcgcgcctgatcgcccgcggaagtacccagaagcactacgttcccggcgcctga

SEQ ID NO: 320615 - DNA, 900 bp, Pseudomonas aeruginosa
atgctagggcgccttctccttctctgtggcctgttcgccgcggcagctccggctgcggccctgaccatctacaagtacaccgacgccaatggcgtggtgacctactccgaccgcgccgtggccggggcgcaggtgttcgtcttccgcgaccggatggtcgagcacctggaacgggaagtgaagctggagacgaagaagcacgcgggtggcgagaccctgcaggtgcgcaacgacctctacgcgccggtcgaagtcgagttgcggatccgcaacccgcgcaatgccgttggggtgcccgacgggccgattcgctgggtggtcccggcgcgcagccaggtgcgcctggcgaccctggcgccgcgcaaggccggcaagccgatgagctacaccccgaagctgcgttacgcgctcggcgacccgcgccagcagccactgctctatcgctatccgctgccctggcgcggcgggccgttccgcctgtcccagggcgccaatggcaagtacagccacttcacccccaagggccgctacgcgatggacatcgccatgcccgagggcacgccgatcatcgccgcccgcggcggcaccgtggtgaagatcgagaacaaccagagcgggcgcggcaacaatccctcgggcaacttcgtccgcatcctgcacgacgacggcaccatgggcgtctacctgcacctgatgcgccattcggtactggtcgccgagggccagcgggtccaggtcggcacgccgctggcgcgctccggcaacaccggcaacagcagcgggccgcacctgcacttcgtgatccagcgcaacgtcggcctggcgctggagtcgattccctacgacttcgcccagccggtcgacagcctgccgaacttcgccatcgtccgcgagccttga

SEQ ID NO: 320616 - DNA, 1341 bp, Pseudomonas aeruginosa
atggacccttctcctagtaccagcatcgccacctatttcgccgatgccggcctgatcctcttcgcgcttttcctcgtcctactcaatggcttcttcgtcgccgccgagttcgccatggtcaagctccgcgccacccgcgtggaaaccatcgccaagcagcacggctggcgcggcgccatcctgcgcaaggttcacaaccagctggacgcctacctgtccgcctgccagctgggcatcaccctggcctccctgggcctgggctgggtcggcgagccggccttcgccgaactcttggaaccgctgctggcgatgatcggcgtgcattccgacgaactgatccgcgggatctccttcttcaccgcgttcttcatcatttcctacctgcacatcgtggtcggcgagctggcgcccaagtcctgggcgatccgcaaaccggaactgctgtcgctgtggacggcggtgccgctgtaccttttctactggctgatgtacccggcgatctggctgctcaacgccagcgccaacgccatcctcaagatcgccggccagggcgagcccggcccgcaccacgagcatcactacagccgcgacgaactgaagctgatcctccactccagccgcgcccaggaccccagcgaccagggcatgcgcgtgctggcctcggcggtggagctgggcgagctggaggtggtcgactgggccaactcccgcgaagacctggtctacctcgagcatgacgcgccgctggcggacatcctcgcggtgatccgccgccacaagtacagccgctacccggtctgggacagccacaagggcgagttcatcggcctgctgcacatcaaggacctgctgctggcgctgtccgccctggacagcctgccggagaccttcgacctcgacgaactggtgcgcccgctggagatcgtcaccaagcacaccccgctgtcgcgcctgctggagcagttccgcaagggcggcgcgcacttcgccgtggtggaagaggccgatcacaaggtggtcggcttcctgaccatggaagacgtgctggaagtgctggtcggcgacatccaggacgaacaccgcaagaccgagcgcggcatcctcgcctaccagccgggcaagctgctggtgcgcggcgacacaccgctgttcaagctcgagcgcctgctcggcatcgacctcgatcatgtcgaggcagacactctcgccgggctggtctacgacaccctgaagcgggtgccggaggaagaggaagtcctcgacaccgagggcctgcggatcatcgtgaagaagatgcgcggtccgaagatcgtcctggccaaggtggtcaagctcgactga

SEQ ID NO: 320617 - DNA, 1332 bp, Pseudomonas aeruginosa
atgcaatccgtcgtgaaccaagactggcgtggagcgctgatccgccacctgcttctcgtgctggccgccagcctcgtgctcggcgtggtcagcggccattacggctgggccctggccctcggcctggctctctacctcggctggaccctctggcagctactgcgtctgcaccagtggctgcgcaaccaccagccagacgagccaccgccggacagctacggcctctggggcgaagtcttcgacaatatctaccacctgcaacgccgcaaccagcgcgcccgtggccgcctgcaggcggtgatcgaccggattcaggagtccaccgcggccctgcgtgacgcggtgatcatgctcgacagcgacggcaacctggaatggtggaacctcgccgcggaaaacctgctcggcctgaagaccccgcaggacggtggccagccggtgagcaacctgatccgccatccgcgcttcaaggaatacttcgaccaggaggattaccgcgagccgctggaaatcccctcgccgatcaacgagcgcctgcgcctgcaattccacatcaccctctacggcaaccgcgagcacctgatgctggtccgcgacgtcacccgcgtccaccagctggagcagatgcgcaaggacttcgtggccaacgtctcccacgagctgcgtacgcctctgacggtgatcgccggctacctggagaccctcctcgacaacgtcgaggatgtgaacccgcgctggctgcgcgccctgcagcagatgcagcagcaggccggacgcatgcagaacctgctcaacgacctgctcctgctggccaagctggaggccaccgactaccccggcgacaacaagccggtggcggtggacgctctcctcgccagcatccgtaacgacgcccaggccctgtccgccgggcgcaaccaccgcatcagcctggacgccgcacccgctgtgcagctcaagggcagcgaggcggaactgcgcagcgccttctccaacctggtattcaacgcggtgaagtacacccccgacgaaggcgagatccgcatccgctggtgggccgacgaacagggcgcgcacctgtcggtgcaggacaccggtatcggcgtcgaccccaagcacctgccgcgcctgaccgagcgcttctaccgggtggactccagccgcgcctccaacaccggcggcaccggcctcggcctggccatcgtcaagcacgtgctgatccgccaccgcgcgcgcctggaaatcagcagcgtgcccggcaagggcagcaccttcacctgccatttcgccccggcgcaggtcgccgaggccgagcgcaaggcgccgaagtga

SEQ ID NO: 320618 - DNA, 690 bp, Pseudomonas aeruginosa
atggttggcaagacaatcctcatcgttgatgacgaagcaccgattcgcgagatgatcgccgtggccctggagatggccggctacgagtgcctggaggcggaaaatacccagcaggcgcacgcggtgatcgtcgaccgcaagccggacctgatcctgctcgactggatgctccccggcacttccggcatcgaactggcgcgacgcctgaagcgtgacgaactgaccgtcgacatcccgatcatcatgctcaccgccaagggcgaggaggacaacaagatccagggcctggaggtcggcgccgacgactacatcaccaagccgttctcgccccgcgagctggtcgcccgcctgaaggccgtgctgcgccgcaccgggcctggcgacagcgaggcgccgatcgaggtcggcggcctgctgctggacccgatcagccaccgcgtgaccatcgacggcaagccggccgagatgggccccaccgagtaccgcctgctgcagttcttcatgactcaccaggaacgcgcctatacccgcggccaactgctggaccaggtctggggcggcaacgtctatgtcgaggagcgcaccgtcgacgtgcatatccgccgcctgcgcaaggcgctcggcgaggtctacgaaaatctggttcagactgtccgcgggaccggctatcgtttctccaccaagagctga

SEQ ID NO: 320619 - DNA, 384 bp, Pseudomonas aeruginosa
atgaacagaatccacctggcgctgggtctggcgctggccctgccggcgttcgccgcgctggcccaggaaacggtggcgccggccaccgagaaggacggcgtgctggtcgatggcaagggcatgacgctctatacctacgacaaggacagcgaagggcaatccgcctgttccgggcagtgcgcgaagaactggccgccgctggcagcggcccagggagcgcaggccagcggcgactggagcctggtcgctcgcgaggacggcacccagcagtgggcctactacggcaagcccctttataccttcatccaggacaagaagcctggcgacaagaacggtgacggcaagatgggcgcctggcacgtcgcccagccggacatggactag

SEQ ID NO: 320620 - DNA, 1467 bp, Pseudomonas aeruginosa
  misc_feature (496)..(505): n is a, c, g, or t
atgcccagcaatgcgctctggcttcgcgccgaccaactgtccagcgtctcccccgccgtcctcgactggctgttcgacgaggggtcgctgacccggcgcctgaccgccctggccgacggcgcgttccgcgtcgaacccctgctggaaggctggcagaccctgcgcgacgacgaatgccaggggctcgacgtccctaccggcagtagcggctgggtccgcgaggtctacctgcatggccacgaccgtccctgggtgttcgcccgcagcgtggcggcgcgcagcgccctggaaggctcgggcttcgacctggcgctgctcggcacccgctcgctgggcgagttgctgttcagcgacagcgccttcgagcgcgggcccatcgaagtctgccgctatccggcggccggtctgcccgccgaggtccgcgccgagggtctctggggccgtcgctcacggttttcccgcggcgcgctcggggtgctggtggcggaggtgtacnnnnnnnnnntacctaccgcgcctgtgggaccaggcgggaatcgccgacgtataatcccccggtcgactccggaggtccccatgttcgtcaccctgatcaagccgctggcccgcctgcacccccgcgcctgggacttcgtccaactggtgcggctggaccggccgatcggcatctacctgctgctctggccgaccctctggtcgctgtggatcgccgcggacggcgtgccggaactgaagaacctgctgatcttcgtcctcggcgtcatcctgatgcgcgccgccggctgcgtgatcaacgatttcgccgaccgcaatttcgacggccatgtcgcacgcaccaaggcgcgcccgctggccaccggcaagatcagcgtgcgcgaggcctggatcaccttcgccgtcctggtcgcgctgagcttcggcctggtcctgctgaccaatgcaacgaccgtctggctgtcgttcggcgcggtagccgtggcctcgctctaccccttcatgaagcgctacacctactatccgcaggtggtgctgggcgccgcctattcctggggcatcctgatggccttcaccgccgagcgcggcgaattgccggccagcgcctggctgctgttcctggccaacgtgctgtggacggtcgcctatgactcctactacgcgatgaccgaccgcgaggacgacctgaagatcggcatcaagtccaccgcaatcctcttcggcgatgccgaccgcctgatcatcggcagcctgcagggcctgaccctgctcctgctagtgctggccggcaaccgcttcgaactgggcctgtgcttctacctcggcctggcggtggcggcggcctgcttcgtctgggaagcctggtcgacccgcgaccgcgacccgcaggcctgcttccgcgccttcctgcacaaccactgggctggcctggcgatcttcctcggcacggtcgccgactacgcgctgcgttga

SEQ ID NO: 320621 - DNA, 756 bp, Pseudomonas aeruginosa
atgcagaaacagcgggtggccgaccaggtcgccgagcgtatcgagcggttgatcgtcgacggcgtgctcaaggtcggccaggcactgccgtccgagcggcgcctggtggccaagctcggctgctcgcgctcggccctgcgcgagggcctgcgggcgctgcgcgggcgcggcatcatcgacaccgagcatggccgtgggtcgttcgtcgccgacctcgaccgcaacgccgacgtcagcccgctgatgcacctgttcggctcccagccgcgcaccctctacgacctgctcgaagtccgcgccctgctggagggcgaggcggcccgcctggcagcgctacgcggcaccgaggcagacttcgtcctgctcgcccggcgctacgaagagatgctcgccagccacgaggaaacccagccgatcgatccccgcgagcacgcccgccgcgaccacgcgttccaccgggcgatcagcgaggcatcgcacaatccggtgctggtgcataccctgcaatcgctcaacgaactgctgctgagcacggtgttcgcctcggtgaacaacctctatcaccggccgccgcagaagcgccagatcgaccgccagcacgcgcgcctctacgcggccctccgcgagcgccagccggaccaggcgcaacgggcggcgcgcgaacatatccacagcatccgcgacaacctgcgggagatcgagcaggaagaacagcgcctggtccgcgccaccctgcgcctgaacggctgggggtga

SEQ ID NO: 320622 - DNA, 1500 bp, Pseudomonas aeruginosa
atgaacatcctctacgacgagcgtctggacggtccgctgccgcaggtggacaaggatggcctgctggccgagttgcgcctccgcctgcccgacctcgaactgctgcacgccgcggaagacctgcgtccctacgagtgcgacggactctcggcgtatcgctgcacgccgttgctggtggcattgccggaacgcatcgaacaggttcagggcctgctcgccctctgccatcggctgaaggtgccggtcgtggcgcgcggtgccggcaccggcctgtccggcggcgcgctgccgctggagaacggcgtgctgctggtgatggcgcgtttccggcggatcctcgagatcgatccgctgggtcgtttcgcccgggtccagcctggcgtgcgcaacctggcgatctcccaggccgctgcccctcatggtctgtactacgcaccggacccgtcctcgcagatcgcctgctccatcggcggcaacgtcgcggagaacgccggcggcgtgcattgcctgaagtacggcctgaccgtgcacaacctgttgcaggtggacatcgtgaccctggaaggcgagcgcctgagcctggggtccagcgccctggacagcgccggcttcgacctgctggcgctgttcaccggctccgaagggctgctcggcgtggtggtggaggtcaccgtcaggctgttgccgcgcccgccggtggcgaaggtcctgctggccagcttcgacgatgtggaaagcgccgggcgggcggtggccgacctgatcggtgccggcatcgtcccggccgggctggaaatgatggacaacctgtcgatccgcgccgctgaggatttcatccacgccggttacccggtcgacgcggcggcgatcctgctctgcgaactggatggcgtggaagccgacgtgcacgaggattgcgagcgggtccgcgagctgttcgaggcggctggcgccacctcggtgcgacaggcccaagacgaggccgagcgccagcgcttctgggccgggcgcaagaatgcgtttccggcggtcgggcggatttcccccgattactactgcatggacggcagcatcccgcgccgcgagctgccgcgggtgctgcatggcatcgccgagctttcgcgcgaatacggcctgcgggtggccaacgtattccacgccggcgacggcaacatgcacccgctgatcctcttcgacgccaacctggcgggcgagctggagcgcgctgaagcgctgggcggcaggatcctcgagttgtgcgtggcggtaggcggcagcatcaccggcgaacatggcgtcggccgcgagaagatcaaccagatgtgcgctcagttcaatgccgacgagctgaccctgttccacgccgtgaaggcggcattcgacccggccgggctgctaaatcccggcaagaacgtgcccaccctgcatcgctgcgccgagttcggcgccatgcacgtccaccacggtcgactgccgttccccgaactggagcgtttctga

SEQ ID NO: 320623 - DNA, 1080 bp, Pseudomonas aeruginosa
atgagccagccgtatttcgatccggacgctggcgccgaccatgccggcgcgctgctcgagcgggtccgcgacgccctggcgcggcgcgcgccgctgcgcatcgtcggcggcgatagcaaggcgttcctcggcaggccggttgcgggcgaaccgctggcgctcgccgaacaccgtgggatcgtcgcctacgatccctgcgaactggtgatcaccgcccgtgccggtacgccgctggacgagctacaggccgtgctggcgcgcggcgggcagatgcttgcctgcgaggcgccgggtttcggcggccgggcgacggtcggcggggtgctcgccagcggcctgtccggaccgcgccggccctgggcgggagcggtacgcgatttcgtcctcgggacgcggctgatcagtggcctgggcacccacctgcgcttcggcggcgaggtgatgaagaacgtcgccggctacgacctgtcgcggttgctggcgggcagcttcggttgcctcggggtggtcaccgaagtgtccttcaaggtgctgcccatgccgcgctgccaggccggcctgagcctggacctgccggtggcgacggcgttgcgcaagctggccgagtggggaggccagccattgccgatcagtgcggcctgccacgacggcgaagccctgcgcctgcgcctggagggcggcgagggctcggtacgctcggcgcgcgaccgcctcggtggcgaagcgctcgaggacggcttctgggccgacctgcgcgagcagcgcctgccgttcttcgacgacccgcgaccgctctggcgcctgtcgctgccggcgctggcgccggagacgccgttgcccggtcgtcagttgctggactggggcggggcgctgcgctggctgaaaagcgacgcgccggccgcggacatccgtgcgtgggccgccgcccatggcggtcacgccacctgctaccgcgccggccatctcgatgcgccgttccagccgctaccgcctggactgctcggcctgcaccgggcactcaaacgccagctcgacccgcagggcatcttcaatcccgggcggatgtacgccgaactctga

SEQ ID NO: 320624 - DNA, 1227 bp, Pseudomonas aeruginosa
atgcaaaccaacctctgcgattccgcccggcaacgcgccgaggccgccgaagccgagcgcatcctgcgcagctgcgtgcactgcggtttctgcaacgccacctgcccgacctaccaggagctgggcgacgaactcgacggcccgcgcggacggatctacctgatcaagcagttcctcgagcgcgacgaggccagcgagcgcacccgcctgcacctcgatcgctgcctgaactgccgcaactgcgaaaccacctgcccgtccggagtcgagtaccacaagctgctggatatcggccgcgacctcctcgccgaacgcctgccgcgcggcttccggcaacgcctgctgcgcgacgggctgcgcctgctggccccgcgcccggggttgttcggcgcgctggccggcgctgccgggcggctgaggcctctgctgcctgaggcgatgcagggcaagctgccacgtcgggtcgcggcgccgggcaggcggccgcagccccggcatgcgcggcgcgtgctgctgctcgaaggttgcgtgcagccggcgctgtcgccgaacaccaacgccgccgccgcgcgggttctggaccgcctgggaatcagcgtgacgccggcggccgcggccggctgctgcggcgcgctggatttccacctggatgcgcaggagcgcggccgccagcgcgcgcggcgcaatatcgacgcctggtggccgttgctgcgcgagggtgccgaggccatcgtgcagaccgccagcggctgcggcgccttcgtcaaggactacgcctacctgctgcgcgacgacccacggtacgcggacaaggcgcgcgaggtcgccgccgctgcccgcgacctggtggaagtgcttcgcgacgagccgctggagtccctcggcctgcgctgcgaccagcgcctggcgttccactgcccatgcacactgcagcacgcgcaacgactgggcggggccgtggaggcggtgctgcggcgactgggcttccatctcaccgaggtggccgacggtcatctctgctgcgggtccgccggcacctactcgctgacccagccggcgctgtcccggcgtctgcgcgacaaccgcctggacgccctggaaagcggcgcgccggatgtcatcgccacggccaacgtcggttgccaggcccatctcgacggggccggacggaccccggtacgccactggatcgagctgctcgaccaggccttgcccggaggagagtga

SEQ ID NO: 320625 - DNA, 402 bp, Pseudomonas aeruginosa
atgcacagcaagccggtactcggccgcgaggaggtcgcccgcgtccttggcgcggcccgcgaggaggcacagcgccaaggctgggcggtgagcatcgcggtggtcgacgacggcggccacccgctggcgctggagcgcctcgacggctgcgcgccgatcggtgcctacatcgcgacggaaaaggcccgcagcgccgccctgggacgccgggaaacgaagcgctacgaggacatgatcaacggcggacgcagcgccttcctctcggtgccgctgctgcaggccaccctggagggcggtgtgccgatcctggtggacggacaggtggtcggcgcggtcggggtttccggcgtacgcgccgaagaggacgcccgggtggcgcggatcggagccgaggggttgtga

SEQ ID NO: 320626 - DNA, 168 bp, Pseudomonas aeruginosa
atgaagaagtggcaatgcgtggtgtgtggactgatctatgacgaggccaaaggctggccggaagaaggcatcgaggcgggaacgcgctgggaagacgtgcctgaagactggctgtgccccgactgcggcgtcggcaagctggacttcgagatgatcgaaatcggctga

SEQ ID NO: 320627 - DNA, 168 bp, Pseudomonas aeruginosa
atgcgcaagtggcaatgcgtggtctgcggcttcatctacgacgaagccctgggcctgcccgaagaaggcattccggcgggaacccgttgggaagacatcccggcggactgggtctgcccggattgcggtgtcggcaagatcgatttcgagatgatcgagatcgcctga

SEQ ID NO: 320628 - DNA, 1155 bp, Pseudomonas aeruginosa
atgagcgagcgtgcgcccctggtaatcataggaaccggcctggcgggctacaacctggcccgcgagtggcgcaagctggacagcgagacgccgctgctgatgatcaccgccgacgacggccgttcctattccaagccgatgctctccaccggcttctcgaagaacaaggacgccgacggcctggccatggccgaaccgggcgccatggccgagcaactgaacgcacgcatcctgacccatacccgggtcaccggtatcgatcccggccatcagcggatctggatcggcgaggaagaggtgcgttatcgcgacctagtcctggcctggggcgcggagccgatccgggtgccggtcgagggcgatgcccaggacgcgctctacccgatcaacgacctggaagactacgcgcgcttccgccaggcggctgccggcaagcgccgggtactgctgctcggtgcggggctgatcggttgcgaattcgccaacgacctctccagcggcggctaccagctcgacgtggtggcgccttgcgagcaggtcatgccgggcctgctccacccggccgcggcgaaggccgtgcaggcaggcctggaaggcctcggcgtgcgcttccacctggggccggtgctggccagcctgaagaaggccggcgaggggctggaagcgcatctttcggatggcgaggtgattccctgcgacctggtggtctccgccgtcggcctgcgtccgcgcaccgaactggccttcgccgccgggctggcggtcaaccgcgggatcgtcgtcgaccgctcgctgcgcacctcccacgccaacatctacgcgctgggcgactgcgccgaagtggacggcctcaacctgctctatgtgatgccgctgatggcttgcgcacgcgcgctggcgcagaccctcgccggcaaccccagccaggtggcctacggtcccatgccggtgacggtgaagaccccggcctgcccgctggtggtgtcgccgccgccccgcggaatggatggccaatggctagtggaaggctctggaacggacctcaaggtcctgtgccgggataccgctggtcgagtgatcggttatgccctgaccggagcggcggtgaacgaaaaattggccctgaacaaagagttacccggcctcatggcttga

SEQ ID NO: 320629 - DNA, 273 bp, Pseudomonas aeruginosa
atgcgtaaaccagaactagccgccgctatcgccgaaaaggccgatctcaccaaggaacaggccaatcgcgttctcaacgccctgttggatgaaatcaccggcgcgctgaaccgcaaggacagcgtgaccctggtcggtttcggcaccttcctgcaacgccatcgcggagcccgcacggggaagaacccgcagaccggccagccggtgaagatcaaggccagcaacaccgtcgccttcaagccgggcaaggccctgcgcgacgcggtcaactga

SEQ ID NO: 320630 - DNA, 393 bp, Pseudomonas aeruginosa
atgaaatttcgtcttctcctgtggatgcttggtcgcctgatggccaaggccagccgcgacaatcccgctttccagaagcagctcgagggcaaggacctggtgttccagttgcataccctcgacggcaaggtggcgcgccactacctggtcagggacctgcgcgtcagcagcaagcgcggtacccatccgcaaccggctttttccctggggttcaaggacggagcctacggtttcgccgcgatgacttcgaagaacccgcagttggccttcatgcagggcatccagaacaaggacatccagatacagggcaatccggcgctggtgatctggttccagggtctggtgaagtacctcaagccgaagaagaaggctccggagaagaaagccgcctga

SEQ ID NO: 320631 - DNA, 1383 bp, Pseudomonas aeruginosa
atgctccgcacgcccccccaggtcatcctccagctgctcgccaagctaggcatcgcctgccgcgaggtcagcgacagcgcggagctgcctgccgcccgccgggtccaggcggtgctgctggacgacgccgtcggcaccctgctggtgctgttcccgcagagccagttgctggacctcgcccggctcaccgaactgaccggccgcaagctgctggcgatcaagcccgagcgcctggaacgaatgctcggcaagcacgagttgcaccgcctgccggcgttgccgcccctgaccagttcgccctgcctgtacgacgagcgcctgttgcaggaaccgcgcctgctgatcgagtccggccagcccggcatcctcctggagatcgccagcaacgacttccgcggcctgctgggcaaggccagcgccgcgcgcttcggcgaaccgctggaaaacatcaacctgaaccttgaccgcccggacgacgaccgcgcggaaatcagccaggccgtgcaggccttcaccgcccggcgcatccagcagcgcctggagcagaccatcgagattccaccgctgccgcagacggcgcagaagatcatcaagctgcgggtcgaccccaacgccagcgtcgacgacatcaccggtctggtggaaaccgatccggcgctcgccgcccaggtggtcagttgggcggcctcgccctactacgccgctccgggcaagatccgctcggtggaagacgcgatcgtccgcgtcctcggtttcgacctggtgatcaacctggccctcggcctcgccctgggcaagagcctgagcctacccaaggaccagccacagcaggccacgccctactggcagcaagcgatctacaccgccgcggtgatcgagggcctgacccgcgccatgccgcgcgagctgcgcccggagtccggcctgagctacctgggcggcctgctgcacaatttcggctacctggtcctggcgcatgtcttcccgccgcatttctcgctgatctgccggcacctggaggtcaacccgcacctcggccatgcctatatcgaacagcacctgctggggatcacccgcgagcagatcggcgcctggctgatgcgcgtctgggacatgcctgacgacctctattgcgccctgcgcttccagcaggaccccagctacaccgggccgaacgcggtctacgccaacctgatctgcctgaccaaccggttgctgcgcaacagcggcatcggcgatggcccgcagcaagcgattccggtggcattgtacgagcgcctggggatcaccccggagaaggccggggacgccgtgaaaaaggtgctggaagcggaagcggccctgcgcgaactggcggcccagttcaatcgcttgccggggtga

SEQ ID NO: 320632 - DNA, 2076 bp, Pseudomonas aeruginosa
atgaccgagctgtccagggtcccggtcaccgcgctaaagggcgtaggcgccgcgctggcggagaagctcgctcgggtaggcctggaaaccctgcaggatatcctgttccacctgcccctgcgctaccaggaccgtacccgcgtcaccgccatcggcgccctgcggccaggggccgacgcggtggtcgagggcgtggtggccggcgccgacgtggtgatggggcgccgccgcagcctgctggtgcgcctgcaggacggcagcggcaccctgagcctgcgcttctaccatttcagccaggcgcagaaggacggtctcaagcgcggcacccacctgcgctgctacggcgaagtccggccgggtgcctcgggcctggagatctaccatccggaataccgcgcgctgaacggcgacgagccgattccggtggagcagaccctgacgccgatctacccgactaccgagggcctcacccagcagcgcctgcgccagttgagccaacaggccctggccatgctcggccccagcagcctgcccgactggctgccggcggaactggcccgcgactaccaacttggcccgctcgaccaggcgatccgctacctgcaccggccgccgccggatgccgacatcgaggaactggccgaaggccggcactgggcgcagttgcgcctggccttcgaagaactgctgacccaccagttatccctgcagcgcctgcgcgaagccgtgcgctcgcaggcagcgccgcgcttgccggcggccagccgcttgccgaaacgcctccttgccaacctcggcttccagccgaccggcgcgcaacgccgggtcggcgcggagatcgcctacgacctggcccaggacgagccgatgctgcgcctggtgcaaggcgacgtcggtgccggcaagaccgtggtcgccgccctcgccgccctgcaagccatagaggccggctaccaggtggcgctgatggcgccgaccgagatcctcgccgagcagcatttcctcaacttcagcaagtggctccagccgctggacatcgaagtcgcctggctggccggcaagctcaagggcaaggcccgcgcggcggcactggaacgcatcggcgacggcgcgccgatggtggtcggcacccacgcgctgttccaggatgaagtgaaattcaagcgccttgcactggcgatcatcgacgaacagcaccgcttcggcgtgcagcagcgcctggccctgcgccagaagggcgtggacggcaggctctgcccacaccagttgatcatgaccgccacgccgatcccacggaccctggcgatgagcgcctatgccgacctcgacacctcgatcctcgacgagctgccgcccgggcgtaccccggtgaataccgtgctggtggccgacagccgccgtatcgaggtgatcgagcgagtccgcgcggcttgccgcgaagggcgccaggcctactgggtgtgtaccctgatcgaagagtccgaggagcttacctgccaggccgccgagaccacctacgaagagctttcctcggcgctgggcgaactgcgtgtcggcctgatccacgggcgcatgaagccggcggacaaggccgtggtgatggaggccttcaaggaaggcatgttgcaactgctggtggcgaccacggtgatcgaggtcggcgtcgacgtgcccaacgccagcctgatgatcatcgagaaccccgagcgccttggcctggcccaactgcaccagttgcgcggccgggttggccggggcagcgccgccagccactgcgtgctgctctaccacccaccgctgtcgcagatcggccgcgagcggctgggcatcatgcgcgaaaccagcgacggcttcgtcatcgccgagaaggacctggaattgcgcggccccggcgaaatgctcggcacccgccaaaccggcctgctgcaattcaaggtcgccgacctgatgcgcgacgcagacctgctgccggcggtccgcgatgccgcccaatccctcctggcgcactggccgcagcatgtcagcccgctgctcgaacggtggttgcgccacggccagcaatacggtcaagtgtga

SEQ ID NO: 320633 - DNA, 933 bp, Pseudomonas aeruginosa
atgaccctcaccgaactgcgctacatcgtcaccctcgcccaggaacaacacttcggccgcgccgccgagcgttgccacgtcagccaaccgaccctctcggtcggcgtgaagaagctcgaggacgagctgggggtgctgatcttcgagcgcagcaagagcgccgtgcgcctgacgccagtgggcgaaggcatcgtcgcccaggcgcagaaggtcctcgaacaggcccagggcatccgcgagctggcccaagccggcaagaaccagttggccgcgccgctgaaggtcggcgccatctacaccatcggtccctacctgttcccgcacctgattccccagctgcaccgggtcgcgccgcagatgccgctgtacatcgaggagaacttcacccatatcctccgcgacaagctgcgtaccggcgaactcgacgcgatcatcatcgccctgccgttccaggaagccgacgtcctgaccaagccgctgttcgacgagcccttctatgtgctgatgccggccgaccatccttggaccgccaaggccagcatcgattccgagctgctcaacgacaagagcctgctcctgctcggcgaaggccactgcttccgcgaccaggtgctggaagcctgcccgaccgtgcgcaagggcgacgagaacaagcacaccacggtggagtcctcgtcgctggagaccatccgccacatggtcgcctccggactgggcgtctcggtgctgccgttctccgcggtggacagccaccactacgcgccgggcgtcatcgaagtgcgcccgttcagcgcgccggtgccgttccgtaccgttgccatcgcctggcgcgccagcttcccgcgtccacgcgccatcgaagtgctggccgactcgatccgcctgtgctcggtggcccgtccgcaaacccaggaacaaccgcaaatcgcatga

SEQ ID NO: 320634 - DNA, 852 bp, Pseudomonas aeruginosa
atgtcgcaaacagtgatgatcgccggctgcggcgatgtcggcgggcgcctcggcgaggcgctgctggccgatggctggcgggtccatggcctgcgtcgctcggtggacgccttgccgcaggggatcctgccggtggctggcgatctgcaggctccggagtgtcccgcgcagtggccgagcgagccgctcgactacctggtgtacagcgccgccgccagtcagcacgacgaggctggctaccgtgccgcctacgtcgacggcctgcgccatgtgctgggctggttgcaggcccgcggccagcggcccaggcgcctgctgttcgtctccagcaccggggtctacgcgcagaccgatggcggctggatcgacgaggagtcgccggcgctttcccaggcctattccggacggatcatgctcgacgccgagcaggtcgcgctggacagcgggataccggctacccgcgtgcgcctggccggcatctacggtccggggcgggagtggctgctcaaccaggtgcgccaggggtaccgggtggtcagcgagccgcccctgtatgccaaccggatccacgccgacgatgcggccgggctgctggccttcctgttgcgcgccgatgccggcggccaggcgttggaggactgctacatcggtgtcgacgacgcgcccgtggcgatgcacgaggtggtcgactacctgcgccagcgcctgggcgtcagccaatgggccgacgaacattcggtacgccgcgccggcagcaagcgttgcagcaatcgccgcgcccgggcgctcggctgggtgccgcgctatcccagctaccgcgagggctacgcggcggtactcggggacgcctga

SEQ ID NO: 320635 - DNA, 801 bp, Pseudomonas aeruginosa
atggctgccaaccggttgttggcgcgtccctggctgcctggcgtggagctgttccatgcggacttctccggccaggcgttcggccgccacagccattcggccttcgccatcggctcgatcctccacggcgtcggcggctaccagtgccgcgggcggcgccatgcgctgccggccggcaccctgtcgctgatgaacccggaagagccacataccgggcacgccgaatccgagcggctggtctaccggatgctctatgtcgaggaaacgcgcctgctcggcctgctcggccgcaaacagttgccgcgcggcttcggcgaactgaacccggccgacgacggcagcgtggcggctggcctggagtggctggccgaggatttccagcgcagcgacgcattggggttggaaagccgcctgctggccttgctcgaacaggtcttcgtgcgccacggcggcttgcgcccggcggctgcggcgccccgcgacggcggaaccaccgcacgcctgcgcgattacctggaagcgcatgccaccgaggcgctcggtctggaccagctggcgcagttgctgcagcgccacccgcgccacctgatcgaggctttccggcgtgcctacggcgtgccgccgcatacctaccaactgcaatgccgggtgcgccaggccaagcgcctgttgctggaagaacggccgctggcggaactcgcccagcacctcggcttctacgaccaggcgcacttctccacgaccttccggcgtttcaccggggtcactccggggcagttccggcgcagcgccaagacctga

SEQ ID NO: 320636 - DNA, 621 bp, Pseudomonas aeruginosa
atgttcgctgcgttcgtccttgtcgccagtacccatttcgctgccctgctgtcgccggggccggacttcttcctgttggtgcgcgccgccctgctgcgcggccggcgccaggccgacggggtggccgccggcatcgccctggccaacctcctgagcatgctgctggtgctcggcctgctggccagcgtgccggactcggcgcacagcgccttgcgctggctgcaggcgctcggcggactgtacttcctctggctggcgggccaggcgctgcttgcgcagaggcgactggaaatgccggcgcagcgcgacgtcccgtcccgcggcggctatctgcgcgggctgcgcgacggcctgctggcgagcagcctgaatcccaagctgccgatcttctatgcggggctgttcggcgtgctggcgcgcttcagcctgccgggctgggcgctggccctgtgcctggcgtggatgagcctggcggtgctgtgctgggacatggcgctggtgcgcctgctggacaggccgcgctggcgcggctggttgcaacggcgggtaggtgcgctggaccggctgtgcggcgtcctgctgctggcgctgggcggctggctggtgctggccgccctctga

SEQ ID NO: 320637 - DNA, 732 bp, Pseudomonas aeruginosa
atgcgccgcgtgattttcctcgccgcagccgccaccctgctggccggctgcgccggcacggccgatccgtccggcacctggatcaaccaggccgcgatcgacgccgcgagcaaggacggcaagctgcgcgaggccctgctcgcctatggcccgaacctggaatggaagctcgacagcaaggcaggcgaagccaccttcagcaacggcttcgaactgggcgaagggaccctgagcaagagcgatgacgagcactggaaggttgccttctatggcgacgacaaccaggagagtctcgaactggacggcaaggagctgatccagcaggccagcgccaacggcccggaacagcgtttccgccgtctcgacccgcaacccgcggccaacagccctgccggcagcggtttcgagcgggccttgtatggcagctatctgaagggcagctggaagatccgcgaaggccagggccagggcggcaaggtcgagttccaggccaatggcctggtcagcggtctgcccggcgccgaacgctacgcgctgtgcctggccggcgattgcgcagcgatgagcggcgacaacgacagcatctggctgcaacaaggcaaccgcggccgcgaattgctgttcagcctcgacgacgacgagctgcaactgttcgaagcggtcaataccgccggcgccaacgagatgcccagctacgtgcccggcaagcgcgtctggctgctggagcgctga

SEQ ID NO: 320638 - DNA, 381 bp, Pseudomonas aeruginosa
atgaccaagaccgttatccacaccgacaacgccccggccgccatcggcacctactcccaggccatcaaggccggcaataccgtctacgtgtccgggcagatcccgctggacccgaagaccatggaactggtggaaggcttcgaggagcagaccgtccaggtgttcgagaacctcaaggcggtgatcgaggcttccggcggctacctgcacgacgtcgccaagctgaacatcttcctcaccgacctgtcgcacttcgccaaggtcaacgagatcatgggccgctacttcacccagccctacccggcgcgcgccgctatcggcgtagccgccctgccgaagggcgcacaggtggaaatggacgccatcgtcgtcctcgaataa

SEQ ID NO: 320639 - DNA, 2106 bp, Pseudomonas aeruginosa
ttgccgggcatagacgccttcgccgacagactgtcgagctacctcgggccggaccaggtcaacctggtccgccgcgcctactactacgccgagcaggcccacgacgggcaacgccgccgcagcggcgaaccgtacgtgacccacccgctggcggtctccaacatcctcgccgacatgcacatggaccatcagagcctgatggccgcgatgctgcacgacgtgatcgaggacaccggcatcgccaaggaagcgctcaccgcgcagttcggcgagacggtttcggaactggtcgacggggtcagcaagctgacccagatgaacttcgagaccaaggccgaggcccaggccgagaacttccagaagatggccatggccatggcccgcgacatccgcgtgatcctggtcaagctggccgaccgcctgcacaacatgcgcaccctcgaggtgctgtccggcgaaaagcgccggcgcatcgccaaggaaaccctggaaatctacgcgcccatcgccaaccgcctgggcatgcacaccatgcgcgtggagttcgaggacctaggtttcaaggccatgcacccgatgcgcgccgagcgcatccgccaggcggtgaagaaggcccgcggcaaccgccgcgagatcgtcggcaagatccaggagtcgctggtcaactgcctcgcccgcgaaggcatggaaggccaggtgatcggccgcgagaagcacctctacagcatctaccagaagatgcgcggcaagcgtaaggcgttcaacgagatcatggacgtctacgccttccgcatcatcgtcgacaaggtcgatacctgctatcgcgtgctgggcgccgtgcacagcctgtacaagccgttccccggacgcttcaaggactacatcgcgattcccaaggccaacggctaccagtcgctgcataccaccctgttcggcatgcacggggtgcccatcgagatccagatccgtacccgcgagatggaagagatggccaaccacgggatcgccgcgcactggctgtacaagtccaacgacgagacgcccaagggcacccatgcccgcgcccggcaatgggtgaagggcgtgctggaactgcagcagcgcgccggcaactcgctggaattcatcgagaacgtgaagatcgacctgttcccggacgaggtctacgtgttcacgcccaagggccgcatcatggaactgcccaagggttccaccgcggtcgacttcgcctacgcggtgcacaccgacgtcggcaacagttgcatcgcctgccgcatcaaccgtcgcctggcgccgctctccgagccgttgcagagcggccagacggtggaaatcgtcaccgccccgggcgcccggccgaacccggcctggctgagcttcgtggtcaccggcaaggcgcgcacccatatccgccatgcgctcaagctgcaacgccgctccgagtcgatcaacctcggcgagcgcctgctgaacaagacccttaccggcttcgacagccacctcgagaagattccccaggaacgcatccaggccgtgctcgccgagtaccgcatggaagtcttcgaggacctgctggaagagatcggcctgggcaaccgcatggcctacgtggtcgcccgccgcctgctgtccagcgagggcgaggaagcgccaagcgccgagggtccgctggcgatccgcggtaccgaaggcctggtcctgagctacgccaagtgctgcacgccgattcccggcgacccgatagttggccacctgtccgccggcaagggcatggtggtgcacctggaaagctgcaagaacatcagcgaagtacgccacaacccggaaaaatgcatccagctcagctgggccaaggatgtcaccggcgaattcaatgtcgaactgcgcgtcgagctggagcaccagcgtggcctgatcgccctgctcgccaccagcgtcaacgcggccgacggcaacatcgagaagatcagcatggacgagcgcgacggccgcatcagcgtggtccagctggtcgtcagcgtgcacgatcgcgtccacctggcccgcgtcatcaagaagctgcgcgccctcaagggagtgatccggatcacccgcctgcgtagctga

SEQ ID NO: 320640 - DNA, 267 bp, Pseudomonas aeruginosa
atggcccgcgtcaccgttgaagactgcctggacaacgtcgataaccgtttcgagctggtcatgctcgccaccaagcgcgcccgtcagctggctaccggcggcaaggagccgaaagtggcctgggaaaacgacaagccgaccgtcgtcgccctgcgcgagatcgcttccggcctggtcgatgagaacgtcgtccagcaggaagacatcgtcgaggacgaaccgctgttcgcagcgttcgacgacgaggccaacaccgaggccctgtaa

SEQ ID NO: 320641 - DNA, 612 bp, Pseudomonas aeruginosa
atgtccggcaccctgtacatcgtttccgctccctccggcgccggcaagaccagcctggtgaaggccctgctcgacgccgcccccgaggtccgcgtgtccgtctcccataccacccgcggcatgcgtccgggcgaggtggacggggtcaactaccacttcaccagccgcgaggaattcctcgccatgctcgaacgcaacgagttcctcgagcacgccgaagtcttcggcaacctctacggcacctcgcagcgctgggtcgagaaaaccctcgccgaaggcctcgacctgatcctcgagatcgactggcagggcgcccagcaggtgcgccggctgatgcccgaggcccaatcgatcttcatcctcccgccgagccaggaagccctgcgccagcgcctgaccaaccgcggccaggacagcgacgaggtgatcgagcggcgcatgcgcgaagccgtcagcgaaatgagccactacgtggagtacgatcacctggtgatcaacgacgatttcgcccacgccctggacgacctcaaggcgatcttccgcgcccgccagttgcgccaggacgcccagcagcaacgccacgccgaactgctcggtcgtctgctcgcctaa

SEQ ID NO: 320642 - DNA, 864 bp, Pseudomonas aeruginosa
atggtgcacagcatgaccgccttcgcccgcgtcgagcaggccggtacccacggcaccctgagctgggagctgcgctcggtcaaccaccgttacctggagccccacctgcgcctgcccgacgccttccgcgacctcgaaggcgcggtgcgcgaggcgctgcgccagggcctgtcgcgtggcaaggtggaatgcaccctgcgcttcgccgaggaaaccgccggcaagagcctgcaggtcgaccaggagcgcgcccgccaactggtcgccgccgccgaaggcgtagccgccctgatccgccagccggcgccgctcgatccgctcgccgtgctggcctggcccggcgtactggtggccgactcggccgatccgcaggcgctcaacgccgccgccctggaagccttcggccaggccctggagcaactcaaggccggccgctcgcgcgaaggcctggagctggcgaagctgctcaacgatcggctcgacgcgatgctggtggaagtcggcaacctgcgcgaactggtgccgaccatgctggccaaccagcggcagaagatcctcgaccgcttcgccgaactcaaggccgaactcgatccgcagcgcctggagcaggaactggtcctgctggcgcagaagagcgatgtcgccgaggagctggaccgcctcgccacccacgtcggcgaggtccgccgggtcctcaaggccggcggcgccgccggtcggcgcctggacttcctgatgcaggaactcaaccgggaagccaacactctaggctccaaggcgttcgacccgcgctcgacccaggcggcggtcaacctcaaggtcctgatcgagcagatgcgcgagcaggtccagaacatcgaatga

SEQ ID NO: 320643 - DNA, 720 bp, Pseudomonas aeruginosa
atgaatcgtcccagtggccgtgccgccgaccagctgcgcccgatccgcatcacccgccattacaccaagcacgcagaaggttcggtgctggtcgagttcggcgataccaaggtgatctgcaccgtcagcgcggagtccggggtgccgcgcttcctcaagggccagggccagggttggctgaccgccgagtacggcatgctgccgcgctccaccggcgagcgtaaccagcgcgaggccagccgcggcaagcagggcggtcgtaccctggagatccagcgcctgatcggccgctccctgcgagcggcgctggacctcagcaagcttggcgagaacaccctgtacatcgactgcgacgtgatccaggccgacggcggcacccgcaccgcctcgatcaccggcgccaccgtggcgctgatcgacgccctggcggtgctgaagaagcgtggcgcgctcaagggcaatccgctgaagcagatggtcgccgccgtttccgtgggtatctaccagggcgtgccggtcctcgacctggactacctggaggattccgccgcggaaaccgacctgaacgtagtgatgaccgatgccggcggcttcatcgaggtgcagggaaccgccgaaggcgcgccgttccgtcccgccgagctgaacgccatgctcgaactggcccagcagggcatgcaggagctgttcgaacttcagcgcgccgcgctggccgaatga

SEQ ID NO: 320644 - DNA, 372 bp, Pseudomonas aeruginosa
atgaacgatgtatccgaagaggtcgccgcgacccccggccaggaagcccggcaatgggcgatgttctgccatttcgcggcgttcatcggcctggtgtttcccttcggcagcctgctcgggccgctgatcgtctggcaactcaagcgcgagagcgatccgttcgtcgacgcccagggcaaggaagcgctgaacttccagatcaccgtggcgctggcgatgttcgtcagcttcctgctgatgctggtggtgatcggcttcttcctgctcggcctggtctgcctggcggcgctggtgttgaccatcatcgccggcatcaaggccaacgaaggcaaggcctatcgctatccgttctgcctgcggctgatcaagtag

SEQ ID NO: 320645 - DNA, 780 bp, Pseudomonas aeruginosa
atgcggatcatcagtgtgaacgtgaatggtattcaggctgcggccgagcgcggtttgctcagttggctgcaagcacagaatgccgacgtgatctgcttgcaggacacccgagcctccgccttcgatctggatgacccgtccttccaactggacggctacttcctttatgcctgcgatgccgagctacccgaacagggcggtgtcgcactctacagccgtttgcagcccaaagctgtgatcagcggcttaggtttcgaaacggccgatcgttacgggcgctacctgcaagccgacttcgacaaggtgagtatcgccaccctgctgctgccttccgggcagagcggagacgagagcttgaaccagaaattcaagttcatggacgacttcacccattacttgagcaagcagcgtcgcaagcgccgcgaatacatctactgcggctcgctgtacgtcgcccatcagaagatggatgtgaagaactggcgcgaatgtcagcagatgccgggcttcctcgcgcccgaacgggcctggctggacgaagtgttcggcaacctcggctatgccgacgccctgcgcgaagtcagccgcgaaggcgaccagttcagctggtggccggacagcgaacaggccgagatgctcaacctcggctggcgcttcgactaccaggtgctgacccccggcctacgccgcttcgtgcgcaacgccaagctgccgcgccagccgcgcttctcccagcatgcgccgctgatcgtcgactacgactggcagttgagcatctga

SEQ ID NO: 320646 - DNA, 642 bp, Pseudomonas aeruginosa
atgcaggcgtatcagcgcgatttcattcgtttcgccatcgagcgcggggttctgcgcttcggtgagttcaccctcaagtccgggcgcaccagcccctatttcttcaatgccggcctgttcgacagcggcctggcgctggcccgcctgggacgcttctacgccgaggcggtgatcgacagcggaatcgacttcgacgtcctgttcggcccggcgtacaagggcattcccctggcagccaccaccgcggtggccctcgccgagcagcaccagcgcgacctgccctggtgcttcaaccgcaaggaagccaaggaccacggcgaaggcggcacgctggtcggcgcgccgctgagcggccgggtgctgatcatcgacgacgtgatcaccgccggcaccgcgatccgcgaagtgatgcagatcatcgacgcccagggcgccagggcggcgggcgtgctgatcgcgctgaaccgccaggagcgtggcaagggcgagctgtcggcgatccaggaggtcgagcgcgacttcggcatgccggtggtgagcatcgtttccctggagcaggtgctggaatatcttgccgaagatgctgaactgaagaagcatctgccggcggtagaggcctatcgcgcccaatacggtatctga

SEQ ID NO: 320647 - DNA, 618 bp, Pseudomonas aeruginosa
atggtcggacaggatgtaatgcgttgcctgatggccctggggctggtgctccaggggatttccttcggcgcccaggcggcgccgggcggagcggtggagctgtaccgctatgtcaacgacaagggcgtggtggtgctcgaccgccagggtgtgccgccgcagtacatcggcaagggctaccaggtcctcaacgaccagggccgggttatccgcaccgtaccgccggcgccgaccgccgaggaactgcggcagcgcaaggcggcccaagcccaggccagctccgatgcgcagctgctgcgcctgtattccagcctcgaggacgtcgaccgcgctcgcgaacggcgcctggcggaactggacgggctgagcagcgtggcgcgcggcaacctgcagtcgctcaagctgcaacaggccaacctgcaaggccaggcggccaaccaggagcgtgccggacgtccggtggcgcaggcgctggtggaccagttggacgatctcaagcaggaggaaaagcgcctgcagggcgagatcgggcgtttccagaaggcccgcgaagacgcggaaagaacctatgccgccgaccgcgcgcggctctcccagctactcggcgtgagtccctga

SEQ ID NO: 320648 - DNA, 465 bp, Pseudomonas aeruginosa
atgagcagcgcagcacagcgccagaactacaccttcttccattccctgcgggttcgctgggcggaggtcgatccgcagggcatcgtcttcaacggcaactacctgacctatctcgacgtcgccaccaccgagtactaccgccagctcggcatgtcctacccggccgacctgctgcgcggcggaggcgacctgttcgcggtgaagagcaccctggaataccgcgccccggcgcatttcgacgactggctggacatcggcacccgcgtggcgcggctggggcgcagcagcctggttttcgagctgggcatctggcgcgacgagcagttgctcacagtcggcgagctggtctacgtctatgcggatgcgaacgagcgacagagccagcccctgccggactggctgcgcgagaagatcagggcgttcgagcgacagtcgccagtggaatcagggactcacgccgagtag

SEQ ID NO: 320649 - DNA, 390 bp, Pseudomonas aeruginosa
atgtcgtccacgctccgtcccggaccgggcaactcgcgcctttgccgcccggggttgctgcttgccctgggcctgatgctggtggcctgcggagaatccacggagccgccggcgcgggccgccgattcccagcgtgtccctgcggaccctgcgttggcgcaggtgtattccgccagttgcaagctctgtcacgccaatcccgcctccggcgcgccgctgaccggcgatgccgctgcctgggcgccacgcctggcgcagggcatcgacaccctgctggaccacagcatcaacggctacaagggcatgccacccatgggcatgtgcatgcagtgctcggaagaacagttccgggctttgatcgatttcatgtccgcagcgcaggaccgatag

SEQ ID NO: 320650 - DNA, 1395 bp, Pseudomonas aeruginosa
atgccaagtcatctgtcgcgacgccagctcctgcaacgggcgggagcgctcggtgcgttcgccgccatggtgggaaaccccgcgctggcggagttgctccgcgcaccgcgcctgattccctggcgcaactggtccggcgcgcaaagctgcctgcccctggcgcgggaggcaccgaaagacctcgacgaactggtccggatcatccgccaggcgtccggcaggatccgcccggtgggctccgggcattcgttcagcgcgttggtcccgaccgacggcaccctgctctcactcgcctacttcagcggcttgctcagccacgacagcgcgaccctccaggccgagttcggcggcggtacgccgatgtcgcagatgggcgctccgctcaaggagatcggccaggcgctggtgaacatggccgatatcgattaccagaccctggccggcgccatcgctacttccacccatggcaccggggtcggcttcggttcctattccgcccaggttcgcggtctgcaactggtcaccgcgagcggcgaggtgctcgagtgcgacgccaagcgcaacgtggaggtgttcgatgccgcgcgggtctcgctgggggcgctgggcgtcgtgacccgggtgcgcctgcagaaccgcgcggcctaccgcctgcgtgaacggcagtggatcgcccggaccgaggaattgctggaagacgtggagaagaatacgcgcgagaaccagcactgggagatgctggtggtgacccattccgactacgccctgtcgatcgccctcaacgagaccgacgagccgaagaccccgcccctggacccggcgaaggaaggcggcaacgagttcgtcggcctgatcgaaggtctcgacaagtacctcagcgacttcccggagacccgccgcaccctgctcaacagcctgcgccatttcgcccgcttcgacgagcgggtcgacgattcctatgcggtctacgccaacgtgcgcaacgtgcgcttcaacgagatggagtactcggtccccgccgagcatggccccgcctgcctgcgggagatcctcgcgctgatccgcgacaaggacctgcgcacctggtttcccatcgagtaccgctatgtgaaggccgacgacattcccctgagcatgttcgagggccgcgacagttgttccatttccgtgcatcagcactacagcatggaccaccacaacttcttcgccgcggtggaaccgatcttctggaaatacgccgggcggccgcactggggcaagctgcatggcctcaacgcgcaccagttgcaggggctctatccgcgctggaaggcattcgccgaggtgcgccaggcgctggatccccgcgggcggttcctcaatgcgcacctctcttccatcctgggcgtgacctga

SEQ ID NO: 320651 - DNA, 1278 bp, Pseudomonas aeruginosa
gtgaatcgacgcaagttcatgttcgccggcctcggggccggcgcgctgctggcgggaactgccgcctggatgcgtcccgccgaccgtggctggccgtacgacgactatttccgcgcgctgaaccgcgaactcaaggccaatggcccgatgtgcccggtgctgctcatcgacctcgatcgcctggaccacaacatcgatgtggtgatgcgttcggtccgccgcggcggcaagcatctgcggctggtggagaaatcgctgccttcgcccggcctgctggcgtacatcgccaggcgcgccggcacccggcggctgatgtccttccaccaaccgttcctcaaccacgacgcggtcgcttttgcggatgccgacatcctcctcggcaagccgttgccggtgcgttcggcggaactgttctaccgcgagcacaagggtgcgttcgacccggcgcggcagctgcaatggctgatcgatacgccgcagcgcttgcgtcagtacctggcgctggcccaggggctgggtacccggatgcgcgtcaacatcgaactggacgtcggcctgcatcgcggcggggtggccgaccaggccgcgctgggcgaattgctggcgctgatcgcggcgcatccgcagtacctggagttcgctggcttcatgggctacgaccccttcgtcggaatgggggtgccgggcatcctcggttcgcccgaggagctgttcgccaaggtcatggcgctctaccagggacatgtcgacttcacccgccagcgcttcgccgcgctgtggacaccacagctgaccctgaataccgccggcagccccagctatcgcatgcacgagaaggaaacgctgagcagcgaggtctcggtgggcaccgccatgctcaagccgagccactacgacctggcgtccctggccgagcatgtgccggccgtctacatcgccacgccggtactcaagagcaccggcgcggtgcagatcccggcgctggacggcaagtcccggctgttttcctggtgggaccccaaccagcgcggcaccttcttcatctacggcggcaactggatggccgacttcgcctcgcccgagggactgcgcagcaacggcatctacgggcgcagctcgaaccaggaaatggtcaacggctcgccttcggtgggcctggaggtggacgaccaggtcttcctgcggccgacccagagcgagtcggtgctgctgcaattcggcgacctgctggcgctgcgcggcgggcggatcgtcgagcgctggccggtttacgcctag

SEQ ID NO: 320652 - DNA, 951 bp, Pseudomonas aeruginosa
atgaacccgatccgcccccacaggcccctgcgcctggccgcctgcgtcaccctcgccgtcagctgctgcacccacgccagcgaaggcggcgtggacaacattggtccaggaaccgacggtttcttcaccctgccactggacgtcgacaacctccccgaccacatgttcgccttcaacgtctactacaaccactacgaagccaggaagctgaacatcagctccttcggcggcaaggtgtccgacgtgaagatcagctcggatgcgatcatccctcgcctggactacctgagcccgctgcggatcttcggcgggcgcctgggcggctacatcgcccagccctatctccgccaacgcgtggccgcgttcggcctgagcgacgaacgggaaagcatgggcgacaccaccttcgcgccgatcatcctctgggacatgggcaaggacctgaccctggccgccgccgtggaggtcaccgtgcccaccggcaagtacgatgccgagcggctggccaacaccagcaacaacttctacacctacaagccgctgttctccttcacctggctgcccaccgaacgcaccgagctgtcgctgaaggccacctacagcttcaacatggaaaaccacgacaccgactatcgctcggggcagatcttccatttcgactattccgccagctaccgggtgaccgacaacctgcgcctcggcctgaacggctactacctcaagcagaccaccgacgacaaacagaacggcgagaccgtacgggtgttcggtttcggcgaggaagtcgacgacggcgtacgcggccaggtcttcgccatcggcccggccgtgcacctgaccttcctcaagtacgccagcgcggagatccgctgggccaaggaattcgacgtggagaaccgccccgagggcgacatgctctgggccaagctgaccattccgttcgaactctga

SEQ ID NO: 320653 - DNA, 1071 bp, Pseudomonas aeruginosa
atgcacaacaatgccgccgatgcgcgctacgaactcgcccaggtatccaccttcctgctgcagacgctggccgaggtggtcgaaggccatggtgtcgatcccgcgcggctgtgccggggcctgggcttcaccgtcgaagacctgcaggaccctacccagcgcatctcctaccgccaggccgtgagcatgatccagcgtgccctccaggccctgccggagcggggactggggctgtgggtcggacaccagaacgtgctcggtacccttggcctgctgggccatgtgctgtcgctgtgccggaccctgcgcgacgcgttcgacatcggcgtgcgctaccagcacagctcgggcggtatcgtcacctccagcgtctaccagcagggcgacaccttcttcgtcgaggttgaatgccacctgctcagcagcgaggtgcaggtgttcgccattgaggagttcttcgccagcctgctggtgtatgggcgtgccctggtcagcccggcgttcgaaccgctgggcatcgaactcatccatgccgctccgccctacgcgggcgaatacctgcgcctgctggggccccaggtacgcttcggctgcctgcacaaccgcatggcgatcgccagccactggctggacatgcgcctgcccaaccacaacctgccggcgttgcgccaggcgctggccctgctggagcaggaaagcacccaggtgcaccggaaactcgacttggtccaggcggtggaacgggccatcgcccgcgacctaagcctgggcagccagatcgaaaggatttccgccgaactgaacatgagcagccgcaccctgcggcgccggctggccgaacacgggctgaccttcgaggcgttgctggagcaggtgcggcgagggcgggcgatgagcctgctgggcaaccccgggatgtccatcgaacgtatcaccgaggaagtgggatatcgtgatatccgcagtttcaggcgcgcgttcaagcgctggacgggagtgagcccggcgaccttccgtagcgagggcacgagcccgttggaccaggtcttcacgctggccgcgcgacgctaa

SEQ ID NO: 320654 - DNA, 906 bp, Pseudomonas aeruginosa
atgaccctgagtcgcgatgacgccgcccaggttgccaaggtcctttccgaggccctgccctacatccgccgcttcgtcggcaagacgctggtgatcaagtacggcggcaacgccatggagagcgaggagctgaaggccggcttcgcccgcgacgtggtgctgatgaaagcggtcggcatcaacccggtggtggtgcatggcggcggcccgcagatcggagacctgctcaagcgcctgtcgatcgagagccacttcatcgacggcatgcgcgtcaccgacgcggcgaccatggacgtggtggagatggtcctcggcggccaggtgaacaaggacatcgtcaacctgatcaaccgccacggcggcagcgccatcggcctgaccggcaaggacgccgagctgatccgcgcgaagaagctcaccgtgacccgccagaccccggagatgaccaagccggagatcatcgacatcggccacgtgggcgaagtcaccggggtcaacgtcgggctgctgaacatgctggtcaagggcgacttcattccggtgatcgcgccgatcggcgtgggcagcaacggcgagtcctacaacatcaatgccgacctggtggccggcaaggtggcggaagcgctgaaggccgagaaactgatgctgctgaccaacatcgccggcctgatggacaagcagggccaggtgctgaccgggctgtccaccgaacaggtcaacgagctgatcgccgacggcaccatctacggcggcatgctgccgaagatccgctgcgccctggaagcggtgcagggcggcgtgaccagcgcgcacatcatcgatggccgggtgccgaatgccgtgctgctggaaatcttcaccgacagcggcgtcggcaccctgatcagcaaccgcaagcgtcactga

SEQ ID NO: 320655 - DNA, 2607 bp, Pseudomonas aeruginosa
atgaagcttttccagcgcaccgccaaggatgggaacgagttgggcgacctgctcgaaccggaaaagaagccgcgcaaggcagcgtccgaacgcgctgacggcaaggacctgctgcccggcataggcgccagcctgctgggcgtggcggctgccggcgccctgctctggttcggcgtcttcggcggcgccggtgaggcgcagcagcgccagttggacgcggcctgggccgaaggccaggccggcgccttgcgccaggccttgcagcaactcgccgccgacacccgcgccgccgcggccagccccctcgccctcgaagccctgcaaagcggcgacgccgcccgcatcgaggccgcccagctcagcctgctggcctgggacggcgtggtcgatgcccacctgaacgcgcccggccaggccgcccaggacaacgacagccccggcccggtcagcttcgccgccctggatatcctgcaccgggtggaaagtggccagaacgtcgccgccgaagcctacaaggtcggccagcgctggctgctgtacagcgcagcgccggtgcgcggcgccgaccagagcctgcaaggcacgctgctgctggcggtcgacctgcaacggctgctgcgcgccctgccgcccttgccgggcgatgccggccaggtacaactggtccagcagttctccggcgcaccggcccaggtgctgctgcaacgcggtacgccggcgccgggcaagggtgcgcaagcgctggacagcggcaatccgaactggaaactgaactacacgcccggcagcgtcgcttcgacccaggcctcgccgctgctgccggcactcgcggcgctgctggcgctgctcggcggcatcctcggcgcctacctcacccgttcgtcgctgttgcgccgcctgcatcaggatgtcctgaccctcggtcagtatcttcaggaactcggcgggcaacgcactgccaaaccccctgtgcctagcctgccgggcttcgccccgctgatccaggcattggcccgccagccgcggcgcaagccggagccgaccagcgtgcccagccctgccaaggcagcgccggtggcgccggtggcggtggcgaaagcgcctcctcgcgaggagccggcattggcagatccgttgttccagaacaccgacattctggatatcgacattctcgatgaagaccaggacctcctgggattggagcaaacccccatcatgagcactgcaaaagcaccgacgctgcccgccagcatcttccgcgcctacgacatccgtggcgtggtaggcgataccctcaccgccgagaccgcctactggatcggtcgcgccatcggctcggaaagcctcgcccgcggcgaaccgtgcgtcgctgtcggccgcgatggccgcctgtccggtcccgagctggtcaagcagctgatccagggcctggtggactgcggttgccaggtcagcgacgtgggcatggtgcctaccccggtgctgtactacgcggccaacgtgctcgagggcaagtccggggtgatgctgaccggcagccacaacccgccggactacaacggcttcaagatcgtggtcgccggcgagaccctggccaacgagcagatccaggccctgcgcgagcgcatcgagaaaaacgacctggcatccggcgtcggcagcgtagagcaggtcgacatcctgccgcgctacttcaagcagatccgcgacgacatcgccatggccaagccgatgaaggtggtggtcgactgcggcaacggcgtggccggggtgatcgccccgcagttgatcgaggccctgggctgcagcgtgatcccgctgtactgcgaggtcgacggcaacttcccgaaccaccatccggacccgggcaagccggagaacctgaaggacctgatcgccaaggtcaaggccgagaacgccgacctgggcctggccttcgacggcgacggcgatcgcgtcggcgtggtcaccaataccggtaccatcatctatccggaccgtctgctgatgctgttcgccaaggacgtggtctcgcgcaacccgggggccgacatcatcttcgacgtcaagtgcacccgccgtctgatcgccctgatcagcggctacggcggccgtccggtgatgtggaagaccggccactcgctgatcaagaagaagatgaaggaaaccggcgccctgctggctggcgagatgagcggccacgtgttcttcaaggagcgctggttcggcttcgacgatggcatctacagcgccgcccgcctgctggaaatcctcagccaggatcagcgtgacagcgagcacgtgttctcggccttcccgagcgacatttccaccccggaaatcaacatcaccgtcaccgaggacagcaagttcgccatcatcgaggcgctgcaacgcgacgcccaatggggcgaaggcaacatcaccaccctcgacggcgtgcgggtcgactaccccaaaggctggggcctggtacgcgcctccaacaccactcccgtgctggtcctgcgcttcgaagcggacaccgaggaagagctggagcgcatcaagaccgtcttccgtaaccaactgaaggcagtggattcctcgctgcccgtgcccttctga

SEQ ID NO: 320656 - DNA, 456 bp, Pseudomonas aeruginosa
atgcactctctccaagccaagatcctcgacccccgcctgggctccgacttcccgctcccgcagtacgccacgccgggctcggccggcctggacctgcgcgccatgctcaaggaggacagcgtcctcggcccgggccagaccctgctgattcccaccggcctgtccatctacatcgccgatcccggcctcgccgccctggtcctgccgcgctccggcctgggccacaagcacggcatcgtgctgggcaacctggtcggcctgatcgactcggactaccagggcgagctgatggtgtcgtgctggaaccgcggcgagtcgccgttcaccatcgccgtcggcgagcgcatcgcgcagttggtactggtgccggtggtgcaggcgcatttcgagctggtcgaggcgttcgacgaaagccagcgcggcgccggcggcttcggccattccggcagccactga

SEQ ID NO: 320657 - DNA, 1209 bp, Pseudomonas aeruginosa
atgcagcggctctatcggaaacgcatcgtcctcggcgtgggcggcggcattgccgcctacaagagcgccgaactggtccgccgcctgcgcgaccagggcgctgaagtccgagtggtgatgacccagggcggccgcgagttcatcacgcccctgaccctccaggcgttgtccggccatccggtgcataccgatctgctggacccggcggcggaagccgcgatgggccacatcgaactggcccgctgggccgatctggtgctgatcgcaccggctaccgccgacctcatggcgcgcctggtccagggcgtggccaacgacctgctgaccaccctggtgctggccaccgacgcgcaaatcgccctggcaccggcgatgaaccaggccatgtggcgcgacaccgcgacccaggccaacgccgagctgctgcgccagcgcggcttccacctgttcggtccggcagcgggcagccaggcctgcggcgacgtcggcctcggacgcatgctcgaagccgaggaactggcgcagcgcgccgccgactgcttccagcgccaggcgctgaccggcgtgcatgtgctgatcaccgccggcccgacccaggaaaacatcgacccggtgcgctacatcaccaaccacagttccggaaagatgggcttcgccctcgccgaggcggcggtggaagccggcgcacgggtgaccctggtcaccggcccggtgcacctgcccacgcccgaccgggtgcagcgcgtcgacgtggtcagcgcccgcgacatgctggccgcctgcgaggcggcgatgccctgcgacctgctgatcgcctccgcggcggtcgccgactaccgcccggaagtggtcgccgcgcacaaactgaagaaagaccctaccagcggcgagggcttgctcttgcagctggtgcgcaatcccgacattctcgccaccctcgcacagcgcgaggatcgtcccttcagcgtgggcttcgccgcagaaaccgaaaacctgctggactatgctgcacgcaagctgaaggacaagaacctcgacctgatcgtcgccaacgacgtggccaacccctcgatcggcttcaacagcgacgagaacgcgatcacggtgatcgaccgcgacctgcatccgagcaccttcgcccagaccagcaagggcaagatcgctcgccagctggtcgccttcatcgccgaccgcctcaaccagcaatga

SEQ ID NO: 320658 - DNA, 675 bp, Pseudomonas aeruginosa
atgagcatccgcgattggcccgaagccgaacggcctcgggagaagcttctggagcagggcgcggcggccctttccgatgccgagctgttggcgatcttcctgcgcacgggagtgaccggttgtagtgcggtcgagctgtcgcggcggctgttgagcgagttcggcgggctgcgtgccctgctcgaggcggacctcgcctcgttctgcggccatctcgggctcggcgtggccaagtatgcgcaattgcaggccgtgctggagatgggccggcgccacctggccgagcgcctgcgtcgcgattcgatactggagagcccgcaggcggtgcgcgactatctcaaggcgcgcctgcgccacgagcagcacgaggtgttcgcctgcctgttcctcgacacgaggcaccgggtcctggcgttcgaggtgctgttccagggcagcatcgatggcgccagcgtctacccgcgccaggtggtcaagcgcaccctggcgcacaacgcggcggcgctgatcctgacccataaccacccctccggcgacgcccgtccgagtctcgccgaccgccagctcactgcgcgcctcaaggaagccttggcgctcatcgacgtgcgggtgctcgaccacttcatcatcggcgacggcgagccgctgtcgctggccgaatacggttggctgtga

SEQ ID NO: 320659 - DNA, 549 bp, Pseudomonas aeruginosa
atggatctcgaccgtctctacctgccgcattggcagttcagcgaacaccaccagcggctgatcgacgcgccggccgcagcggtactcgacgcggtggaagacctgctgcgcttcgacggcccgctggtgcgcgccttcctcgtcctgcgcgaagcgccgggaaggctggccggcctgctgggccggcgcaacgacctggccggccgcccacgcttcggcctgcatgagttcacccgcctggagcgccgcgccgaccaggccatcgcctacggcctggtcggccgcttctggcgcgccgacttcgccctggaacgcatcgcggacggcgagcatttccgctgctacgaccagcccggagtggccaagctcgtgctgtgtttccgttgcacgcccagcgccagcggtaccctgctgcacacggaaacccgggtgttctgccccgatcgcgccagccgcctgcgcttcaccccctactggttggcgatccgcccggtcagcgggctgatccgccggcgcctgctggcgggcatcgagcggcgcctgggctga

SEQ ID NO: 320660 - DNA, 1581 bp, Pseudomonas aeruginosa
atgcgcctcgccgctttctccctgttcctcgcccccctgctactcgcccagcccgccgccgctgccgccttgagcgtgtgcaccgaagccagccccgagggcttcgacgtggtccagtacaactcgctgaccaccaccaacgcctcggccgatgtgctgatgaatcgcctggtcgagttcgacgccggcaaggggacggtggtgccctcgctggccgagcgctggtcggtatccgacgacggcctgagctatcgcttcgacctgcgccagggtgtgcacttccacagcaccgcctacttcaagccgagccgtacgctcgacgccgacgacgtggtgttcagcttccagcgcatgctcgatccggccaatccctggcacaaggtggcgcagaacggcttcccgcacgcccagtcgatgcaactgccggagctgatcaagcgggtggagaaaagcggcgaccaccaggtgctgttcgttctcgaccaccccgacgcgaccttcctgccgatgctgagcatgggcttcgcctccatctattcggcggaatacgccgaccagttgatgaaggccggaaccccggaaaagctcaacgccgagccgatcggcagcggcccgttcgtgttcaagcgcttccagaaggacgcggtggtgcgctacgccgccaaccccgagtacttcgccggcaagccggcggtcgacgcgctgatcttcgccatcaccccggacgccaacgtgcgcctgcagaagttgcgccgcggcgaatgccagatcgccctgtcgccgaagccgctggacgtggagagcgcgcgcaaggacgccagcctgaaggtcgagcagacgccagccttcatgaccgccttcgtcgccctcaatacccagcatccgccgctggacgatcccaaggtgcgccaggcgatcaacctggccttcgaccgcaccagctacctgcaggcggtattcgaaggcagcgccagtgccgccaccggcatctatccgccgaacacctggagctatgccagggatattcccgcctacccgcacgcccccgaacaggcgcgcaagctgctggccggcaagcagcttcccgagctgaacatctggacccgcccgtccggcagcctgctcaaccccaacccgagcctcggcgcccaactgctccaggccgacctggcggaggccgggatcaaggccaacatccgcgtcatcgaatggggcgagttgatccgtcgcgccaagaacggcgaacacgacctgctgttcatgggttgggcaggcgacaacggcgatccggacaacttcctcactccgcaattcagctgcgccagcgtcaagtcggggctcaacttcgcgcgctattgcgaccccggcctggacaagctgattgccgacggcaaggccgccagcagccaggaacaacgcaccggcctgtaccaccaggcgcagaaactgatccacgaacaggcgctctggctgcccctggcccacccgaccgccttcgcccttacccgccaggaggtgcagggctaccaggtcaatccgttcggtcgccaggatttctctcgggtcgccgtgaaacgctga

SEQ ID NO: 320661 - DNA, 237 bp, Pseudomonas aeruginosa
atgtctagagtctgtcaagtaaccggtaagggtccggttaccgggaataacatttcccacgcacacaacaaaacccgccgccgtttcctgccgaacctgcagcaccaccgtttctgggtcgagtccgagaagcgcttcgtacgtctgcgcgtttccgccaagggcatgcgtatcatcgacaagcgtggcatcgaggccgtcctggctgacctgcgtgcccgcggcgaaaaattctaa

SEQ ID NO: 320662 - DNA, 156 bp, Pseudomonas aeruginosa
atgcgtgaattgattcgtctggtgtccagcgccggtaccggccacttctacaccaccgacaagaacaagcgtaccaagcctgagaagatcgagatcaagaagtacgatccggtcgttcgtcagcacgtgatctacaaggaagccaagatcaagtaa

SEQ ID NO: 320663 - DNA, 363 bp, Pseudomonas aeruginosa
atgaacatcgaacagatcgtcgacttcgcccaggccaacagcgccccggagcactacagcccggcgccggagaaaatcctcaagggcgacccgaaacagagcgtgcgcaaccactatggcagcccctgcgggcagttcaacgccggtatctgggaaggcgccgtgggccagtggacggtgaactacaccgaacacgagtactgcgagatcatccagggcgtctcggtgctgcgcgaccggcacggcaacgccaagaccgtgcgcgccggcgaccgcttcgtgatccctgccggcttccagggcacctgggaagtgctcgaagcctgtcgcaaggtgtatgtgatcttcgaagccaaggcctga

SEQ ID NO: 320664 - DNA, 1335 bp, Pseudomonas aeruginosa
atgacaatgaataacgagccgcagtcgagcagcctcgacaacttctggatgcccttcaccgccaaccgccagttcaaggcgcggccgcgcctgctggaaagcgccgaaggcatccactatatcgcccagggcgggcgccgcatcctcgacggcaccgccggcctctggtgctgcaatgccggccacggccggcgcgagatcagcgaagcggtggcccggcagatcgccaccctcgactacgccccgccgttccagatgggtcacccgctgccgttcgaactcgccgcgcggctggcggaaatcgccccgccgagcctgaacaaagtgttcttcaccaactccggctcggaatcggcggacaccgcgctgaagatcgcccttgcctaccagcgcgccatcggccagggcacccgcacccgcctgatcggccgcgaactgggctaccacggggtcggcttcggcggcctgtcggtaggcggtatggtcaacaaccgcaaggccttctccgccaacctgctgccgggggtcgaccacctgccgcacaccctggacgtcgcccgcaacgccttcaccgtcggcctgcccgagcatggcgtggaaaaggccgaggagctggaacgcctggtgaccctgcacggcgccgaaaatatagccgcggtgatcgtcgagccgatgtccggctcggccggcgtggtgctgccgcccaagggctaccttcagcggctgcgcgagataacccgcaagcatggcatcctgctgatcttcgacgaagtgatcaccggtttcggccgcgtcggcgaagccttcgccgcgcagcgctggggcgtcgtcccggacctgctgacctgcgccaaggggctgaccaacggcagcatcccgatgggcgccgtattcgtcgacgagaagatccatgctgccttcatgcaaggcccgcagggcgccatcgagttcttccacggctatacctattccggccatccggtagcctgcgccgccgccctggcgaccctggacatctaccgtcgcgacgacctgttccagcgggccgtcgaactggaaggctactggcaggacgcgctgttcagcctgcgcgacctgcccaacgtggtcgacatccgcgccgtaggcctggtcggcggcgtgcaactggcgccgcacgcggacggccccggcaagcgcggctacgacgtcttcgagcgctgcttctgggagcacgacctgatggtccgggtgaccggcgacatcatcgccatgtcgccgccgctgatcatcgacaagccccacatcgaccagatcgtcgagcgcctggcccaggccatccgcgccagcgtctga

SEQ ID NO: 320665 - DNA, 1494 bp, Pseudomonas aeruginosa
atgaccaccctgacccgcgccgactgggaagcccgcgccaaagacctgaagatcgaaggccgtgccttcgtcaacggcgaatacagcaacgccgcctccggcgagaccttcgactgcctgagcccggtggatggccgcttcctggccaaggtcgccagttgcgacctggccgatgctgagcaggcggtcaaggtcgcccgcaatgccttcgattccggcgcctggtcgcgcctggcgccggccaagcgcaagcagacgatgatccgcttcgccgatctgctgctggagaacgccgaggagctggccctgctggaaaccctggacatgggcaagccgatcagcgactcgctgcacatcgacgtcgccagcgccgccaacagcctgcgctggagcgccgaggcgatcgacaagatctatgacgaagtcgccgccactccccatgccgagctgggcctggtgacccgcgagccggtcggcgtggtcgccgccatcgtgccgtggaacttcccgctgctgatgtcctgctggaaactcggtccggccctggccaccggcaactcggtgatcctcaagccctccgagaagtcgccgctgaccgccatccgcatcgcccagctggccgtcgaggccggcattccgaaaggcgtgttcaacgtgctgccgggctatggccacacggtaggcaaggcgctggcattgcacatggatgtcgacaccctggtgttcaccggttcgaccaagatcgccaagcaactgatggtctatgccggcgagtcgaacatgaagcgcgtctggctggaggccggcggcaagagcccgaacatcgtcttcgccgacgccccggacctgaaggccgccgccgaagccgctgccggcgccatcgccttcaaccagggcgaagtctgcaccgccggttcgcgcctgctggtggagcgctccatcaaggacaagttcctgcctctggtgatcgaggccctcaagggctggaaaccgggcaacccgctggatccggaaaccaacgtcggcgcgctggtggacacccagcagatgaacaccgtgctgtcctacatcgaggccggtcacaacgacggcgccaagctggtcgccggcggcaagcggaccctggaagaaactggtggcacctacgtcgagccgactatcttcgacggcgtgaccaatgcgatgaagatcgcccgcgaggaaatcttcggcccggtgctctcggtgatcgagttcgaggatgccgaggaagccgtgcgcatcgccaacgacacgccctatgggctggcggcggcggtctggaccagcaacctgtccaaggcgcacctgactgccaaggccctgcgcgccggcagcgtctgggtcaaccagtacgacggcggcgacatgaccgctccgttcggcggcttcaagcagtcgggcaacggtcgcgacaagtcgctgcacgccttcgacaagtacaccgagctgaaggcgacctggatcaagctctga

SEQ ID NO: 320666 - DNA, 1164 bp, Pseudomonas aeruginosa
atgcgttggggaagctatttcgccgtctgttccgcagtcatcagcatcggcctcgcccttggcctgaccatgccgctggtctcgttgcgcctggagagctggggctacggcagtttcgccatcggcgtgatggccagcacgccggcagtgggcgtgctgctcggcgcgatgatcgccgggcgcctcgccgcgcgcgtcggcacgccgcggctgatgcagttgtgcctgctcaccggggcagcctccgtcggcctgctggcgctgctgcagagctacccggtatggctgttgctgcgcctgctgatcggcgtgcagctcaccgtggtgttcatcctcggggaaagctggatcaaccagttggcagtggagaagtggcgtggccggctggtcgcgctgtacggcaccggctacgccctcagccaactgtccgggccggtactgctgaccttcatcggtaccgccgacgaccgtggcttctggttcggcgtctgcctgctgattgctggctcgttgctgctgctgggccgcagcggtgcgcccagggtcgatccgcacagtgcctccgggcgcggtttgtgggccttctgccggggtctgccggcgatcgcctgggcggtggtgttgttcgctgccttcgaggcgatgatcctcaccctgctgccggtatacgggttgcgccagggctttccgcaagcggtggcgctggccatggtcagtaccgtggtggtgggcgatgcattgttgcagctgccgatcggctggctcgccgaccgggtctcgcgcagcggcctgttcggcggctgcggcctggtgctgctgctgagcagcctggcgattcccctgctgctgcagacgccgttgatctggccgctgctggtgctgttcggggccagcgccggcgggttgttcaccctggcgctgatcctgatcggcgagcgctaccgagacgatgccctggtccgggccaatgcccatgtcgcgcagctatggggcatcggctgcctgctcggcccgctggccaccggcgccgccagccagtggatcagcggtcacgccctgccgttgatgatggcgctcggcgcggcgggcttcgtggtgctggtgcggctgcgcggggcgattccggcggacgacgaggcgacaggcctggaagcctccgagtga

SEQ ID NO: 320667 - DNA, 1554 bp, Pseudomonas aeruginosa
ttgcttcgccgattcctcctgctggccctcctggccctctccggctgcgccagcactcctccgccgcaaccgtcgtcggcactgcccgccgagggtacctggctggccaggcaggccgaaatccagggacgcgaccaccccggccagtccggcttccacctcctgggcgccagcgaggatgccttcgtcgcccgcgcggcgctgattcgcgcagcccagcgcagcctcgacatccagtactacatcgtccacgacggactgaccacgcgcgccctcgcctacgagttgctcaaggcagccgaccgtggcgtgcgggtacgcatcctcatcgacgacaccgccagcgatggctgggactacgagatcggtgtgctctccgcccatccgaacatccaggtgcgcctgttcaacccgttgcacctgggccgcgccaccggcatcacgcgaggcgtcggccgcctgttcaacctgtcccagcaacaccggcgcatgcacaacaagctgtggctggccgacggcacggcggccatcgtaggcggacgcaacctcggcgacgagtatttcaacgccaagccggagatgaacttcaccgacctcgacctgctcggcgtcggccccatcgccaaccagctctcgcacagcttcgaccagtactggaacagcgccatcagccggccgatcgaggatttcctctggcgcgcgccctatcccggcgaactggagtcggcccgacgcaagttgcagcgctacctgcgcaaggagtcggtgaaggagtccggctacatccgccacctgttcgaccgcggcgaccagccacgcctgggcaactggctggagaatctcacctgggcccgcgccgaggcgatctgggatgcgccgctgaaggtattgagccgcggcgagcccgacccgcacctattgctcagtccgcacctggcgggcctgttcaagggcgtgcagaaggaactgatcctggtctcggcgtatttcgttccggccaaggacggtctcaactacctcaccggcaaggccgacagcggcgtccgcgtgcgcctgctgaccaactccctggaagccaccgacgtgcccgccgtgcatgccggctacgcgccctatcggatggcgctgcttgagcatggcgttaagctctacgagctgcgcgccaatcccgaccagccgctgagcggcgcgccctggcgcctgcacggatcgagcagcgccagcctgcacagcaaggcgatggtcttcgaccggcgcaaggtattcatcggttcgttcaacttcgatccgcgctcgatcctgtggaacaccgaagtcggggtcatcgtcgacagtccgctgctggccgagcaggtccgccaactggcgctggagggcatggcgccgagcgtcagctaccaggtgcgcatcgaccgcagcggtagccggccgaagctggtctggatcgacgaacgcgacggccggccccaggtcctgcgccacgagccgggcagcctgtggcgacgcctgaacgcctgggtcgcgggaatgatcggactggaaaagatgctctga

SEQ ID NO: 320668 - DNA, 1320 bp, Pseudomonas aeruginosa
atgaacgcccgcgttcaccagccggtgcataccgcccaacacgccccctcctactacgccgccacgctcaaccgacgcatcgagtgccctcccctggccggcgaagaacaggccgacgtgtgcgtcgtcggtggcggcttctcgggagtgaacacggcgttggaactggcccagcgcggcttctccgtggtcctgctggaagcgcaccggatcggctggggcgccagtggacgcaatggcggccagttgatccgcggcgtcggccatgacgtcgagcagttcctcccggtgatcggcgccgacggcgtgaaggcactcaagctgatgggcctggaggcggtggagatcgtccgtcgccgggtcgagcagtacgccatcgactgcgatctgcgctggggctactgcgacctggcgaacaagcccggcgactaccagggcttccgcgaggacatggaggaactccaggccctcggctatcgccacgagatgcgcctggtgccggccgcggagatgcgcagcgtggtcggctccgatcgctacgtcggcggcctggtggacatgggctctggccacctgcacccgctcaacctggtcctcggcgaagccgccgctgcccagtcgctgggcgtccgcctgttcgagcgctcgccggtgacgcggatcgactacggcacggaagtccaggtgcataccgccaccggcaaagtgcgggcgaagaccctggtgctgggctgcaacgcctacatgaacgacctcaacccgctgctcggcggcaaggtactgccggccggcagctacgtgatcgccaccgaaccgctggacgagaaactggcccgccaactgctgccgcagaacatggcggtgtgcgaccagcgcgtggccctcgactactaccggctctccgccgacaaccgcctgctgttcggtggcgcctgccattattccggccgcgaccccagcgacatcgccgcctacatgcggccgaagatgctggaggtattcccgcaactggcgaacgtccgcatcgactaccaatggggcggcatgatcggcatcggcgccaatcgcctgccacagatcggccgcctgccggggcagcccaacgtgtacttcgcccaggcctattccggacacggggtgaacgccacgcacctcgccgggcagttgctcgccgaagccatcggcggccagcagagcgacggcttcgacctgttcgccaaggtgccgcacatcaccttccccggcggcaagctgctgcgctcgccactgctggcgctgggcatggcctggtaccggctgaaggaaaaactcggtagctga

SEQ ID NO: 320669 - DNA, 489 bp, Pseudomonas aeruginosa
atgcgtacccagcatcagagcaagcgcgagctggacaagatcgaccgcaacatcctccgcatcctgcaggaggaaggtcgcatttccttcaccgagctgggcgaacgcgtcggcctctcgaccacaccctgcaccgaacgcgtgcgccgcctggagcgcgaaggcctgatcatgggctatcacgcccggctcaatccgcagcatctgaaggccagcctgctggtgttcgtcgagatcagcctggactacaagtccggcgataccttcgaagagtttcgccgggcggtgctcaagctgccccatgtgctggaatgccacctggtgtccggccacttcgactacctggtgaaggctcgcatctcggaaatggcgtcctaccgcaagctgctcggcgacatcctgctgaaactgccgcacgtacgcgagtcgaagagctatatcgtcatggaagaggtcaaggaatcgctcgacctaccggttccggattga

SEQ ID NO: 320670 - DNA, 2568 bp, Pseudomonas aeruginosa
atgcgtttgcgcagaaggacgacgttgctgctggtatttgcagtgctgttgctgctggcgttcggctacggctggcatgcctggcgcagcctgttgcgcgagcagggtgtcgagcgcctggagtggcaaggcctgggcctgtccgccgaaggcatcgggctgcgacggctggcgctggagcggcgcggcgcggatggcgccagcctgcgactggacgtggaacacgcgctgctgcgctggcccgggctgtcgggttggcgtccgcgtctacccggcctgcgcgtggagcaagtggcgctcgcctggcaaccggctgccgcgagttccgacgacgactccgctgcgctggactggacgtccctgcgcgagaccctcgcctggctgccggaacagatccacctcgaacgcttccatctcgacctgccttgtcccgccggccgctgcgagcaggacggcggactggacatcggccgcccgtcgggagcgctgtttccgctggctgcgcaactgcgcctgcaacaggaggcgcagcaggcccagctcgacgcccagctcttcgaggagcctaccggttggcgcctgcggacgcgcgcgcaactcgaccggcaggcgctgctgacgctggacagccagctcgcgccgtccgatggcgacggcctctggcaggggcgcctggaggcgcccggcctgccggacacccgtggcctggtggtctggctcaatcgctggttgccggaagcccagcgcctgcccgacgcaccgcaagccctgcgtctgcaagcggactggacgatccgcctggcgcctggcagcgactggctggagccgcgccgggtgctcgacggcggtggctcggcggcgctgctggtgcaggctccgcaagcctggccgctgcccggtctgggtaatgtacagggcgaactgcaagtccaactggatggagacgagggcgcctggttgccacgccagctgcgcagcgacttgcgcctgagccagttgcacggcgagtggttgcaggcgctgccggccgagttgcggccgagcgcgctgggcttgcgcagcgagccgctggagcgcgatgccgatagcgtcaccgcgttgcgcctggcgttcaccagcgagggcgcgagtacgctgaagctggagacgcggctcgacctgctgggcatctcgccgtgggccgccaggctggtggagggtcgcttgcaggtggacgcgccgcgcctgcaatacctgggctggaaagccgagcgactggtcgcggagattcccctggagggccggctggacgggcagcgcgccaacctctccttcggcaggggcgcgcggttgcaggcggcgtccctggccgagccgtcgacgctgcaccttggccagccccgcctcgacctcgccggggccgctctcgaactggcctaccagccgctggcgctgcatttcgccgggccgctgcaggcgcaggtcggacaactccgccaggccaacctcaaaccgttggcctggaccttcgaggggccgctcgacaccaccctcgagcgcaccagcctgaagggacggctgagcaacggcgcggggttggcggcggacatccagctgcagcgcgacgcgaagacgcccctggcgctctccgccaggctggccgaggtgttcttccgtaccggcaatccgctggccgcgaccctcgccgactggccggggctgctcgaactgggcaatgggcgagcgaccgccgcggccggctggaagctcgatgcggcgggcgcctcgtccctcgacctggacctgaccctgaaaggcctcgacggtatctacgaccgcagcgagctgaaggggctgggcggcagcctggccttgcgcctgcgtggcggtcagttgagcctggacagccccggcctgagcctggccgaggccaatcccggcctgccgctggggccggtgagtttccgcgggcgctatgaggccccgctttccgcgccgggcagcggccgtttgagctggcagacgttgcagagcggcctgttcggcgggcaggcctcggtccccgcggggagcatccgcctgggtcaggctgagcagaagttcgccttgcgtatccagggcatacaactcggcgagattttccgggtctatccggcggagggcctggccggcgaaggcgccctggacggcgagctgccgctgatgctgaaccgctggaagcccagcgtctccggcggccaggtcaaggcccgcgagcccggctacctgcgcttccgctcggcgaagatcgaggcgctggggcgcagcaacccggggatgaagctggtcgccgatgccctcgacgatttccactacgacgtcctgcaaagcagcgtcgattatcatgagaacggcaagctgttgctcggcctgcgcttgcagggcagcaacccggacctggagaaggggcgcccggtcaacctcaacgtcaatctggaggaggatatcccggcactgctgaccagcctgcaactgagcgaccgggtcagcgaaaccattcgccaacgtgtgcaggagcgcatgcagaaacgcaaggcttcggcgccatga

SEQ ID NO: 320671 - DNA, 192 bp, Pseudomonas aeruginosa
atgcgcctctgcgctctattcgctgtcctgctgctgggcagcctgacgatggcctgcacgcccaccgtgcagctggcggctcccagcgagccgatcaacatcaatctcaacgtgaaaatcgagcacgagatctacatcaaggtcgacaaggctctggacggcatcatcaacgagaacagcggcctgttctaa

SEQ ID NO: 320672 - DNA, 345 bp, Pseudomonas aeruginosa
atgacaacccgtagcaaactcggtatcgccctgctggccctcggcatcagcctttccgccatggcgatggacctcggccaggccatgtcggcccttggcggcgccaaggcccagggcctggtcggcgagcaggcggacggctaccttggcgtggtcagcaacagcggccaggcggcggacatcgccgcgcagatcaatgccgcgcggcgtgccgaataccagaaggtggccaacagcagcggcgcttcgctggccgacgtggaggccatggccggcaagaaggcgatggagagaacccctgccgggcagtacgtccaggtcggcggcaagtgggtgaagaaatag

SEQ ID NO: 320673 - DNA, 1299 bp, Pseudomonas aeruginosa
atgcgagttctggtccttggcagcggtgtcatcggtaccgccagtgcgtattacctggcccgtgccgggttcgaggtggtggtggtcgaccgtcaggacggtcccgcgctggaaaccagcttcgccaacgccggccaggtgtctcccggctacgcttcgccctgggcagccccgggcattcccctgaaggccatgaagtggctgctggaaaagcacgcgccgctggccatcaagctcacctccgatcccagccagtacgcctggatgctgcagatgctgcgcaactgcaccgccgagcgctacgccgtgaacaaggagcgcatggtccgcctgtccgagtacagccgcgattgcctcgacgaactgcgcgccgagaccggcatcgcctacgagggccgcaccctcggcaccacccaactgttccgcacccaggcgcagctggacgccgccggcaaggacatcgccgtgctcgagcgctccggcgtgccctacgaggttctcgaccgcgatggcatcgcccgcgtagagccggccttggccaaggtcgccgacaagctggtcggcgctttgcgcctgcccaacgaccagaccggcgactgccagctgttcaccacccgcctggcggaaatggccaagggcctgggcgtggagttccgcttcggccagaacatcgagcgcctggacttcgccggcgaccgcatcaacggcgtgctggtcaacggcgaattgctcaccgccgaccactacgtgctggccctgggcagctactcgccgcaactgctcaagccgctgggtatcaaggctccggtctatccgctgaagggttattcgctgaccgtgccgatcaccaacccggagatggcgccgacctcgaccatcctcgacgagacctacaaggtggcgatcacccgcttcgaccagcgcatccgcgtcggcggcatggcggaaatcgccggcttcgacctgtcgctgaacccgcgccgccgcgagaccctggaaatgatcaccaccgacctctatcccgagggcggcgatatcagccaggcgaccttctggaccggcctgcgcccggcgaccccggatggcaccccgatcgtcggcgccacccgctaccgcaacctgttcctcaataccggccacggcaccctgggttggaccatggcctgcgggtcgggtcgctacctggccgacctgatggcgaagaagcgcccgcagatcagtaccgaaggcctggatatttcccgctacagcaattccccggagaacgccaagaatgcccatccagcgccagcacactaa

SEQ ID NO: 320674 - DNA, 354 bp, Pseudomonas aeruginosa
atgcccatccagcgccagcacactaacgagcgtatgagccagatcgtcgtccacaacggcaccgtctacctggcgggccaggtgggcgaggacatgtccgcgggcgtcgagcagcagacccgcgagaccctggcggccatcgagcgtctgctggaagaggccggcaccgacaagactcggatcctctcggtgaccatctacctgaaggacatcgacgccgacttcgaaggcatgaaccgcgtctgggaccagtggctgccgcgcggcgtcgcgccggcgcgcgccaccgtcgaagccaagctctgcgagccggagatcctggtagagatgtcggtggtcgctgcgctgccctga

SEQ ID NO: 320675 - DNA, 1074 bp, Pseudomonas aeruginosa
atgcgccccgcccgtgccctgatcgacctgcaagcccttcgtcacaactatcggctggcccgcgaggccaccggcgcccgtgcgctcgcggtgatcaaggcggacgcatacggccacggcgcagtgcgctgtgccgaagcgctggcggccgaggccgatggcttcgccgtggcctgcatcgaggagggcctggagctgcgcgaggccggtatccgccagccgatcctgctgctggagggcttcttcgaggcgtccgagctggagctgatcgtcgcccacgacttctggtgcgtggtgcattgcgcctggcaattggaggcgatcgaacgcgccagcctggaccgcccgctgaacgtctggctgaagatggattcgggcatgcaccgtgtcggcttcttccccgaggacttccgcgccgcccacgagcgcctgcgggccagcggcaaggtggcgaatatcgtgatgatgagtcacttctcccgcgccgacgaactggattgcccgcgcaccgaggaacagctcgccgccttcgcggccgcgagccagggcctggaaggcgagatcagcctgcgcaattcgccagccgtgctcggctggccgaaggtgcccagcgattgggtacgtccgggcatcctgctctacggagccacgccgttcgagcgcgcacatccgctggccgaccgcttgcgcccggtgatgaccctggaatcgaaggtgatcagcgtccgcgacctgccggccggcgaaccggtcggctacggcgcgcgctacagcaccgagcgtagccagcgcatcggcgtggtcgccatgggctacgccgatggctatccgcgccacgccgccgacggcaccctggtgttcatcgacggcaagccggggcgcctggttggccgggtatcgatggacatgctcaccgtcgaccttaccgaccatccccaggccgggctgggcagccgggtcgaactatggggcccgaacgtgccggtcggcgccctggcggcgcagttcggcagcattccctaccagctgctgtgcaacctgaaaagggtgccgcgcgtctattccggggcttga

SEQ ID NO: 320676 - DNA, 549 bp, Pseudomonas aeruginosa
ttggacgtcggtgctcgtctgcaaaccatccgaaagctcaaaggtctttcccagcgcgaactcgccaaacgggcgggtgtcaccaacagcactatctcgatgatcgagaaaaacagcgtgagcccttccatcagttcgctgaagaaggtgctgggcggtatccccatgtccctggtggagttcttctccctggacctggagcaggacagccatacccaggttgtctacaaggcagacgaactgatcgacatttccagcggcgcggtgtccatgcgcttggtgggcaaggcgcacccgagccgggcgatcgccttcctcgacgaaacctacccgccgggctccgacaccggcgaagaaatgctcaaccacgaaggcgaggaggccggcgtgctggtcgacgggcgcctggaactgaccgtcggcagcgagacctatgtgctcgagcgcggcgacagctactatttcgagagcaacaagccgcaccgttttcgcaatccctacgatgtgccggcacgcttgatcagcgccaccacgcccgcaaatttctga

SEQ ID NO: 320677 - DNA, 429 bp, Pseudomonas aeruginosa
gtgaacctgattaaaaaaatgctggcggcccaagctgccgtgttggccctgtgggctgtaagcgctcaggctacgaccactgacgatgcgatcgccaagcgcctcgagccggtaggcaaggtctgcgtacaaggcaaggaatgcgaaggcgtcggcgccgtcgcggcagccgccggtggcggcggtgcgcgttccggcgaagacatcgtcggcaagacctgcaacacctgccacggcaccggcctgctgggcgcgccgaaggttggcgacaaggccgagtggggcaagcgcgccaaggagcaaggcggcctcgatggcctgctggccaaggcgatttccggtatcaacgccatgccgccgaaaggcacctgcgccgattgctcggacgacgagctgaaagccgcgatcaagcatatgtccggtctgtaa

SEQ ID NO: 320678 - DNA, 1929 bp, Pseudomonas aeruginosa
ttgagccgaacctgttccatcgacgccgcagtcgatcacttgctgcagaccatcgagggcccgattcgcatgggcctgcccctcgggctgggcaagcccaaccgactggtcaatgcgttgtaccagcgcctgcggaccctgccggagcgccagctgacgctgtataccgcgctttccctggggcgtcccgccgctggcggcgacctgcaacggcgtttcctcgagcctttcgccgaacgggtcttcgccgactacccggagctggattacctgcacgccctgcgccgcgacgaactgccggcgaacatccgcgtcgaggagttctacctgcagcccggcagcctgctggacagcgcgccggcgcagcagcactacatcagttgcaactacagccacgtcgcccgcgacatcaatgccaagggcgtcaacgcggtggcccagctggtggcgcggcatcccgagcggccgggcaagctgagcctggcctgcaacccggatatcaccctggacctcctgccgatgctggagaagcgtcgcgccgctggcgagaccatcgtcgccatcggcgtggtccacgatgacctgccctacctgccgggcgacgccgaggtcgaggagtcggtattcgacctgctgatcgacgcgccggcggaaagcagccggctgttctccacgccgaacatgccggtcaacctgcaggatcactgtatcggtctccacgccagcgcgctggtgcgcgacggcggcaccctgcagatcggcatcggctcgatgggcgacgcgctgaccgccgccctgctgctgcgccagcgcgacaacgccacctaccgggcgttgatcgacgagctgggtgtgcgtgcgcgctgggccgagacgatcgagcgcgacggtggcctggagccgttccgccgggggctttacggttgcagcgagatgttcgtgccgggtctgctggcgctggccgaggccggcgtgctgagccgccgggtctaccccgacgaagcgcggcagcgtgccgccgagcgcggcgaggcgccggtggagggcggggtgtggctgcacggcggctttttcctcggtccgttggcgttctaccggcgcctgcgcgagatgtcgctggaagagcgcgccgggatcggcatgaccggcatcggcttcgtcaacaacctgtaccgccaggaagagctgaagcgtctgcagcggcgcgacgcgcgcttcatcaacagcgccttcaccgtgaccctgctcggcgccggggtcgccgaccagctggaggacggccgggtgctcagtggcgtcggcgggcagtacaacttcgtcgcccaggctcacgagctggagggcgcacgttcgatcctgatgctgcgtagctggcgcgaatccggcggggaggtcagttcgaacatcgtctggcagtacgcccacaccaccattccccggcacttgcgtgacatggtggtgaccgagtacgggatcgccgacctgcgcggcaagaatgacgcggaagtgatcgccgcgctgctggccatcgccgactcgcgcttccagcaggcgctggccgagcaggcccagtcggccggcaagctgccgaaggatttcgtcctgcccgaacgctatcgcaacaataccccggagcgcctgcaggccttgcaccaggcccacgcagcggcgctgccggagtttcccctgggcagcgatttcgacgagatcgagcaggacctgctgcgggcgctgggttggctcaagcgcaagctgaagctgagcgagatcctcgaactgggcaaggcgaccctggatgcgccggagccagaagcctacccggcgcatctgcggcgcatggacctggacgatccgcaggggcttcgcgaggaactctaccagcgcttgctgctggccggcctgcgagccagccaggaagagcggggctga

SEQ ID NO: 320679 - DNA, 573 bp, Pseudomonas aeruginosa
gtggacattctcaaagacaaaatccgctcggaaggcatcgtcctttccgagcacgtactcaaggtcgacgcctttctcaaccaccagatcgacccgcagctgatgcagcaggtcggtcacgcgttcgccacgcgcttccgcgaccagggcatcaccaagatcgtcaccatcgaggcttccggcatcgccccggcggtcatggccggcctggagctgggcgtcccggtgatcttcgcccgcaagtaccagtcgctgaccctgaaggacaacctgtacatctccaaggtgttctccttcaccaagcagaccgagagcaccatcgccatctcggccaagcacctgaacgcccacgaccacgtgctggtgatcgacgacttcctcgccaacggccatgccgccaaggcgctgatcgacctgatcggccaggccggcgcgagcatcgccgggctcggcatcgtcatcgagaaatccttccaggatggccgcgccctgctggaaagcgaaggctaccgggtcgagtccctggcccgggtgaaatcgctggccggcggtcaggtcgagttcctcgactga

SEQ ID NO: 320680 - DNA, 1719 bp, Pseudomonas aeruginosa
atgtcgagcaagaaagtcgccgagatcgtcgtggaaaccctggaagccgccggcgtccgccattgctatggcatcgtcggcgacaccctcaaccatgtcaccgacgccatccatcgcagccagatccagtgggtccacgtgcgccacgaagaagcggcggccttcgccgcgggcgccgagtcctacatcagcggacgcctgaccgcctgcgccggctcctgcggaccgggcagcctgcacttcatcaacggcgtctacgaggcccagcgcaaccgcgcgccgatggtcctgatcgccagccagatcgtcaccccgcaactgggcatggagtttccccaggaggtcgacttcaaggcggtctacgccagctgctcggtgttctgcgagcaggtgcacagcccggaacaggcgcgccgggtggtggccctggcctgccaggcggcgctcaaccggcgcggcgtggcggtggtgatcctgccggccgacatcagccaggccacggtgaaggacgacctgccgttctcggtgcatttcccgcaaccggtgctgcgccccagcgacgccgaactgcaggacgtcgcccgcctgctggcccacggcaagaagatcggcatctacgccggctccggctgccagggcgcccacgacctgctggtggccctcgccgaccgcctcaaggcgcccatcgcgcacacgtcgcgggccaaggacttcgtcgagtacgacaaccccttcaacatgggcatgaccggtatgctcgggatcgagtccggcttccacatgatgaccgagtgcgacaccctcctgctgctcggcgccgacttcgcctgggcgcagttctatccgcagaaggccaccctgatccaggtcgaccgcgatggcagtcacctgggccgccgccaccccatcgatctcggcgtggtcggcgacgtgatccccaccctcgaggcgctcttgccgttgctcgaagcccgcgaggagcgcagcttcctcgacgaatgcctggagcaccgcgagcgctcgctgcggacgctggaaaaagaggagcaagccggcaagggcgagctgatccatccgcagcacctggtcagcctgctcgaccagcacgccagcgaggacgccctgttcaccgccgacggcggctcggcgatggtctggctgttgcgtcacatccacagcaacggcaagcgccgcaccctcaccagcctggtccacggcaccatggccaacgccatgccccaggcgctggggctgaagaaggcctaccccgagcgccaggtgatctcgatctccggcgacggcggcctggccatgctgctcggcgacctgctgacggccatccaggaaaaactgccgatcaaggtagtggtgctgaacaatgcctcgctgaacttcgtcgagctggaacagaaggtcgagggcctgctggacaactacaccgacctgctcaacccggacttcgcccgtctcgccgaagtgatcggcttccacggacgcaaggtgacgcgctccgaggagctcgaggcggcggtgcaggagttcctcgcccagcccggtccggcgctgctggacgtgcataccaaccctgcggagctggtgatgccgccgaagatcgagttcggccaggtcgccgacaccgcgctctacgccgccaaggccgtgctcagcgggcgcttcaaggacgtcgagacgctactggtgaacaacctgctgaaatga

SEQ ID NO: 320681 - DNA, 2010 bp, Pseudomonas aeruginosa
atgtcccgactcaatccccggcagcaagaagccgtgaactacgtcggcggtcccctgctggtcctggctggcgccggctccggcaagaccagcgtgatcacccgcaagatcgcctatctcgtccagcagtgcggtatccgcgcccagtacatcgtcgccgtgaccttcaccaacaaggccgcgcgggagatgaaggagcgcgtcggcaccctgctgcgcggcggcgagggcaagggcctgaccgtctcgaccttccacaacctcggcctgaacatcatccgcaaggaacacgaacggctcggctacaagcccggtttctcgatcttcgacgagtcggacatcaaggcgctgctgaccgacatcatgcagaaggagtattccggggacgacggcgtcgacgagatcaagaactacatcggcgcctggaagaacgacctgatccttccggaggaggcgctggaaaaggcccgcaaccccaaggagcagaccgccgcgatcgtctacctgcattaccagcgcaccctgcgcgcctacaacgcggtggacttcgacgacctgatcctgcaaccggtgaagctgttccaggaacatccggacgtcctccagaagtggcagaacaaggtgcgctacatgctggtggacgagtaccaggacaccaacgccagccagtacctgctggtcaagctgctggtgaaggaccgcgcccagttcaccgtggtcggcgacgacgatcagtcgatctacgcctggcgcggcgcgcgtccggaaaacctgatgcagctgaaggaagacttcccttcgctgaaggtggtgatgctggagcagaactaccgctccaccagccgcatcctcaagtgcgcgaacgtcctcatcgccaacaacccgcacgtattcgagaagcagttgtggagcgagatgggccacggcgatccgatccgggtgatccgctgccgcaacgaggacgccgaggccgagcgcatcgccatggaaatcctcaccctgcacctgcgcaccgagcggccgtacagcgagttcgccatcctctaccgtggcaaccaccaggccaagctgatggagctgaagctccagcaccaccagattccctatcggctctctggcggcaccagcttcttcgggcgccaggaagtgaaggacctgatgtcctacttccgcctgctggtgaaccccgacgacgacaacgccttcctcagggtgatcaacgtgccgcgccgggaaatcggttcggcgaccctggagaagctcggcaactacgccacccagcgcaagatctcgatgtacgccgcctgcgacgagatgggcctggccgagcacctcgacagccgtttccacgaacgcctgcaacgcttcaagcgctggatggacggtatccgccgacagtgcgcggagaacgagccgatcgccgtgctgcgcagcatggtgatggacatcgactacgagaactggctgcggcagaacgcctccagcgacaaggtcgccgaattccgcatgagcaacgtctggttcctcatcgaggcactgaagaacaccctcgagcgcgacgaggaaggcgacatgaccatcgagcaggccatcgccaagctggtcctgcgcgacatgctggagcgccagcaggaagaagaggaaggcgccgaaggcgtgcagatgatgaccctgcacgcgtcgaaggggctggagttcccctacgtgttcatcatgggcatggaggaagagatcctgccccaccgttccagcatcgaggccgacacggtggaagaggagcgccgcctggcctacgtcggcatcacccgcgcgcggcagaacctggcgatgaccttcgccgccaagcgcaagcaatacggcgagatcatcgactgctcgccgagccgcttcctcgacgaactgccccccgaagacctcgaatgggaaggcatggaagacgccccgcaagaggtcaaggcggccaagggcaacgccgccctcgccgacatccgcgccatgctcaagcgctga

SEQ ID NO: 320682 - DNA, 1677 bp, Pseudomonas aeruginosa
ttgtcagcgcccgcagaacccttgcgcctgctccttctggcggatacgccggactgggcgccgctgctaggtgaacgcctgagagcgctggggcctgccttttcgctgagcatcgtcaccacctgggagggcgcggccaccctgttcgccgccgagccccgggggctgctcctggccacgccggcctgcctgccgctggggactccctgtccctggccggtgatcctgctgttgcagcaggaaccggcgcaggcgccggttggggtggtcgactggctggctgccgaacagctttccgaggacagcctgcgccgctgcctgcgctacgcgcgcgagcgcctgggtttgcaggcgaccctgcaactgctcgccgagcaggatccgctgaccggcatcgccaaccgccagggcttccagaccctgctcgcggcgcgcctcagcgaattcgacgggcgtggcctggtgctcggccacctcgacctggacaacttccgtcacgtcaacgattccctcggccaccagggcggcgaccgtctgatcctgcaggtggtcaaccgcctgcgcggcttcatggagaacggcgacagcctggcgcgcctgggcagcgacgagttcgccctgctgctggacacccgtcgcgatccgcaacgcgccgagcgggtcgccgaacgcatcgtcgaatgcctcggcgagccctactggatcgatggcgagagcctgttgctgggttgcagcctgggactcgcccacgcccgtgccgacgaaggcgccgacccgctgatgtggcatgcgcacatcgccatgcagcaggccaagagccgccagggttgcaccttccatgtcttcgacgaacgcatcaaccgtggcgtgcgcagcctcgccgacctcgaagccgaactgcgccgggcgctgcgtcgcgacgagctggagctgcactaccagccgcgactgtgcctggacagcgggcgcatcgtcggcctggaggcgctggtgcgctggcgccacggcgagcggggcctgctcacgcccagcgagttcgtcccgctggccgaggagagcgggctgatcgtgccgctcggctactgggtcatcgcccgcgccctgcgcgacatgcagtggctcaacgggcgcggcctggagccgttgcacatggcggtgaacctgtcgttccgccagttccaggacagccagttgctgccgaccctgcaacggttgatcgaagagcacggcgtcgacgcgcgctggctcgagttcgaactgaccgagaccgccgtgatgcggcgcagcgaccaggtgctgcagaccatgcaggcgctcggccaactgggcgtgcgcttttcgctggacgacttcggcaccggtttctcgtccttcgtccacctcaatagcctgccgatcaccctgttgaagatcgaccgcagcttcgtcggcggcatggaccagcgggcggaaaacttccaactggtgcgggcgatgatcaacctggcgcacaacctcaacctggaagtggttgccgaaggcgtggagaccctgcgccagcaggagcagttgcgcgatttcggttgcgaccaggtgcagggctactggatcagtccgccgctgccgttggcggaactggcgcgtttcctgggcataggcgagcgctcggcgcaccgcggccagccgctcggcaattga

SEQ ID NO: 320683 - DNA, 1467 bp, Pseudomonas aeruginosa
atgtcctcgccatccctcgtcgaactcaaagccatcctgcgcctggcgggcccgttgatcgccgcccagctggcctatgtcgccatggtcttcaccgacaccgtgatgatgggcaagctcggccccgacgcgctggccgccggcggcctgggcgcggtcagctacgccttcgtctcgacgttctgtgtcggcgtggtggcagcggtcggcaacctggtggcgatccgtcacggctgcgacgacgccgctggcgccgccgcggccgctcgctccggactctgggtcggcgccgcgctggccctggccgccggcctgctgctatggaacctgcggccgctgctcctggtcttcggccaggcgccgcagacggtggacggcgccatgcagttcctccacagcctgacattcgccctgcccggctacatggccttcatggtcctgcgcggcttcaccagcgccatcgaccgcgccggcccggtgatggcgatcagcgtgctcggcgcgctggccaacctggctctaaactattccttcatagaaggcctgttcggcctgccgcgcctgggcctggccggtatcggcctggtcaccgccctcgtcatgaactgcatgccgctgctgctggccctgtatatccgcctgcagccggcctatgccgagtactcgctgctgcgcggactgggacggccgcagcgggcgatggtcgaggagatactgcgcctggggctgcccatcggtggcacctacgcggtggagtcggggatgttcacggtcgccaccctgtgcatgggcatcatcggcgatcacgccctggccgcgcaccagatcgccatccaggcggtatacgtggcgttcatggtgccggtggggttgtcgtacgccaccacctaccgcatcggccagcatttcggcgccggccgcctgctcgaagcacgccgcgccgggcgtgtcggcatcggcttcggcgcgctgtgcatgctgctcttcgccgggctcttctggtggatgccggaggccatcatcggcctgttcctcgaccgcgacgccccggccaaccgggaggtggccgcgatggccgtctcgctgctggcgatcgccgcctggttcgagctgttcgacggcacccagaacgtcgccatgggcgcgatccgcggtctcaaggacgcccgcaccaccttcctggtcggcctggcctgctactggctggtcggcgtgccgctggcctgcctgctggcgttcgcggccggctggggcgccgcgggcgtctggtgggggctggccggcggcctggcctgcgcggccatcggcctgaccctggccttcgagtggaagaccgcgcggttgctgccgaaagccacggccagcgaggcgtcggcgctcaattgccgagcggctggccgcggtgcgccgagcgctcgcctatgcccaggaaacgcgccagttccgccaacggcagcggcggactga

SEQ ID NO: 320684 - DNA, 918 bp, Pseudomonas aeruginosa
atgacccgtcgcctgcccccgctgtatgccctgcgcgccttcgaggctgccgcccggcacgcctctttcacccgcgccggcgaggaactggcgataacccagagcgcggtgagccggcacatccgtaccctggaggagcacttcggttgtcgtctgttcgagcgccatggccgccagttgcagctgaccgagccggcacgcctgctgctgcccgggctgcgcgacggcttcgatgcgctggaacgggcctgcaccgccctgcgtgtggacgacgccaccctgcgcctgaaggcgccttccacccttaccctgcgctggctgctaccgcgcctgagccgcttccgccacctgaacccggatatcgaggtgcagctcaccagtgcctggatggatgtggactcggtggacttccagcgcgagcctttcgactgcgcggtgttgctgggcagcggccagttcagcccggaatgggaaacggcagcgctgttcgccgaatggctggtgccggtctgcgatcccgacgaggccgtggagccctggaccctccaacgcctgcgtgacagcgagttgctgcaccccacgccggatcgtcgcgactggcgacgctggctgcaacggaccgggctgggggaggaggtgtcgctcaagggcggccaggtgttcgacacgctggaactgggcatcgtcgccgccgcgcgaggctatggcgtgtccatcggcgacctggtgatggtcgccgaggatgtcgcccagggccgcatcggcctgccctggccggtggcggtggccagcggcgaaagctatcacctggtctggcctcgcgcccgcaggggacaggaacgcttccagcgattgcgcgacttcctcctcgcggaggtggcggcgatgcgtctgcccgtcgtcgagcggctggcgtga

SEQ ID NO: 320685 - DNA, 1050 bp, Pseudomonas aeruginosa
atgaccttcgccaaaggaatactcgccgcgctggcgctcgccgccgcagtcggccaggccagcgccaccgaactcgagcactggccggcccccgccgccaggcaactgaatgcactgatcgaggccaacgcgaacaagggcgcctatgccgtgttcgacatggacaacaccagctatcgctacgacctggaagaatcgctgctgccctatctggaaatgaagggcgtgctgacccgcgacaggctcgacccttcgctgaaactgatcccgttcaaggaccaggccgggcacaaggagagcctgttcagctactactaccggctttgcgagatcgacgacatggtctgctatccctgggtcgcccaggtgttctcaggcttcaccctcagggaactgaagggctatgtcgacgaactgatggcctacggcaagccgatccccgccacctattacgacggcgacaagctcgccacgctcgacgtcgagccgccgcgcttgttcagcggccagcgcgagctgtacaacaagctgatggaaaacggcatcgaggtctacgtgatcagcgcggcccatgaggaactggtgcggatggtcgcggcggaccccaggtatggctacaacgccaagccggagaacgtcatcggcgtcaccaccctgctgaagaaccgcaagaccggcgagctgaccactgcgcgcaagcagatcgccgagggcaagtacgatcccaaggccaacctcgacctggaggtgaccccctacctgtggaccccggcgacctggatggccggcaagcaggctgcgatcctcacctacatcgaccgttggaagcggccgatcctggtcgccggcgataccccggacagcgacggttacatgctgttcaacggcaccgcggaaaacggcgtgcacctgtgggtcaaccgcaaggccaagtacatggagcagatcaacggcatgatcaagcagcattccgccgcacaggccaaggccggcctgccggtgacggcggacaggaactgggtgatcgtcactccggagcagatccagtag

SEQ ID NO: 320686 - DNA, 1986 bp, Pseudomonas aeruginosa
atggagacacccactaccccccggagcaccctgaatcctccggtcttctatacctccgccgccctgatcctggccctggtgctgttcaccgtgctcctccaggaagaagcgcaatcgctgttcaaccacgtccagcaatggatcatcaccaacgccagctggttctacgtactggccgtggcgctgatcctgatcagcgtggtgttcctcgccgtcagccgctacggcgacatcaagctcggccccgaccacagtcgtcccgactaccgcaacaccacctggttcgccatgctgttctccgccggcatgggcatcggtctgatgttctttggcgttgccgaaccggtgatgcacttcaccaccccaccggtaggcgagccgaacaccgtgcaggcggcgaaggaagcgatgaagctgaccttcttccactggggcctgcatgcctgggcgatctacgccatcgtcgcgctgatcctggccttcttcagctatcgccacggcctgccgctgaccctgcgctcggcgctgtatccgctgatcggcgaacgtatctacggccccatcggccacgcggtggatatcttcgcgatcatcggcaccgtgttcggcgtggcgacttcgctcggctacggcgtgctgcagatcaacagcggcctgcaccacctgttcggctggccggtgaaccagaccgtgcagatcgccctgatcgccgccacctgcggcctcgccacgctctcggtggccagcggactggaccgcggcatccgcatcctgtccgagctgaacctgagcctggcggtgatcctgctgctcttcgtgctggtcctcgggccgaccgtgttcctcctgcagacctacgtgcagaacaccggggcctacctgtccgacatcgtcaacaagaccttcaacctgtacgcctacgagcccaccgactggatcggcggctggaccctgctgtactggggctggtggctgtcctggtcgcccttcgtcggcctgttcatcgcccgtatctcgcgcggccgcaccatccgcgagttcgtctgcggcgtgctgttcgtcccggccggcttcaccctgctgtggatgacggtgttcggcgataccgccatccacatggtcctgcaggagggcttcacccagttggccgaagtggtcaaccaggacagttcggtggcgctgttcgccttcctcgagcacttcccgctgggcagcgtgatctcgctggtggcggtgctgatggtggtggtgttcttcgtcacctcggccgactccggcgcgctggtggtggacatgctggcctccagcggcaaggaccactcgccgctctggcagcggatattctggtcggtgctgatgggcgtggtggccatcgccctgctcctcgccgatggcctcaaggcgctgcaaaccgcgaccatcgccagcgcgctgccattctccatcgtgctcctggcgtcgatctggggcctgttcaaggcgctgcacctggatgccaccaagcgcggcatccgctaccaggcgctgaccttctcccgccccaccacgcgcagcggcgcaagcgagggcgacggttggcagcgccgcctgcgcaacatcgccatgttcccaaggcgcagccacgtcaaccgcttcatcaccgatgtggcgcgaccggcctgcgaggacgtcgccgccgaactgcgcaagcagggctacgaagtccaggtgcaggacggcgaggacggccgggttcggctggaagtcagccacggcggcgaggtcgatttcatctacgaggtgcgtccgcgcgccttcaccacgccgagcttcgtgatgcgcgacaccgaggacagcagcgagtcgcgcaagtatttccgcgccgaggtccatctccaggaaggcggccaggactacgacatcatgggctggagccgcgacggcgtgatcggcgacatcctcgaccagtacgagcggcacatgcacttcctgcacgtggtgcgctga

SEQ ID NO: 320687 - DNA, 1494 bp, Pseudomonas aeruginosa
atgtccctggcgattgtccacagccgagcccaggtcggcgtcgaagccccctgcgtcagcgtcgaggcgcacctggccaacggcctgccttcgctgaccctggtcggcctgccggaaaccgcggtgcgcgagagcaaggaccgcgtgcgcagcgccctgctcaatgccggtttcgacttccccgcgcggcgcatcaccctcaacctcgcccccgccgacctgcccaaggacggcggtcgcttcgacctggccatcgcactcggcatcctcgccgccagcggccagttgcccggcaccgccctcgacggcctggagtgccttggcgaactggccctgtccggggcgatccggccagtgcgaggcgtattgccggccgcgctggcggcgcgcgacgcaaggcgcgttctggtggtaccgaaggaaaatgccgaagaggccagcctggccagcgggctgacggtgttcgccgtggaccacctgctggagatcgccggacacctctccggccaggccccgctgctgccctaccaggcccgcggcctgctccgcgcgcccttcccttatccagacctggccgaggtccagggccaggccgccgccaagcgcgccctgctggtggccgccgccggcgcgcacaacctgttgctcagcggcccgccgggcaccggcaagaccctcctggccagccgcctgcccggcctgctgccggcgctcgacgaggacgaggccctggaggtcgcagcgatccattcggtggccagccacgtccccctcaggcactggccgcagcgaccgttccgccagccgcaccactccgcctccgcgccggccctggtcggcggcggcagccgcccgcagccgggcgagatcaccctggcgcaccagggcgtgctgttcctcgacgaactgccggagttcgagcgcaaggtcctggaggtcctgcgcgagccgctggaaagcggcgagatcgtcattgcccgggccaacggccgggtacgtttcccggcgcgcttccaactggtggcggcgatgaatccctgtccctgtggctacctcggcgatcccagcggccgctgccgctgcaccccggaacaggtccagcgctaccggggcaagctgtccggaccgctgctcgatcgcatcgacctgcacgtcagcgtgctccgcgaaagcaccagcctgcagccaggacacggcgaaaccgctaccgccgagatcagcgaacgggttggcgccgcacggcaacggcaactggcccgccagggctgcgccaatgcccatctcgacctccaggcgatgcaccgcaattgtgcactcgccgaagcggaccgccgctggctggaggctgccggagagcgcctggaactttccttgcgcgccttgcatcgcatactcaaggtggcccggacgctggccgacctggagcgcatcgatgccatcgaacgccggcacctggcggaagccctgcagtatcgggcaacgacctccacgtga

SEQ ID NO: 320688 - DNA, 261 bp, Pseudomonas aeruginosa
atgctgccgcccaaagccgtcttcgaagccctcagccaacaagccagccgcctgttcgccggcgaatcgccgttgcccaaggccgagctggagtcgcagttccgcgccctgatgcagagcgctttcagcaagctcgacctggtcagccgcgaggaattcgacagccagatgctggtcctcgcccgcacccgcgcacggctggaagccctggaggccaaggtggcggaactcgaaagcaagctgacgccgcccgccgactga

SEQ ID NO: 320689 - DNA, 339 bp, Pseudomonas aeruginosa
atgaagctagtcactgccatcatcaagccgttcaagttggacgacgtccgcgagtcgttgtccgagatcggtgtgcagggcatcacggtgaccgaggtcaagggtttcggccggcaaaagggccataccgagctgtatcgcggcgccgagtacgtcgtcgacttcctgcccaaggtgaagatcgacgtggcgatcgccgacgaccagctggaccgcgtcatcgaggcgatcaccaaggcggccaataccggcaagatcggtgacggcaagatcttcgtggtgaacctggaacaggccatccgcatccgtaccggcgaaaccgataccgacgcgatctaa

SEQ ID NO: 320690 - DNA, 1329 bp, Pseudomonas aeruginosa
atgactctgcgtaagatcgcagggctaggagccctattgtccctcgctttgccgggcgtcgccctggccgccgaggaacccgtcctgaacagcggcgacaccgcctggatgctgatctccactgcgctcgtcctgctcatgaccatccccggcctggcgctgttctacggcggcatggtgcgagcgaagaacgtgctgtcgatcatgatgcagtgcttcgccatcaccggcctgatcaccattctctgggtggtctatggctacagcctggcgttcgataccgccgggatggagaagggcgtcctcaacttcaattccttcgtcggcgggctggacaaggccttcctcagcggtctcaccgccgacggcctgacttccgccaccgcgctgttcccggaaagcgtgttcatcaccttccagatgaccttcgcgatcatcactccggcgctgatcgtcggcgccttcgccgagcgcatgaagttctcggcgatgctgatcttcatggcggtctggttcaccgtggtctacgcgccgatcgcgcacatggtctggagcggtgacggcgccctgatgtgggactggggcgtgctggacttcgccggcggcaccgtggtgcacatcaacgccggtatcgccggcctggtcgcctgcctggtgctgggcaagcgcaagggctacccgaccacgccgatggcgccgcacaacctcggctacaccttggtcggggcggccatgctgtggatcggctggttcggtttcaacgccggttccgccgccgccgccaacggcaccgccgggatggccatgctggtgacccagatcgccaccgccgccgcggccctggcctggatgttcgccgagtggatcacccacggcaagccgagcgccctgggcatcgcgtccggcgtggtcgccggtctggtggccatcaccccggccgccggcaccgccggtccgatgggcgcgctggtgatcggcctggcctccggggtgatctgtttcttcgccgccaccagtctcaagcgcgcgctgaaatacgacgattccctcgacgccttcggcgtacatgcggtcggcggtatcgtcggcgcgctgctcaccgggatcttcgcggcgccgtcgctgggcggcttcggcagcgtggaggacatcggcgcgcagttcttcgtgcaattcaagggcgtggccttcaccgtggtctacaccgccgtggtgaccttcgtgatcctcaaggtgctggacctggtcatgggcctgcgggtcaccgaggaagaggaagcggtcggcctcgacctggcgctgcacaacgagcgcggctacaacctgtaa

SEQ ID NO: 320691 - DNA, 426 bp, Pseudomonas aeruginosa
atgtggcagcagaccctgatcaccttgcgcccgcgtccgcggggctttcacctcgtcaccgaggaggtactcgacgccttgccggagcttcggcggtgccgggtcggcctgctgcacctgcttttgcaacatacgtcggcttcactgaccctgaatgaaaatgccgatcctgccgtacgccgggatttcgagcgttttttcgagcggctggcgccacgcggcgaagtcggctatgaacacaacgacgaaggtccggacgaccttccggcgcatttcaaggccagcctgctgggctgccaactgaccctgccgatacagtcgggagggttggcactgggcacctggcaggggatctatctcggtgaacaccgggacaggggcggggcacggcgcgtgctcgccacctggcagggcgagtcagtatga

SEQ ID NO: 320692 - DNA, 318 bp, Pseudomonas aeruginosa
atgagcgaagaagaactggaacaggacgagctggacggcgctgacgaggacgacggcgaagagctggccgcggccgacgacggcgaagcggacagcggcgacggcgacgaggcccccgcccccgggaagaaggcgaaagccgccgtggtggaagaggagctgccctcggtcgaagccaagcagaaagagcgtgacgccctcgccaaggcgatggaggagttcctttcccgcggtggaaaggtgcaggagatcgaacccaacgtggtggccgatccgccgaagaagccggacagcaagtacggcagccgccccatctga

SEQ ID NO: 320693 - DNA, 915 bp, Pseudomonas aeruginosa
atggagttcaagacgttccgtcgaaccctgctgctcgcggcagtcctgttcgttcccgccggcaccagcatggctgccaatctgtacgctttcggcggccgcgatatcgccgtgccctcgatccttcccgagggaagtgtcatgtcgcgctacacgttcactcccatgcaactgtgcggcaagcccagctgcgatctcatcggcgtctctctgtacaacaagggaagtgtctgggacccggtcgatggtccggacctgaataccaacgtgccgggcctctcggtgcgcctgctgctggatggcataccggcgagcagccgtttcaagggcactttctcgcaaatcgcggagatccagttgttccgcaactcgacgccgctctccgacggccagttcgcgagcggagccttcaactcgtacttcctcattacctacaaggacgggcttatcgcgtctggcacctcctccatcaggttgaccgggagcgtcaccacgatcaatgcgacctgccaggtcgccgaccagaccgtgaagctgcagtcgatcgctgccgcccggctgaacggcgtcggcacctacgcggccgttaccccgttcaatctggtagtggccggctgtcctcgcgggtacaaccgcgtcggctacagccttcaagcggtggggggcgcggtggccgaaggctcgggtgtattgccgcgcctggcgggcagcaccgcgaccggcgtatcgatccgggtcaccgacgaggccggcgtgccgctacggatgggactctcgttgccggtgaccgcgtacgacaagaacaccggcggggcttactggatcccgatgaaagcgtcctatgtgcagaccgccgagaaaatcacgcccggctcggtcctggccgcgatggtgatcctgctcgactaccagtga

SEQ ID NO: 320694 - DNA, 1377 bp, Pseudomonas aeruginosa
atgcacctccggatcgaccgcaatgccagcgagccgctggtgcagcagatcgtcgcaggggtcagcggctggatccgcggcaatcgcgtccgcgccggcacgcggattccgtcgatacgccagttggccagggaaaaccagctcagccagtccagcgtgatcgaggcctacgaccgcctggtcgccctggggatgctggaatcgcggcacggctcggggttcttcgtcgccgaggcgcccgccgccactaccgacctcgacagcgaatggcacgaaggcgcggaaaacgcatggggccagttcagcggcagctcgacgaaactcaagctcggctgcggctggattccggacagttggcgggaagtcgaggaactcagctacgcgatccgccaggtcgcccgcagcgaactcgccgggctgttcgactacagcactccgctgggcctgccggcgctgcgccagcacatccagaaacgcctgcggctgatcgatatccatgtcgacccggagcagatcctcaccaccaccggcgccagccatgccctcgacctgttggtacgcacgctgctcaagccgggcgacgtggtggtggtggagaaccccggctactacaacctgttcaacctgctgaagttccacggggtgaagatgctcggcgtgccgcgcacccgccacggcccggacaccgccgcgctggagacgatcctccgcgcgcacaagccgaagttccttttcaccaacagcatgtaccacaaccccaccggcaccagcctcagcccctcagtggcccaccgcgtgctgcaactggccgagcagcatgatttccacatcgtcgaggatgacatctacgccgacttccagaacggccccagcacccgcctggcaaccctcgattcgctgcgccgggtgatctacctggcgagcttttcgaagaccctcagttgctcgctacgggtcggctacctgatcgccggccccgagctgatccggcgcctggcggatgtgaagatgtacaccagcatcggcagccagcgcttcgccgaatgcgtggtctcgaccatgctcgccaacggcagttaccgcaagctggtgcaacgcctgcgccagcgcctgacccggcagatggcggcgaccctgcgggtgcttggggacaacggctgggaggtgttcgccgaaccggtcggcgggatgttcgtctgggcccgtatcggcgactacccgttcgccgaattgcaggccgtggcgacacgcctggacgtgctgctgtcgccgggcagcggcttcagcccggaaggcgaggagagcgactggctgcgtatcaacatcgcctatgccagcgacccgcgggccctggcgttcttcgaggcgttcgggtga

SEQ ID NO: 320695 - DNA, 1170 bp, Pseudomonas aeruginosa
atgagcaatacccgtcgccacgccgcatgcctggccttcggcctgtgcctgatcaccttggcggtgaacctccaggcgccgctgtacaccgcctacgcggagctttccggctacggcgcggcagctaccgccagcgctttctccggctatgtgctcggcgtactgccggtgctgctggtactcggcgggttgtccgatcggatcgggcgcaagccgccgatcgtcgtcgcgctgctgctgtcgatggtggccaccctggtgatggcgctctggccgcgcctggaggcgctcggcgtggcgcgcctgttgctcggcgtcggcacggccctggcatcggccaccgggacggcctacatgagcgaactgatcgcgggcggggattctcgcacctcggccaactgggtgaccgccagcacctcgctcggcttcggcctcggcgcggcactgaccagtctgttcctgctgttccgggagagcctggtgcccggcagcttctgggtccagctgggactggcctgcgtggccctggcggcggtggcgggcctgccggacgaggcgccgcgcgggcgcgatacgccgatgctgcggctgccgttctttcccgccggcagcctgccgtacggcctctcgatcctgctggcatgggccactgtgggtctggtcatcgcggtcctgccttcgctgctggcggcccacgggctggcgcgctggtcgggcttctcgaccttcaccgtgatcagctgcggcctgctgttccagccgctggcgcggcggatggcgccggcctcggcgacctgcctggggctggtgatcctgccgccgagctatgccctgctggcctggggcgcgatccacggctcactggctgcggtgctgttcggtgcgctgggcgcgagcagttcctgctacggcttcacctacctgggcgggctgtcggcggtgaatgtcctggccggtgcggaaaagccgcgggccagcgcgggctacttcctgttggcctacctcggcttcagcctgccggtgatcttcaccgggttgatcgcggatcgcttcggtgcgtcgacggcgttgctgcttttcggcgtgtcgctgacgttggctgccgttgcggtggcgttttccatcttgcgcggggtcgggcgcttaaaggccagcgcttcgcgtgcctag

SEQ ID NO: 320696 - DNA, 699 bp, Pseudomonas aeruginosa
atgagcagcctgcgactgatcaccttcgacctcgacgacaccctgtgggacgtcgccccggtgatgaacaacgccgaggccctgctccgcgaatggctggcgagcaacgccgcgcgcctgggtccggtacccatcgagcacctgtgggcgatccgcacccgcctgctggatcgcgagccgatgctgcgccaccgtctcagcgagctgcgccggcgcatcctgttccatgccctgctcgacgccggttatccacaggcggaggcggaaagcctggccgaggccggtttccaggtattcctcgaagcgcgccaccgggtcaccctgtttcccgaggtccacccgaccctggagatcctcgccgaccgcttcaccctcggcgtgctcaccaacggtaacgccgacgtgcgccgcctgggcctggccgactacttccggttcgccctctgcgccgaagaactgggcgtcggcaagcccgacccgacgccattccgcgaagccctgaagcgcgccggcgtcgaggcctcggcagcgatacacatcggcgaccaccccagcgacgacatcgccggagcgcgccgcgccggcatgcgtgccatctggttcaacccaagcggcaagccctgggccggggaggaagagccgagcgcggagatccgcagcctcgccgagctgccggccctgctcgcccgcctgcaatga

SEQ ID NO: 320697 - DNA, 912 bp, Pseudomonas aeruginosa
atgcgcgccgacctggatgccttcctcgaacatctgcgcagcgagcgccaggtctccgcgcacaccctcgacggctaccgccgcgacctgctgaagatcctcgccctcgccgaaaaggccgggctctccgactggaacgccctcgacacccgcagcctgcgcaccttcgtcgcccgcctgcaccagcagggccagtccagccgcagcctggcacggctgctctcggcgacgcgcggcctctaccagtacctgctacgcgaagggcgctgccggcacgaccctgccaacggcctgagcgcgccgaagagtccgcgcaagctgcccaggaccctcgacgccgaccgcgccctgcaattgctcgacggtgccgtggaggatgacttcatcgcccgccgcgaccaggccctgctggagctgttctattcctccgggctgcgcctctcggaactggtcggcctcgatctcgaatggctggacctcaaggaaggcctggtgcgagtgcgcggcaagggcaacaaggtccgcgagctgccggtcggcaaggccgcgcgccaggcgctcgaagcctggctgccgctgcgcacccaggccgctccggaagacggtgcggtgttcatcggccgcagcggcaagcgcctgacgccacgggcgatccagctgcgggtgcgccaggccggcgtccgcgagctgggccagcacctgcacccgcacatgctgcggcactccttcgccagccatctgctggagtcgtccggcgacctgcgcgccgtgcaggaactgctcggccacgccgacatcgccacgacccagatctatacccacctggacttccagcacctggcctcggtctacgaccgcgcccatccccgcgccaagcgcaagggcaacgccgatggaggcaacgacccatga

SEQ ID NO: 320698 - DNA, 702 bp, Pseudomonas aeruginosa
atgaccgagaaaagccaggaaccgacagcagcgctggacgccgagcaggtggccgcttatctgagccagcacccggagttcttcgtcgagcatgacgagctgatccccgagttgcgcatcccacaccagcccggcgacgcagtgtcgctggtggagcgccaggtacgcctgctgcgcgagcgcaacatcgagatgcgccaccggctctcgcaactgatggacgtggcccgcgagaacgaccgcctgttcgacaagacccgccgcctggtcctcgacctgctcgacgccaccagcctggaagacgtggtcagtaccgtcgaggacagcctgcgccacgagttccaggtgccctacgtgagcctgatcctgttcagcgacagtagcgtctcggtgggccgctcggtgagcagcgcggaggcgcaccaggccatcggcggcctgctctccggcggcaagaccgtctgcggcgtgctgcgtccgcacgaactggcgtttctcttcggcgagagcgaccgcgacgagatcggctccgcagcggtggtctccctgagtttccagggcctgcacggcgtgctcgccatcggcagtcccgatccgcagcattacaagagttccctcggcaccctgttcctcggctacgtcgccgaggtcctggcccgcgtgctgccgcgtttctcctcgccgctgcgctcggtccgctga

SEQ ID NO: 320699 - DNA, 831 bp, Pseudomonas aeruginosa
atgcttttgcgcttcaccaagatgcatggcctgggcaacgacttcatggtcctcgacctggtcagccagcacgcccatgtgcagcccaagcacgtcaagctctggggcgaccgcaacaccggaatcggcttcgaccagttgctgatcgtcgaagccccgagcagccccgacgtcgacttccgctaccggatcttcaacgccgacggctccgaggtcgagcagtgcggcaacggcgctcgctgcttcgcccgcttcgttcaggacaagcgcctgacggtgaagaagagcatccgcgtagaaaccaagggcggcatcatcgagctgaatatccgcccggacggccaggtcacggtggacatgggtccgccgcgcctggccccggccgagataccgttccaggccgagcgcgaagccttgtcctatgagatagaggtgaatggccagcgcgtcgaactggccgcggtatccatgggcaatccccatggcgtgctgcgcgtcgagaacgtcgacagcgcaccggtacacagcctcggtccgcaactggaagtccatccgcgcttcccgaagaaggccaacatcggcttcctccaggtgctcgatccgcaccatgcgcgcctgcgcgtctgggagcgcggcgtcggcgagacccaagcctgcggcaccggcgcctgcgccgcggcggttgccgggattcgccagggctggctgcaatcgccggtgcagatcgacctccccggcggccgcctgcacatcgagtgggcaggtcccggccagcccgttatgatgaccgggcctgccgtccgcgtgtatgaaggccaggtccgcctgtaa

SEQ ID NO: 320700 - DNA, 1248 bp, Pseudomonas aeruginosa
atggacacattcagttaccgcgacggtgagctgttcgcggaaggggtggcgctttcccgcatcgccgagcgtttcggcacgcccacctacgtctactcccgcgcgcacatcgaggcccagtaccgcgcctatgccgacgccctcgccggcatgccgcacctggtctgcttcgcggtcaaggccaactccaacctcggggtgctgaatgtgctggcgcgcctcggcgccggtttcgacatcgtttcccgcggtgagctggagcgtgtcctggccgtcggcggcgatccggccaaggtggtgttctccggcgtcggcaagacccgcgacgacatgcgccgcgccctggaagtcggtgtgcactgcttcaacgtcgagtccggcgaagagctggagcgcctgcaacgggtggccgcggaactcggcgtgaaagcgccggtgtcgctgcgggtcaacccggacgtggatgcacagacccacccctatatctccaccggcctgaaagagaacaagttcggcatcgccatcgacgaggccgaggcggtctacgcccgcgccgccgagcttgaccacctggaggtgatcggcgtcgactgccacatcggctcgcaattgacccagctggagcccttcctcgacgccctcgagcgcctgctcgggctggtcgaccgcctggccggcaaaggcatcggcattcgccacctggacctcggcggcggcctcggggtgcgctaccgcgacgaacagccgccgctggccggcgactacatccgcgccatccgcgagcgcctgcatggccgcgacctgaccctggtgttcgagccgggccggtccatcgtcgccaacgccggcgtgctgctgacccgcgtcgagtacctcaagcacaccgagcacaaggatttcgccatcgtcgacgcggcgatgaacgacctgatccgcccggctctctaccaggcctggatggacgtgcaggcggtacgcccgcgcgatgccgtgccgcgccgctacgacctggtcgggccgatctgcgagaccggcgacttcctcgccaaggatcgcgacctggcgctcgccgaaggcgacctcctggcggtgcgctcggccggcgcctacggcttcgtcatgagctcgaactacaacacccgcggccgcgccgccgaggtgctggtggatggcgagcagacccacgaggtccgtcgccgcgagaccgtccaagagctctacgccggcgaaagcctgctgccgcagtga

SEQ ID NO: 320701 - DNA, 141 bp, Pseudomonas aeruginosa
atgaagcggctgttcctgtccttcgtcgcgctcgccctcctcgccggctccatcgccgcctgcggccagaaaggcccgctgtacctgccggacgacgaaaaagccaagaaagaacacagcaaagaccgctacggtttctga

SEQ ID NO: 320702 - DNA, 336 bp, Pseudomonas aeruginosa
atgagtacgatgaatgaagcgcgtttccacgacctggtcgatgcgctccagcagcaggtggaagacgccttcgatgacagcgacctggacctcgacctggagaacgccggcggcgtgctcaccgtacgcttcgagaacggctcgcagctgatcctcagccgccaggcgccgttgcgccagctgtgggtggctgcgaagtcgggcggcttccacttcgattacgacgaggccagcggcctctggcgccacgatggcagccaggaaccgctgggcgcgctgctcaaccgggcgaccctggagcaggggggcgaggatgtcgagttccccggcctctga

SEQ ID NO: 320703 - DNA, 405 bp, Pseudomonas aeruginosa
atgagcacgccgccgatcaccatcactcgtctggacctgcagcgcctggagcgcctgctggatggcctggacgaattcggacccgccgccgaggcgctggaggccgaactgtcgcgcgcccaggtggtggggcatgacgagattccgccgggcgtcgtgaccatgaactccaccgtgcgctgccgcgaggaaagcagcggcaaggagtacaccctgaccctggtctatcccgaagacgtcgccggcgaaggcaaggtctcgatcctcgcgccggtgggcaccgcgctgctgggcctgaccatcggccagaccatcgactggccggcgccgagcggcaagacgctgaagctgaccctgctggaaatcgaataccagccggaagccgccggcgactacgcgcgctga

SEQ ID NO: 320704 - DNA, 753 bp, Pseudomonas aeruginosa
atgtctcgcctgccgttaatcggcgtcaccgcctgcaccaagcagatcggtcttcatccctaccacattgccggcgacaaatatctgcgtgccgtcgtcaacggcgctggcggtctcccgctgatcattcctgcgctgggcgagtcgatcgaccaggcagccctgctggacagcgtcgacggcttgctcttcactggctcgccgtcgaacgtcgagccccgtcattatagtggaccggcgagcgagcccggcaccctccacgactccgaccgcgacgccaccacgctgccgctggtccgcgccgccatcgacgccggcattccggtcctcggcatctgccgcggtttccaggaaatgaacgtggctttcggcggcagcctgcaccagaaggtgcacgaggtcggaaccttcatggaccaccgcgagccggccgaccagccgctcgaggttcagtacgcgccgcgccatgccatgcatgtgcagccgggcggagtgctcgccggtatcggcttgccgagcgagttccaggtcaattccatccatggccagggcgttgatcgtctggcgccgggccttcgagtagaagcactggcgcctgacgggttggtcgaagccatctccgtagaaggtgcaaaagccttcgctcttggtgtgcaatggcacccggagtggcaggttctgacgaaccccaactatctcgctatcttccaggctttcggtaaggcctgcagcaagagggcggggcaacgttga

SEQ ID NO: 320705 - DNA, 1359 bp, Pseudomonas aeruginosa
atgactaccaagttagaccagctgaccagctggctgaaggaacgcaagatcaccgaagtggaatgcctgatttccgatctgacaggcatcgcccgcggcaagatctcgccgaccaacaaattcatcgcggaaaagggcatgcgcctgccggagagcgttctgctgcagaccgtcaccggcgactacgtggaagacgacatttactacgacctgctcgacccggccgacatcgatatggtctgccgcccggacgagaatgccgtgttcctcgtcccctgggccatcgagcccaccgcgatggtgatccacgacaccttcgacaagctcggcaatcccatcgagctgtcgccgcgcaacatcctcaagcgcgtgttgaagatgtatgccgacaagggctggcggccgatcgtggcgccagagatggagttctacctgaccaagcgcagcgacgaccccgactatccgttgcaggccccggtgggccgctccggacgccaggaaaccgggcgtcagtcgttctccatcgacgccgccaacgagttcgacccgctgttcgaggacatgtacgactggtgcgaggcccagggccttgacctggatacgctgatccacgaggaaggcaccgcgcagatggagatcaacttccgtcatggcgacgccctcgacctggccgaccagatcctggtgttcaagcgcaccatgcgcgaggccgcgctcaagcacaacgtcgccgcgaccttcatggccaagccgatgaccggcgagccgggcagcgcgatgcacctgcaccagagcatcgtcgacgtgaagaccggcaagaacatcttctccaatgccgacggcaccatgagcgagctgttcctgcaccatatcggcggcctgcagaagttcatcccggaagtgctgccgctgttcgcgcccaacgtgaactcgttccgccgcttcctgcccgatacctcggcgccggtgaacgtcgagtggggcgaagagaaccgtaccgtcggcctgcgcgtgccggactccagcccggagaaccgccgggtcgagaaccgtctcgccggcgccgacgccaacccttacctggcgctggctgccagcctgctgtgcggctacatcggcatggtcgaaggcatcaagccgagcgcccaggtcaaaggtcgcggctatgaacgccgcaacctgcgcctgccgctgacgatcgaagcggcgctggagcgcatggagaactgcaagcccctcgagcagtatctcggcagcaagttcatcagcggctacgtcgcggtgaagcgtgcggagcacgagaatttcaagcgggtaatcagctcctgggagcgggaattcctcctgctttccgtttga

SEQ ID NO: 320706 - DNA, 1371 bp, Pseudomonas aeruginosa
atgaacagccaaatcaccaacgccaagacccgtgagtggcaggcgttgagccgcgaccaccatctgccgccgttcaccgactacaagcagttgaacgagaagggcgcgcggatcatcaccaaggccgaaggcgtctatatctgggacagcgagggcaacaagatcctcgatgcgatggccggcctctggtgcgtcaacgtcggctacggccgcgaggagttggtccaggccgccacccggcagatgcgcgagttgccgttctacaacctgttcttccagaccgcccacccgccggtggtcgagctggccaaggcgatcgccgacgtcgctccggaaggcatgaaccacgtgttcttcaccggctccggctccgaggccaacgacaccgtgctgcgtatggtccgacactattgggcgaccaagggccagccgcagaagaaagtggtgatcggccgctggaacggctaccacggctccaccgtcgccggcgtcagcctgggcggcatgaaggcgttgcatgagcagggtgatttccccatcccgggcatcgtccacatcgcccagccctactggtacggcgagggcggtgacatgtcgccggacgaattcggcgtctgggccgccgagcagctggagaagaagattctcgaagtgggcgaggaaaacgtcgccgccttcatcgccgagccgatccagggcgccggcggcgtgatcgtcccgccggacacctactggccgaagatccgcgagatcctcgccaagtacgacatcctgttcatcgccgacgaagtgatctgcggcttcggccgtaccggcgagtggttcggcagccagtactacggcaacgccccggacctgatgccgatcgccaagggcctcacctccggctacatccccatgggcggggtggtggtgcgcgacgagatcgtcgaagtgctcaaccagggcggcgagttctaccacggcttcacctattccggtcacccggtggcggccgccgtggccctggagaacatccgcatcctgcgcgaagagaagatcatcgagaaggtgaaggcggaaacggcaccgtatttgcagaaacgctggcaggagctggccgaccacccgttggtgggcgaagcgcgcggggtcggcatggtcgccgccctggagctggtcaagaacaagaagacccgcgagcgtttcaccgacaagggcgtcgggatgctgtgccgggaacattgtttccgcaacggtttgatcatgcgcgcggtgggcgacactatgattatctcgccgccgctggtgatcgatccgtcgcagatcgatgagttgatcaccctggcgcgcaagtgcctcgatcagaccgccgccgccgtcctggcttga

SEQ ID NO: 320707 - DNA, 1104 bp, Pseudomonas aeruginosa
atgatgaaacgtttcggtaagaccctgctcgccctgaccttggcgggctctgtggccggtatggcgcaggctgcggacaacaaggtgctgcacgtgtacaactggtccgactacatcgcgccggacaccctggagaagttcaccaaggaaactgggatcaaggtcgtctacgacgtctacgacagcaacgaagtgctggaagccaagttgctggcaggcaagtccgggtacgacgtggtggtgccgtccaactccttcctcgccaagcagatcaaggccggggtctaccagaaactcgacaagtccaagctgccgaactggaagaacctgaacaaggacctgatgcacaccctggaagtcagcgacccgggcaacgagcatgcgattccctacatgtggggcaccatcggcatcggctacaacccggacaaggtcaaggcggccttcggcgacaacgcgccggtggattcctgggacctggtattcaagccggagaacatccagaagcttaagcagtgcggcgtcagcttcctcgactcgccgaccgagatcctcccggcggccctgcattatctcggctacaagccggacaccgacaatcccaaggaactcaaggcggccgaagagctgttcctgaagatccgtccctacgtcacctacttccactcgtcgaagtacatttccgacctggccaacggcaacatctgcgtcgccatcggctactccggcgacatctaccaggccaagtcccgcgccgaagaggcgaagaacaaggtcaccgtcaagtacaacattcccaaggaaggcgccggcagcttcttcgacatggtcgccattccgaaggacgccgagaacaccgagggcgccctggccttcgtcaacttcctgatgaagccggaaatcatggccgagatcaccgacgtggttcagttccccaacggcaacgcggcggccaccccgctggtgtccgaggcgatccgcaacgacccgggcatctacccgagcgaagaggtcatgaagaagctgtataccttccccgacctgccggccaagacccagcgggcgatgacccgcagctggaccaagatcaagtccggcaagtga

SEQ ID NO: 320708 - DNA, 1098 bp, Pseudomonas aeruginosa
atgcaacattccattggcaagacactgctggtagccgctctggctacggcgatcgcgggccccgtgcaggcggagaagaagagcctgcacatctataactggaccgattacatcgctcccaccaccctcaaggacttcaccaaggagagcgggatcgacgtcagctacgacgtcttcgactccaacgagaccctcgagggcaagctggtctccggccactccggctatgacatcgtggtgccgtcgaacaacttcctcggcaagcagatccaggccggtgccttccagaagctggacaagagcaagctgccgaactggaagaacctcgatccggcgctgctcaagcaactggaggtcagcgacccgggcaaccagtacgcggttccctacctgtggggcaccaacggcatcggttacaacgtggccaaggtcaaggaagtcctcggtgaccagccgatcgactcctgggccatcctcttcgagccggagaacatgaagaagctcgccaagtgcggcgtggccttcatggacagcggtgacgagatgctgcccgccgccctcaactacctggggctggatcccaacacccacgacccgaaggactacaagaaggccgaggaagtcctgaccaaggttcgcccctacgtcagctacttccactcctccaagtacatctccgacctggccaacggcaacatctgcgtcgccttcggctattccggggacgtcttccaggccgctgcccgcgccgaagaggccggcaagggcatcgacatccagtacgtgattcccaaggaaggcgccaacctgtggttcgacctgatggcgattcccgccgatgccaaggccgccgataacgcctacgcgttcatcgactacctgctgcgtccggaggtgatcgccaaggtcagcgactacgtcggctacgccaacgcgataccgggggcccgcccgctgatggacaagagcgtcagcgacagcgaggaggtgtatccgccgcaggccgtgctcgacaagctctacgtttccgccgtgttgccggccaaggtgctgcgcctgcagacccgtacctggacccggatcaagaccggcaaataa

SEQ ID NO: 320709 - DNA, 1155 bp, Pseudomonas aeruginosa
atggcgatagcctccggtgcctacaagaaagccctagagggcaaccagcagccgaaagaggtgctggtaaagatcgaccgggtaaccaagcagttcgacgagacgctggcggtggacaccgtgtccctgaccatcaacaagggcgagatcttcgccctgctcggcggctccggttcgggtaaatccaccctgttgcgcatgctcgccggtttcgagcggcccaccgaggggcggatcttcctcgatggccaggacatcaccgacctgccgccctacgagcggccgatcaatatgatgttccagtcctatgcgctgttcccgcacatgagcgtggcgcagaacatcgccttcggcctcaagcaggacggcctgcccaaggccgagatcgacgagcgcgtggccgagatgctcaagctggtgcacatgacccagtacgccaagcgcaagccgcaccagctctccggcggccagcgccagcgggtggccctggcccgttcgctggccaagcggccgaagctgctgctgctcgacgagccgatgggcgcgctggacaagaagctgcgctcgcagatgcaactggaactggtggagatcatcgagcgcgtcggcgtgacctgcgtgatggtgacccacgaccaggaagaggccatgaccatggcccagcgcatcgccatcatgcacctgggctgcatcgagcagatcggcagcccgatggacatctacgagaccccggcgagccgcctggtctgcgagttcatcggcaacgtcaacctgttcgacggcgtgctggtggaggacgtgcaggaccatgcggtgatcgcttgcccgcagctggagaacccgatctacatcggccacggcatcagcacccgcgccgaggacaagcgcatcacctacgcgctgcggccggagaaagtgatgatcagcgcgcagaagccggacaacctggaacacgccgggcacaactgggcccagggcaccgtctacgacatcgcctaccttggcggccactcggtgtactacatcaagctggcctccgggatgatcgtccaggccttcatggccaacgccgagcgccacgtcgcccggccgacctgggaccagtcggtgtacatcagctggtacgacgacagcggcgtggtactgcagtcatga

SEQ ID NO: 320710 - DNA, 912 bp, Pseudomonas aeruginosa
atgaaattcgccaacagcctgaaaaagcgcatgcccaccgggcggcatgcggtcatcggggtgccgttcctgtggctcttcctgttcttcctgctgcccttcgccatcgtgctgaagatcagcctggcggaagcggacgtggccatcccgccctataccgagatcttcgcctacgcggaccagcagttgcaggtgctcctcaacctcggcaactacctgatgctgaccgatgacccgctctacatcgatgcctacctcggctcgctgaagatggccttcatcagtaccctgatctgcctgctggtgggctacccgatggcctacgccatcgcccgctccagccagtcctcgcagaccgtcctgctgctgctgatcatgatgccgacctggacggcgatcctgatccgggtctatgcctggatgggcatcctttccaacaacggcctgctcaacagcgtactgatggggctggggctcatcagcgagccgctgaccatcctcaataccaacatcgcggtgtacatcggcatcgtctattcctacctgccgttcatgatcctgccgctctacgccaacctggtgaagcacgacccgagcctgctggaggccgcttccgacctgggcgcgcgtaacttcaccagcttctggaagatcaccgtgccgctgtcgaagaacggcatcatcgccggctgcatgctggtgttcatcccggcggtgggcgagttcgtcatcccggaactgctcggcggccccgagaccctgatgatcggcaaggtgctctggcaggagttcttcaacaaccgcgactggccggtggcgtccgccctggcggtggtgatgctggcgatcctgatcatcccgatcatcctgttcaacaagaaccaggccaaagaactggagggcaaggtatga

SEQ ID NO: 320711 - DNA, 870 bp, Pseudomonas aeruginosa
atgaagcgctggaatttctccaacgtcatgctgatcgtcggcctgctcttcatctacctgccgatgctgatcctggtgatctattcgttcaacgcctccaagctggtgacggtgtggggcggctggtcggtgaagtggtacgtcggcctgctggacaacacccaactggtcagctcggtcggacgctccctggagatcgccttctatacggcgttctcctcggtgctcctcggcaccctggcggccttcgtcctcacccgcatcccgcgcttccgcggtcgtacgctgttcggcggcatggtcaccgcgccgctggtgatgccggaagtgatcaccggcctgtcgctgctgctgttgttcgtggccatggcgcaactgatcggctggccgcaggaacggggtatcgtgaccatctggatcgcccacaccagcttctgctcgtcctacgtggcggtggtggtgtcggcgcgcctgcgtgaactcgacctgtcgatcgaggaagcggcgatggacctgggcgccaagccctggaaggtgttcctgctgatcaccatcccgatgatcgcgccctcgctggcggcgggcggcatgatgtccttcgccctgtcgctggacgacctggtactggccagcttcgtctccggacccggctcgaccaccttgccgatggaagtgttctcggcggtacgcctgggcgtgaagccggagatcaacgcggtggccagcctgatcctgctgagcgtttcgctgttcaccttcttcgcctggtacttcacccgccaggccgaggagcggcgtcgccgggcgatccagcaggcgatggaagagaccgcgaccgactggcagaaaggctcgccgaccccggcctga

SEQ ID NO: 320712 - DNA, 2388 bp, Pseudomonas aeruginosa
atgaaacgcaccctgaccgtgatcgccgtggcggtcgccgccgcggctgccggcggcgcctggtacctccatgccaagcagccgctccgcaacggctcgctcgccgtggcccacctgcaggcgccggtcgacgtgcgctacgacgagcgcggggttccgcacctgtacgcgcagaaccagaccgacctctaccgcgccctcggctacgtgcacgcccaggaccgcctgttccagatggaaatgctgcggcgcctggcgcgcggcgagctggccgaagtgctcggacccaagctggtggataccgaccgtctgttccgcaccctgcgcatccgcgaccacgccgccgaatacagcgcccgccaggacaagcagtcgcagccctggaaagtgctggaggcctacctggacggggtcaaccagttccaggaaaacaacccggcgccgctcgaattcgatctgctgggcatacccaggcgtcccttcacccccgaagataccctgagcatcgccggctacatggcctacagcttcgccgccgccttccgcaccgagccggtgctgacctacatccgcgacgaactgggcagcgactacctgcgcatcttcgatctcgactggcatccgcagggcgtgctgacgccctccggcgcactgggcgccggcgactggaaggacctcggcgccctcgcccgtctcagccagcaggccctggaggacgccggcctgccgcagttcgagggcagcaacgcctgggtcgtcgccggcagccgcaccgccagcggcaagcccctgctggccggcgacccgcatatccgcttcgccgcgccggcggtatggtacgaggcccagctgagcgcgcccggcttcgaactctatggccaccaccaggcgctcaaccccttcgcctcgctgggccacaaccgtgcgttcggctggagcctgacgatgttccagaacgacgacctcgacctggtcgccgagaaggtcaacccggacaaccccaaccaggtctggtaccagggcgaatgggtcgacctgcagagcgaggagcaggaaatcgcggtcaagggcgctgcgccggtgaagctcaccctgcgccgctcgccccacggtccgatcgtcaacgacgcgctcggcgccagctccggcaagaccccgatcgccatgtggtgggctttcctcgagaccgagaacccggtgctcgacgccttctaccagctgaatcgcgccgataccctggccaaggcccgcgcggcggcctcgaagatccattcgccgggactcaacctggtctgggccaacgccgccggcgatatcggctggggggcctcggcggccctgccgaagcggccggagggggtgaacccgagcttcatcctcgacggcagcaagggcgaggcggacaagtccggcttctatccgttcgccgacaacccacaggaggaaaacccggcgcgcggctatatcgtctccgccaacttccagccggtcccggccaatggccggccgattcccggctactacaacctggcggaccgcggccagtggctggatacccaactggccgaccgcggcaccaaatggaacctggacaacagccgcgcgctgcaactcagcaatcgcaccggctacgcgccacgcctgctcgcacccttgctgccggtcctgcgcgaggtggtcgacgacgccgaaggcaagcgcctggtcgagcaactggcggcctggaacggcgactacccggtcgactcgaccaccgccacgctgttcaaccagttgctgttccagattgccgagggcgccttgcacgacgaactgggcgatgccttcttcgacagcctgatcgccacccgcgccatcgacagcgcgctgcctcggctggctgccgacgccgactcgccctggtgggacgaccgccgcacagaacgccgggaaacccgcgcggatatcgtcagggccgcctggaacgcctccctcgcgcatctgcgcggcaccctcggcaacgacccgtccggctggctgtggggcaaggcgcataccctgacccacgagcacgccctgggccagcaggcgctgctcaagcgccttctcaacgtcggtccgttcgccgcccccggcacccacgaggtaccgaacaatctgtcggcgaagatcggcccggccccctgggcggtcacctacggtccatcgacccggcgcctggtggacttcgccgacccgacccacagcctcggcatcaacccggtcgggcagagcggcgtgcccttcgacggccactacgacgaccaggccgaggcctacatcgagggccactacctgccgcagcactacgaggaaaacgaggtgaaggcgaacagcaagggcgtgctggtgctggagccgaagcgctga

SEQ ID NO: 320713 - DNA, 1053 bp, Pseudomonas aeruginosa
atgcaggacgacccgtctaccagccccctgacccattccgccacgttgcggcgtctgttgtatgaagccctggacgccctcgggctcgaccccacccgcgtctaccgcagcgtctaccggcgtatcccgctgccgccgccgaccctgggcggccgcctggtgcatgacaacgccccgttgttctggaccgagctggcggcggtgaccggcgatgccgacatcggcctgcacctgggcgaggcaatgaagccgcgcctgctcgatgtggtcggctacctgctgctgtccgcgcgcgacctggaggaggcgctgcgcagcttcgtgcgtttccagcacattctctccggcggtttcgccgcgcgcctcgaggtcgaaggggaaacggcaaggctgatcctcgacatcaactacctgggctatgcctcgctgcgccagcagatcgaatgcctgatgctgctgttcctcaagctgctggcgctgatcagcgacgacgagttcgtcgccgagcgcatcgagttccgccaccgagccccgccgcggctgggcgaacaccgccggttgttcggcaggctgccgctgttctcgcggccgcacgatgccctggtgttttccgccgccttgctgcggcgtccttcgcgcaacgccaatccggacatgcatgacgtgctgacccgccacgcggaagaacagtcccgcgaactcagcgagaaccgcttgctcaatcgcgtgcgctacctgatcgagctgcgcctcggggagggctatggcttgcgccagtgcgcggcggagctgggccttggcagcggcgccttgcagcgtgcgctggccgctgggggagcgagtttccggcaggttcgcgatgaggttcgccggcagcgggcgagcgagatgctgttggccggtcgcgccatccgcgaggtggccaaggcttgcgggttcgccgagctgtcgccgttctaccgggcctttcgccgctggcacgccgcgcccccggagcaatacagggcgcggctggcgaagcgggaagagggttactcgaccagcggtacctga

SEQ ID NO: 320714 - DNA, 504 bp, Pseudomonas aeruginosa
atgtccctacgtcccaccctcgccctgctcgccctcgtcagcctgccactgatggccgcccagaacgaccctcagcccagcagcaaggaactgatgaaggagcaccaggcgcagatccagaacgacctggccgacgtcgactacaagcgcaagcgcatcgtcgaggccaacatgaacctcaccgaccaggaaggcgagaagttctggccgatctacaacacctaccgcaccgagtcggacaagctcagcaaggaaaccctcaagctcctgctcgactacgcccaggcctacaacagcggcaacgtcagcgacgaccaggcgagcaagctgatcgagcgtgtcgacgacctccaggaggaccgtctggaactgcgcgacaagtacgtcaagcgcatcgccgagaacgtctcgcccaagcgcgccatgcgcttcctgcagatcgagatccagctcgacgccatcgccaccctggagatcggccgtcaggtaccgctggtcgagtaa

SEQ ID NO: 320715 - DNA, 576 bp, Pseudomonas aeruginosa
atgactccccgccgcaagacgctcctcgtcagcctggtcggcctgctctgggccggcggcctgctcgccgcctactggtggttcgaggtccgctacatccgcccgttcagcgagcagaccaccctgttctccggcgacagcctgcgcctgccggccgagctggccgggccgggggcgatccgcctggtgcatttctgggacccggcctgcccctgcaacgtcggcaaccagcagcacctcggcgagctgatcgaacgcttcgccggcaagggcgtggagttccatgtcctgcagaagcctggcagccagggccgcctgccggacaacctggccgccctgcgccccctcgctggtctgcccggttccgagcagttgccggccagcccggccgtggcgatctgggaccgcgacggccgcctggcctacttcggcccctatagcgagggcgcggtatgcacctccagcaacagcttcatcgaaccgatcctcgaagcgctgctgcagggacgtccggtggatgccacccataccctcgccgtgggttgctactgcccctggcccccggaaaaaggctga

SEQ ID NO: 320716 - DNA, 942 bp, Pseudomonas aeruginosa
atgtcagaagccttcaaccccgattacctgcgccagcacctgcgacccttggccgcggccgaggcggacgccgccgtcctcgcctaccaggcctactacggcctggacctgcgctcccgccatccgcgcctgcaagcgcggctcggcagcatgacggtcgacgggcgccgcctggcggtgcaggcctggctgctgccggaagcgcgcggcagcctgttgctgatgcatggctattacgaccacatgggactgtatcggcacgtggtcgactgggcgctgggcatgggcttctcggtgctcgcctgcgacctgccggggcatggcctgtccgaaggcgagcgggccagcatccgcgacttcgccgaataccaggcggtgttcaagggcctgctgggccaggctgccgaactcgacctggcggcgccctggcacctctgcggacaaagcaccgggggggcgatcctgctggactacctgctgcacggcggcgaacgtcccgagctgggcgagacgattctcctggcgccgctggtgcgcccgcgcgcctggggctggtcgaagctcagctaccgcctgctgagcccgttcgtcgactcgatcccgcggcgcttctcggagaactccagcgatccgcagttcctcgacttcctccgcgagcacgatccgttgcagccacgcaccctgccgaccgcctgggtcggcgcgctgacccgctgggtgccgcgcatcgagcgggcacctcggcgtgccctgagccccctggtggtgcagggcgagtccgacgagacggtggactggcgccatggcctgaaggtgctgcgggagaaattcgacgagccgcggatactgttgctggaagaggcgcgccatcacctggcgaacgaaagcgaggggctgcggcggcgctatttcgatttcctgagcgacgcgctgggggcctga

SEQ ID NO: 320717 - DNA, 753 bp, Pseudomonas aeruginosa
atgcgcgctttgctcgccttcgctttactgctggttggtctgcccgccctggccgacccttatcaacgcctgtaccaggccgctggctggcccgaccagcgcgcgcatttcagcgatgccctggacgcggcgcagaagcgctaccaggacaagctgccgcccgcgctctaccagaccctggtggacaacagcaatcgccgcttcgccccggccgaagtcgaccagcgcgccctcaacggcctgcgcgagaacctgccggacagcgccagcccgctgaatttcttcgagtcgccgctggggcgcaaggtggtcgccgccgaggtgctcgccacccgccgcgaccagttgctccagcacagcaacggcctgccgcggcagaacgccagcgagccacgccgggccctggtgaagcgcctggcccaggtccttccggcccgagaggccggcgcggaagtcagcctggccctggccggggtcgccgccgacagcctcagccagatgcttccgggcctccccggcctgcttggcggcggacagaccggccagttgctggaaggccagcgccagcgcctggtgcagcagatcggcgcggacctggagaacaccctgctgtatgtctaccgcgatctctccgatgcggaactcacccagtacgtgaacttcgccgagtcgccggccggccgcagctactaccaggcggccctggccgcgctgaaagccggcctggcggtggaccaggcggtcgccccctga

SEQ ID NO: 320718 - DNA, 630 bp, Pseudomonas aeruginosa
atgcacatcaacgtcaatcatccactcctgcatcgcatcgtcgatgaactggtcgaccagggctggtcgcaccagagcatcttcatgcctgagcgtctgaccaccagattggccgaagagtgccgcacccgtgcggtcgcgggcgacctgaccccggcggcgatcggccgcggcgacggccaggtgatccgcgaaggcatccgcggcgacctcacgcaatggctggagcccggagaatccgaggcctgcgacgaatacctgggggtgatggacagcttgcgccaggcgctcaacgcctcgctgttcctcggcctcgaggatttcgagtgccacttcgcgctgtacccgccgggcgcctattaccagaagcatgtcgatcgtttccgcgacgacgacgcacgcaccgtctccgcggttctctacctcaacgatgcctggttgcccgagcatggcggcgcgctgcgcctgcacctgccgcagcggcaggtggacatccagccgacgggcggtagcctggtggtgttcatgtccgccggcaccgagcacgaagtcctgcccgccagccgcgaccggctgtcgctgaccggctggttccgccggcgcaacgaatccctcctgcaactctcctga

SEQ ID NO: 320719 - DNA, 555 bp, Pseudomonas aeruginosa
atgctcccgacccgctcgcttctaccgtttttcctggcccccgcgttgctcgccagcgctgccagccaggcggccatggaggccctggacaacgacagtctcagccaggtcaccggccaggccggcatcagcctgcgcctggacctgcgcgccggcgcggccagggtcgcctgggtggacgacggcggcagcctctcgctgcgcaacctggtgatcgacaacggctgcgtgaaggccggcgactgcccggacgggcgcggcggcaacatccccctgggcgccgcccagctcggcctgagcttgccgatcttcggcgtcgagcagccgaccctggcactggacgtgaccaccggcagcggcggcgggcagcaactggcgatcagcctgccggacctcaccaccatcaacgaccagttgatcgccagcggcctgccggcgcagcgcatccgcctgcgggtggccagcgacctgtacatcggcgacaactcgatcggccgcatcgaactgcgcgacatcaccgacctgcgcggcacgatcaaggtctggggtcactga

SEQ ID NO: 320720 - DNA, 495 bp, Pseudomonas aeruginosa
atgcagaaggttctggtcagccgttgcctgctgggccacctggtgcgctacgacggtggcagccatggcccgttcgacctgctctcgcgctggcatgcgcaggggcggatcgtcgccctttgcccggaggtcgccggaggcctgccgacgccccgcccgccagcggagatccccggcggccagggcggcgaagtgctggaccggctgaaccgggtcttcaccgtcgacggcgaggatgtcagcgaagcattcctgctgggtgcggaggcggcagtggagctggtccgccgccatgacatccggatggccgtgctcaaggcgcgcagtccttcctgcggcaacctggagaactacgacgggcgcttcaacggcaaccgggtcgccggcgagggcgttaccgccgccgccctcaagcgcatgggcgtgctggtattcaacgaggatgaactggaccgcgccgcggtctgcctggccggcctcgacgccggcggctga

SEQ ID NO: 320721 - DNA, 693 bp, Pseudomonas aeruginosa
atgaattcgctgcagaaattgctcgaatggctcgccaacctggtcgagctgctcgggatggcctggcccttcctgctccagggcgcgatgtataccgtgctgttcgccgcggtatcgatggtcctgggcctgatcctcggcttcagcgtcgcggtggtccgggtgaccaaggtgccggtggtctcgcagatcgccgcggtctacgtcagcgccttccgcgggacgccactgctggtgcagatcttcgtcctgtactacgggctgccgagcgtaggcatcgagttcaccccggtcaccgcgggcatcctggcgctgaccctgaatgtcgcggcctatctctcggagtccatgcgcggggcgatcctcggcatcgacaagggacaatgggaagccgggctctcggtcggcctgacctggggccagaccctgtggaacatcatcaccccgcaggccctgcgcctggcggtgccgagcctgtcgaacagcctgatcagcctgatcaaggacacctcgctgatctccgtgatcaccgtgaccgaactgatgctggcgaccaaggaggtcatcgccgagaccttccagccgctgccgctctatctcgccgccgccgggatctactggctgctttcggcactcttcgagcgtgtgcagaaagccctggagaaccgcctgaccgcgccgctgcggcgctga

SEQ ID NO: 320722 - DNA, 771 bp, Pseudomonas aeruginosa
atgcgatttctgccccgcctgctgatgctggtatccctggccgctccgctggcccatgccgagctgctcgacgacgtccaccagcgcggcgccctgcgcatcgccctggagggcacctatccgccgttcaacttcaagcagggcggcaagctcaccggcttcgagaccgaactgggcgaactgctggccgccgaactggcggtcaagccggaattcgtcaccaccgaatggagcggcatcctcgccggcctgcagagcggcaagtacgacatcgcgctgaaccaggtctcggtgaacgagcagcggcgcaaggtcttcgacttcagcgagccatacaccatctccagcgcccagttgatcgtgcgcgccgacgaaacccgccagttcaagtcgctggaagacctcaagggcctcaagctcggcgtcggccagggcaccaactacgccgacctggcgaagtcggtggccggcgtcaacgtgcgcacctatccgggcgccccggaatacctgcaggacctggccagcaaacgcatcgacgcggcgctcaacgaccgcctgctgatccccttcgccatccgcgaggccaagctgccggtcaagcccggcgcggcggtgggaccggtggcgaacatggcgattccctaccggaagaacaatccgaagttcggcgaggcgctgaatgcggcgctggagaagatcaaggccgacggccgcttcgccaagctctcggaaaagtggttcggcctggacgtcagccagccgccgaagtga

SEQ ID NO: 320723 - DNA, 438 bp, Pseudomonas aeruginosa
atgagagtgacattgccttgcctcggtctagccgccctgatgttcggcgcatccgccagcctgatggctgccgacctgccccggacgaaggcgcccgaaggggcgaaagtgtatttcatcacgccggccgatggtgcaaccgtcgacaagaccttcaccgtgaaattcggcctgaaaggcatgggcgtggcgccggccggcgtcgacatgccggataccggccaccatcacctgttggtggacctgaaggagcagccggcgatgaacctgccgctgccgatgaccgacaacatccgccacttcggcaagggccagaccgaaaccgagatcaccctgccgccgggcaagcacaccctgcaactgctggtgggcgacaagaaccacgtgccgctggagccgaccgtggagtcggagaagatcaccgttaccgtcaagtga

SEQ ID NO: 320724 - DNA, 1230 bp, Pseudomonas aeruginosa
atgagcaagacctctctcgacaagagcaagatcaagttccttcttctcgaaggtgtccaccagaacgccgtggacacgctgaaggccgccggctacaccaacatcgagtacctcaagaccgcgctttccggcgacgagctaaaggaaaggatcgccgatgcgcacttcatcggcattcgctcccgcacccagctgaccgaagaggtcttcgactgcgcgaagaaactgatcgcggtcggctgcttctgcatcggcaccaaccaggtcgacctcaacgccgcccgcgaacgcggtatcgccgtgttcaacgcgccctactcgaacacccgctctgtggctgagctggtactggccgaggcgatcctgctgctgcgcggcatcccggaaaagaacgcctcctgccatcgcggcggctggatcaagagcgcggcgaattccttcgagatccgtggcaagaagctcggcatcgtcggctacggctcgatcggcacccagctctcggtactcgccgaggccctgggcatgcaggtgttcttctacgacaccgtgaccaagctgccgctgggcaacgcggtgcagatcggcagcctgcacgagctgctgggcatgtccgacatcgtctcgctgcacgttcccgaactgccctccacccagtggatgatcggcgagaaggaaatccgcgcgatgaagaagggcggcatcctgatcaacgccgcgcgcggcacagtggtcgagctggaccacctggccgccgcgatcaaggacgagcacctgatcggcgccgccatcgacgtgttcccggtcgagccgaaatccaacgacgaggaattcgccagcccgctgcgtggcctggaccgggtgatcctgaccccgcacatcggcggctccaccgccgaggcacaggccaacatcggcctggaagtggcggagaagctggtcaagtacagcgacaacggcacctcggtgtcctcggtcaacttccccgaagtcgccctgccgtcgcacccgggcaagcaccgcctgctgcacatccacgccaacatccccggcgtgatgagcgagatcaacaaggtcttcgccgacaacggcatcaacgtttccggccagtacctgcaaaccaacgagaaggtcggctacgtagtgatcgacgtcgatgccgagtactcggacctggccctggagaaactccagcaggtcaacggtaccatccgtagccgcgtgctgttctaa

SEQ ID NO: 320725 - DNA, 1395 bp, Pseudomonas aeruginosa
atgacccgcgaagccctgatcgaatcgctcaagcccctggtcgagcctggcaagctgctcgacgacgccgcctccctggacgcctacggcaaggactggaccaagcatttcgcccctgcgccgctggccatcgtgttccccaagagcgtcgagcaggtccaggcgatcgtccgctgggccaaccagcacaaggtcggtctggtcccgtcgggcggtcgtaccgggctctccgccgcggccgtggcggccaacggcgaagtcgtggtggccttcgactacatgaaccggatactcgacttcaatgccttcgaccgcaccgtagtctgccagccgggcgtggttaccaagcaactgcagaccttcgccgaggaaaacggcctgtactacccggttgacttcgcttcttccggttccagccagatcggcggcaatatcggcaccaatgccggcgggatcaaggtcattcgctacggcatgacccgtaactgggtggccgggatgaaggtcgtcaccggcaagggcgacctgctcgagctgaacaaggacctgatcaagaacgccaccggctacgatatgcgccagctgttcatcggcgccgaaggcaccctgggcttcgtggtcgaggcgaccatgcgcctggagcgcacgccgaagaacctcaccgctatggtcctcggcacgcccgacttcgactcgatcatgccggtgctgcatgccttccagagcaagctcgacctgaccgccttcgagttcttctccgacaaggccctggccaaggtcctggcccgtggcgacgtaccgcgggcgttcgaaaccgactgcccgttctacgccctgctggagttcgaggcgaccaccgaggaagtcgccaacgaggcgctggccaccttcgagcactgcgtcgagcagggctgggtgctggacggggtgatgagccagagcgagcagcagttgcagaacctgtggaagctgcgcgagtacatctccgagaccatctcccactggacgccgtacaagaacgacatctcggtcacggtttcccgggtgcccgccttcctcaaggacatcgacgccatcgtcgaggccaactacccggacttcgaggtggtgtggttcggccacatcggcgacggcaacctgcacctgaacatcctcaagccggaaaacctcggcaaggacgagttcttcgccaagtgcgcgaccgtcaacaagtgggtgttcgagaccgtcgagaagtacaacggctcgatttccgccgagcatggcgtgggcatgaccaagcgcgactacttgacctacacccgctcggaaaccgaaattgcctatatgaaggcactgaaggcggtgttcgaccccaacgggatcatgaatcccggcaagatcttcgccgagtag

SEQ ID NO: 320726 - DNA, 666 bp, Pseudomonas aeruginosa
atgagttaccagcatcaatatatcgacggcaccccgatccacttccccctgggcaagctggtctgcgtcgggcgcaactacgccgaacacgccaaggaactgaacaacccggttcccaccgagccgctgctgttcatcaagcccggctcctgcgtggtgccggtgagcggcgggctgagcctgccgcaggagcgcggctcggtacactacgaggcggaaatcgccgtgctgatcggcaagccgctgtcgcgcaagccgaaccgcgaggaggtcctcgacgcgatctccggctatgcgccggcgctggacctgaccttgcgcgaggtccaggcgaaactgaaggaaaagggcctgccctgggagctggcaaagagcttcgatggcgccggcgtgctgtcgccgttcgtgaacgccgaccagtttcccgacccgaccgacatcggcatccgcctgaccatcaacggcgaggtgcgccaggacggcaacagccgcgacatgctcaatccgatcgtgccgctgatccagcacatcgccgggcatttctcgctacaggccggcgatgtggtgctgaccggcacgccgtccggggtcgggccgctgaacagcggcgacgagttgctgctcgaattgccgggcgccagccgtttcgagacccgcgtgctctga

SEQ ID NO: 320727 - DNA, 933 bp, Pseudomonas aeruginosa
atgtcccttgcctccaagcttccccgtttccgctggctgctgccggcgttcgtcgtgctcgtcggcgtggtgctgaccatcgtcatgcattgggacgatcgcgccggcctttggtggaaggaaagccaggccagccagcagcagcgcgacgaaagcatctggctgccgggctatcgggtggtgatcgacgccaagccgttgcggggcctggaggaggaagaaacctcggacctggcctacaacccggcaaccaggaccctgttcaccgttaccggcaagcggccgctgctggtggagctgtcgctcaccggcgacgtgctgcgcaccatcccgctgctcggcctgagcaatcccgaaggcgtggcggtgctggagaacggcaacgtcgcggtgaccgacgagcgccgcaataccctgaccatcttccatgtcgacccgcagaccgccgagctgagcaccaagagcctggccgaattcccgctgggcaatattggcaagaagaacaagggcttcgagggcatcgcctgggatccgcgccagcagcgtctgttgctgagcaaggagcgcgatccgatgaccctgttcagctggaagagcgacggcgggccgagcctgagcggggcgatgaccgcgctaccgagcgacgacctgtacatgcgcaacgtctcggccctcagcgtcgacccgcgtaccggccataccctggtgctgtcggccgaatcgcatctgctgctggagctggacgagaagggcgagccggtcagcttcatcagcctgctcggcggcttcaacggcctggacagcaagatcccgcgcgccgaaggggtggccatcgacgacgagggcaccatctacatggtcagcgagccgaacctgttctacgtgttccgcaagaagagcggcgagcgcctggccaccagcgacgccgattaa

SEQ ID NO: 320728 - DNA, 351 bp, Pseudomonas aeruginosa
atgaaacttcgtcacctgcccctcatcgctgccatcggcctgttctccaccgtcaccctggccgccggctataccggcccgggcgctaccccgaccaccaccacggtgaaggccgcgctggaagccgccgacgacaccccggtggtcctccagggcaccatcgtcaagcgcatcaagggcgacatctacgagttccgcgatgccaccggcagcatgaaggtggagatcgacgacgaagacttcccgccgatggaaatcaacgacaagacccgggtcaagctgaccggcgaagtcgaccgcgacctggtcggccgcgagatcgacgtcgagttcgtcgaagtgatcaagtaa

SEQ ID NO: 320729 - DNA, 1035 bp, Pseudomonas aeruginosa
atgctgaccatctacagcgacgaccatcgcctgcaccacggccggcacgaactgatcggcggccagttcaccccctgcttcgaaaaacccagccgcgccgacatggtcctcgaccgcgtgaaggccgtcggcctcggcgaagtccgcgcaccgcgcgacttcggcctggaaccgatccgccgggtgcacagcgagggtttcgtgcgtttcctgcagaacgcctggcaggactggctggccaccggccgcagccacgacatgctgccgatcgcctggccgacccggcgcctgcggcagacggagccggacaacatcgacggtcgcctcggctactactccttcgacgccggcgcgccgatcaccgccgggacctggcaggcgatcaccagttcggccaacgtcgccctcagcggccagtccgaactcgccaacggcgcgcgctcggtattttcgctctgtcgcccgccgggccaccacgccgcggccgactacatgggcggctattgcttcttcaacaatgccgccatcgccgcccaggccttcctcgaccggggcgccgggcgggtggcgatcctcgacgtcgactaccaccatggcaacggcacccaggacatcttctacgaccgcgccgatgtgctgttcacctcgatccacggcgatccgcgcttcgaatacccctatttcctcggctacgccgacgagaagggcaacggcgtcggcaccggctacaacttcaactacccactggcggccggcagcgactgggcgacctggagccaggcgctgcaggcggcgatccggcagatccaggcctatgcggcggacgccctgatcgtttccctgggggtggataccttcaaggaggacccgatttcccagttccgcctggacagccccgactacctgcgcatgggcgaagccatcggcaagctcggcctggccacgctgttcgtgatggagggaggctacgcggtggaggaaatcgggatcaacgcagtgaacgtgctacagggtttcgaaggggttcaccggtaa

SEQ ID NO: 320730 - DNA, 1395 bp, Pseudomonas aeruginosa
atggccagcgaacgcaacaacggcatcctcatcggcggcaagcgccccgagtacgtccacagcgcccagggcaccggcctgcggcgcatcctcgggcttcccgccctggtcttcttcgggctggtctacatggttccgctgaccatgttcaccacctacggggtagtcaccgagatcaccggcggtcgtaccgccagcgcctacctgatcaccctggcggcgatgctcttcaccgccttttcctacagcttcatggtgaagaaatatcccatcgccggctcggcctattcctataccagcctcagcttcggcccctgcgtcggcttcctcgccggctggtcgctgctgctcgactacctgttcctgccgatgatcaactacctgctcatcggcctgttcctcaacatcgccttcccgatggtgccggcctgggtcttcgtgctcgcggtgatcggcctggtcaccgtgctcaacgtgatcggcatcagctcggtggccggcatgagcaacgtgatcgtcggcgcccagttcgtcttcgccgtggtgttcgtcgccatggcggtcaagcacctggccggcatcccctcgctggacctgagcctgcccttcgtcggcgacggcagccagccgggcttcgccccgttgatggccggcgcggcggtgctgtgcctgtcgttcctcggcttcgacgcggtctcgaccctggccgaggaaacccgcgacccgcaacgcgacatcccgcgcgccatcgtcatcaccacggtcggcgctggcctgctgttcaccgtgctggcggtcttcagccaactggtgttccccggcagcgtattccaggacgccgagtcggcggccaacgaagtgatgctggcggccggcggcaagttcctcgccagcttcttcaccgccgcctacgtcgccggcgccgccggctcggcgctggcctcgcaggcctcggtgtcgcgcatcctctacagcatgggccgcgacggcatcctgccgcggcgcgtgttcggcagcctctcggagcgcttcaagacgccagtgatcgcgatcctggtggtctcggtgatttccctgctggcggtggtcatcgacctcaccaccctggcctcgatgatcagcttcggcgcgctggtggcgttctccgcggtgaacctggcggtgatccgcagctacctgctgctcgacggccgccgcgccccgcgcgacctgctgcgctacgggctggtgccggccatcggcctgggcctgaccctgtggctgtggaccagcctctcggcgctgaccctggtgatcggcctgacctggttcgccgccggcctcgcctacctggcgttgcataccggcggtttccgccgcaaggcgccgaccgtgaccttctccgaacagaactga

SEQ ID NO: 320731 - DNA, 1044 bp, Pseudomonas aeruginosa
atgacctaccgcacaccgctcaccctgctcttcgccgccggtctagccctgggcggccaggctcgcgccgaaggcaccctgcacttcgccaactggtcggactactacccgccggagttgctgaagaagttcgagaaggacaccgggatcaaggccaccctcgacgcctacgacagcaacgagacgctgctggccaagctcaaggccggtggcggcgcctacgacgtggtggtgccgtcggacagtttcatagaaatattcgtcaaggaggggctgctgcaaaagctcgacaagagccagttgccgagcctgggcaatctgaaggaaaacttccggacccttggcttcgatcccggccacgactacagcattccctatctctggggcaccaccggctacagctacgatacggcgaaggtgccgggcggcaggctggaagaaagctggaagccgttcttcgaaccaccagccgagctgaaaggcaaggtggtggctctgaactccatcgaggaactgttcattcccgccacctactacctcggcatcgacgaatgcaccgaggacgccagggaagcgcagaaggtcctcgacctgctgctcaggcaaaagccggcgctggccatgtacaacagcgacggcaccatcgagcgcatggccgccggcgaggtcgccatgcaccagcagtggaacggcgccttccaccgcgcccacgcccaacgcgccagcctcgaatacgtctatccgaaggaaggcatccggctgttcatcgacaacttcgcgattccgcgcgacgccagcaacgtcaaggaagcccacgtcttcatcgactggatgatgcgcccggagaacatcgccgccgcctccaacttcgccaagtacaacaacgccatcgtcggctcggagaaattcatggagaaagcactgttcgacgacccggcgatcaacaccccgcaggacaagctcgaccgcctgaagccgttcaagctctgctcgccgaaagccctggcgttgcgcagcaaggtctggaccaagcttaagaaatga

SEQ ID NO: 320732 - DNA, 789 bp, Pseudomonas aeruginosa
atgaacggccgcaatccactctggaccttcagcggcgtgcgccaggccgcctggctgttcttcgccttcctctacatcccgatcctggtgctggtagtgctcagcttcaacagcggccagtcggcgacgctctgggagagcttcagcctgaaatggtatgcggtggtggccaacgatccggaaatcctccgcgcggcgaagaactcgctgctcgtcgccaccctcgccaccctggcctcgaccgtcctggccaccctcgccgcgctgggcatgcgcggtcgcgccttccgcgggcagaccctgatgaacggcgttctcggcctgccgctgctggtgccggagatcgtcaccgcggtggcgaccctgatgttcttctccttcatcggcctgaagctgtcgttgttcaccatcctcatcgcccacatcgtgttctgcatccccttcgcctacctgccgatccgcgcccgcctggagggcctggacccgcgcctggcggaggccgccgccgacctctacgcctcgccgtggaaggccttctggaaaatcaccctgccgctgctgatgcccggcgtgctgtccggggcgatgctcgcgttcatcatctcgatggacgatttcgtcatcacctatttcgtcgccggcgccggcgcaaccaccctgccggtgtacatcttcagttccatccgcatgggcatatccccgaagatcaatgcgatttcctcgatcatcctcatgatttccatcgccttcgtcgccctgtcgtactacctcggccaacgccgccgctga

SEQ ID NO: 320733 - DNA, 930 bp, Pseudomonas aeruginosa
atgagcaccgccggccgacctaccgcgcaacagtcggccgaacgccggcagctgcgtcggcgcctgctgctgagcagcccggcgatgctgatgctggtgctgttcctggtgatcccgctgggcatcatgttcgccgtgtcgatccagcaatccggcgactacggcggagtgaaatggggccagcacagcctggaggcctacctcaatttcctctgggaacgcgacctggacgacagcctggtgttcaacgccgactacctgggcatcttccagcgctcgttctggctgtcgctgctgaccaccctcggctgcctggcgctcggcttccccaccgcgctgtacctggcgttgcaaccggaacgccggcgcaacctgctgctgttcctggtcaccgtgccgttctggaccaacctgctggtgcgggtctacgcctggatcctgctgctgcgcaacggcgggctggtggacgccggcctgcaaggcatcggcctgaccgacaccgggctggggctgctctataccgacaacgcggtgatcatcggcctcctttatacctacctgccgttcatggtgctgccgatctacagcagcctggaaaagatggactggcgcctggtggaggcggcattcgacctcggcgccaaccgctggaaagcgctgcgccgggtgatcgtgccgctggcgatgccggggatagtcgccggctgcatcctggtattcatcccggccctgggcagctacatcattccggaattgctcggcggcggtaaggcgctgatgatcggcaacctgatccagctgcaattcggtaccgcgcacaactggccgttcggcgccgccctttcgttcgccctgctggccttcgtcctgctggcgatgctgatctacaacctgcgcttccgggccaacgccggcggaggccagccatga

SEQ ID NO: 320734 - DNA, 1050 bp, Pseudomonas aeruginosa
atgaccagcgcgatagccatcgagcggatctgcatggaattcggtacccccggccaaggcctgaaggcccttgacgatgtgtccctggatatccacgccaacgaattcttcaccctcctcggcccttccggctgcggcaagaccaccctcctccgcctcatcgccggcttcgaacagcccagttccggcagcatccgcctctatggcgaacacatggaaggcctgccgccgttccgccgcccggtcaacacggtgttccagagttatgcgctgttcccgcacatgagcgtcgccgacaacatcggcttcggcctggagatgcagggccgcccgcgcagcgagatcgacgccaccgtgagccgcatgctcgacctggtgaagctgccggaggtcggcaagcgccgcgccgaccagttgtccggtggccagcagcaacgcatcgccctggcccgcgcgctggccagccggcccaaggtgctgctgctcgacgagtcgctgtcggcgctggacctgaagctgcgcaaggaaatgcagatcgagctgaagcgcctgcagcacgagaccgggatcaccttcatcttcgtcacccacgaccaggaggaagcgctgaccatgtccgaccgcatcgcggtgatgagcaagggcaaggtgttgcaggtcggcacgcccagcgacatctacgaggcgccgctgaaccgggcggtcgccgacttcatcggcgaaaccaacttcctcgagggccaggccgacgccgacggcgtgcgcctggcggacggccagcggctggccgcgacgaccccgggcagcggcgctgtgaccttggcgatccgcccggagcgcaccgaactggccgccgacggccagttggaaggcgtgctggaaaacatcgtctatgtcggcaccgataccgtctaccacctgaacgtggccggacagccgggcttccgcgtgcgccagcagaaccgcgacggcgcacgctgcccgcacagtccgggggcgaaggtgcgggtgcggattcccgccgccgccatccgggtgcttgccgaatga

SEQ ID NO: 320735 - DNA, 930 bp, Pseudomonas aeruginosa
atgtcccgagctttcacgcctcgccgtctgctgctggccgtcctgctggtcgcgctgtccgcgctggtccttctcggccagagcttccgggtcttcgaccgggcctggttcgccgtccaggagtggcgtcacgccgatgcctggaaagagcgctcgatatggctgccggactaccgcgtgcggatcgaggcgcagcccatcgaggggttgaacgacgacgtttccgcgctgaccttcgatcccgaccggcgcaccctgttcaccgtgaccaaccagccggcgcagatcatcgagctgtccttgcagggcaaggtactgcggaccatcccgctgaccggcttcggcgacgccgaggccatcgagtacatcagccgcggcgtctacgtgatcaccgacgagcgccagcaacgcctggtcaaggtgcgcctggaggacgacacgcgcttcatcgacgctgccgatgcccagcagctttcgctgggtatcggcctcaacggcaacaagggtttcgaagggctagcttacgacgccgagggcaagcgcctgttcgtcgccaaggagcgtgacccggtgcgcatctacgagatccacggtttcccccacacccaggcggacaaaccgttcgccgtgcacgtggtggacgaccccgggcgcgacaagcgcctgttcgtccgcgacctgtccagcctgcagttcgacgagggcaccgggcacctgctggcgttgtccgacgagtcgcgtctggtagtcgagctggacaccgacggcgagccggtcagcaccctgtcgctgctgcgcggcatgcacggcctgaagcgcagcgtgccgcaggccgagggcgtggcgatggacgaccgtggcgtgctctacctggtcagcgagccgaacctgttctacgtcttcagcaaggacgagccggcgcagccctga

SEQ ID NO: 320736 - DNA, 1977 bp, Pseudomonas aeruginosa
atgcaccatcgtaccgacacagaggaaagtgccgtgttcaaaccattagctgtcgctgtaggcctgggatgtgctgcgctgtcgttgggcgccaacgcctaccaatacggggaatacgccggggagaccctggagcgcctgatcaccgactacccgggccgctatcgcggcaccgccagcttcgccggcgccagcgaactgatgcagtcgcgcctgggcttcggctaccagaccagtcgccaggacttcacctgggccggcaaccgcagttcacagaacgtcatcgcctcggcgcccggtagcagcgggaagttcctggtactcggcgcgcactacgacacctactacggtcgcccgaccctgcagggcctggacgataacgcctcgggcgcggcggtgctcaccgagatcgcccgcaacctcggcggcatcgccctggagaacggcctcgaggtggtcggtttcggcgccgaggaggaaggcctgcgcggttcgcgtgcctacgtcgagtccctcgacgccagccagcgcgccaacctgctgggaatgatcaacctcgacagcctggtcaccggcgacaagatgtacgcccatgccggctccaacagcgtgtccagcccggccctcggcgcctaccgcgaacagatcctgcgcatcgcccgcgagctggacatcccgttgttcaccaaccccggcctgaacgccgaatacccggcgggtaccggctgctgcagcgacggcgaaagcttcaacgggatggacatcccggtgttgttcatcgaggcgaccaactgggaactgggcgacctggacggctacgagcagaccgacaacccggcgattcccggcggctcaacctggcacgacccggccgaggacaacaaggaagtactgaccaacgccctcggccaggagcgcatcgagcaacgcatgcgcgacttttcccgcctgctgacgcgcctggtgctggagctgaccaacgccgacctgctggcctccaccgcctccggcggcgccctggcgcggcagatggaagaccagttgcagcgccagcatcaggcactgacccgcctgcacgaccgccgctggctgaccctgctcggcagcaaccggccggtaggcagcttcgacggcgaggtgggcgcggagggcgaggtctcgccggacagcggtttcgacatgcctggcaatccggagtccaggcgcgccggcgtgcatctgctcggcgactaccgctacagcgaggccctgaccctcggcggcagcctggccttccagcgcagccgcgacaagctggaccatggtgggcgcatcgagggcgacacctggcagctcggcctgttcggcctgtacaatgacggcggtccggaatggctggccggcgagctgaacctcgggcatacccgctacgacagcaagcgttcggtctacctccaggccgccggcgggccggtgctgctcgaccagcgtctgtcgggcgacacctcggcctggtcctggggcgcccggctggaaggcggctatgacttcagcttcggcgaactgcggagcgggccgctggccggcctcgactacatgcactaccgcatcgacgacttccgcgaggacgaggccctgcgtaccgcactcggctacgagaagcaggactacgactcgctggaggcgagtctcggctggcgcctgcgcggcgagctggcgctgggcgcgagaatgcgcctgcaaccctacgccagcctgcgctgggtccgcgagctggcggacggacgcctggacgacatggacctgaccagccgcggcgacgggcgtgtccgggtcgccgacatgggcggcgtggacaaggatttcggccgcgcccagcttggcgcgcaactggcgatcaccgagcagctcggggtcttcgccgaagccaacagccgcttcgcccacagcgaaggcaaccaggcgggctattcgctcggggtgaactggcagttctga

SEQ ID NO: 320737 - DNA, 726 bp, Pseudomonas aeruginosa
atgaacattttccgcgaagccctgctcaaccgtcgcctgaagaaggccctggcacgtcacggttgccgcatggccagcggggtcgagacgctgcgcgacggcacgcaggtgacgctggagccgaacgtgaagctgggcaaggcgaagatccattcgccggcactggaggtcggcgcctataccgacgtggtcagcggctgcgagttcttggaggtggccagcatcggccgcttctgctcgatcgccaccggggtggtgatcggtcagccgcgccgctcgcatccaatgcactggctgagcacccacgccttcaccgccaatccgaagctgttgcgcaagccgttgcagcccgagcgcgaagcgaccccggcgcggatcggccacgatgtatggatcgggcgcgacgcgctgatcctcgatggggtggagatcggcaccggcgcggtgatcggcgcgcaatcgctggtcaatcgcgacgtgccgccctacgcggtggtggcgggctcgccggcgcgggtgctccgttatcgcttcgcgccggagctgatcgagcgactgctggcgagtcgctggtgggagttgccgctggacgtgcttggcgaattgccgctggacgatccgcaggcctgcgtcgaggcgctggagcgtcggccgccgcaggcgtgccaggaggcgcggcgcttgcgcatccggcacaagccgttcgccatcgaatggctgtcctga

SEQ ID NO: 320738 - DNA, 333 bp, Pseudomonas aeruginosa
atggcagccaaattccatctgaagaaagcgaaagacggccagttccacttcaacctgcatgccgccaacggcgagatcattctcaccagcgaactgtacaaggccaaggactcggcgctcggcggcatcgagtcggtgcgcaagaactcccagcgcgacggtgccttcgaggtcaagccggccagcaacggcaagttccacttcgtactcaaggccaccaatggccaggtcgtcggccagagccagctctatgccagccaggccaacgccgaagccggcgtgcagtcggtgaagcgcgcagcgccggaagccggtctcagcgacgaaagctga

SEQ ID NO: 320739 - DNA, 672 bp, Pseudomonas aeruginosa
atgaaccaggatcagctcaagcaggcagtggcacaggccgccgtcgaccacattcttccgcacctcgacagcaagagcatcgtcggcgtcggcacaggctccaccgccaacttcttcatcgatgccctggcccgccacaaggccgagttcgacggcgcagtagccagttcggaggccaccgccaagcgcctgaaggagcatggcatcccggtctacgagctgaacacggtcagcgagctggagttctacgtcgacggcgccgacgaaagcaacgagcgcctggagctgatcaagggcggcggtgccgcgctgacccgcgagaagatcgtcgccgcggtggccaagaccttcatctgcatcgccgatgccagcaagctggtgcccatcctcggccagttcccgctgccggtggaggtcatcccgatggctcgcagccacgtcgcccgccaactggtgaagctcggcggcgatccggtctaccgcgaaggcgtgctgaccgacaacggcaatatcatcctcgacgtgcacaacctgcgcatcgacagcccggtggaactggaagagaagatcaacgccatcgtcggcgtggtcaccaacggcttgttcgccgcccgcccggccgacttgctgctgctcggcaccgccgacggcgtcaagaccctcaaggcctga

SEQ ID NO: 320740 - DNA, 1515 bp, Pseudomonas aeruginosa
atgctcgaacaatacgtcaagaagatcctcacctcgcgcgtctacgacgtcgcggtggaaacgcccctgcaacccgcccgccagttgtccgaacgcctcggcaaccaggtcctgctcaagcgcgaggacctgcagccggtgttttccttcaagatccgcggcgcctacaacaaggtcgcgcagctcaccgaggaggagaaggcccgcggggtgatcgccgcctcggccggcaatcacgcccagggcctggccctggcggccaagcggcaggggatcagggcggtcatcgtgatgcccaagaccacccccgagatcaaggtccaggcggtgcgcgcccacggcgccaaggcggtgctgcacggcgacgccttccccgaggcgctggcccacgcgctgaagctggtcgacgagaagggctacaccttcgtccatccctacgacgatccggacaccatcgccggccagggcaccgtggccatggagatcctccgccagcagcccggccgcctcgatgcgatcttcgtcccggtgggcggtggcggactggtcgccggcatcgccgcctacgtcaagtacctgcgtccggagatcaaggtgatcggcgtcgagccggacgagtcgaactgcctgcaggcggccatggccgccggcgagcgggtggtgctgggccaggtcgggctgttcgccgacggcgtggcggtggcgcagatcggccagcacaccttcgacatctgcaaggaccacgtcgacgaagtgatcaccgtcagcaccgacgagatctgtgcggcgatcaaggacatctacgacgacacccgctcgatcaccgagccggccggcgcgctggcggtggccgggatcaagaagtacgtcgagcgcgagcgcgccgaggggcagaccctggtggcgatcgactccggcgccaacgtcaacttcgatcgcctgcggcatgtcgccgaacgcgccgaactgggcgagcgccgcgaagcgatcatcgcggtgaccattcccgagcggccgggcagcttcaaggccttctgcgaggcggtcggcaagcgccagatcaccgagttcaactatcgctaccacagcggcagcgaggcgcacatcttcgtcggcgtgcagacccacccggagaacgacccgcgcgaggcgctggtggcctatctgcgcgagaagggcttcccggtcctcgacctgaccgacaacgaactggccaagctgcacatccgccatatggttggcggccatgcagtgaaagtcagcgacgagatggtgttccgcttcgaattccccgagcggcccggcgcgctgttcaacttcctcaccaagctcggcgggcgctggaacatctcgatgttccactaccgcaaccatggcgcggccgacggccgggtggtggccgggttgcaggtgccggaagacgagcgccacctgatcccgcagaccctggaggcgatcggctatccgtactgggacgagaccgccaacccggcctaccagctgttcctcggctga

SEQ ID NO: 320741 - DNA, 468 bp, Pseudomonas aeruginosa
atggaacattttctccagatcaagattctccacggagtcgccaccgtgctgctgttcggcggcctgctcggcctggcgttctacgcctggcgcagctggcggacgggcgacgcggctcgggtcgcgcgcggtttcaagcgggtccgcctgatcggctggccgctgctggggctcagcctgctggccctgccggtcagcggctggtggctggtgcacctggccggctggccgttgggccagagctggctgctgttcggcgcctgcctctatctgctcggctgcatcttctggctggtcctcgccggccgcctggcgcgggtccagcaccaggccggcgccgccgagacggcgggggccgcgctgggcgagcagaccctgcgcgagatcaaggtgggcctggtcatggccctgctcggtgcggccagcttcatcgcggtggcggtactgatggtcagcaagccgctctga

SEQ ID NO: 320742 - DNA, 1272 bp, Pseudomonas aeruginosa
atgcgtattctgctggtaggcgcgggaggtttcgtcgggcggcacctgctcccggcgctgctcgccgccggacacgaactgctcctcaccgcgcgccgcccgccggtcgatgcgcctgccggcgtacgctggctggcgctcgacctggagcggcttgcggaaaggccggacagcttcgcctggcccgccggggtcgacttgctgatcaatgccgccggcaccatgagcctcgacgaggcgagcatggctcgcgtccaggacagcggcgcgcgaacactcttcgacctcgctgcagcccatggggcgaaggtcctgcagatttccgcgctgggcgccggtgcgcacccggacgtggccttcctcgccagcaaggcggcggccgaccgccacctgctggaactgggcatcccggcgctggtgctgcgcccgtccctgctgctggggccgggcggcgccagcagcgcctggctggaacgcctgtcgccgctaccgctgattcccttgctggacaatcgcgcgcgcctgcaaccgctgcatgtcgaggacctggtcggcgcggtgctggccttgctgcgctgctggccggagcgggcgcaggtgattccgctggtgggtccgcaggcgctgacccagggcgagctgctggacgagctgcgccgcgcccagggttggccgcgcggccgctatgcggtgccgcccgcggcgcttctcgatgcgttgggcgggcttggccggcgtgctggctggcggacactgagtccatcgatgctgaagctggtgcgccacgacaacctggccgacccggcactcctcgatgcggcctgcggctatcgttgcgcgccgctggccagtcgcctgctcggctggccgcaggcggcacgcagcctggcggcgctgatgcggccgctgatgctggcggccctggtgctgatctggctgggtaccctggtcgcctgcctggggccgggttacggctggggcctgcggatcctcggcgaggccggcatccacggctggccggcgagcctggcggtgatcgccggggccctgctcgacggcgcgctcggcgtcggcctgctgctccgccgctggcgtcggcgcgcgctgctggcgcagttctggctgatgcttggctacagcctggcgatcagcctgatcctgccgcattactggtacgacccctacatggcggtcggcaagaacatcgtgctgatggtggccacgctctggctgctgggcgacgaacctcgagccagggaggcccgtggatga

SEQ ID NO: 320743 - DNA, 468 bp, Pseudomonas aeruginosa
atgaacctttacctgttgctgaagaccctgcatatcctttcctcgaccattcttttcggcaccggcctggggtcggcctactacgccctgcgtgcctggcgcagcgggcagttgccggtgatcgcagtgaccttccgccacctggtcaccgccgactggctgttcatcgccaccaccgcggtgttccagccgctcagcggcctggccatggtgcatgtcgccggctggtcgctggcccagggctggttgctgtggagcctgggcctctacgtgttcgccgggctctgctggctaccggtggtgtggttgcagatccgcgtacgcgacatggccgaggcggccttgcgcgaggcgcggcccatcgaaccgctggcgtaccgctacatgaacgcctggttcatcctcggctggccggccttcatcgccttcatggtcatcttctacctgatggtcaacaagccggtctga

SEQ ID NO: 320744 - DNA, 1242 bp, Pseudomonas aeruginosa
atgccccacacagcccccgctcccggctcgctgcggccggtcgtgatcgtcgccctggtcaccgcgctatgcctggccggcgactcgatgctttatatcgccttgccgatctactggcacgaggtcggcctggaggcgctctggcaggtcggcgtgctgctgtcgatcaaccgcctgatccgcctgcccttcaatccgctgatcggccgcctgtacaagcacctggcactgaagaccggcctgctcctggcggtcgtcatcggcgtgctgagcaccgccggctacggcctggccagcggtttcctggcctgggtgctgctgcgcggactgtgggggatcggctggtcgttcttccgcatcggcgggctctcggcggtggtctactgcgccgccgaccaccagcgcggccgcgccatgggcctgtacaacggcctctaccgcctgggcagcctggtcggcatgctgctcggcgggctgctggtgccggtcctcggcctgccggcgctggcgctgtccttcgcgatcctggcactgctcggcctgccgctgctggcgaggggtttcgacctgccggagagtcccgccggacatgcgcggacctccgccgcaacggcagccaccagcgtcgccaggcgcccgccgccgcgcggcctggtgatcctcagcggcttcgccaccgcgctcctgatccagggcgtactcgccgccaccctgagcgcgctgatcgcccgcagcttcggcaccgaggtcagcctgctcggcctggcgctcagcgccgccggcctctccgggatcatccaggccctgcgctggtcctgggagccctggctggccgggcgcttcggtgcctggtcggatggcccgcgcgggcgtcggcgcttctacgtggctgcgctactggtcggcgcaatgggcttcggcctgctttccagcaggctgcccattctcgcctggctggccatcgccctgctggtgatgctggtcgccaccgccctcaccaccctgaccgacgccctcgccgccgacgtcgcccgcgccggcgacgtggtcggcttcatgacccgctactccatcgtccaggacctcggtgccgcgctgggcccggccctggccttcctcctgctggagcggcccggcggcttcgcctggttgtactggggcggctccctggcgttcctggtcctggcgttgctctggttgcgccgagcggactctcagaccggcttgttgaccatcaggtag

SEQ ID NO: 320745 - DNA, 654 bp, Pseudomonas aeruginosa
gtgcgtctggcccttttcgatctcgataacaccctgctcgccggcgacagcgaccatagctggggcgaatggctgtgccagcgcggcctggtcgacgccgccgaataccaggcgcgcaacgacgccttctatgccgactacgtcgccggcaagctcgacgtccttgcctaccaggccttcacccaggcgatcctcggtcgcaccgagatggcccagctggaaacctggcaccgccagttcatgcaggaagtgatcgagccgatcgtgctggccaagggcgaggcgctgctcgccgagcaccgcgccgccggcgaccggctggtgatcatcaccgccaccaaccgcttcgtcaccggcccgatcgccgaacggctcggggtggagaccctgatcgccaccgagtgcgagatgcgcgacggccgctacaccgggcagaccttcgacgtgccctgcttccagggcggcaaggtggtgcgcctgcaacgctggctcgacgagaacggcctggacctggaaggcgccagcttctacagcgactcgctgaacgacctgccgctgctggaaaaggtcagccggccggtggccgtcgaccccgatccgcgcctacgcgccgaggcggaaaaacgcggctggccgatcatttccctgcgttga

SEQ ID NO: 320746 - DNA, 480 bp, Pseudomonas aeruginosa
gtgatcgattccgatggttttcgcccgaatgtcggcatcattctcgccaacgaggcggggcaggtgctgtgggcgcggcgtatcaatcaggaagcctggcagttcccgcagggaggcatcaatgatcgcgaaacgccggaagaggcgctgtatcgcgagttgaacgaagaagtcgggctggaggccggggacgtgcgcatcctggcctgcacccgcggctggctgcgctaccgtttgccgcagcgcctggtgcggacccacagccagccgctgtgcatcggccagaagcagaaatggttcctgctgcggctgatgtccgacgaggcgcgcgtgcgcatggatatcaccagcaagcccgagttcgacggctggcgctgggtgagttactggtaccccctgggacaggtggtgaccttcaagcgcgaggtctaccgccgcgccctgaaggaactggccccgcgccttctggcgcgggactga

SEQ ID NO: 320747 - DNA, 2280 bp, Pseudomonas aeruginosa
atgctcaacacgctgcgcaagatcgtccaggaagtgaactccgccaaggatctgaaggcggcgctgggcatcatcgtgcagcgggtcaaggaagccatgggtacccaggtctgctcggtgtacctgctcgacaccgagacccagcgtttcgtcctgatggccaccgaaggcctcaacaagcgttccatcggcaaggtcagcatggctcccagcgaaggcctggtcggcctggtcggcacccgcgaggagccgctcaacctggagaacgccgccgcccacccgcgctaccgctatttcgccgagaccggcgaggagcgctacgcgtcgttcctcggcgcgccgatcatccaccatcggcgggtgatgggggtgctggtggtgcagcagaaggagcgccgccagttcgacgaaggcgaggaagccttcctcgtcaccatgagcgcccagctcgccggggtcatcgcgcatgccgaggcgaccggttcgatccgcggcctgggcaagctcggcaagggcatccaggaagccaagttcgtcggcgtgcccggcgcccccggggtcggggtgggcaaggcggtggtggtgttgccgccggccgacctggaagtggtgccggacaagcaggtcgacgacatcgacgccgagatcgccctgttcaagcaggccctggagggcgttcgcgccgacatgcgcgcgctgtcgagcaagcttgccagccagctgcgcaaggaagaacgcgcgctgttcgacgtctacctgatgatgctcgacgatgcctccatcggcaacgaggtcaagcgcatcatccgtaccggccagtgggcccagggcgccctgcgccaggtggtgatggagcacgtgcagcgcttcgagctgatggacgacgcctatctccgcgagcgcgcctccgacgtcaaggacataggtcgccgcctgctcgcctacctccaggaagaacgcaagcagaacctgacctacccggaacagaccatcatcgtcagcgaggagctgtcgccggcgatgctcggcgaggtgccggaagggcgcctggtcggcctggtctcggtgctcggctcgggcaactcgcacgtggcgatcctcgcccgtgccatgggcatccccacggtgatgggggcggtcgacctgccgtactccaaggtcgacggcatcgacctgatcgtcgatggctaccacggcgaggtctacaccaacccctccgccgagctggtgcgccagtacagcgacgtggtcgccgaggagcgcgagctgagcaagggcctggcggccctgcgcgagctgccctgcgagaccctcgacggccaccgcatgccgctctgggtcaacaccggcctgctcgccgatgtcgcccgcgcccaggagcgtggcgccgagggagtgggcctgtaccgcaccgaagtgccgttcatgatcaacgaccgcttccccagcgagaaggaacagttggcgatctaccgcgagcagctcagtgccttccacccgctgccggtgaccatgcgcaccctggatatcggcggcgacaaggcgctgtcctacttcccgatcaaggaagacaacccgttcctcggctggcgcggcatccgcgtcaccctcgaccacccggagatcttcctggtccagacccgcgccatgctcaaggccagcgaaggactggacaacctgcgcatcctgctgccgatgatctccggcacccacgagctggaagaggccctgcacctgatccaccgcgcctggggcgaggtgcgcgacgagggcgtggacatcgccatgccgcccatcggcatgatggtcgagattcccgccgccgtgtaccagacccgcgagctggcccgccaggtcgacttcctttcggtcggttcgaacgacctgacccagtacctgctggcggtcgaccgcaacaatccgcgggtcgccgacctctacgactacctgcatccggccgttctgcatgcgttgaagaaggtggtcgacgatgcccacctggaaggcaagccggtgagcatctgcggcgagatggccggcgatcccgcggctgccgtgctgctgatggcgatgggcttcgacagcctgtcgatgaacgccaccaacctgcccaaggtgaagtggctgctgcgccagatcaccctggacaaggcccgggacctgctcggccagttgctcaccttcgacaacccgcaggtcatccacagctcgctgcacctggcgttgcgcaacctcggcctgggtcgcgtgatcaacccggcggctaccgtccagccctga

SEQ ID NO: 320748 - DNA, 1038 bp, Pseudomonas aeruginosa
atggacgaacgggcgtcgaagccgccaggtcttcttccgctgtcacgcgaagaccttgagaaaaccctgcgatatgccctggagatcgtcagcgacgggatctgggactggaacatcgcgaccaaccaggtcagccgcagcgccggctggtacctgatgctcggctatccgccgcatagcctgccggagagcgtggagacctggaagagcatcatccatcccgaggactatccgcgggtgatggccagcttccaggcctacctcgacggcgaaagcccggaatactgcgaggaataccgctgccgcacctacagcggggattacctgtggatcagcgatcgcgggcgtttcgtcgagttcgacgagcgcggcgagccgcggcggatgatcggtgcgcaccacgagatccatcagcgcaagctggtcgagctggagttgcagcagcgcaacgaggaactgttcgactggaacctgcgtctcgaggaactggtggccgagcgcaccgaggcgctgcaccgggtcaaccaggcgctggcctcgaagatggccgaggcccagcgcctgagcgaaatcgatccgctcaccgagctgtacaaccgacgcaagttcgagcagtgcctgcaccatgaatggatgcgccggcagcgccatggacgcgccacggcactggtgatgatcgatgtcgatcacttcaagcggatcaacgacctgttcggccactccaccggtgatcgcgtgctggtcgccttcggccgcctggttgccagcgagctgcgcgaggtcgacgtgctggcgcgctggggtggcgaggagttcatcctgctgctcccggaaaccggcctggaggccgcggcggccttggccgaacgcctgcgccagcgggttcgctcgcagtccttcgagatgggcgagcggttgaccgccagctttggcgtcggcgtgctgaatgatggcgagaccctcgacctgctgctgtgccgggtggacgacgccctctatcgggccaagcagcgtcgcgattgcgtggcctgttgctga

SEQ ID NO: 320749 - DNA, 756 bp, Pseudomonas aeruginosa
atgtgcctgatcgtcttcgcctggcaaccggggcacgccctgccgctgctggtcgccgccaaccgtgacgaattctatgcccgcccgagcctgccgctggcggcctgggaggacgccgagggggtattcgccggacgcgacctggaggccggcggcacctggctggggctcggcccggccggccgtttcgccgccctgaccaacgtccgcgatccgtcgcaggctctcggcaagcgctcccgtggcgaactggtggcggacttcctgcgcggcggcggcaacccggccgactacctggcgcaggtcgccgggcgcgccgcggactattccggcttcaacctgctcattggcgatcgccatcagctctggcactacaacccccgcgtagggccaccgcgcctactgccggcggggatctacgggctgtccaacgcggccctcgatacgccctggccgaagctgctcaaggctcgcgccgccctcgccgagcggcttgccgagccgcatccgcaggccctgctggagctgctggccgacgcagcgccggccgccgacggccagttgccggataccggcgtgggtctggccacggaacgcctgctctccagcgtgttcatcgccagcccgagctacggcactcgcgccagcagcgtcgtacgggtacacgccgacggcacgcgggagatgatcgagcgcagcttcgggccgtccggcgcccggctcggcgaggtcagcctggtgctgccgccaggctga

SEQ ID NO: 320750 - DNA, 804 bp, Pseudomonas aeruginosa
atggagtttctcctctatatcgtgctgggcgcctgtgccggcgtgctggccggactgttcggcgtcggcggcggcctgatcatcgtcccggcgctggtcttcagcttcaccgcgcacggtttcggcggcgacgtcctgacccagatggcggtcggcacctccctggcgaccatcgtcttcacttcgatcaattccattctcgaacaccatcggcgcggcgcggtgcgctggccggtgttcgcctggatgaccctcggcatcctcatcggcagtgccctcggcgcgctgaccgcggcgcagatcaaggggccgctgttgcagaagataatcggggtgttcgccatcctggtcgctttgcagatggttctcgacctcaagcccaagggtagccgcgaggtgcccggcaagggcggcctgaccctggccggcgcggtgatcggctgggcctcggcgatcttcggcatcggcggcggttcgctgaccgtgcctttcctcagttggcgcagcgtgccgatgcagcaggcggtggcgacttcctcggcctgcggccttcctatcgccatttccggcgctctgtcgttcatcgcggtcggctggcacaacccgcagttgccggagtggagcctgggctacgtctatctgccggcgttggtcggcatcgccgccaccagtatgctgttcgcccgcttcggcgcgcgcctggcgcatcgtttgtcgccgcgcgtactcaagcgactgttcgccctgctgctgttcagcgtgggcataagtttcctgacccccgatctcgcttttctgtcgtag

SEQ ID NO: 320751 - DNA, 801 bp, Pseudomonas aeruginosa
atgctgacgtatccccagatcgatccggttgcgctggccatcggcccgctgaagatccactggtacgggctgatgtacctgatcgggatcggcggcgcctggctgctggcgtcgcgccggatgaagcgcttcgacccgacctggaccaaggagcgcctttccgacctggtcttctgggtcgcctgcggcgtgatcctcggtggccgcctgggctacgtgctgttctacaacctggacgagtacatcgccaacccgacgctgatcttcgaggtctggaaaggcggcatgtccttccatggcggcctgctcggcgtgatgctggcggtctggtggttcggcaagcgccatggcaagagcttcttccagctgatggacttcatcgccccgctggtgcccatcggcctgggcgccgggcgcatcggcaacttcatcaactcggaactgtggggcaaggtcagcgatgtgccctgggccatggtcttccccaacggcggcccgctgccgcggcatccctcgcagctgtaccagttcgccctggaaggcgtggcgctgttcgtcatcctctggctgttcacccgcaagccacggccgaccgcctcggtctccggcctgttcgtgctgtgctacgggatcttccgcttcgttgtcgaattcgtccgcgtgccggatgcccagctcggctacctcgcctggggttggctgaccatgggccaggtgctctgcgtaccgatggtgctggccggcattgccctgatggtctgggcctaccgccgcgacgcggcgcagccgaaggcggcctga

SEQ ID NO: 320752 - DNA, 795 bp, Pseudomonas aeruginosa
atgaaacagtacctcgacctgatgcgccacgtgcgcgagcacggcaccttcaagagcgaccgcaccggcaccggcacctatagcgtgttcggccaccagatgcgcttcgacctggccgcgggcttccccctggtgaccaccaagaagtgccacctcaagtcgatcgtccacgagctgctgtggttcctcaagggctccaccaatatcgcctacctcaaggagcacggcgtctcgatctgggacgaatgggccgacgagaacggcgacctcggcccggtgtatggctaccagtggcgctcctggccggcgccggacggccgccacatcgaccagatcgccaacctgatggcgatgctgaagaagaatccggactcgcgccggctgatcgtctccgcctggaacccggcgctgatcgacgagatggccctgccgccctgccacgcgctgttccagttctacgtcgccgacggcaagctcagctgccagctctaccaacgttcggcggacatcttcctcggcgtacccttcaatatcgccagctatgccctgctgaccctgatggtggcgcagatcgccggcctgcagctgggcgagttcatctggaccggcggcgattgccacctgtacgccaaccacctggagcaggccgacctgcagctgacccgcgagccgctgccgttgccgagcatgaagctgaatcccgaggtgaaggatctgttcgactttcgcttcgaggacttcgagctggtcggctacgaggcccatccgcacatcaaggcaccggtcgcggtctga

SEQ ID NO: 320753 - DNA, 798 bp, Pseudomonas aeruginosa
atgcccttcgtttcctacgcgcagaacctggaagacgtccgactctggcgggccctgaaactcttccccagggggttctacatcgacgtcggcgccaaccacccgcggatcgactcggtcaccctggcgttctacgagcgcggctggcgcggcatcaacatcgaaccgctgccccacctgcaccgcgagctggagcgggaacggccggaagacctcaacctgaacctcgccattggcgagcgcgaaggccgcgccacgctctacgagatggccgcctcgggtctctccaccctggaccccgagctagcccgccagcgccaggccgagggctgcacggccaccccgcgcgaagtgaaggtcagcaccctggacgcgatctgcgcggcccatgtcgaagggccgatccacttcctcaagatcgacgtcgaagggctggaaggcgcggtgctccgcggcctcgacctgaaccgctggcgcccgtggctgatcctcgcggaaaccccattcgaccacgaccccgaatggaaagcgccgctgctcgccgcaggctaccgtttcgtccacttcgacggcctcaacggctattacctggctgaggaacaggcccgcctggaaggcgccttcgcgctaccgccgaacctgctggacgacttccagctctgccatggccatgccatgagccatccggtcgctccgctggagcaggccctggaacaggcgctgcaacgcgcagaagatgcggagcgggctttgcgggactggcgcgcgcttccctggtaccgtcgcctgttcggttga

SEQ ID NO: 320754 - DNA, 1380 bp, Pseudomonas aeruginosa
atgactgagccgctgatcctggccgtggtcggccacaccaataccggcaagacctcgctgctgcgcaccctgactcgcgaccgtggattcggcgaagtctcccatcgccccagcaccacccgccacgtcgagggcgccaggctgtcggtggacggcgaagcgctgctggaactctacgacacgcccggcctggaagacgccatcgccctgctcgactacctggacgccctggagcgccccggcgagcgtctcgatggcccggaacgcatggcgcggttgctggacagcaacgaagcgcgcgggcgtttcgaacaggaagccaaggtggtccgccagttgctcgcctccgacgccgggctctacgtgatcgacgcccgcgaaccggtgctggccaagtatcgcgacgaactggcggtgctcgccggctgcggccggccgctgctgccggtgctgaacttcgtcgccagcccgcagcatcgcgaggaggagtggcgcgccgccctcgctcgcctgggcctgcacgccctggtgcgtttcgacagcgtggcgccgccgctggacggcgagcggcgcctctacgagagcctggcgctgctgctggagcgcgcccggccgcaactcgaccggctgatcgccgaccatgagacccaggccgccgcgcgcctgcgcgccgggcaacggctgatcgccgaattgctggtcgacgtcgccgcctgccggcgcctggtgcccggcggcgaaagcgccgtgcaggaagccacccgcgacctgcaccagcaggtgcgcaagcgcgagcaggcctgcgtggaagcgttgctgcggctctacgccttcgccagggacgacgcccgcgccgccgacctgccgctgctcgacggccgctggggcgacgatctgttcaatccggagaccctgcgccaactcggtatccgcctcggcggcggggttgcggccggtgccgcggccggcgccggcatcgacctgctggtgggcggcgtcacccttggcgccgccgccgccctcggtgccctcgccggcggcgcctggcagaccgtcggccaatacggctcgcgcctgctcggcaagctcaagggcgcccgcgagctgaccgtcaacgacgccgtgctgcgcttgctcgcgctgcgccaacggcagctcctggcagccctgcaaacgcgcggccacgcggcggtcgaggcgatccgcctggaaaccccggaggacaagcagtggcgcgaaggcaagctgccggaagcgctgcgcaaggcgcgcgcgcatccggagtggtcgtcgctgaacggcaggcgggtgggcggcagcgaccgccaggaacagatcgacgcgctggccgaactgctggagagcgggcgcggggaatga

SEQ ID NO: 320755 - DNA, 1386 bp, Pseudomonas aeruginosa
ttgagtcacacgacgcatcccggcctcgacgccctctggctgaccgaggccgttcgcctgcgcgaggagcaggccggtccgctggaagacagcgaggcggttcgccaggcgctggcccagggcggttccctgccgcgccgtattctcacccgcgcccactggctgggccgccgcgagggcctgctcgacgcccagcggacctggcgccagggttcgcggctggcgctggccctgctgctggtgctggccctggccagcggcgccggactggccttcgccgcgctcggcgatggccagcgcccggtcaacgtgttctgggcgctggccagcctactcggcctgcacctgctgaccctgctcggctgggccctcggcctgctcgccggcggcgaggccgcgggcgcgctcggccggctctggctgtggctcagcggcaagctggcgcgcgatgcccgcgccgcgcacctggcgccggcgctattggtcctgctcggccggcgccggctggcgcgctggggcctcggcgcgctggtccacgggctctggctgctcggcctgctgaccgcgctggccatgctcctcggcctgctggcgacccgccgctacggtttcgtctgggaaaccaccattctcggcagcgataccttcatcgcccttacccaggcgctcggcgccctgccggcgttgcttggcttcccgttgccggacgccgagctgatccgcgccagcggcgacgccgtcctggccagcgaagccgcacggcacgcctgggccggctggctggtaggcgtactgctggtctatggggtcctgccgcgcgcgctgctcggtctgctctgcctgtggcgctggaaacgcggcctggcccacctcgacctggacctcgacgacccaggctacagcctgctgcgcgaacgcttgatgccggccagcgaacgcctcggcgtcagcgacgcggcaccggactggctgccggagccgcagggcggccagtccagccaggaagccgccggagcggtgctggtggcggtggagctggacgatcgccggccctggccgccgaagctcgccgaaggcgtcgccgacgccggcatcctcgacgacggccagcagcgccgtcgcctgctcgaacaactgacccgctacccgccggcgcgcctggccatcgcctgcgacccgcgtcgctcgccggaccgcggcaccctggcactgctcggcgaactcgcccgctgcgccgccagcacccgcatctggctgctccaggctccgcccggcgaagcgctcgacagcgaccgcctgggtgactggcacgccgccctggaacgcctgcaactgccgcacggcgagacctcgccgctggcctggctggagaccggccatgactga

SEQ ID NO: 320756 - DNA, 363 bp, Pseudomonas aeruginosa
atgaaggtagtacgccgataccccctggcgctgttgctggggatggcgggcgcgctggccgacgagttgcccgatggctccttgctgcaacgctatggcgtgcaggccgaccagttgccgaccctggcggcggatccgccgtcgcgcaaggaggagaaggaaacgccgtcgcgcttccgggtggagccggagcagcccttggtgacctttggcgtcaaggaccacaagggcatggaacccactggcaacccgtcgatcgacgccatgcacgagcgcgatcggcggatctgccggaacatcaggcggcaggcactggagaaaggcaaggcacagcccttcgacggctacatcgagtgtccatga

SEQ ID NO: 320757 - DNA, 1152 bp, Pseudomonas aeruginosa
atgcaaccagccttcctgcgccgccacctcggcgccgcctgcctgatgctcgccgctggcctggccagcgccgcccacgccgacaccggcaacgtacaacgcgccatcgactgggcccagggccaggcctccgttcgccacccggccagcgacgaacgctcgccgctggtcatcgcccaccgtggcgccagcggttacgtaccggaacacaccctgggcgcctacgccctggcggtgatgatgggcgccgactacgtcgagccggacctggtgatgacccgcgacggcaagctggtcgcccgccacgacaacgagctgggcctgaccaccgatgtcgcccagcacccggaattcgccgaccgcaagcgcacgcagaaagtcgacggagtggaactcaccggctggttcagcgaagacttcaccctcgccgaactgaagaccctgcgcgccatcgagcgcatccccacgatccgcccgggcaatgcgcgcctggacggcaccttcgagatccccaccctgcaggagatcatcgacctggtgaaaagcctgcagatcagccagcaacgcaccatcggcctgtaccccgagatcaagcacggcacccacttccagcgcctcggcctggccatggaacgcccactggtgaagaccctgcaccgcaacggctacctcggtccgcgcgcgccggtattcatccagtccttcgaggtgaacaacctgaaggaactcaagcgcctcaccggcatccgcctggtccagctctacggcagcggccagccctacgaccagcaggctgccggcggcagcctgacctacgccgagatggccaccgccaagggcctgcgccaggtggcgcgctacgcctacggggtcggtccggacaagagctacgtgattccccgcgatgccaacggcaacctcggccagccgacccgcttcgtcggcgacgcccacgccgccgggctgaaggtgcatccctacaccttccgcgcggaaaacagcttccttccggcggagttccgcagcgccgacggcaacccgcagtcgcgcggcgacctggccggcgagatcagggcctacctcgacgccggcatcgacggcctgttcagcgaccagccggacgtcgccgtgcgcctgcgcgagcagcgctga

SEQ ID NO: 320758 - DNA, 1095 bp, Pseudomonas aeruginosa
atggcttccgcgcaacctgcctccgcgtttccctgcctgtcgttgcaactggcctgcctgttgctgggcgcctggctggccttcgatgcccacggcggcggccaggccgtggcgccgccggcccgtgtcgaagcgcgtgtgccgacggccgctaccgatgactggggacgccagccggacagcctgatgagcgccgtgccgccgcgcacgctggaggcgagcgtcggcgcccgcggctcgggatcggcgagttcgcgactgtggatcgccgataccgacttccgcctgcacgacgacatcggtttcttcatccagcgcatgctgatccgcatggagccgactcgtcccggcgcgcccttgtcgctcgacgatccgacggcgatggtggcgcggatccaggccggcgagatattcgtcagcgacgccaccctggcgaccctgctcaaccaggacctcgccgcgtcccgcgcggccgtgcgcaacctcagtatgaacacccgcaaggacggccaggaagtgcgtggcgagttgttgcgcaaggggcgctggcggccgctgcggatgctcaccgagatcgagctgagcggtccgctggaggtgaccctggtaccccggcggatcttcgtcgacggggtcgaggtcacttcgtcgctggcggcggcctcgatcgagatgtccgaggtgctgaagctgaagacccggcacatggaactggtcggcaaccgcatccgcgtcgacctcgacggtttgttcccgccgccgcgcctggacttccgcgtcagtcgcctggccctggccgacggcggcatgcaactcgccctcggcgactccctggccgacctgcaatggccggcattacgggcgccggacagctacatgttcatcgagggcggcgatatcaagatggcgcgcaccgtgctggtcaaggcctatgccctgttcaccagcctcagcccggggcagccgctgctgttcaatctctacgactaccggcggcaactgcagaacggcgtgatccgcctgcgcgaggacggcatggtgcagatcgccgtgtcgccggtgaaggcgccggcgccgctggaggcacggctgtga

SEQ ID NO: 320759 - DNA, 1041 bp, Pseudomonas aeruginosa
gtgagccggcgtccgtggggcgtgctgcttggctgttgcctgttggcggccagcgcggcccaggccgaaagcgccatcgaccggcagcagcgcgaactggccctgctgcgcgagggctggtaccggcaggtcccgccggcgccggtgccgctgcccatgcgtacggccgggccggcggattccggccaggatggcgtcggcatactgctgcgcaacgtggacatgtacctgcgcggcaacatcggtttccacgtgcccgaggtgaagggctggctggtgccgaaccgggccggccagccggtggacttcgaccgtccgcaggacatgcatttccaggtgatggagggcgaggtgctgctcagcccgcggcaactggccaacctgttcaacgagcacatcctcgcctacgacgggaccatgttgaaggacttccgcatgagcagtgcggcgggacgcctggaggtggaggggcgggtgcgtccgctcggcgtagggccctggctgccgctgcggctgggcggcggcgtggaagtggacgcggccagcggcgcgctggtctatcggcccgaccagttgaaggtgatcggtctgccgctgtacggggcgatgagcctggtcggtctgccgatgtcggcgctggtcagcctcgatcggccgggggcgcgcctggtgggcagcgccatgcgcctggactaccgcaaggtcttcccgctgctgggcatcgacggccacgtacaggaggcctggctcgacgaccaggggctgcacctgcgtttctcccaggagcccggccagccgtcgccggtgttcagcccgccggtcgcggcgggcccatccttcctctggctacagtcgggcgacctgaagatcttcgaaatcctcatcacctacgcccaggtgctgctgaagaccgagaccccggaccaggtgctgaccttcaacctgcaggactaccgcaaggtgctggcgaccggcaccacccaggtcaacgaggatggcaccttcttcatgcaggtgccgccgtatgccaatcccttgtag

SEQ ID NO: 320760 - DNA, 507 bp, Pseudomonas aeruginosa
atggcacgaccgctggcgatgatcgccgcccttggcgagaaccgcgcgatcggcatcgacaaccgcctgccctggcgcctgccggccgacctcaagcatttcaaggcgatgaccctcggcaagccggtgatcatggggcgcaagacctgggactcgctgggtcggccgctgccgggccggctaaacctggtggtcagccgccaggccggcctggcactggagggtgcggaagtgttcgccagcctggacgccgcgctggcgcgcgccgaggcgtgggcgcaggcggaggacgccgacgaactgatgctgatcggcggcgcccagctctatgccgaggccttgccgcgcgccgcgcgtctctacctgacccgggttggcctggcgccggagggcgacgcctttttccccgagatcgatggtgcggcctggcgcctggcgtcgagcatcgaacacgccgcggctgacgatgcgcctgcctacgccttcgaggtatgggagcgccgctga

SEQ ID NO: 320761 - DNA, 474 bp, Pseudomonas aeruginosa
atgccccagtcccgccgcccgttgcgcatcggcctgatcgccgacacccatggcctgctccggcccgaggcgctggaacggttgcgcggctgcgaccagttgatccatgccggcgacatcggcaagccggaaatcctcgccgagctggaacgcctggcgccgctctcggtggtgcgcggcaacaacgacacccaggactgggcggcggacatccccgagcgcctgctgctgaagatcggccggctgaccctctatgtgctgcacgacctcaagcgactcgacctcgacccggccgccgaaggcatcgacgtggtggtcgccggacattcgcacaagccgctgaaggaagagcgcgacggcgtgctctacctcaacccgggcagcgccgggccgcggcgcttcagcttgccgatcgggatcggcgtgctggaagtggcggggaagaagatcgaggcggagctgatcaccctctga

SEQ ID NO: 320762 - DNA, 1386 bp, Pseudomonas aeruginosa
atgagttccctgcaaagcccgtcggacgccagcgcccgcaacgacctggtctatggcctggacgaccgtcccagcgctcccatcgccctgctcgccgccctccagcacctgctggcgatcatcgtgccgatcgttacccctggcctgctgatctgccaggcgctgggcgtatcgccgcgcgacaccaatctgatcgtgtcgatgtcgctggtgatctccggcatcgccaccttcgtccagtgcaagcgcttcggcccgttcggcgccggactgttgatcgtccagggcaccagcttcaacttcgtcggcccgctgatcgccggcggggcgctgatggtcaagcagggcacgccggtggaaagcgtgatggcggcgatcttcggcgtggtcatcgccggctccttcgtcgagatgggcatctcgcgcatactgccgttcgtcaagcggctgatcaccccgctggtgaccggcatcgtcgtgctgatgatcggcctgaccctgatcaaggtcggcctgatcagcatgggcggcggcttctcggcgatgtccaacggcaccttcgccaacggcgagaacctgctgctgtccggcgtggtgctgggcatcatcgtggtgctcaaccgcatcccggtggtatggatgcgcagttgcgccatcgtcatcgccctggccgtcggctacgcgctggccggctacctcggtcgcctggacttcaccggcatgcaccaggccgagctgttccaggtaccgaccccgctgcacttcggcctggacttctcctggccgctgttcatcccgatgctggtgatctacctggtcacctccctggaagccatcggcgacgtcaccgccaccagcaaggtgtctaagcaaccggtggaaggcccgctgtggatgcagcggatcaagggcggcgtgctggtcaacggcgccaactcgttcctcgccggtatcttcaataccttccccagctcagtgttcgcccagaacaacggggtgatccagctcaccggcgtggccagccgctacgtcggcctgtggatcgccgccatgctggtcctgctcggcctgttcccgagcgtcgccggggtcatccaggcggtgccggaaccggtactgggcggcgcggcgatggtgatgttcggcgcggtggccgcttcgggcatcaacatcctcgccggcatccagctggaccgccgtgccctgctgatcatcgccgtatccctggccctcggcctgggcgtttcgcaggtgccggagttcctcgcgcacatgcccgcggcgctgcgcaacgtgctggagtccggggtcgccaccggcggcatctgcgccctgctgctgaactggttcctgccggaaagcccggtccagaaggccggacactga

SEQ ID NO: 320763 - DNA, 1839 bp, Pseudomonas aeruginosa
atgcccgattaccgctcgaaaacctccacccacggccgcaacatggccggcgcccgcgccctctggcgcgccaccgggatgaaggacgaagacttcaagaagccgatcatcgccatcgccaactccttcacccagttcgtgcccggccacgtgcacctgaaggacctcggccaactggtcgcccgcgagatcgagaaggccggcggcgtggccaaggaattcaacaccatcgccgtcgacgacggcatcgccatgggccacgacggcatgctctattcgctgccgagccgggagatcatcgccgactccgtggaatacatggtcaacgcccactgcgccgacgccatcgtctgcatctccaactgcgacaagatcacccccggcatgctgatggccgcgctgcgcctgaacatcccggtagtgttcgtctccggcgggccgatggaagccggcaagaccaagctggccagccacggcctggacctggtcgatgccatggtggtggccgccgacgactcctgctccgacgagaaggtcgccgagtacgagcgcagcgcctgcccgacctgcggctcctgctccggcatgttcaccgccaactcgatgaactgcctgaccgaggcgctcggcctgtcgctgccgggcaacggctcgaccctggccacccacgccgaccgcgagcaactgttcctgcgcgccgggcgcctggccgtggaactctgccagcgctactacggcgaaggcgacgacagcgtgctgccgcgcaacatcgccaacttcaaggccttcgagaacgccatgaccctggacatcgccatgggcggctcgaccaataccatcctgcacctgctggccgccgcccaggaggccgaggtgccgttcgacctgcgcgacatcgaccgcctgtcgcgcaaggtgccgcaactgtgcaaggtggcgccgaacatccagaagtaccacatggaagacgtgcatcgcgccggcggcatcttctccatcctcggcgaactggcccgcggtggcctgctgcacaccgacgtccccaccgtgcacagcccgagcatggccgacgccatcgcccagtgggacatcacccagacccgcgacgaagccgtgcacaccttcttcaaggccggtccggcgggcatcccgacccagaccgcgttcagccagaacacccgctggccgagcctggacgacgaccgcgccgagggctgcatccgcagcgtcgagcatgcctattccaaggaaggcgggctggccgtgctctacggcaacatcgctctcgacggctgcgtggtgaagaccgccggggtcgacgagtcgatccacgtgttcgaaggcagcgcgaagatcttcgaaagccaggacgccgcggtgaaaggcatcctcggcgacgaggtgaaggccggcgacatcgtgatcatccgctacgaaggaccgaagggcgggccgggcatgcaggaaatgctctatccgaccagctacctgaagtccaagggcctgggcaagcagtgtgccctgctcaccgacggacgcttctccggcggcacctcgggcctgtccatcggccacgcctccccggaagccgccgccggcggcgccatcggcctggtgcaggacggcgacaaggtgctgatcgacattcccaatcgctcgatcaacctgctggtcagcgacgaagaactcgccacacgccgcgccgaacaggacaagaagggctggaagccggccgcgccgcgtgcccgccgcgtcagcaccgcgctcaaggcctacgccctgctcgccaccagcgccgacaagggcgcggtacgcaacaaggcgctgctggacggctga

SEQ ID NO: 320764 - DNA, 1197 bp, Pseudomonas aeruginosa
atgaccctgcccagcttgcgtctcaaagccaacgccgagcgccgcctgcgcgccggccacctgtgggtctacagcaacgaggtggatgtcgccgcgacgccgctgaatgccttcgccgccggcgaccaggcggtgctggaaatggccaacggcaagccgctgggcatcgtcgcgctgagcccgaacaatctcatctgcggccgcctcatttcccgtgataccaagcacgttctcgacaaatcgctgctggttcatcgcatcaacatcgccctcagcctgcgcgagcggcttttcgacaagccgttctaccggctggtctacggcgattccgacctgctgcccggcctggtggtcgatcgcttcggcgacgtgctggtggtgcaactggcgtccgcagccatggaactgcgcaaggacgaggtgctcgccgccctgctgcaggtgctcaagcccgccgccgtgctctggaagaacgactccagcgcgcgcgacgccgagggcctggagcgctacgtggccaatgcctacggcgaagtgccggagtgggtcgccctggaagagaacggcgtgaagttcgaggcgccggtgctggccgggcagaagaccggctggttctacgaccaccgcatgaaccgtgcgcgcctggcgccctacgtgcggggcaagcgggtcctcgacctgttcagctatatcggtggctggggcatccaggccgccgccttcggcgccagcgaagtgatgtgcgtggacgcgtccgccttcgccctcgacggcgtcgagcgcaacgcggcactgaacggcgtggcggagaaggtcgcctgcgtcgagggcgacgtgttcgaggccctgcgcgagctgaaggccgccgacgaacgcttcgacgtggtgatcgccgacccgccggccttcatcaagcgcaagaaggacctgaagaacggcgaggccgcctaccgccgtctcaacgaacaggccatgcgcctgctgagcaaggacggcatcctggtcagcgcctcctgctcgatgcacctgcccgaggacgacctgcagaacatcctgatcggcagcgcccgccatctcgaccgcaacatccagctgctcgagcgcggcggccagggccccgaccatccggtgcacctggcgatcgcggaaacccgctacatcaagagcctgacctgccggctgctgcccaacggctga

SEQ ID NO: 320765 - DNA, 540 bp, Pseudomonas aeruginosa
atgacccaatccctgcacggcaaggtcgtcgccaccctggtgaccgacggtttcgaacaggtcgaactgaccggtccgaaaaaagccctggaagacgccggcgccacggtaaggattctttccgacaaggccggcgaggtgcgcggctggaaccatcaccagccagccgaggccttccgcgtcgacggcaccttcgaagacgccagcctggacgactacgacgccctgctgctgcccggcggggtgatcaattccgaccagatccgcagcctggccaaggcccaggaactggcgatccgcgccgaacaggcgagcaagccggtggcggtgatctgccacggcgcctggctgctgatctccgccggactggtgcagggtcgtaccctgaccagttggccgtcgctcaaggacgacatcaacaacgccggcggccactgggtggaccaggaggtagcggtggacggcaagctggtgagcagccgcaaacccgaagacatcccggccttcaaccgtcgattcatcgaaatcctcgccggctga

SEQ ID NO: 320766 - DNA, 879 bp, Pseudomonas aeruginosa
atggtccaagaactcaccgccgagcagatccgccaggccctgcaaggcatcagcgtgccgccgcaaccccagatcatggtcgacctgcagatggagcaggtcatgcccaatccggacctgaagaacattgccaggctgatcagccaggacccgggcctttccggggctctcctgaaactggtgaactcgccgttcttcggcctggccaatcgcatcacttcgatccagcgcgcggtgaacctgctgggcagtcgttcggtgatcaacctgatcaacgcccagtcgatcaagggtgagatgagcgacgacaccatcgtcaccctcaaccgtttctgggacaccgcccaggacgtggccatgagctgcctgagcctggccaagcggatcggctacgaatcggtggacgaagcctacgctctcggcctgttccacaattgcggcatcccgctgatgctcaagcgcttcccgcactacatggcggtgctggaagaggcctacgccgccgccagcgacgaacgccgggtggtggacaccgagaaccgcgtgctgaacaccaaccatgcggtggtcggctactacaccgcgcgctcctggcgcctgccggagcacgtctgcgaggcgatcgccaaccaccacaacgcgttgtcgatcttcggcgacgaatcggcacgcgatacccaactgaagaacctgctggcgatcctgaagatggccgagcacatctgcggttcgcaccgggtcctcggcaaccagccggaagaccacgaatggaacagcatcggtgcgctggtgctggactacgtcgggctcaccgactacgacttcgagaacctcaagggctcgatcctcgagctgggcgtcggccagggcagctactga

SEQ ID NO: 320767 - DNA, 813 bp, Pseudomonas aeruginosa
atgcccgaactacccgaagtcgaaaccacccgccggggcatcgccccctacctcgaaggccagcgcgtcgagcgcgtgatcgtgcgcgagcggcgcctgcgctggccgattcccgaagacttggacgtgcgcctgtccggacaacgcatcgtcagcgtcgagcgccgcgccaagtacctgctgctgggcgccgaggccggtacgctgatcagccacctgggcatgtccggcagcctgaggctggtggagagcggcaccccggccagtcgccacgagcacgtcgacatcgagctggcctcgggcatggccctgcgctacaccgatccgcggcgcttcggcgccatgctctggagcctggcgccactggaacacgagctgctgcgcaacctcggcccggaaccgctgaccgacgctttcgccggccagcgtctgttcgagctgtcgcgcgggcggagcatggcggtcaagccgttcatcatggacaacgcggtggtggtcggggtcggcaacatctacgccagcgaagcgctgttcgccgccggcatcgatccgcgcaagcccgccgggagcatctccaaggcgcgctacctgcgcctggcggaggagatcaagcggatcctggcgatcgccatcgagcgcggcggcaccaccctgcgcgatttcgtcggcggcgacggccagcccggttacttccagcaggaattgttcgtctatggccgtggcggggagttctgcaaggtctgcggcagcaccctgcgcgagatccgcctaggccagcgcgccagcgtgtactgcccgcgctgccaacgctga

SEQ ID NO: 320768 - DNA, 579 bp, Pseudomonas aeruginosa
atgtccggcaattacctgcctcgcaacaccctggtcgagtcgctcggccatgccatgctgaaactctccggctggaagatcgagggccaattgcccgcgctcgacaagttcgtggtgatcggcgcccaccacacctcgaactgggacttcgtggccttccttgccgccaagttcgtcctgcgcctgaacgcccgctggttcggcaagcacaccctgttcaacggcccgctgggcggcctgatgcggcgctggggcggtatcccgatccagcgccacctgaagctgaataccgtggaccaggcgatccaggccttccgcgagcaccgcgagttcatgctgatcatcgctccggaaggcacgcgcaagaaggtcgaccgctggcgcatgggcttctaccacatcgcccgtggcgccggcgtaccggtggtaccggcggcgctggactacgaaaaccggcggatcgtcatcggcgaactcttctggccgaccggcaacgaggacgccgacctgtgcagcctgatcggcttctaccggccgttcatcccgaaaaagccgcactacgcattcctcggcgattga

SEQ ID NO: 320769 - DNA, 345 bp, Pseudomonas aeruginosa
atgaacctgtttcgcaccaccgcgctcgtgctggcgctgaccaccgggctctcgtccatgcccgcgctggcggatgccgtgcaggaaaacgccagcggcgacccgatgtacaccgtcgaagcgccccccgcgtacgccatgatcggcgatctgctcatcgcccgtcccttcctgatcgccgccacggccgtcggggcggtggccttcgtggtcagcctgccgttcactgcggccagcggcagcgtcggcaaggccggccaggcgctggtggtcgatccgggcaaggaagccttcgtccgttgcctgggctgcaccaccagcggctataaccacgacgaaagctga

SEQ ID NO: 320770 - DNA, 987 bp, Pseudomonas aeruginosa
atgttcagtcagtgggtgttcctgtccgtccttgctcttgccataccctcgttcgcctgggcggaggatgcggcgtccgacctcggcacggagcagtccaaggccgagcagggcgacaagcgcggcgatgaactgttcgccgaattcacccgcctccgccaggccgccgagacgggggagccgcaggctctgttcgatttcggcgcctacttctaccagcaacagaactacgccagcgcgcgcgaatggtggggcaaggcggccgctgcggggatggtccgcgcgcagatccaactggccatgctctatcgcgatggtgacggcgggccacaggacaagaccgaggcggcacgctggttccggaaggccgcggagcagggggatgccgccgcccagaatgaaatgggcgttctctactggagaggcgaaggggtcgaccaggaccgggtgaaggccgggacctggttcgaacgcgcggcggccagcggtagcgaagacgccgaaaccaatctgggatggttctacctggacgactcgcaaggcgtctattccgccacttcagacgaggaagccgccctgctggaccgttatgccggcagccgggaaaaggccttccactggttctgcaaggctgcgacccagggagatgcccgtgcccagttcaaggtgggcgaggcctactggaacggttccggtgccgggatgaacaagctgcaagcgcggctctggctggaaaaggccgcacagcagcaggatgcggatgccatcgcctggttggagagcgccgcgaacgcagcctggtacacccgcctggaaaactggattcacgctgcgctggatggagagctgtccggtgtcgccgactgctccggtgccgccgatcgccggcactccggccgaggcatggagggcgccccgtctgacccggaggcggtggaagccagtgcggaggatgcgcagcaggcggttgaagcggcgagccagtga

SEQ ID NO: 320771 - DNA, 1734 bp, Pseudomonas aeruginosa
atgtccttcctgaacctgcccgtccgtaccctggtcgccgcctgcggcctgtccctgctcagcctcgcggcgcatgccgacagctttcgcggcgacgcccacgcaccgcagcaggccgccgtcgccacgccacatccggccgcgaccgtcgccggcctggaaaccctggccaatggcggcaacgccttcgacgctgcggcggccatcgccgctgccctggcggtagccgagccttacggctcgggactcggcggcggtggattcttccttctgcgccaggccggtgcgcagccgacctatcgcttcctcgacgcccgcgagcgcgcgccgaaggccgcctacgccgacatgtaccggcgcaatggcaaggtcgaccccaggctgtccgtcgacggcccgctggcggcggcgatccccggcctgccggcggcgctggtcgaattgagcagccgctacggacgcaagcccctggccgacaatctggtgccggcgatccgcctggcggtggatggcatatccgtcgaccggatctaccgtgaccgcgccgccatgcgcctggaagcgatgcgcaaggacccggaaaccgcgcggatcttcctcgacaagggcggaatccccgacgaatggaacctactccgccaaccgcagttggcacgtaccctggaacgcctcgggcgctacgggcggatcggtttctacgaaggcgagacagcggacaagctgctcaccggggtccgcgccggcggcggcatctggagcgcggccgacctgcgcgactaccgggtgatcgaacgccgcccgctggaggtgaagctggccaacggccgcgaactgatcagcgcaccgccgccctcggccggcggcgtcgccctggcgcagagcctgcagatgctggaacagctgccgtggcagaaggccgagccggtacagcgcgcccattacgtgctggaggtcctgcgccgtgcctaccgcgatcgaggcctgctcggcgacccggacttcgtcgccaacccgctgcccagtttgctggcgccggactacctgaagcgccttgccgccggcatcgacccgcgccgcgccacgcccagctcggcgctgccggaggcgccggcctggcgcgaaggcgaccacaccacccacttcgcggtgatcgatgcccagggcaacgcggtggccgccaccctctcggtgaacctgccgttcggcgccgccttcaccgttcccggtaccggcgtggtgctgaacaacgagatggacgatttcgccgccgacacccagggcgccaacagctacggcctggccggcagccaggcgaacgcggtggcggccggcaagcgcccgctgtcgagcatgagcccgagcttcctggaaagcccgaccgacttcgccgccttcggcacccctggcggcagccgcatcccgagcatggttctgatctccatgctgcagtacttcgacggtcgcccggtcggccaatgggtcgccgcgccgcgctaccaccaccagtacaagccggacgtcgtcgagtacgaaccgcgcgccttcagcgatgccgaggccgccgaactgcgccggcgcggctatcagctcaaacgcctggagcgcagctacggcaaccagcaggtgctctactgggacaagcgcagcggccgcgtcgacgccgccagcgacccgcgcgggatcggctactcgtctctgtccctggaggcgcaagcgcagcctcggccgcactga

SEQ ID NO: 320772 - DNA, 252 bp, Pseudomonas aeruginosa
atgtccctgaaaatcactgacgattgcatcaattgcgacgtctgcgaacccgaatgcccgaacggcgcgatctcgcaaggcgaagaaatctatgtgatcgatcccaatctctgcaccgagtgcgtcggccactacgacgagccgcagtgccagcaggtctgtccggtggactgcattccccttgacgacgccaatgtcgagagcaaggaccagttgatggagaaataccggaagatcaccggcaaggcctga

SEQ ID NO: 320773 - DNA, 480 bp, Pseudomonas aeruginosa
atgaaccgagtgctgtacccaggcaccttcgatcccatcaccaagggtcacggcgatctgatcgaacgtgcttcacggcttttcgaccatgtgatcatcgcggtcgccgccagccccaagaagaaccccctgttcagcctggaacagcgggttgcgctggcccaggaggtcaccaagcacctgccgaacgtcgaggtggtgggcttctccaccctgctggcgcacttcgtcaaggagcagaaggcgaatgtcttcctccgcggcctgcgcgcggtttccgacttcgagtacgagttccagctggccaacatgaaccgccagctcgcccccgacgtggaaagcatgttcctcaccccgtcggagaagtattccttcatttcctcgacgctggtccgggaaatcgccgctctcggcggggatatcagcaagttcgtgcatccggccgtggcagacgccctggcggaacgtttcaagcgctga

SEQ ID NO: 320774 - DNA, 1596 bp, Pseudomonas aeruginosa
atgcctgtacccgatctgttcgccgagggcctcgcccgcggctggaaaacctacaacggctcgcgcctggacgacgacctggagctggaggccgacgtggtcgtggtcggcaccggcgccggcggcggcaccaccgcggaaatcctcagcgccgccggcctgaaggtgctgctggtggaagaaggcccgctgaagaccagcagcgatttcaagatgcaggaggccgacgcctaccccgagctgtaccaggaaggcatcggccggatgagcaaggacggcgccatcaccatcctccagggccgcgccgtgggcggcaccaccctgatcaactggaccagcagcttccgcaccccggaaccgaccctgcagcactgggcccaggtctacggggtcaagggccacagcgcggaggacatggcgccctggttcgagaaaatggagcagcgcctgcacgtggcgccctgggcgctgccgccgaatgccaacaacgacgtgatccgcctgggctgcgagaagctcggctatcactggaaggtcatcccgcgcaacgtcctcggttgctggaacctcggctactgcggcatgggctgcccggtcaacgccaagcagtcgatgctggtcaccaccatcccggcgaccctcgacaagggtggcgagctgctctacctggcgcgcgccaaccggctgctgctggacggcgacaaggtgacgggcctcgaatgcctgggcatggatgagcgctgcgtggcgcccaacggccgccggatcagggtccgggccaggcactacgtgctctccggcggcggcatcaacaccccggcgattcttctccgctcgaaggcgcctgatccgagccagcgggtcggcaagcgcaccttcctgcacacggtgaatttcagcgcggggctgttcgaccgggtgatcaaccccttctacggcgcaccgcagtcgatctactccgaccatttccaatgggacgacggtgtcaccggacgcatgtcctacaaactggaggtgccgccgctgcaaccgtcgctggcctcggtgctgctcggcggcttcggcagcgacaacgccctgcgcatggaacagctaccgcataccaacatgatgctcgccctgctccgcgacggcttccacccggacagcgcggagggctcggtcggcctgcgcggcgacgacaccccagtgctcgactaccggatgaccgactacacctgggacggtatccgccgtgccttccataccatggcggagatccagttcgccgccggcgcccgggaagtgcggccggtgcacagcgacgcgcgtagcgcgaagaacctgcaggaggcgcgcgggatcatcgacggcctgcgcctggagatctaccgcacgcgcctgggcagcgcccacgtcatgggcggctgcgccatgggcgaagacccggccgtggcggtggccgacagcctcggccgccatcaccacctgcggaacctgtcgatccacgacggctcgctgttccccaccagcatcggcgccaacccgcagctctcggtctacggtcttaccgcgcaactggccagcgcgctggccgaacgcctggccagggcctga

SEQ ID NO: 320775 - DNA, 549 bp, Pseudomonas aeruginosa
atgagcgacaccacccttgaaagcgccggcctgtcccgacgcagcctgatgaaagtcggcctgatcggcggcgccttcctcgccaccgcgggcgtcaccgccagcctcaccggctgttcggcggagaaaccggcgagcggcctggaaaaggtccgcgaatccgacctgccgttcctccgtgcgctgctgccggtgatgctgctcggcgcggtttccgccgagcagatgccgaaagccgtggagggcgcgatccagagcctcgaccacaacctggcgcggctctccccggagatgttcaagctcacccagcaactcttcgacgtgctcgccctgccgctcacccgtggcccgctcaccggtatctggggcagttgggagaacgccagcggcgacgacgtgcgggcattcctttcgcgctgggaaaacagcttcatcggcctgttgcggatgggccacagttcgctgatgcaactggcgatgatggcctggtacgcccgccccgaggcgtgggcccattgtggctaccccggaccgccgaagatcgcttga

SEQ ID NO: 320776 - DNA, 1476 bp, Pseudomonas aeruginosa
atggtcgccgatatcgcctacctgcagcagagccagcaggaaatcaaccagctcgaagccctcttcgcccgccagcgcgccgcctacctggcgcagccgatgcccgacgccacgcagcgcgtgcagtggctgaaggccctgcgcgacctgctgttcaaggaacagcaggcactgatcgaggccatcgaccgggacttcagcgcgcgctccgccgacgagaccctgctcgccgagatcatgcccagcctgcacggcatccactacgccgccaagcgcgtgaagaagtggatgaagcccgcgcgccgcgcggtcggcctgcaattccagccggcctcggcccaggtggtgtaccagccgctgggcgtggtcggggtgatcgtgccttggaactatccgctgttcctctccatcggcccgctgaccggggccctcgccgccggcaaccgggtgatgatcaagatgagcgagtcgaccccggccaccgggcgcctgctcaaggacctgctggcgcggatcttccccgaggaccaggtcgccgtggtgctaggcgaggtagacgtcggcgtggccttttccaagctgccgttcgaccacctgctgttcaccggcgccaccagcgtcggcaagcacgtgatgcgcgccgccgccgagaacctgaccccggtcaccctggagctgggcggcaagtcgccggcgatcgtctccgacagcgtgccgatgaaggacgccgccgagcggatcgccttcggcaagagcctcaacgccgggcagacctgcgtcgcgcccgactacgtgctggtaccgagccggcgcgtcgaggaattcgtcagtcagtacaaggaggtggtccagggcttcttcccgcgtctttcggacaaccccgactacaccgcgatcatcaacgagcgccagctcggccgcctccggggctatctcgacgacgcccgcgagaagggcgcgaccctcgtcccgctgttcgccgaaggccagcaacggcgcctgccgcagacgctgctgctgaacgtcagcgacgacatgaaagtgatgcaggaggaaatcttcggcccgctgctgccggtgatcccctacgagcgcctggaagacgccctggcctacgtcaaccagcgcccgcgaccgctggccctgtactacttcggctacgacaaggcgcagcagcagcgcgtgctgcacgagacccactcaggcggtgtgtgtctgaacgacaccctgctgcatgtcgcccaggacgacatcccgttcggtggcgtcggtccctccggcatgggccactaccatggccacgaaggcttcctcaccttcagcaaggccaagggcgtgttcagcaagccgcgcttcaacgccgcgcgaatgatctacccccccctacggcaagtcgatccagaagctcgtctacaagctgttcgtgcgctgaaccggggcgcgtgcggcgccccctcattcctacgctgcaggtga

SEQ ID NO: 320777 - DNA, 648 bp, Pseudomonas aeruginosa
atggcaccacgcatcaagacccgcgatcgcatcgcccaggccagcctggaactgttcaacgcccagggcgagcgcagcgtcaccaccaaccatatcgccacccacctgggtatatcgcctgggaacctctactaccactacccgaacaagcaggcgatcatcgccgagctgttcgccgagtacgaaagccacgtcgagagcttcctgcgcctgcccgaagggcggggtctgacggtggacgacaagaccttctacctggaagcgctactggccgcgatgtggcgctaccgcttcctccaccgcgacctcgagcacctgctggaaagcgacccggagctggcggcgcgctaccgcgccttcgcccagcgttgcctggtcaacgccaaggcgatctaccggggcttcaccgaggccggcatcctgcggatgaacgagacccagctggaggccctgaccctcaacgcctggatcatcctcacctcctgggtgcgcttcctctgcaccaccctcgatctcgacggcgacctcagcgaggcgcaactgcgtcgcggcatctaccaggtgctggcgctggagagcgggcacatcgaggcgcaggcccaggatgcggtggacgggatttccgagcggctctacgtgccgctctga

SEQ ID NO: 320778 - DNA, 411 bp, Pseudomonas aeruginosa
atggaactgacgctgcggcacaacccgatgctcgacgacgccgactgcgaggcgatcctggcgatccacgcggcggtcggctgggaccggcgcatgccgcctgccgagctacgcacgctgtaccagcattccgggtattccctgctggccgaacgcgacggccgcctggtcggcctgctgcgcgccgaggaagaaacaccgattcgcgtctggctggcggaaatcgccgtgctgcccggcgcacagagcagcggcgtcggcgcagccctgctgcggcgcttcgccgaggatcaccgcggcgcctacctgttcaccgacgccaccctcggtaccgaagccttcttccgccgccacggcatccacatccagcaggtgctggagaaaaccctgcgcgatcagagcggcacgtag

SEQ ID NO: 320779 - DNA, 999 bp, Pseudomonas aeruginosa
atgaccgcgtccccgaccttccagcccgcctggtggctgcccaatccgcacctgcagaccctgtggagcccgttcttccgccgcgggccgaccctggaacggcagcgcgaacgcctgtggctggccgatggcgacttcatcgacctcgactgggccggcccgcacgatgccgagaccccgctggtgctggcgctgcacggcctcaccgggtcatcctcgtcgcactacatcctcggtctgcagcgcgccctgctggagcgcggctgggccagcgtggcgctgaactggcgcggttgctcgggggagccgaaccgcctgccgcgcggctaccattccggggtcagcgacgacctcgccgaggtggtcgcgcacctgcgcgccaggcgcccgcaagcgccgctgtacgcggtcggctattcgctgggcggcaacgtgctgctcaagtacctgggcgaaaccgctggggactgcccgctgctcggcggcgtcgcggtgtcggtgccgttccgcctggacgagtgcgccgaccgcatcggcctgggcttttcccgggtctaccaggcgcacttcatgaaggccatgctggcctacgtgcaggacaagcagcggctgttcggcgagcagggccaggcggaaggcctggccgccctgcaacgcctcggtccgctggagggcatgcgcaccttctgggacttcgacggccgggtcaccgcgccgctgcacggcttcgccgacgccagggattactatcggcgcgcgtccagccgctactacctgccggacatccgcacgccgagcctgatcatccattccagcgacgaccccttcgtgttcgcccgcagcctgcccgatcgcagcgaactggcaccctgcaccgagctggagctgcacgcccgcggcggtcacgtcggcttcgtcgacggctctccgcgccagcccacctactacctggaacgacgcatccccgactggctggaggcccgcctgcggcagcactga

SEQ ID NO: 320780 - DNA, 567 bp, Pseudomonas aeruginosa
atgagcccggcttccgcgagcattcgccaacgcctgctggcgcttggcgagccttgcgcggcgcaacccgccgccgactggcagggcgatatcgccctgcccgccgagctggagcgtttctaccgcgaggtcggcccactcgactgcaccctggagagtgccggcaacccatttttcctgccgtccctggcccgcctctggcagcgccaggccggctatcgctggcacggcatcagcggcgagcgcctgtcgggctggcaggacgactggctggtggtggccgaccagggcgccgacccgttcatcctcgagaccggcagcgggcgcatactcttcgacctgcatggcggcaggggctgggacccggcgccgtgcttcgacgacctgtggcagatggcggccagcctggcctgcttcggcgaggtctggagcggcgccggcgaggacatcctgctggacgactgcagcgtcgcgccccgctatcggcagcagctcgtcgacgaactgcaaccgatcctcggttcgcgccagcgggcggaggacctcgccgacgagttcggctggtaa

SEQ ID NO: 320781 - DNA, 597 bp, Pseudomonas aeruginosa
atgagtaaacctactgcgaaagcccccggtcgccacggcggccagggacagctgcggatcatcggtggcgaatggcgcagccggcgtttcgtctttcccgacgggcccggcctgcgaccgaccccggaccgggtccgcgagaccctgttcaactggctggcaccctatgtcgaaggcgcacgggtgctcgatcccttcgccggcagcggcgcgctgttcctcgaggcgttgtcgcgcggcgcccgcgaagggctggccctggataccaacggcgaagcggtggcggccctgcgcaaccacctcgacgcgctcaagtgcggcaccgcccaactggtcctcggcgatgccgtgcgctacctgggaaaccaggctccgagcgccttcgacctggtgttcctcgacccgccgttccatcagaacctgctgcaggacgcctgccgcctgctcgaaacccgcggctggctgaaccccgacgcctggatctataccgagagcgagagcgtcccctcgtccctcggcctgcccggaaactggcggctgcaccgggaaaagaaagccggcaacgtacattacgcgctctggcagcggggagcctga

SEQ ID NO: 320782 - DNA, 1488 bp, Pseudomonas aeruginosa
atgagtgagcgcacagggctgcgttatggcctgctcggcctgatcgtcatcgcgttgctggccgcgctggcctatttcgtcgcgcgtcccccccagaccccggcggcggcccatgccgcggcggtcgaggaaaaccagttgcagtcgctgaaggacgtcgccaagcaggcgccggtccatcgcaagctggacatccaggaatggaagaccgccgaaggcgccaaggtgctgttcgtcgaggcccatgaactgccgatgttcgacctgcgcctgaccttcgccgccggcagcagccaggacgccggcacccccggcctgtcgatgctgaccaacgccatgctcaacgaaggcgtgccgggcaaggacaccactgccatcgccgccggcttcgaggacctcggcgcctcgttcagcaacggttcctaccgcgacatggcggtggccggcctgcgcagcctgtccgacgccgacaagcggacccaggcgctgaagctgttcgaacaggtgatcggccagccgaccttccccgaggacgccctggcacgcatcaagaaccaggtcctggccggtttcgagtaccagaagcagaaccccggcaagctggccgggctggagctgttcaagcgcctctatggcgagcatccctacgcgcactccagcgacggcgacgaaaagtccattccaccgatcagccgcgaacaattgcaggcgttccacaagaaagcctacgccgccggcaacgtggtcatcgcgctggtcggcgacctctcgcggcaggaggccgaagcgatcgccgcagaagtctccaaggcgctgccccagggcccggcgctggccaagaccgtccagccggaaacgcccaagcccggcctgacgcgcatcgacttcccctccgagcagacccacctgatgctcgcccagcttggcatcgaccgccaggatcccgactacgcggcgctctacctgggcaaccagatcctcggcggcggcggcttcggcacccgcctgatggaccaggtgcgagaaaagcgcggcctgacctacggcatctattccggcttcaccgccatgcaggcacgcggtccgttcatgatcaacttccagacccgcgccgaactcagcgagggggcgctgaagctggtccaggacatcgtccgcgactacctggccaacggcccgacccagaaggaactggacgacgccaagcgcgaactggccggcagcttcccgctgtccaccgcgagcaacgccgacatcgtcggccagctcggcgccatcggtttctacggcctgccgctggactacctggaaagcttcctcaagcaggtcgagggactcagcgtcgaacaggtcaggagcgccatggccaagcacctggacgccgacgccttcgtcatcgtcagcgccggcccgagcgtgccgcagaaacccctgccgccacccaccgccaagccggcccagcaacccagcggcgttccggagcattga

SEQ ID NO: 320783 - DNA, 1371 bp, Pseudomonas aeruginosa
atgaaaaccccagctcgccgccgcgtcggcctgctcctagccagcctttgtctcccgcttttcgcccaggcggcggaaacccagcccacccacgagttcagcctcgacaacggcctgaaggtcatagtgcgtgaagaccaccgcgccccggtggtggtttcccagctctggtacaggatcggctccagctacgagacacccgggctcaccggcctgtcccacgccctcgaacacatgatgttcaagggcagccgcaagctcggcccgggcgaagcctcgcgggtgctgcgcgacctgggtgcggaagagaacgccttcaccaccgacgactacaccgcctattaccaggtcctggcccgcgaccgcctgccggtggcgctggagatggaagccgaccgcatggcccacctgagcctgccggccgaccagttcaagagcgagatcgaggtgatcaaggaggagcgccgcctgcgcaccgacgacaatcccaacgccctcgccttcgagcgcttcaaggccgccgcctacccggccagcggctaccacaccccgaccatcggctggatggccgacctgcagcgcatgaccatcgacgacctgcgccactggtacgaatcctggtacgcgccgaacaacgccaccctggtagtggtcggcgacgtcaccgccgacgaggtcaagaccctcgccaagcgctacttcggcgagatcccctggcgccagctgccgccggcgcgcaagccgctggaactggccgagcccggcgagcgccggctcaagctgtacgtacgcacccagctgccgaacctgatcatgggcttcaacgtgcccagcctgggcagcagcgagaaccctcgcgaagtcaacgccctgcgcctgatcggcgcgctgctcgatggcggctacagcgcccgcctggcctcgcgcctggagcgcggcgaggagctggtcgccggcgcctccacctactatgacgcgttcaaccgcggcgacagcctgttcgtcctctcggccacgccgaacgtgcagaagggcaagaccctcgagcaggtcgaggccggtctgtggaagcagctcgatgacctcaagcagaacccgcccagcgccgcggagatcgagcgcgtgcgcgcgcagatgatcgccgggatggtctacgagaaggactccatcgccgcccaggccagcagcatcggccagctggaaagcgtcggcctgtcctggaagctgatcgaccaggacctggaggccctcaaggcagtgactccggacgatatccagaaagccgcccgcacctatttcaccccgtcgcgcctgaccctggcgcaagtgctgcctgtgaaggccgaggaaaaggaggcccgtcatgagtga

SEQ ID NO: 320784 - DNA, 1353 bp, Pseudomonas aeruginosa
atgtttggttccaacgatgacaagaaggccccgcagggcggggaaaagaaaggtctgttcggctggtggcggaaaaagccgcaagccggcgagcagcctgccgatcagcctgtcgagccggtctccgaaacagcggccgccgagcagcgcgcgcctgccgatgacgtggcgcaatccctgacagaacagccaggtcggcagcagccctccgctgccgagccggccgagccggcgccggttgccgaagcaccgctcgccagtgacgagccagcgtcggccgaggagcattcgccccggcccgaggcgcccgtcgcgcaacccgaacctatcctggctgccgagaccgagcccgagcccgagcccgagcccgagcccgttgcgccgctggccgccgctccggcagtcagcgagccggcgaccaggccgggcttcttcgcccgcctccggcaggggctgtccaagaccagcgccagcattggcgaaggcatggccagcctgttcctcggtcgcaaggaaatcgacgacgacctgctcgacgacatcgagacgcgcctgctgaccgccgacgtcggcgtcgaggccaccaccctgatcgtgcagaacctgaccaagcgcgtggcgcgcaaggagctggccgacagcggcgcgctgtacaaggcgctgcaggaagagctggccagcctgctgcgcccggtggagcagccgttgcaggtcgacgtcgcgcgcgagccctatgtgatcctggtggtcggggtgaacggcgtgggcaagaccaccaccatcggcaagctggcgaagaagctgcaactcgagggcaagaaggtcatgctggccgccggcgacaccttccgcgccgccgccgtggagcagttgcaggtctggggcgagcgcaaccgcatcccggtgatcgcccagcacaccggcgccgactccgcctcggtgatcttcgacgcggtgcaggccgccaaggcccgcggcatcgacgtgctgatcgccgataccgccggacgcctgcataccaaggacaacctgatggaggagctgaagaaggtgcgccgggtgatcggcaagctggacgagacggcgccccacgaggtcctgctggtgctcgacgccggcaccgggcagaacgccatcaaccaggccaagcagttcaacctcgcggtggagctgaccggccttgccctgaccaaactggacggcaccgccaagggcggggtgatcttcgccctggccaagcagttcggcctgccgatccgctatatcggtgtcggcgaggggatcgacgatctccgtaccttcgaggccgacgccttcgtccaggcactcttcgcagagcgggagaacgcatga

SEQ ID NO: 320785 - DNA, 672 bp, Pseudomonas aeruginosa
atgatccgcttcgagcaggtcggcaaacgctatcccaacggccacgtaggcctgcacgaggtgtccttccgcgtgcaccgtggcgagatcctcttcgtcaccggccactccggcgccggcaagagcaccctgctgcgcctcatcctggcgatggagcgaccgaccagcggcaagctgttgctcggcggccaggacctggggcgcatcaccaccgcgcagatccctttcctgcgccggcagatcggcgtggtgttccagaaccaccaactgctcaccgatcgtacggtggcggacaacatcgccctgccgctgcagatcctcggcatgcccaagccggagatcgccaagcgcgtggcctcggccctagagcgggtgaacctgaaggaaaagggcgaggcgttgccttccgacctttccaccggccagcagcagcgggtcggcattgcccgcgccatcgtccaccagccggccctgctgctggcggacgaacccaccggcaacctcgacccgcgactcgcctcggaaatcatgggcgtgttcgaggatatcaatcgcctgggcaccaccgtactgatcgccagccacgacctggccctgatcgcccgtatgcgccatcgcatgctgaccctgcagcgtggccggatcatcgctgaccgtgaggatgaggcctga

SEQ ID NO: 320786 - DNA, 1008 bp, Pseudomonas aeruginosa
atgagcgccaacgatcttccccgtggccccgaagagggcgcaccggaacgcaagacccgcgagaaaccgagccaggagcagaccgactggagcggctcgttcagcgcctacctggaaagccatcgcgccagcctggtggacagcctgcgccggttgttcggccacccgttcggcagcttcttcacctgcctggtgatgggtatcaccctgagcctgccgatgggcctctcgctgctgctgaacaatgtcgaacggctcggcggctcctggcagcgggcggcgcagatctccctgttcctcgacctgaagaccagcgaaaaccagggccaggacctgcgcgagcagatcgagcgcctgccggacgtgatcgaggcccaattgatcagccgcgagcaggcgctcagcgaattgcaggaacagtccggcctgggcgaagcgctcaaggagctgccggagaacccactgccgccggtgatctcggtcacgcccaagcagatcgaccgggccggcttggaggcactgcgccagcagctcgcggagctgcctcatgtgcagcaggcgcagctcgacctggtatgggtcgagcgcctgagcgcgatcctcaagctcggcgaacgcttcgtcttcggcctgaccatcctgctggtgctgaccctcttgctggtggtgggcaacaccatccgcctgcacatcgaaaatcgccgtaacgaaatcgaggtgatcaagctggtcggcgggacggacggttacgtgcgccggccattcctgtacatgggcgcgttgtacggcctgggcgcgggcatcctgtcctgggcgctgctggcctattcgctgaactggctgaacggttcggtggtcaacctttcagggctgtacggcagcgacttcggcctgcagggcgtgccgctggacgacggcctgtcgctcaccgtcggcgcggtgctgcttggctgggtcggcgcctggctggccgtggcccgccacctgcgcgagttggcgccgcgctga

SEQ ID NO: 320787 - DNA, 855 bp, Pseudomonas aeruginosa
atgaccacttctttgcaacctgtacatgccttggttccaggcgcaaacctggaagcctacgtgcactcggtgaacagcattccgctgttgtcgccggaacaggagcgtgaactggccgaacgcctcttctatcagcaagacctggaagcggcgcggcagatggtgttggcgcacctgcgcttcgttgttcatatcgccaagagttattcggggtacggcctggcccaggccgacctgatccaggaaggcaacgtcggcctgatgaaggccgtgaagcgtttcaacccggaaatgggcgttcgcctggtgtccttcgccgtgcactggatcaaggcggagatccacgagttcatcctgcgcaactggcggatcgtcaaggtcgccaccaccaaggcgcagcgcaagctgttcttcaacctgcgcagccagaagaagcgcctggcctggttgaacaacgaggaagtccatcgcgtcgccgagagcctgggggtcgagccccgcgaagtgcgcgagatggaaagccgcctgaccggccaggacatggcgttcgacccggccgccgacgcggacgacgagagcgcctaccagtcgccggcgcattacctcgaagaccaccgctacgacccggcgcgccagttggaagacgccgactggagcgacagctccagcgccaacctgcacgaggcgctggaaggcctcgacgagcgcagccgcgacattctccagcagcgctggctgtccgaggagaaggccacgctgcacgacctggcggaaaagtacaacgtttccgccgagcgtatccggcagctggaaaagaacgccatgagcaagctgaaagggcggattctcgcctga

SEQ ID NO: 320788 - DNA, 606 bp, Pseudomonas aeruginosa
atgccgcgcaatacccgctggctgttctacctgtcgctggcggtcctgaccttcgtcgtcggcgcctggctggtccgtacgccggaaccggcgcgaccgttgccgtggctggccgactggcaggagcaggtgctggcgccgttggcggacaacgccttgaccctgcgccagctgcacgacgcggtggatggcgagttgtgggtggacccgcgcctggacggcgtgcgcctggccttccgtggccgcctgctgggcgacggcggcccctggcaggtagaaggcgagctgggcctgagcgccgaggagcaactgagcctgcagcgggcatctgcgttgcagcctggcagcgcgccgcaaccattgagcgccgggctggaaggacagttgggcgacaagccgatcgtggcgctgagcatgattcccgaaggcagggtcggtgccgagcggctgctggccagtctcggccagccgcgcctgcgcctgcaactggcccagggcgaggcctgggtctatccgcaactgggcctgaccgcgcacctgccggacgacgacttgcgactgatgctcgcggtgccgcgccaggccctggaaaaaccgccgcgttga

SEQ ID NO: 320789 - DNA, 732 bp, Pseudomonas aeruginosa
atggccgcccccttcttccaagccaagccgcgcatgttgcgatccctgttccgccgcctgttcaagtacctgctctggttcatggccgccagcgtcgtgctggtcgcggtcctgcgctgggtgccgccaccggggaccatggtcatggtcgaacgcaaggtcggctcctgggtcgacggccagcccatcgacctgcagcgcgactggcgctcctgggagcagttgccggacagcctgaaggtcgcggtgatcgccggcgaggaccagcacttcgccgagcaccacggcttcgacctgccggccatccagcaggccctcgcgcacaacgagcgcggcggcagtatccgcggcgccagtacgctcagccagcaggtggcgaagaatgtcttcctctggtccgggcgcagttggctgcgcaagggcctggaggcctggttcaccctgctgatcgagacgctctggaccaagcaacggattctcgaggtctacctgaacagcgccgaatggggcccgggcgtcttcggcgcgcaggctgcggcacgctatcacttcggcctcgacgccgagcgcctgagccgcacccaggccagccagctcgccgcggtgctgcccagcccgctgaaatggagcgcggccaggccgggcccctacgtacgccagcgcgcggcctggattcgccagcagatgtggcagttgggcggcgacgactacctgctgcgcctggagcgctga

SEQ ID NO: 320790 - DNA, 378 bp, Pseudomonas aeruginosa
atgcttcgtcccttcctgttgttggcggcatttttcggtttcaccggcgtggccctcggggcgttcgccgcccacggcctgaagaagcagctgagcgccgagtacctggcggtattccagaccggcgtgcactaccagttgatccatgccctggcgctgttcggcgtggcgctgctcgccacccgcctggacggccgcctggtgagcgcggcgggtggcctgttcacgctgggcatcctgctgttctccggcagcctctacctgctgaccctaagtggcatcggcaagctcggcatcgtcaccccgttcggcggcgtctccttcctcgccggctggctgtgcctggggctggccgcctggcgcctgggcaacgcctga

SEQ ID NO: 320791 - DNA, 201 bp, Pseudomonas aeruginosa
atgcagattcaactgaacggcgagcccttcgagctgcccgacgcgcagagcgtcgcggacctgctggcccgcctggagcttggcggccgccgcgtggccgtcgagctgaacctggatatcgtgccgcgcagccagcacgccagcaccgcgctcaaggatggcgaccgcgtggagatcgtccacgccatcggcggcggctag

SEQ ID NO: 320792 - DNA, 798 bp, Pseudomonas aeruginosa
atgagccaagcatccagtaccgatacccccttcgtcatcgccggccgtacctatggctcgcgcctgctggtggggaccggcaagtacaaggacctcgacgagacccgccgggccatcgaggcctccggagcggagatcgtcacggtggcggtgcggcgcaccaacatcgggcagaatcccgacgagccgaacctgctggatgtgatcccgccggatcgctacaccatcctgccgaacaccgccggctgctatgacgcggtcgaggccgtgcgcacctgccgcctggcccgcgagctgctggacgggcacaacctggtcaagctggaagtcctcgccgaccagaagaccctgttccccaacgtcgtcgagaccctcaaggccgccgagcaactggtgaaggacggcttcgacgtgatggtgtacaccagcgacgacccgatcatcgcccgccagctggccgagatcggctgcatcgcggtgatgccgctggccggcctgatcggctccggcctgggcatctgcaacccctacaacctgcgcatcatccttgaggaagccaaggtcccggtgctggtcgacgccggcgtgggcaccgcttccgatgcagcgatcgccatggagctgggttgcgaggcggtgctgatgaacaccgccatcgcccatgccaaggacccggtgatgatggccgaggccatgaagcacgcgatcgtcgccggtcgtctcgcctacctggccggacgcatgccgcgcaagctgtatgccagcgcctcgtcgccgctggacggcctgatcgactga

SEQ ID NO: 320793 - DNA, 735 bp, Pseudomonas aeruginosa
atgagcgataccccgcaatccccggcccaggactccctggcggaacacgacgaagcacggccgatgcgcaccgtgaagagcttcgtgatgcgcgccgggcgcatgaccgaaggccagcagcgtggcctcgacctgggctggccgaagttcggcctggaactgagcgatgaggtccaggacttcgacgcgatcttcggtcgccaggcgccgcggactttcgagatcggtttcggcatgggccattccaccctggaaatggccgccgctgcgcctgacatcgacttcatcggcgtcgaggtgcacaagccgggcgtcggcgcgctgctcaacggcctgctgacccagggcctgggcaacgtgcgggtgtatagctgcgacgcgctggaagtgctgcgccactgcgtggccgacgccagcctcgatcggctgctgctgttcttccccgatccctggcacaagaagcgccaccacaagcggcggatcgtccagccggaattcgccgaactggtgcggcgcaagctgaaggtcggcggcgtgctgcacatggccaccgactgggaaccctatgccgagcacatgctggacgtcatgagcgcggcgctgggctaccgcaaccaggccgaagacggccgcttcgtgccgcgcccgcaagagcgtccggtgaccaagttcgagcggcgcggggagcgcctgggacatggcgtctgggacctcaagttcgagcgcgtcgactga

SEQ ID NO: 320794 - DNA, 1347 bp, Pseudomonas aeruginosa
gtgttgaagaaactgggcatcctgttgctcggggccggttgcgcctgggcggcgcaggccaaggtagacgaagtccaggccgcacgcctggaccaggacctgaccccgctgggggcggagcgggccggcaacgccgatggcagcatcccgccctggaccggcggcatcacccaggcgccggccggctaccggcccggcatgcatcacctcgacccgttcgccgccgatcgtccgcgcctggtcctcgacagccgcaacatggccgcctaccaggcgctgctgacgccgggcacccaggccttgctgcaggccaacccggactaccacctgcgggtcttccccacccgccgcagcgcatccctgccgcagcgcctgtacgacgctacccgcgccaacgccagccgcgccgagctgatcgccgacggcaacggcgtgcagggcgctgccgccggcgtgcccttccccctgccgcagagcggccaggaagcgatctggaaccacatcatgcgctaccgcggcgagcaactgcacctgcagaccaaccaggcggcggtgctggccaacggcagctacaacctgctcaagctcgaccgctacctgtacttcgtctatggccgcgaggggatgatcccggagaacctcgacaacacgttgttctactacaagtacaaggtggtcgcgccggcacgcctggccggttcggcgctggtggtgcaggaaaccctcgaccaggtgctgtcgatccgcaaggcctggcgcttcaaccgtggcgagcggcgcgtgcgccgcttgccgaccctggcctacgacagcctgcagccggataccaacggcatggccacggcggacaccgtggatgtctacaacggtgcaccggaccactacgagtgggcgttgctcggcaagcgcgagatgctggtgccttacaacagctacgcggtgcaccagaagggcctcgcctatggcgacatactcaagagccgcttcatcaatcccgacctgctgcgctacgagctgcatcgcgtctgggtggtcgaggcgaccctgcgcaagggcttcagccatccctacgccaagcgccgcttctacctcgacgaagacagctggcagatcctcgccgccgacatctacgacaaggatggcgtgctgacccgggcccaggaagtccatccgatcaactactacgatgtgccgctggtctccagcaccctggaagcgatctacgacttcaagggcggccgctacttcgtcgatgggctggacaacaacgagccgatgtacgacttcggcgtgcaggtcgggccgcgcgacttcaccccgcaggcgctgcgccgggaggggaactga

SEQ ID NO: 320795 - DNA, 258 bp, Pseudomonas aeruginosa
atgaaaccgatcaagcacctctacctgcatttcaccgacggccagcgcctgtcgctgcgcttcccgcgccagcaggacgacccggccgaggttgcccgcagcatccgtcagcaactggacacgccctatctcagcgtcgaggtcgacggcgacctgctgctgattccgcgggacagcatcaagtacctgcagatcagcccggcgccggcgcgcctggacgacgacggcacgctacgcggcgccgagctgatcgtctga

SEQ ID NO: 320796 - DNA, 324 bp, Pseudomonas aeruginosa
atggattacgcgctggacctgatcgccaccctgtcgcgctggagccgcagccacctgtcggacatttccctggccatcatggccaccctgctggtgctgttcggcccggcgatcaacgcctgggtacagcagcgcatcggcagcctcaacttcgtcttccgcaccctgctgttcgtgttgatctgcgcggtcggctacggcctggcgatggtcttcgtcaccccctggctggccaagggcctcggctacttcaacaactacaccctggcgcccgtgctcctgctagtgttcttcgtgatcggcatgatcgccgatcgcagctga

SEQ ID NO: 320797 - DNA, 1110 bp, Pseudomonas aeruginosa
gtgcacatcccgtggtgcgtgcgcaagtgcccgtattgcgacttcaactcccacgccgcgggcacggagctgcccgaagaggcctatgtcgacgccctgctcgccgacctggagcaagacctgcgccatgtccacggccggcgcctgggttcgatcttcttcggcggcggcacgcccagcctgttctcggccaaggccctgggccggctactggaaggcgtcgagcgcagggtcggcttcgccgacggcatcgagatcaccctggaagccaatcccggcaccttcgaacaggtcaagttcgccgactaccggcgcctcggcatcaatcgcctgtccatcggcgtgcagagcttccaggccgacaagctgcaggctctggggcgcatccacgacggcgccgaggcagtgcgcgccgccgacatggcgcgccaggccggcttcgacaacttcaacctcgacctgatgcacggcctgcccgggcagagcctcgacgacgccctggccgacctgcgccaggccctcgccctggcccccacgcacctctcctggtaccaactgaccatggagccgaacacggtgttctggagccagccgccggagctgcccgaggacgacatcctctgggacatccaggaagccggccaggccctgctcgacgcgcacggctaccgccagtacgagacctccgcctacgcccgcgacggcctgcgcgcccggcacaacctgaactactggagcttcggcgacttcctcggcatcggcgccggcgcccacgccaagctgagcgcgccggacggacgcatcgtgcggacctggaagacccgcctgccgaaggactacctcaacccgcaaaaggccttccaggccggcgagcgcccgctggaagcggccgacctgccattcgagttcatgatgaacgtgctgcgcctggtcgacggcgtccccgccgcgctctacccgcagcgcaccggccagccgctggcggcgatcgccgatgcctgcgccgccgcgcgcgacgccgggctgctcgccgacgacccgcagcgcctgcgccccagcgaacgcggccagctgttcctcaacgacctgctgcaacatttcctgccgtga

SEQ ID NO: 320798 - DNA, 171 bp, Pseudomonas aeruginosa
atgtccagccgactgagccccgaagaccagcagaaggtcgagcagtacctcgcctcgccgctgcaccaggtcgagcgtgcgccgttccgcccgtggttcctgatgttcgtcctgctcgccgtggtcatcggcctgggcctgctcagccgcctcctcagctacctggcctga

SEQ ID NO: 320799 - DNA, 450 bp, Pseudomonas aeruginosa
gtgagcgaagggcgggtgaagtggatcggcgtgcgctccggcagccgcgcgccgatccaggaactggaggcggtggaggcacggcgcggcctgggactgacgggcgaccacccgcacccgccgcgccaggtcaccctggtgcaatgggaacacatcgaggccctcggtaccctgctgggcaggccgctgttgcccaacgagatgcgccgcaacatcgccgtcgccggcatcaacctgctcagcctgaaggaccgtcgcttccgcctcggcggcgcgctgctggaaaccactggctggtaccaaccctgcggacgcctggaaaagcacatcgaccaccgcacactgaagagcgtgcgcgaacagggcggcatcaccgcgcgggtgatcggcagcggagtgatccgcctcgacgatctgctggtgatcgagccccctgtctgtctagaatga

SEQ ID NO: 320800 - DNA, 630 bp, Pseudomonas aeruginosa
atgaacgaagcggattatctgcgcctgctcacccgtcaggccgaacaagccaacgacttcctctccaacgcacgtaaatgggaccgcgagcgctgggtctgccagcgcttcctcgaggccctcaacgtgccctatcgccaggaggatttcgccgcccccggggaacagccgccggacgtcctgtttaagggtgccggcttcgaggtgttcttcgtcctcgatgaaggtcgccggctgaacgaggagtggcgcgaggaactgacccgtcgccgccaggccgtcagcctgcgccaactgatccgccgcgaagagcggccacaacggatcgccgccgccgagctgcaggcacggctggcgccaaccctgcgcaagaaggcgcacaactatagcgagcgcggcatcgaccacggcgaactggacctgctggccttcgtcaacctgaagcgcgcggtgcccgatttcaatacgcccttcccgccgcccaccgaatacctgcgccaaggctggcgctcgctgtcgatggtcggtccgacctttgcccgggtgctcttcgctcactccggcgcccccgaattcctgcgcgccaacctcggccgcagcatcctgttcgacgccggggtaggcctgtga

SEQ ID NO: 320801 - DNA, 426 bp, Pseudomonas aeruginosa
atgcaacttcgcagcgtcatcgccgccgatcacccggcactcttcgcgctgtggtcgcgaacgccgggtattcgcctccgtgcggaggacgcctatcccttcttcctcgcctaccttcaacgcaaccccgggctgagcctgctggtcgaaaccgaaggggaggtgatcgcctgcctgatggccgggcatgacggtcgccgtggttacctccagcacctggtggtcgatcccggttatcgagggctggggctggcgcggcagatgctcgacgaggtgttggcgcgtctggcgagggaggggatcggcaaatcccatgtcttcgtcctggatgccgccgaggaggcacaggcattctggcgagcccagtcgggctgggagcggcgcaaggacatccaggtattttccactcgggagggacacgcgtga

SEQ ID NO: 320802 - DNA, 471 bp, Pseudomonas aeruginosa
gtgaaacgattgcattgggttctgctgggcatgctgctgcccggcctggcgctggccgtggagaagggctccaccctggagccctggacgttgcaggaccagttcgaaaaggcgcactcgctggacgactccacccgggtcctgctggtggcgcgggacatggacggctcgaagctggtcaaggcggcgctggcggaacgcccaaagggttacctggaggcgcgccacgcgctgttcctggcggacatcagccgcatgccggcgctgatttcccggcttttcgcggtgccggccatgcgtgactacagttatccggtgctgctcgatcgcgacgcggccatcgcttctcgctatgcctcggacgagggcaaggtgctctgggtcaggctggagcagcgccgcgtgttggaaacccgccagttggattcgccggtggccctgcgcatcgccctggaacaactgcagccgtga

SEQ ID NO: 320803 - DNA, 690 bp, Pseudomonas aeruginosa
gtgatcgctgccgagttgctgtcggcggaaagcctggaactgggctgggccatctatgcgccggtgctgctgctcgccgcctggcgcgcgccctgggtcgagctggtcagcgatacccgccgccagcacctgatgttcggtaccatgctcgggctgttcctgctctggctggtgcgccgggacttcgaatcggggctgtccttccatttcatcggcatgaccgccgtcaccttgctgctcgactggccgctggcgatcgtggtggggttggtggcgcaactgggcttgtgcctgcttggccgccaggattggctggcgatcggcgtcaacggcgtgctgctggtggcgatccccgcgctgatcgcggagctggcggcgttgttcgtggaaaagcgccagccgcgcaacctgttcgtctacatcttctgctgcggtttcttcccggcggccctcaccgcggtggtggtcctgctgctcggccttggcgtggtctggatcgacggccttttcccgatgccgccctggctggaggacttcgccggttacctgtggctgatcatgttccccgaggccttcatcaacggcacggtgatcaccggcctggtggtctactacccggagtggctggaaaccttcaatcgcacgcgctacctgcaggcgccctggaaggacgaagagcgcaagccctga

SEQ ID NO: 320804 - DNA, 210 bp, Pseudomonas aeruginosa
atgggtgtccatgaatgggcccgagagggcctgcgagagttgctgtcgaagagcgacgaggcggaccgggcaatgcgcctgcgcgcgttgctcagcgcaatcgtcgaactgaaccgggcggagcgcgatgctggcgacctggccagcgaactgcagtttcttgcggagaatctcgacgaccagcgcgactacgctttcatgcgcccctga

SEQ ID NO: 320805 - DNA, 201 bp, Pseudomonas aeruginosa
atgagccagcccctgaccgtggagtgcccgacctgcggcgcgcccgtcgaatggaaaagcgacaacaagtaccgccccttctgctccgaccgctgcaagctgatcgatctcggcgcctgggccgccgaggaacatgcgatccccggcgacaccctggaagacgacatcttctccgccgacctgccgcctcgcgagcattga

SEQ ID NO: 320806 - DNA, 612 bp, Pseudomonas aeruginosa
atgacccaaccctggatactaggcctcacgggcggtatcggcagcggcaagagcgcagccgccgagcatttcatttccctcggcgtccacctggtggacgccgaccatgccgcccgctgggtggtggagccggggcgtccggccctggcgaagatcgtcgaacgcttcggcgacggcatcctcctgcccgatggccagctcgaccgcgccgccttgcgcgagcggatcttccaggcgccggaggaacggcgctggctggagcaattgctgcacccgctgatcggcgcggagatcgtccagtacctggccagggccgaatcgccctatgccatcctggtctcgccgctgctggtggagtccggccagcgccagatgacccaccgcgtgctggtggtggataccccggaacatctgcaactacagcgcaccatgcttcgcgacaaggtctccgaggagcaggtgcgctcgatcctccaggcccaggcccggcgcgacgagcgcttgaagcacgccgacgacgtgctggtcaacgacggcgacctgtcccacctgcagcgtgaagtcgagcgactgcacgccttctacctgaccttgcgaggaggccgagcatga

SEQ ID NO: 320807 - DNA, 873 bp, Pseudomonas aeruginosa
atgaccctcctcgactacctggccagccatccgctggcctttgtcttgtgcgctatcctccttggcctgctggttggcagcttcctcaacgtcgtcgtgcatcgcctgccgaagatgatggagcgcaactggaaggccgaggcccgcgaagcgctcgggctggagccggaacccaagcaggcgacctacaacctggtgctgccgaattcggcgtgcccgcgctgcggccacgagatccgcccctgggaaaacatcccgctggtcagctacctggcgctgggcggcaagtgctcgtcctgcaaggccgccatcggcaaacgctaccccctggtggaactggccaccgcgctgctttccggctacgtcgcctggcatttcggcttcacttggcaggcgggcgcgatgctcctgctgacctggggtctgctggcgatgagcctgatcgatgccgatcaccaactgctgccggacgtgctggtgctaccgctgctctggctgggtctgatcgccaaccatttcggcctcttcgccagcctcgacgatgcgctgttcggcgcggtgttcggctacctgagcctgtggtcggtgttctggctgttcaagctggtgaccggcaaggagggcatgggctacggcgacttcaagctgctggccatgctcggtgcctggggcggctggcagatcctgccgctgaccatcctgctgtcgtcgctggtcggggcgatcctcggggtgatcatgctgcgcctgcgcaacgccgaaagcggcacgccgatccctttcggtccctatctggcgattgccgggtggattgctttgctctggggtgatcaaataacccggacctatctgcaattcgccggattcaaatga

SEQ ID NO: 320808 - DNA, 1218 bp, Pseudomonas aeruginosa
atggcggacaaagcgttaaagaccagtgtcttcgtatgggaaggcactgacaagaaaggcaccaaggtcaagggcgagctgtccagccagaacccgaccctggtcaaggcgcaactgcgcaagcagggcatcacgccggtcaaggtccgcaagaaaggcatctccctgctgggggcggggaagaagatcaagcctatggacatcgccctgttcacccgccagatgtccaccatgatggccgccggcgtgccgctgctgcagtcgttcgacatcatcagcgaaggcttcgacaatccgaacatgcgcaagctggtggaggagatcaagcaggaagttgccggcggcaacagcctggccaactcgctgcgcaagaagccgcagtacttcgactcgctctactgcaacctggtggacgccggcgaacaatccggcgccctggaaaccctgctcgaccgggtcgccacctacaaggaaaagaccgaggcgctgaaggccaagatcaagaaggccatgacctacccgatcgcggtgatcgtcgtcgccatcatcgtttcggcgatcctactgatcaaggtggtgccgcagttccagtcggtgttcgagggcttcggcgccgaactgccggccttcacccaaatggtcatcaatatctccaacgtgctccaggaatggtggctcctggtactgctgatgatgggcggcgccggcttcctgctgaaccacgcctacaagcgttcggagaagttccgcgacgccaccgaccgcacggtactgaagctgcctatcgtcggcgccatcctctacaaatccgccgtggcacgctacgcgcggacgctgtcgaccaccttcgccgccggcgtgccattggtggaagccctcgactcggtttccggcgccaccggcaacgtggtgttcagggacgcggtgggcaagatcaagcaggacgtgtccaccggcatgcagctgaacttctccatgcgcaccaccaacatcttccccagcatggccatccagatgaccgccatcggcgaggagtcgggcgcgctggacgacatgctggccaaggtcgctggcttctacgagcaggaagtggataatgccgtggacaacctgaccgcgctgatggaaccgatgatcatggcggtcctcggggtcctggtcggtggcctgatcatcgccatgtacctgccgatcttccagctgggcaacgtcgtctaa

SEQ ID NO: 320809 - DNA, 1701 bp, Pseudomonas aeruginosa
atgaacgattccacgcctctcagcggccttgccaagcaactggtcctgaacgaactcctcgacgaaaagaccgcccgccaggcccaggtgcaggccgcgcgcaacaagcagtcgctggtcagccacctggtccaggccaagctggtgcagagccgggcgctggtcgaggtggccgccgagcagttcggcatcgcctattgcgacctgaacagcctggatcgggaaagcattccgaaggatgtcatcagcgagcgcctggtccgccagcaccgcgtgttgccgctgtggaaacgcggcaacaaactgttcatcggtctctccgacccgaccaaccatcaggcggtcaccgatatccagttcagcaccggcctcaccaccgaagccctgctggtagaggacgacaagctcggcgtagccatcgagaagctttacgagggcgccatggacgccctcggcgacctcggcgatatcgatctcgacggggtcgatgtcggcaaggcggaaagcgccagccaggacgacggcggcgacgatgccgaagacgcccccgtggtgcgcttcgtcaacaagatgctgctcgacgccatccgcggcggctcttccgacctgcacttcgagccctacgaaaagacctatcgggtgcgcttccgtaccgacggcatgctccacgaagtggccaagccgccgatccagttggccagtcgtatctctgctcgtctcaaggtaatggccggcctggatatctccgaacgacgcaaaccgcaggacggacggatcaagatgcgcgtatcgaagaacaagtcgatcgacttccgcgtcaacaccctgccgaccctgtggggcgagaagatcgtgatgcggatcctcgactcctccagcgcgcagatgggcatcgacgcactgggctacgaagaggaccagaaggaactctacctggccgcgctcaagcagccacagggcatgatcctggtcaccggccccaccggctcgggcaagacggtttcgctgtacaccggtctgaacatcctcaataccaccgacatcaacatctccaccgctgaagaccctgtggagatcaacctggaaggcatcaaccaggtcaacgtcaacccgcgccagggcatggacttctcccaggcgctgcgcgccttcctgcgccaggacccggacgtgatcatggtcggcgagatccgcgatctggagactgccgagatcgccatcaaggcggcgcagacagggcatatggtgatgtccaccctgcacaccaacagcgccgccgagaccctgacccgcctgctgaacatgggcgtgccggcgttcaacctggcgacctcggtgaacctgatcatcgcccagcgccttgcgcgaaaactctgttcgcactgcaagaaagaacacgacgtgccgaaggaaaccctgcttcacgaaggtttccccgaagagctgatcggcaccttcaagctgtattcgcctgtaggctgcgaaaactgcaaaggcggttacaaaggtcgcgtcggtatttatgaagtggttaaaaacacccccgccctgcagcggattatcatggaagaaggcaactccatcgagatcgccgagcaagcccgcaaagaaggcttcaacgatctgcgcacctcaggcctgctgaaagccatgcagggaatcaccagcctggaggaagtcaaccgcgtgaccaaggattaa

SEQ ID NO: 320810 - DNA, 465 bp, Pseudomonas aeruginosa
atgaaagctcagaagggttttactctgatcgaactgatgatcgtggtcgcgatcatcggcatcctagccgccattgccatcccgcaatatcaggactacaccgcccgtacccaggtgacccgtgccgtgagtgaaatcagcgcgctgaagaccgctgcggagtcggcgattctggaaggcaagaagctcgtttccaacgattctcccaaaaacgatgagtatgatcttggctttaccagttctactctgcttactggtagcggtaaggggcagatcaagattgacaaagctgataccgcaactccggagatttctggtaccttgggcggctcttctggtaaaggtattgctggcgctgtcatcactgtcaagcgtgatgataaaggagtatggacctgcggcatcactggttcgccgaccaactggaaagccaactacgctccggccaattgcccgaaatcctaa

SEQ ID NO: 320811 - DNA, 480 bp, Pseudomonas aeruginosa
gtgtcgctgctggtcatccacaatatcagcctgccgccgggacagttcggtaccggcaaggtccaggcgttcttccagaatcgcctggacccgaacgaacatccctatttcgaggagatccgccacctgacggtttccgcgcatttcctcatcgaacgcgacggcgccatcacccagttcgtctcctgtcacgaccgcgcctggcatgccggggtttcctgcttcgacggtcgcgaggcgtgcaacgacttctcccttggcatcgaactggaggggaccgacacggaaccgtacacggacgcgcagtacactgccctggtcgggctgacgcggctgttgcgtgcggccttcccggcgatcaccccggaacgcatccagggccactgcgatatcgccccggagcgcaagaccgatcccggcgaggctttcgactggtcgcgctaccgcgccggattgaccgattccaaggaggaaacatga

SEQ ID NO: 320812 - DNA, 837 bp, Pseudomonas aeruginosa
atgacgttcctggtgttgctgctggcccttgcgctggagaagttctccggctggcgccggcgtatccagcgcgatggcgcctggctcgcctggttgggcctggtcgaggacctgccctcggtgtcccgccgctcctggctggggctgctgctcgcggtggtcctgccgttgctgccgctggccctgttgctgacattgctgcagccgttggcctatggctggctgagccttccgctgcatcttctggtggtggtctacagtctcggccgcggcgacgtcatggccgacctcgggccgttccgcgacgcctggcggcgcgaggaggcccaggctgccttccatgtcgccgaacgcgatctggggatcctgggcggcagcgagagcgaactgatcggccgggtgcacggccatctgctctggcagggctaccagagcttcttcgcagtgatcttctggtatgccttgctcggcccggtggcggccctggcctatcgcctgctggcactggcgctggagcacgcccgccagccggcgttgcgcgaacaggcggcgcgcgtccggcatatcctcgactggttgccggtgcgtgcgctggtgctgagcttcgccctggtcggcaacttcctcgcggttatccgcgtgctgctgcactggctgctggcctgggacatctcggcggccgcgctgctgggcaaggccggacgggtcgccagcgatgtcgaagcggtcgaactgggtgccgccggcgtcgccagcctggatgcgctctggcaattgctggtgcgcgcggccgtgctctggtacgccgtgttcgccttctgcgcgctgttcctctga

SEQ ID NO: 320813 - DNA, 2022 bp, Pseudomonas aeruginosa
gtgaagaccgtactctatcccgccatcgcgctgatgaaccggctcagcttcggcatgaagttcggcctgatcagcgtgctgttcttcctgccgctgctgatcaccagcttctatctggtgcgcgatgcctatcgccagttcagcgacacccggatcgaactgcagagcttgacgctgctgggtagcggacttcagatccggcgtagcctggagtccctcaacgatctgttgcagatcaatgcggtcatcggccagtccggcaaggccggcgatctggaagcgcgcatcgcggacgtccagaaggggctgcgcgggcggctcgaggcgctggcgccgctcagcgaggatggtgcggcggtagccgaattcgaggcccagcgcgaccggttgctcaacggcttgcaggccgtggaggccgaagggtccctgcagggcaagggcgcacgggcggagaagctgctcggtagcgcacaggtattcatcaagttgctcatcgcccaggccgggctcagccaggacagccagcgccaggtgcgccagctcagcgagctggtcggctcgataacgccggaggtgacggcggccatcagcaaggggcgcgccatcggcgcctactccctgggccagggtttcctcaattcgtcctccagcgcgcggctcgacgaactgctgctggagttcgagaaactgcatggcgagtatggcctgaagctgcaggagtccctggccggcagcccacagctgctcgaggaggccgcccaggccagtcgcgagaccctgaagagcctggggcagttgttcgaggaccgggtgatcgtggccgagacgctggataccccgtggacgcagttctacgatcaggtcagcgcggcgatggacaagacctaccagctcgacgacgccgttctcggctatctcgatacccagttgcaaaagcgcctgcaacaggtgcgcacgcagatgctgttgctagtcgccgcgctggccgtggttttcgccgcgatcctatacctctacggcggtttctacgtttccacccgtgccaccctgaaggatctcgggcgaatgatggagcgcgtcgccggcggcgacatgacggtcagcttccaggcccgcagccgtgacgagctgggcgagctgggacaatcgttcaacgaatcggtggcgaagatccacgacctgatcgagcgggtcagccagaccgtcggcgaggtcgagcggcagaccctccgcgtcgagtcggtgtcggccgaaagcaaccaggcggtagccgggcaacgcagccagatcgagcaggtggccacggcgatgaaccagatggccgctaccgcccaggaagtggcgcgcagcgcggcgatggcggtgagcagcgcgaacagcgtgaaccaggaaaccctcagcgggcgcagcctggtcgagtcgcaggtgggtagcatccagcgcctggccggcgagattgaccagtcggtggcggcgatcaatcgcctggccagtgacagcgcctcgatcagccaggtgctggatgtgatcaagggcatcgccgaacagaccaacctgctggcgctcaatgcggcgatcgaggccgctcgtgccggggagcaggggcgcggtttcgcggtggtggccgacgaggtgcgcacgctggccaagcgcacccagcaatccactgccgagatcgaacagatgatcctgcgcctgcagggcggcgtcgatgcggcggtgaaggcgatgggcagcagccaccataccgccgatggcacggtcaacgagtcggcgcaggtgcagcaggcactggagaatatcctcggcgcggtgggcatgatcgtcgaccagaaccagcagatcgccgccgccgccgagcaacagaccgccgtggcccacgatatcgaccagaacatcgtcgagatcaaccaggccggcgagcgcaccgcggaaggcgccagccagaccgaacgggccagccgcgaactgggcgcccaggtgacccagctgaaacgcctgatcggcgcgttccgggtgtag

SEQ ID NO: 320814 - DNA, 1164 bp, Pseudomonas aeruginosa
atgtccatcaaggtcgaggattatttcgcccctgaaaccttccagcgcatgaaggccttcgccgacaagcaggaaaccccctttgtagtcatcgacaagcagaccatcgccgatgcctacgaccaactgaccgactgcttccccttcgccaggatctactacgcggtgaaggccaatcccgctaccgaaatcaccgagctgctgcgcgacaagggttcgaacttcgatatcgcctcgatctacgaactggacaaggtgatgaagaccggcgtcggtccggagcgcatcagctacggcaacaccatcaagaaatccaaggacatccgctacttctacgagaagggcgtgcgcctgttcgccaccgactccgaagccgacctgcgcaacatcgccaaggccgctcccggcgccaaggtctacgtgcgtatcctcaccgagggctcgactaccgcagactggccgttgtcgcgcaagttcggctgccagaccgacatggccatggacctgctgatcctggcccgccagctgggcctggagccctacggcatttccttccacgtcggttcgcagcagcgcgacatctcggtgtgggacgcggcgatcgccaaggtcaaggtgatcttcgagcgcctgaaggaagaagacggcatcgtcctgaagatgatcaacatgggcggcggcttcccggccaactacatcaccaagaccaacgacctggaaacctatgcggaggagatcatccgcttcctcaaggaggacttcggcgacgacctgccggaaatcatcctcgagccgggccgttcgctgatcgccaatgccggcatcctggtcagcgaagtggtgctggtcgcccgcaagtcgcggaccgccgtggagcgctgggtctatgccgacgtcggcaagttctccggactgatcgaaaccatggacgagtcgatcaagttcccgatctggaccgagaagcagggcgagatggaagaggtggtgatcgccggcccgacctgcgacagcgccgacatcatgtacgagcactacaagtatggcctgccgctgaacctggcgagcggcgaccgcctttactggctgtctaccggcgcctacaccaccagctacagtgcggtggagttcaacggcttcccgccgctgaaggcgttctacctctag

SEQ ID NO: 320815 - DNA, 426 bp, Pseudomonas aeruginosa
atgacaggcaatggtgtttccctggtgaccctcggggtcgccgatctggcccgctcctctctctactaccaggcgctgggctggcagccctcttcggacggcaacgagcaggtggtatttctcaagggccgcaacctggtcctcggcctctacggacgcagcgccctcgccgaggatgcgcaggtggaagatcgcccgaccggcttcgcggctatcaccctggcctgcaactgcgcctcgcgggacgaggtggaccgtctgttctccgcagctacggcggccggcgggcaggcgaccaagatgccgcaggaagtgttctggggtggctactccggatatgtcgccgacccggatggacacctttgggaaattgcctacaacccgttctggccgttcgacgagcagggcaacctggtcttgccctga

SEQ ID NO: 320816 - DNA, 1803 bp, Pseudomonas aeruginosa
gtgtcccccactccaccaagcgttacgcgcaatcgcatcgactgggccggcctgggctggctgttcctgttcttctggttcttctccggcatcacccaactgctcctgctgacctccggcaacagcggtttctccggtttccgcaacgccatggtgctgagcaccatctggcttgcgccggtgttgctgttcccgcgctggaccaagccgctggccgccgtcatcgggctggtgctgtgggccgcctcgctggtcggcctgagctatttcggcatctatcaccaggaattctcgcaaagcgtgatcttcgtgatgttcgagtcgaacaccgccgaggccagcgaatatttcagccagtacttcaacccctggatgactctcggcctggtgctctacagcctggtcgccatcctcctctggcgccgcctgcgcccggtctacctgccgcgcttcagcgccctgccggtggcggtgctgctgatcgtcgcgaccatcggttatccgttctacaagcaactggtcagccagggccgacccttcgacgaagccctggacaaggtccaggcgcgcatggaaccggcggtgccctggcaattgctgatcggctaccagcaataccgccagcaactgggcagcatgcaggcgctgttgcaaaagaacgcggccctaccgccgctgaagaacctcgtcgatgccaatggcgatacgccgcgcacgctggtcctggtgatcggcgaatccacgtcgcgcaagcacatgagcctctacggctatccacgcgaaacgaccccgcagttggacgcactgaaggccgcgaaccggaacctcacggtattcaacaacgtggtggcgtcgcggccatacaccatcgaggtgctgcagcaggtgttgacgttcgctgaccaggagcatcccgaccgcttcctcaccgatccgtcgctgatgaacctgatgaagcaggccggctacaaaaccttctggatcaccaaccagcagaccatgaccaagcgcaacaccatgctgacgaccttcgcccagcagaccgatgcgcagttctacctgaacaaccagcgcagccagaacgccagccagctggacggcgcggtgctggcgcccttcgccaaggtgctggacgacccggcgccgaagaaattcatcgtggtccatctgctcggcacccacatgaactacaagtaccgctatcccgccgattacgctcgcttcgtcgaccgccagggcgccccggcggccctcagcgacgaccaggtggaggtctacaacagctacgacaacgccgtgctgtacaacgactacgtggtctccagcctgatcaagggcttcgccaacagcgatccgaacggcttcctggtctacctctcggaccatggcgaggaagtcttcgacgaagccccgcacgaccgtctcggccgcaacgaaggcgacccgacccgcggcatgtacaccgtgcccttcctggtctggacttcgcccagctggcagcagacccatccgcgcgacctgcaggccctggtcgaccgacgctacagcagcgaagacctgatccatacctggtccgacctcgccggcctcaactatgacctcttcgatccgaccaagagcctggtgagcaacgacttccagcatgaagtccgctggatcggcaacccctatgcccacaatggcttgcgcgacttcgacaagctgccgctggacaaggccgacgccgggcagcaggtagcccaggccggacgacccgcgccaacgacgccgcgcgcaccgtcccgccagccgaacgaaggctga

SEQ ID NO: 320817 - DNA, 816 bp, Pseudomonas aeruginosa
atgcgccacctgctgcttcgtcacgaagcgctggacgccgaaggtttcgccgcacaactggccggtaccccgggcgaggttgcccaggccatcctcggcgctgcgcgcgagggcctgacggaagcccaggccctgctcggacagatccttctggacggccaaggcatccagcgcgacccgagcctggcgcggacctggttcacgatcgccgccgaacgcggccacgcaatggcgcgcaatatgctcgctcgctgtcttgaacatggctggggcggcccggcggatccagccgcggcagccgtccactatcggatcgccgcccaggccggccttgactgggcccgctacaacctggccaatctccacgccaccggccgcggcgtgccccaggaccagccgcgcgcctatgcgctgtatcggcaagcggccgagcagggccacgccaaatcgatgaacctggtggggcgctaccacgaagaaggcctggtggtcgctcgcgacctggcgcaagctgcgcactggtatcgacgttccgccgagggcggcgattttcgcggccagttcagccacgccgcgatgctcagcgcctcgggccgccatgccgaagccgaaacctggctccggcgtgccctcgaaggcggcaacctgaacttcctgcgcagtgcccgccatggcctggagcagtcggcccacccgccattccgcagcctggcgctggcctactaccgacgcgcggcgcagttgggcgacgacaccgatcgagaggctctggaacaggcgctcgaacgtcacgggtacgcacgactgcccgtctga

SEQ ID NO: 320818 - DNA, 729 bp, Pseudomonas aeruginosa
atgcaaatcaatatcattggcaatcatttcgccttcatggacagcgccatgttgctgcatattcccgccatcttcaccgccgaggaagtctcccggatccgcgcagccctggagcaggcggaatgggccgacggcaaggcgaccgccggctaccaatcggccaaggccaagcacaacctgcaactgccgcaggaccacccgctggcccgggagatcggcgaagccatgctgcagcgcctgtggaaccatcccctgttcatgtccgccgccctgccgctcaaggtcttcccgccgctgttcaactgctataccggcgggggctcgttcgacttccacatcgacaacgccgtgcgcgacatccatggcggccgcgagcgggtccgtaccgacctgtcctcgaccctcttcttcagcgacccggaggactatgacggcggcgaactggtgatccaggacacctacggcctgcaacaggtgaagctgcccgccggcgatctggtgctctaccccggcaccagcctgcacaaggtcaatccggtcacccgcggcgcgcgctacgcctcgttcttctggacccagagcctggtccgcgaagacagccagcgcaccctgctattcgaaatggaccagtcgatccagcgactcacccgcgacgtccccgaccacccctcgctgatccgcctcaccggtacctaccacaatctcctgcggcgctggtcggaactctga

SEQ ID NO: 320819 - DNA, 2301 bp, Pseudomonas aeruginosa
atgtcgcgtcagtccacggataccgccgtttcttcgcaacgtctgctggcttcggccatcggtgtggccatcaccgccatcgccgcaccgcaggcagcccacgccgacgaggccgggcagaaaaagaccgacaaggaccgcgtactgtcgctggatgcggccaccatcgtcggcgagcagcaggacgaaaccacctacaacgtcgaccgctcggcgtcgaagaagtacaccgcgccgctcttggatacgccgcgctccgtcacggtagtaccaaagcaggtgatcaaggataccgccgccgtgtctctccaggatgcactgcgtaccgttccaggtattacctttggcgcgggcgagggcggcaatcccaccggtgaccggccattcattcgcggcttcgatgcgcaaagcgatacttacgtcgatggtgtacgcgatactggtgcacagacccgcgagatcttcaaccttgagcagatcgaggtcagcaagggccctaactcggcattcggaggacggggctcggccggcggcagcctcaatctcgtcagcaagcaggccaaggctgggaacttcatcgatggaggcttcacctatggttctgaccagactcgccgctacaccctggacctcaaccaggaattcctcgatggcaatgcggcattccggctgaatcttctcaagcacgatgccaatgtcgcgggccgcgatgaagtcgatgtcagtcgctggggcgtagcgccgtcgctcaccttcggtcttggctcgccgacccgagtgaccgtcagccattatcacctggaaagtgacgataccccggattcgggcattccctatgccaagagtagcgatcgcagcaagcacaatccggacaaaccggtgaatgtcgatcgaggcaatttctatgggctgacggggcgcgatttccagaagagccgcatcgataccagtaccatcaccgttgagcatgatctgactgacagcctcactattcgcaatacctcgcgttacggcaacagtcatcaggactatctgtggacacaaccggatgacagccagggcaacatcaacaatggctcggtctggcgccgccagaacaatcgggtaagtaccaccaccacagcagtcaaccagactgacctgtttggagagttctacctgggtggcttcaagaacagcttcagcaccggcctggagttcagccgagaagacagcaagcgcgatgggtataccgtcgataccaataccggcctgggcagcaacaagtgcaatccatcgctgatcggggcgcctagcggctataactgcactagtctggaaaatcccaatccgcacgatccatggaatggcagtattacccggaaatatgcgccgctgaatacggtcggcaccaccaaggcaatatatgcgttcgacaccatcgacctgaacgagcagtggcaggtcaatattggcgcgcgcttcgatagtttcgaaactacggcgaagaaccacggtgtaagacccgctaccaaactcagcgacaagtcgagcttctggaactggcaggcaggcttggtgtggaagcctgtacccaacggcagcatctatgcgtcctatgccacttcggctacgccgccgggtagcatgctcgataatggggatacctcgaatgctgtcgacgggttcgccatcagcaacaaccttgagccggaagaaaccacgaactacgagcttggtaccaagtgggctttcttcaacgagcggctggagctgagtgccgcgatcttccgcaccgacaaggacaatacccgcatcctggtcgccaaccagacctacgacaacgccggacaatcccgcgtcgacggcgtggagttgagcgccagcggcaagctgaccgagaagtggaaggtgttcgcgggctacagctacctggacagcgagttggtcgatgccggtaaggctgggcgtaacggcaatgtgaacgcatcggcggcttccaacaacggcaacgagatgccaaatacgccgaagaacagcttcagtctctggaccacctatgacatcttcccgaagaccaccatcggcggcggggctttctatgtcgacaaggtctatggcgacgttggcaataccgtctatgtccccgattactggcgctatgacgcaatggccagctacaaactgagcaagaacgtcgatttccagttgaacgtgcagaatgtgttcgacaagaagtacttcgacaaagcctatgcggcgcactatgcgtcccaggccgctggaaggacgatactgttcagcaccaacttccacttctga

SEQ ID NO: 320820 - DNA, 2553 bp, Pseudomonas aeruginosa
gtgaagaaagtctggttccagttgcattggttcttcggtatcagcgccggcctggtgctggcgctgatgggcgtcaccggagcgaccctgtcgttccaggacgagctgatgcgcgcgctcaaccctgacgtgctggtggtgcagaagcgccccgagggcgtgctgccgctggacgaactggtgcgccgtatcgaaggcgccgagccggggcggaaagtggccttcgtctgggtcgagatggacagcgacaaggccgggcggatcttctacaccccgccgccgggacagcgccgcggcgagtcgcgctggatcgatccctacaccggggctttcgtcggcgagccgcgcggcgagggtttcttcaacctgatgatgcaactgcaccggttcctcgccatgggcgagtacggcaagcaggtcaccgccgcctgcaccctgatcctgatcttcttctgcctgtccggtctctacctgcgctggccgcgcaaggttttcgactggcgcgcctggctgaccctcgactggtcgcgcaaggggcgcagtttcaactgggacctgcatgccgtggccggcacctggtgcctggcgctctacctgctggctgcgctgaccggcctgtactggtcctacgagtggtaccgcaacggcctgttcaaactgctcgacgacgcgcccgccggccagcaggcgcagcgcggcaagccgggcggacgtggcgagcgcccggccgatgcggctccgctggtggtcgactacgcggcggtatggaacagcatccgccaggccggcggcgaccgcttgcaggcctacaacctgcgcctgccgccggcgggcggccagccggcgacagtgttctatcgcctgaccgacgcgccgcacgagcgtgccttcaacaccctgaccctggacccggccaacggccaggtgaaaagcgaccaacgctatagcgaccgttctttcggcagccagttgctggccagcgtctatgcattgcacgtaggcagctatttcggcatggccggacgcatcctgatgatgctcgccagcctggcgatgccgctgttcttcatcaccggctggctgctctacctcgaccgccggcgcaagaaacgcgcggtacgggcgagccgcgccgacctgggcggcagcgccggcgccagcggcgagccctggttgatcggctacgccagccagagcggttttgccgagcaactggcctggcagagcgccggccagttgcaggcggccgggttgccggtgcgggtcgaatcgctggcgcgcctggatgccgggcaactcgccgaggcgcgcaaggcgctgttcgtggtcagcaccttcggcgacggtgaggcgccggacagcgcccgcggcttcgaacgcaaggtgcttggccaggccgccagcctcgatggcctgagctacgccctgctggccttgggagatcgccagtacgagcagttctgcggcttcgcccggcgcatgcagggctggttgcaggggcagggcgcgcggagcctgttcgccccggtggaggtcgatgatggcgacgccgcggccctgcgccaatggcaggaaagcctggccgaggtgaccggcggtgccgccccggcggcctgggaagcgccggccttcgaggtctggtcgctggcgcggcgggagtgcctgaatcctggcagccagggcgagtcgacctggctgctggacctgcgtgcgccgaccgacagcgccatccaatggcgcgccggcgatctgctggagatcgtcccgcaccaggcgcccgcgcgcatccgcgaatggctgcagcggcataacctggacggccaggcgcgggtggcggtcgagggcgtcgagcagagcctggagcaggccctggctgggcgcttgctgccggactctttcgaacacctggtcggcttgcacccgcaggcgctgctggatgcgctgattccgctttccgtgcgccagtactccatcgcgtcgctgcagagcgatggcgacctgcaactgatcgtacgccaggagcagcatgccgacggcagcctgggcatctgctccggctggctcaccgagtacctgccgctcggcgccgcgctgaccctgcgcctgcgccgcaacgcgggcttccacctgccggaggatgacgtgccgctgatcctcatcggcaacggtaccgggctcgccggcctgcgcagcctgttgcgcgccagcattgccgccgggcgcaagcgcaactggctgctgttcggcgaacgcaatttcgcccacgactactactgtcgtgcggagctggagcaagccctggccaggggtgagctgcaacgcctggacctggccttctcccgcgaccaggcggagaaaatctatgtccaggaccgcctgcatgaagcggcggatgaactgcggcgctggattgacgagggtgcggccttgtacgtctgcggcagcctgcagggcatggccggcggtgtcgaccgggtgctgcgcgaagtgctcggtgaggaggccttgcaacgcctggccgacgaaggacgttaccgacgcgacgtgtactga

SEQ ID NO: 320821 - DNA, 900 bp, Pseudomonas aeruginosa
atgaaagttctcatcctggcggcctatgcgctgagcatcctctatgtccatttccgcggccgggtacgccacaagctgtcgcgccaattgagcgaccactccagcttcctcgctccgatcaactgcctgatgtacctgttctcgaaggtaccgaaccgcccttacctggcaccgcagaccttccccgaactgcaggttctggtcgacaactggcaagccatccgcagcgaggcgctgcacctgcacgacgccggcaacatcaagcgttccgaacagtacgacgatatcggtttcaactcgttcttcaagagcggctggaagcgcttctacctgaaatggtacgacgaggcccatccctccgccggacaacgctgcccgcagaccaccgccctgttgcggcagattccctcggtcaaggcggcgatgttcgccgaactgccgccgggctcgaagctggtgcgacaccgcgatccctacgccggctcgctgcgcttccacctgggactgttcacccccaacgacccggcctgcttcatcgaggtggacggcgagcgctaccactggcgcgacggcgaggcggtggtgttcgatgaaaccttcatccactacgcggaaaacgccaccgaacacaaccgcatcattctcttctgcgacatcgagcggccgctgacccagggctgggccaccgccttcaaccgctggttcagccgcaacgtgatggctgccgcggccgccccgaacaacgcaggcgaccggaccggcggactcaatcggatcttcgacagcctctacaagatccgcctgcagggcaaacgtttgaagaagcgcaaccgcaagctctactacctgcagaaatggggcttcttcgccctggtactggctttcatcctgtggatctga

SEQ ID NO: 320822 - DNA, 756 bp, Pseudomonas aeruginosa
atgaacgacaccggccggcgtatcctgctcaactgcgacatgggcgaaagctttggcgcctggcgcatgggcgacgatgtccacagcatgccgctggttgaccaggccaacctggcttgcggcttccacgctggcgacccgctcaccatgcggcgcgcggtggaactggcggtacgccatggcgtgagcatcggcgcgcacccggcctatcccgacctgagcggcttcggccggcgctcgctggcctgctctgccgaagaggtgcatgccatggtgctgtaccagatcggcgcgctggacgctttctgccgttccctcggtacccaggtggcctacgtcaagccgcatggcgcgctgtacaacgacctggtcggcgacgatgagctgctgcgcgccgtgctcgacgcctgcgccgcctatcgcaagggcctgccgctgatggtgctggccctggccgacaacggccgcgagctggaactggccgacgaggccgacgtgccgctgctgttcgaggccttcgccgatcgcgcctacctgccggacggccggctggcgccgcggcggcttggcggcgcggtgcatcacgatccgcagcggatcatcgaacaggccctggccatcgcccgcggcgaagccttccccgactacgacggcaacccgctgcgcctgaccgccgacagtctttgcgtgcatggcgacaacccgcagtcgctggcggtcctccggcgcctgcgcgcggccctggacagcctgtga

SEQ ID NO: 320823 - DNA, 678 bp, Pseudomonas aeruginosa
gtgatccgcatcgaacccgctggtgccgaagccctgctgctgacgctcgccgaagagcccgaagtggacctgtctgtgcgcctggccgagctggccagacgtctgcgcgaggggctcggcgaaggcgtcagggatctggtgccgggctggaccaccctgatgctgcattacgacccctaccgcatcgccccgcagatactggaagaacgcctgggtccgctgctggcggagtggcacgcctggcgtcccgccgaggatgccgggcgcctgcacgagattcccgtctggtacgccggcgaggacctcgcgacggtagcggttgcctgcggattgactggcgaaggggtgatcgaactgcacagcgcggccgaataccgggtcggcgcgatcggtttcgctccgggattcgcctacctcggcggcctcgatccgcgcctggtcctgccgcggcgggccaccccgcgggcgcgcgtaccggccggcagcctggccattgccgaggcgcagacggcgatctatccgcaggcctcgcccggcggctggcacctgctgggacgcagtccgtggcgtccgttcgatccggccgccactcctccgtgcccactggcgctgggcgaccgggtgcgcttcgtcgccatcgggcgcgaggctttcctcgacctgggcgggcgcgaatga

SEQ ID NO: 320824 - DNA, 930 bp, Pseudomonas aeruginosa
atgaatggtttgcgggtcgtcaaggcgggtccgcagagcctgctgcaggacgacggccggcgcggctggcagcacctcggcgtatccccgggcggccctctggaccgccaggcggcagcctgggccaatcgtctgctcggtaatccctgggggacgccattgctggaaatcgctttcggcggcttggtgctggagtgcagggtggaggcgacctggctggcgttgaccggagcgcgcctggcgctgacggtggacggtcgcgaatgcctgccctggagtcgcttccgggtccgccgcgggcaacgcatcgaactgggcttcgccgaggccgggcagcgtgcctacctggcctgcgccggcggtttccgggcgaggccggtactgggcagcgtcgcctgccaggttcgcgacgggctcggcggtttacagggcgatggccggatcctggcggagggcgattgcctgccgtgtgccgaagcgggggcggcgtgtccgtgggatgccagcgtgccctggcgtttccagccggactaccggcagcagcggcccttgcgcgtgctgctcggcggcgatgcggcggccttcaacgcagccagccggcaagccttcttcgccagcgcctggcgaatcagcccgcggtccgatcgcatgggcgtccgcctggccggcgagccgctgcgcggggcgccgcgcgcctggtcgcagggcgtggtggagggcgctatccaggttccgcccgatggccaacccatcgtgctgatggccgaccgccagagcatgggcggctatccgctgctgggcttcgtccatccactggacctctcgcgcctggcgcaaagccccgcgcatagcgaggtaaccttcgtcgagagcgacctggcgacgcagcaggccgatctgctgcgcttctaccgcttcttccgcggctga

SEQ ID NO: 320825 - DNA, 474 bp, Pseudomonas aeruginosa
atgaaactcgacgcctatgaccaccgcatcctcgccgccctccagcgcgacggccgcctgagcaacgtccagttggccgaggagatcggcctctccccgtccccctgcctgcgccgcgtgcgcctgctggaagaggccggggtgattcgcggctaccaggccagcatcgaccgcgacgaggtcggcctcggcctcacggtgttcgtcgggatcaaggtggaacgccaccgccaggagcaggccgaggccttccaccgtgcggtggtcgacctgccggaggtgatctcggtgcacctcgtctccggcgagtcggacttcctcctgcaagtggtggtccccgacctgcgcgcctacgaacgcctgctcagcgagactctgctgcgcctgcccggggtcagcgacattcgcagcaacttcgcgatcaagacggtcaaggcgccctcgccgctgccgctcggccacctggccggctga

SEQ ID NO: 320826 - DNA, 633 bp, Pseudomonas aeruginosa
atggacacgagcgctttcctgattgccctggcggtggtttacctggtgcccggaccagacatgctcctgctgttccagaccggcgcccgccagggccgtcgcgcggcgctggtcaccgccctcggcctggcgctggctcgggcctgccatgtgctgatggccgcgactggactggcgctgctgttccgtaccgctccctggaccttcgacctggtgcgcctgctcggcgccgcctacctcgcctggcttggcctgcagatgctgcgcggtggcggactggccttgccgaccagcgacgcgggctccgcgccggtggtccctcacgccgaccgccgggccttgctgcgcggactcctgaccaacctgctgaaccccaaggccctgctgttctgttcggtgctgctgccgcagttcgtcagccccggggccggttcgctggccgtccagttcgccgcgctcggtacggtcctggttctggttggcctggccttcgactgcgcctatgcgctggccggtggccgcctgggccgctggctggcgtcccggccacgggcacagcgcctgcagcagtggggcttcggtgggttgttgatagggttcggggtaaggctggcgctgctgcgccagctctga

SEQ ID NO: 320827 - DNA, 972 bp, Pseudomonas aeruginosa
atggaaaccgttctgaccgcccgtgatctgacccgtcactacgaagtctcccgcggcctgttcaagggccacgcccaggtgcgcgcgctgaacggcgtatcgttcgaactggaagccggcaagaccctcgccgtggtcggcgagtccggctgcggcaagtcgaccctggcgcgcgccctgaccctgattgaggaacccacctccggctcgctgaaaatcgccgggcaggaggtcaagggcgccagcaaggaccagcgccggcagttgcgccgcgacgtgcagatggtcttccagaacccctacgcctcgctcaatccgcgacagaagatcggcgaccagttggccgagccgctgctgatcaacaccgcgctgtcgcgcgaggaacgccgcgaaaaggtccagcagatgatgcgccaggtcggcctgcggccggagcattaccagcgctacccgcacatgttctccggcggccagcgccagcgcatcgccctggcccgggcgatgatgctgcaacccaaggtgctggtggcggacgagccgacctcggccctcgacgtgtcgatccaggcccaggtactgaacctgttcatggacctgcagcagcagttccgcaccgcctacgtgttcatctcgcacaacctggcggtggtccgccacgtcgccgacgacgtcctggtgatgtacctcggccgaccggcggagatggggccggcggacaagctctacgagaacccgctgcatccctatacccgtgcgctgctctcggcgaccccggcgatccacccggacccgacgaagccgaagatccgcatccagggcgaactgccgaacccgctgaacccgccggagggttgcgccttccacaagcgctgcccctacgccaccgagcgctgccgcagcgaggtgcccgagctgcgcctgctcgaccagcgccaggtggcctgccaccacgccgagcaattcctcggctga

SEQ ID NO: 320828 - DNA, 975 bp, Pseudomonas aeruginosa
atgagcctcctcgatatcaagaacctcagcgtacgcttcggcgacaccaccgccgtgcccgtggtcgacggcctcgacctgagcgtcgacaagggcgaggtgctggccatcgtcggcgagtccggctccggcaagtcggtgaccatgatggccctgatgggcctgatcgacgcccccggctgggtatccgccgatcacctgcgcttcgacggccacgacatgctcaccctcaagggccgccagcgccggcgcatcgtcggcaaggacatggcgatggtcttccaggacccgatgaccgccctcaaccccagctacaccgtcggctaccagatcgaggaagtcctccgcctgcatctcggcctgcgcggcaaggccctgcgccagcgcgccctggaactgctcgaacgggtcgagatcccggccgccgccagccgtctcggcgcctacccgcaccagctctccggcggcatgagccagcgcgtggcgatcgccatggctatcgccgccgagcccaagctgctgatcgccgacgagccgaccaccgccctcgacgtgaccatccaggcgcagatcatggagctgctgctgaacctgcagcgcgaccaggacatggcgctgatcctgatcacccacgatctcgccgtggtcgccgagaccgcccagcgcgtctgcgtgatgtacgccggcgaagcggtggagatcggcggcgtgccggcgctgttcgaccgcccgacccatccctacaccgaggcgctgatcaaggcgatccccgagcactgtgccggcgaagcccgcctggccaccctgcccggcatcgttccggggcgctacgaccgcccgcgcggttgcctgctgtcgccacgctgcccctatgcccaggagcattgccgccaggagcggccggccctggaggcgcacgagcgcggcgcggtgcgctgcttctatccgttgaacctgctgaacgaggtggcctga

SEQ ID NO: 320829 - DNA, 912 bp, Pseudomonas aeruginosa
atgaacgccatgcacaacgctcccgccagcgacccgagcctggtctacccgtccccgctgaaggaattctggcaggccttcgcgcacaacaagggcgccctcggcggcctgctgttcatgctgctgatcgtgttctgcgcgctgttcgccccctgggtcgccccctacgatccaagcgagcagttccgggacttcctgctgaccccgccatcctggctggaaggcggccaggcgcgcttcctgctcggcaccgacgagctgggccgcgacctgctctcgcggctgatccacggcgcccgcctgtcgctgctgatcggcctgtcctcggtggtgatctcgctgatccccggcatcctcctcggcctgctcgccggcttctcgccgaaccgtgccgggccgctgatcatgcgcctgatggacatcatgctggcgctgccgtcgctgctgctggcggtggccatcgtggcgatcctcggcccgggcctgatcaacaccgtgatcgccatcgccatcgtctcgctgccggcctacgtacgcctgacccgcgccgcggtgatgaccgagctaaaccgcgactacgtcaccgcctcgcgcctcgccggcgccggcaccctgcgactgatgttcgtctgcgtgctgccgaactgcatggcgccgctgatcgtccaggccaccctgagcttctcttcggcgatcctcgacgccgccgccctcggcttcctcggcctcggcgtgcaaccgccgacccccgagtggggcaccatgctcgcctccgcccgcgactacatcgagcgcgcctggtgggtggtcagcctgcccggcctgaccatcctgctcagcgtactggcgatcaacctgatgggcgatggcctgcgcgacgccctcgatccgaaactgaagaacgcggcatga

SEQ ID NO: 320830 - DNA, 1011 bp, Pseudomonas aeruginosa
atgcttagtttcattgcacgacgattggggttgctgatccccaccttcttcggcgtgacgctgctcaccttcgcgctgatccgcctgattcccggcgacccggtggaagtgatgatgggcgaacgtcgcgtcgatccgcagatgcatgccgaggccctgcaccgcctgggcctggacaagccgttgtaccagcagtacctggactacgtgggcaacctggcacagggcaatctcggcgaatcgctgaccacccgcgaaggcgtctggcacgaattcctcaccctgttcccggcgaccctggaactgtccctggccgccatgctcttcgccggcaccttcggcctgctggccggggtgatcgccgccctgaaacgcggttcgctgttcgaccacggggtgatgacggtgtccctcgccggctattcgatgccgatcttctggtggggcctgatcctgatcatgctgttctccgtgtcgctgggctggacgccggtgtccggccgtctcgacctgctctacgacatcgagccgaagaccggcttcatgctgatcgacaccctgctttccgacgaacagggctcgttcctcgatgccgtgcgccacctgatcctgccggccatcgtgctgggcaccatcccgctggcggtgattgcccgcatgacccgctcggcgatgctcgaggtgttgcgcgaagactatgtgcgcaccgcccgcgccaagggcctgtcgccggcccgggtggtcttcgtgcacgccctgcgcaacgcgctgattccggtgctgacggtattcggcctgcaggtcggcacgctgctcgccggcgcggtgctgaccgaaaccatcttctcctggccgggcatcggcaagtggctgatcgacgccatcagccgtcgcgactacccggtggtgcagaacggcatcctgctggtcgccaccctggtcatcctggtcaatttcgtcgtggacatcctctacggcctggccaacccgcgcattcgccaccaacgctga

SEQ ID NO: 320831 - DNA, 1596 bp, Pseudomonas aeruginosa
atgctccacccgttgctccgacacctgcccctggccctggcgctatgcgccgccggcgcggcccaggcgaagaacctggtggtctgcaccgaggccagcccggaaggcttcgacatcgtccagtacaccggcgcggtgaccgccgacgcctccgcggaaaccgtgttcaaccgcctgctcgccttccgccccggcaccaccgaggtgatcccggggctggccgagcgctgggacgtcagcgccgacggactgagctataccttccacctgcgccccggcgtgaaattccataccaccgactacttcaagccgacccggagcctgaatgccgatgatgtgctgtggaccttccagcgcgccctcgatccgaagcatccctggcatgcctcggcgctgcgcggctacgcctacttcgacgcgatgggcatgggcgagctgatcaagtcggtggaaaaggtcgacgagctcaccgtgcgcttcgtcctcaaccgtcccgaagcgccgttcctgcgcgatatggcgatgcccttcgcgtccatctattccgccgagtacggcgaccagttgctcgccgccggcaagcagggccagctgaacaaccagccgatcggcaccgggccgttcgtcttcaagcgctacgccaaggacgcccaggtccgctatacggcgaacccggactactacgccggcaagccgccgatcgacaacctggtgttcgccattaccctcgatcccaacgtgcgcatgcagaaggtccgtgccggcgagtgccaggtctcgctgtacccgaaaccggaggacgtgccgcgcctgaagcaggacccgaacctggcggtggacgagatcgatgccctgctgaccacctacattgccatcaacacccagcacaagccgctcgacgacccgcgcgtgcgccaggcgatcaacctcgcgctggacaagaaggccatgctcgacgcggtgttcggccccggcgcggccagtccggcggtcggtccctatcccccgaccctgctcggctacaaccattcgatccaggactggccgcacgatcccgaacgcgccagggcgctgctcaaggaagccggcgcggaaaatctcaggatcaccctgttcattcgcaacggcacctcgcctaccatccccaaccccgccctggcggcacagatgctgcaggcagacctggccaaggccggcatccagctgaccatccgttccctggaatggggcgagctgctcaagcgttcgaaggccggcgagcacgacctgtcgctgcttggctgggccggcgacaacggcgacccggacaacttcctcagcccgaacctgagctgcgccgccgccgagtcgggtgaaaaccaggcgcgctggtgcgacaaggacttcgaggcgctgatgcgcaaggcccgcgaggtgagcgatccggccgagcgggcgaaactgtacgagcaggcccaggtggtattccacgaacaggccccatggataccgctggcctacccgaagctgttcaacgtccggcggaacacggtgcagggctacgtgatcaatccgttgagcaacaacaacttcgccaccacctcggtgaagccgtag

SEQ ID NO: 320832 - DNA, 1452 bp, Pseudomonas aeruginosa
atgagataccaacgagtgaccggcgcgacgctgggattggccttgatggcatcggccgcgccaggctgggcagcggacgagcaggcaaccccgccgaccccggacaatcccagctacgccgcccaggtgcagagcatccccagcgtggagaaaccgatcaagggccaggccggcgccagcgggctgttcgaggggcagagcctgaccctgaccacccgcaacttctactcgcgggaaaacatgaaggacagcttcaccttccgcattcccaaggccggcggcggctcccagcgcatccaccagcgcaacgcctgggtccagggcacggtgctcaagtacagctcgggctacacccagggcagcatcggcttcggcttcgacgtcgcagccttcaacgagatcgccctggagcgcggcaagggccgcatcggcggcggcggcaaccggaccctggcgaacagcgatggcgaggcgatcggcgagtggtccaagctgggcgtcgccaacatccgcctgcgcgcctcgaataccgaattcaaggccggtcgcttcctggtcaacactccagtgttcagctatatcgacaaccgtgccctgccctccagcttcaccggcttcgccgtgaccagcgaggagctggacaacctcagcctgcaggccggcagcttccgcaaggtcagcccgcggaccggttccggcgacgaggacatgaccaccgagtacggcacccgccaggtcaagggcgaccgcctgaactacctgggcggcaactacaagccgctcgacgggctggaaatctccctctatggctcgcatttccaggacgtctggaaccagtactacctgggcgtgacccacgacatcggcgacctcgagaacggcatcgccctgcgcaccgccttcaacggctaccacaccggcgacaccggcgcgcgcgaggccggctacatcgacaacgacacctggagcctggccttcactctcggccatcgcgcccacgccctgaccctggcctaccagcaggtcgacggcaacgaatacttcgactacgtgcacgagacctcggcgatcttcctggccaactcgatgctggccgactacaacagccccaacgagaagtccgcgcagatccgctacgagaccgactggagctactacggggtccccggcctgagcaccggcgtgtggtacgtgaagggctgggacatcgacggcacccactacgacggcgatcgcaacggtgcctacggcaactacgccgaggtgcgcgcccaggacggcgagaagcaccacgagctgggcctgatggcggcctacaaggtgcagaacgggccgatcaaggacagcaccttcaagctcacctacatgatgcacaaggccagccagaaccaggtcgacggcagcgtcaacgaactgcgcctggtcagcaccttccccttcaacctgctgtaa

SEQ ID NO: 320833 - DNA, 1602 bp, Pseudomonas aeruginosa
atgcgtaagatccttccccttcgggcctggctggcagccggtctgatcctcggctccccgttctcccacgccgccagcaacctggtgttctgctcggagggcagcccggccggcttcgatcccgcccagtacaccaccggcaccgactacgacgcgacctcggtcaccctgttcaaccgcctcgtccagttcgagcgcggcggcacccgggcgatcccggccctggcggaaagctgggacatcggcgacgacggcaagacctacaccttccacctgcgcaagggtgtgaagttccacagcaccgactacttcaagccgacccgcgaattcaacgccgacgatgtgctgttcaccttccagcgcatgctcgacaagaatcatccgttccgcaaggcctaccccaccgagtttccctacttcaccgacatgggcctggacaagaacatcgccagggtcgagaagctcgacgagcacagggtgaagttcaccctcaacgaggtcgacgccgccttcatccagaacctggcgatggacgtcgcctcgatccagtccgccgagtacgccgggcagttgctcgaggccggcaagccacagcagatcaaccagaagccgatcggcaccgggcctttcatcctgagccgctaccagaaggatgcgcagatccgcttcaagggcaacaaggactactggaaacccgaagacgtgaagatcgacaacctgatcttctcgatcaacaccgacgccgcggtgcgcgcgcagaagctcaaggccggcgagtgccagatcaccctcaacccacgccccgccgacctcgacgcgctgaagaaggacccgaacctgaaggtgccctcgcagccaggcttcaacctcggctacatcgcctacaacgtcacccacaagccgttcgaccagctggaagtacgccaggcgctggacatggcggtgaacaagcaggccatcatcgacgccgtctaccagggtgccgggcaactggcggtgaacggcatgccgccgacccagtggtcctatgacgaaaccatcaaggacgccccgttcgatccggccaaggcccgggaactgctgaagaaggccggcgtcaccgagggcaccgagatcaccctgtgggcgatgccggtgcagcgtccctacaaccccaacgccaagctgatggcggagatgatccaggccgactgggcgaagatcggcatcaaggccaggatcgtcagctacgaatggggcgagtacatcaagcgcgcccatgccggcgagcatgacgccatgctgttcggctggaccggcgacaacggcgatccggacaactggctggcgaccctctacggctgcgactcgatcaacggcaacaacgtatcgaaatggtgcgacgcggcctacgacaagctggtcaaggctgccaagcgggtctccgaccaggacaagcgcagcgagctgtacaagcaggcccagcacatcctcaaggagcaggtgccgatcaccccgatcgcccactccaccgtgtaccagccgatgaacaagtcggtgcatgacttcaagatcagccccttctcgcggaacgccttctatggcgtagccaaccagccctga

SEQ ID NO: 320834 - DNA, 564 bp, Pseudomonas aeruginosa
atgaccgtagaccgcatcggcgaacgcctgcgtcgctatcgccgcgccgccaagaagaccctgcaccaagtcgccagcgaatccggtctcaccgcgagcttcctctcccaggcggagcgcaacctcaccggtgtatcgatctcttccctggccaacatcgccaagtcgctgaatatcccgctcaatgccctgttcgaccaaccggcacaaccccagcccgactcccacgaaggcgagcgggtacgctacaccatcgagggccagccgctggcctacgaacgcctgtccagctccttccccggcaacctgatcaatgcggtcaagatgaacatgccggtgggctaccagtcggagctgatctcccatgagggcgccgagttctcctacgtcctgtccgggcagatcgtctacaccatcgaggggcgccagtaccccctcggcgccggcgactcggtgcacttcgacgcgaccaagacccattgcctggccaacgtcggcagcgatgtggcggaagtcctgaccatcaccaccatgggcctgttcgacgaccatccgacgccctga

SEQ ID NO: 320835 - DNA, 1218 bp, Pseudomonas aeruginosa
atgaccgtgggtgttggcgggagtacccctgcgcaggcgctggagcgtctgcggaacatgatggacggcgcgcagccgatcggcctggcgtcttaccgtgcgcgaatcgccgcggcccaggcgtggatgggcgagcatggcatcgccgcggcgtacctgcatgcaggcagcaacctgcgttacttcagcggcgtgcaatggcaccccagtgaacgcctggtgggtgctctactgcccgccgagggcgccctcgaataccttgcgccggccttcgaggaaggtacggtgcgcgacttccaggtggtcgatggcgccatccacacctgggaggaacaccaggatccctatcgcctgctgctcgatcgcctggaggcgctcggcgtgggcgagcgcagcacggtcgcactgtgtccgagcctgccgttcggcatgttcgagcgcttgcgccaacaggcgccgggcaggaacttcgtcagcgccgcgccgctgatcgaccagggacggatgcgcaagtcggccgaggagctggcgctgatgcagcgggccaaggacatgaccctggaagtgcagaaggccgcggcgagcattctccgcgaaggcatcagcaccaccgaagtcgccgagttcatccaccaggcgcaccgcaaggtgggcgcgcccggttcgaccttctgcatcgtcctgttcggtgccgccagtgccttcccgcatggggtgaagcatgcgcaggtgctgaaggatggcgacatggtgctgatcgataccggctgccaggtccacggctaccagtcggatatcacccgcagctatgtgttcggcacgcctagcgcacgccagcgcgaattctgggggatggagcgcgacgcccaactggcggccttcgaggccgcgcgtctgggccagccctgcgaggcggtggacgccgccgcgcggcgttcgctggaggccaacggcctggggccggactaccgcctgcctggcctgccgcaccgcaccgggcatggcatcggcatggacgtccacgaaggcccgtacctggtgcgtggcgatcgcacgccgctggatgtcggcatgtgcttcagcaacgaaccgatgatctgcgtgcccggcgagttcggcattcgcctggaggatcacttctacatgacgaaggaaggaccgcgctggttcacccaaccgagcccgtccatcgacgatcccttcggcctcggcggctga

SEQ ID NO: 320836 - DNA, 1599 bp, Pseudomonas aeruginosa
atgcgaccacgctctgccctgcgctacagcctgctgctgctcgccttcgccgccagcgccgccatccaggcccagccgaagaccctggcggtgtgcaccgaagcggcgccggaagggttcgatccggcccgctatacctccggctacaccttcgacgcctcagcccatccgctgtacaacgcgctggccgcgttcgctccgggcagcgccacggtgatcccggccctggcggaaagctgggacgtctccgctgacggcctcgtctacaccttccgcctgcgccagggcgtgaaattccacagcaccgactacttcaagccaacccgcgaattcgacgccgacgacgtgctgttcagcttccagcgcatgctcgatccgcagcaccccgcccacgacctttcgcccagcggctacccctacgccgacgccatgcaactgcgcgacatcatcgagcgcatcgagaagatcgacgaacatcaggtgcgcttcgtcctcaagcacccggaggcgccgttcctcgccgacctggccatgccgttcggctcgatcctctccgccgaatatgccggccagttgatcgccaggggcaagggcgacgaactcaacagcaagccgatcggcaccggcccgttcgtcttcacccgctaccgcaaggatgcccaggtgcgctacgcagccaaccccgactactggaagggcaagccggccatcgaccacctggtgctggcgatcaccctcgaccccaacgtgcgcgtgcagcgcctgcgccgcaacgaatgccagatcgccctgacgcccaagcccgaagacgtcgccgcgttgcgccaggacccgcaactgacggtgctggaagaagcggcgatgatcacctcccacgccgcgatcaacacccggcacgaaccgttcgacgacccgcgcgtgcgccgggcgatcgccatgggcttcaataagccgtcctacctgaagatcgtcttcggcgatcaggcccgtccggccatcggcccctacccgccgatgctgctcggctacgacgacagcatccgcgactggccctacgaccccgaacgggccaaggccctgttgaaggaagccggcgtcaccccggacacacccctgaacctctacatcagcaccggcagcggccccggcggcaacccggcgcgagtggcgcaactgatccagtccgacctggccgccatcggcatccgggtgaacatccgccagttcgagtggggcgagatggtcaagcgcaccaaggccggcgaacacgacatgatgctctacagctggatcggcgataacggcgacccggacaacttcctcacccacaacctcggctgcgcctcggtggagtccggggaaaatcgcgcgcgctggtgcgacaagggcttcgacgaagccatccgcaaggcgcgcatgagcaacgacgagagccaacgggtagcgctgtacaaggaagcgcagcggatcttccacgagcagatgccctggttgccgctggcgcatcctttgatgttcgacgcgcaacgcaagaacgtcagcggctaccgcatgagcccgatgtcggcgcgggacttttcgcgggtgaagctggactga

SEQ ID NO: 320837 - DNA, 1614 bp, Pseudomonas aeruginosa
atgcgtagaaacgccgtcatccgctccgcgatcattccctcgctgctcggcgcagcgctggtcgccgccgttccccaggccttcgccagcaacctgatcttctgctcggaaggcagcccggccggcttcgatcccgcccagtacaccaccggtaccgatttcgacgccgcggcggaaaccgtcttcaaccgcctgacccagttcgagcgcggcggcaccaaggtccttcccggcctcgcggaaagctgggacgtcagcgacgacggcaagacctataccttccacctgcgcaagggcgtgaagttccacagtaccgactacttcaagccgacccgcgaattcaatgccgacgacgtgctgttcaccttcgaacgcatgctcgacaaggatcatccgttccgcaaggcctaccccaccgagtttccctacttcaccgacatgggcctggacaagaacatcgccagggtcgagaagctcgacgagcatacggtgaagttcaccctcaacgaggtcgacgcggccttcatccagaacctggcgatgcccttcccatcgatccagtccgccgaatacgccgcgcaactgctcaagcagggcaaggccagcgacatcaaccagaagccgatcggcaccggcccgttcgtgttcagccgctaccagaaggatgcgcagatccgcttcaagggcaacaaggactactggaagccggacgaggtgaaggtcgacaacctgatcttcgccatcaacaccgacgcctcggtgcgcgcgcagaagctcaaggccggcgagtgccagatcaccctcaacccgcgccccgccgacctcgacgcgctgaagaaggacccgaacctgaacctgccgtcgcaggccggcttcaacctcggctacatcgcctacaacgtcacccacaagccgttcgacaagctggaagtacgccaggcgctggacatggcggtgaacaagaaggccatcatcgacgccgtctaccagggcgccggccagttggcgagcaacggcatgccaccgacccagtggtcctacgacgagaccatcaaggacgcgccctacgatccggccaaggccagggagctgctgaagaaggccggcgtcgccgagggcaccgagatcaccctgtgggccatgccggtacaacgcccctacaaccccaacgccaagctgatggcggaaatgctgcagaacgattgggcgaagatcggtatcaaggcgaagatcgtcacctacgaatggggcgaatacatcaagcgcgccaagggcggcgagcatgacgccatgctgatcggctggagcggcgacaacggcgacccggacaactggctcggcaccctctacggctgcgacgcggtggacggcaacaacttctccaaatggtgcgacgccggctacgacaagctggtcaaggatgccaagcgcaccaccgaccaaggcaagcgcaccgagctgtacaagcaggcccagcacatcctcaaggaacaggtgccgatcaccccgatcgcccactccaccgtgtaccagccgatgcgcaagacggtacacgacttcaggatcagtcccttcggcctgaactcgttctacgaggtcagcgtcggcaagtag

SEQ ID NO: 320838 - DNA, 711 bp, Pseudomonas aeruginosa
atgtctgcgatttcccgcctggccgccgccgtcaccctctgcgccgccagcctctcggccgtcgccgaggaagcgccgcgctacaaccaggtctcgctgcacgccgaagtcagccagcaggtggcccacgacctgatgcaggtcaccctctacagcgaaaaccagggcagcgatccggccaagctcgccgccgagaccaccagcgtcctcaacgccgccgtcgccgacgcgcgcaaggtcaagggcgtgaccatcagcctgggcagtcgcaacagctatccggtctacgacgacaagggccagaagatcaccggctggcgcgagcgcgccgagctgcgcctggaaagctccgacttcgccgccctcggccagctttccgccgacctgctgggcaagctgaagatgggcggcatggacttcagcatcgccgatgcgacccgcaagaagaacgaggaccaattgatgaaaggcgccgtggacgcgttcaaggagcgcgcccagttgctcaccgaggcgctcggcggcaagggctacaagctggtcagcctgagcgtgaacagcgccggcgcaccgcgcccgtacccggtgatgcggatggcggcgatgaaggccgacgccagcttcggtggcgcccaggcaccggagatcgaggccgggaccagccaggtcacggtcaacgccgacggtgtgatcgaggtgcagatgccctga

SEQ ID NO: 320839 - DNA, 1269 bp, Pseudomonas aeruginosa
atgcgcgcaccggttttcctgctctccgccagtcgccagaaccttggccgtctgctcctcatccgtattctcgtgctggccgcgcaggccggctcggtgggtttcgcctggctctccgacctgttgccgctgccgtggctggcgctcggcctgacccttggcctgtccgcctgcctgatcctgttcaccgcgctgcgcctgcgcgcgccgtggccggtgaccgaccaggagtacgcggtacaactggcctgcgacctgatcatccacagcaccttgctgtattactcgggcggctcgaccaaccccttcgtttcctattacctggtaccgctgaccatcgccgctgcgaccctgccctggatctactccatggtgctctccggcctggccctgaccggctacaccctgctgctgatctggtaccacccgctgcacctgcaggcggttcagcacgaggcgatgctgatcaacctgcacctgttcggcatgtggctgaacttcgccctgtcggcggccttcatcaccttcttcgtggtgaagatgtccgaggcgctgcgctggcaggcgcacatgcaggccgagcggcgcgaggaaagcatgcgcgaccagcagttgctcgcggtggccacccaggcggccggtgccgcgcacgaactgggtacgccgctggcgaccatgagcgtgctgctcaacgagctgcgccaggagcgcccgcaggacccgaccctgcaggaagacctggcattgctccaggaacaggtcaagcagtgcaagcacaccctccagcaactggtacgggcggccgaggccgaccgtcgtcaggcgatcgaggagcaaagcgccgcggaatggctggaatcggtgctgcgccgctggcacctgatgcgtccggaggcttcctaccgctaccagtgcctgggcctcggctccgcgccgcgcctgaccccgccgaccgacctcagccaggctctgctgaacctgctgaacaatgcggcggacgcctgtcccgacgacctcgacatccgcctggactgggacagcagcagtatctgcctgagtatccgcgaccacggcgtcggggtgcccctggcgatcgccgaacagatcggcaaaccgttcttcaccaccaagggcaagggcttcggcctcggcctgtttctcagtcaggccagcgtgacccgcgctggtggaacggtgaagttgtataaccacgaagatggcggcactctgaccgaactgcgcttgccgcgcagctacggaatggcttga

SEQ ID NO: 320840 - DNA, 561 bp, Pseudomonas aeruginosa
atgtctgaagagctgctcttcgaaggggaagaacaaccccatctcctgctggtggacgacgatcccacctttacccgggtcctggcgcgggccatgagccgtcgcggcctgcgggtcagcaccgccggctccgccgaggaaggcttggcgctggcccagcaggacacgccggactatgccgtgctcgacctgaagatggaaggcgactccggcctggtgctgctgccgaagctgctggagctgcacgcggacatgcgggtggtgatcctcaccggctattccagcatcgccaccgcggtggaggcgatcaagcgcggcgcctgcaactacctgtgcaagccggcggatgccgatgacgtgttggccgcgctgctctccgagcacgccgacctggacaccctggtgccggaaaacccgatgtcggtggatcgcctgcaatgggagcacatccagcgcgtgctcgccgagcacgagggcaacatctccgccaccgcccgcgccctgggcatgcatcgacggaccttgcagcgcaagctgcagaagcggccggtacggcgctga

SEQ ID NO: 320841 - DNA, 810 bp, Pseudomonas aeruginosa
atgcgtatcttcggttcgagtgccggctgcctgtcggtgctgttcggactggccttcgggctgcctgcactagccgagccttcggtggacctggatggtccgacggcaggctggcgctattccggcctgctcgagcagcccgatgccccgcgtgtcgcctatccgactccgcccatcgatcgcggcggccagcgcggccgcagcctgatcgaaggacacctgcgcgaactggtcggcaccgagcgcgcccagcgcctggtggtcaacggcaatcctctccctctctataccgacggcgccgggcgcttcgtccgcccctatgcgttcggccacggctccaacggcgtccaggtcggcagcgccgacggcaagatcctcaagcgcgtacagttctacgaggccaatcgctcccaactgccgccgcgcgtgcgcgtggtgctgggttgggacgatccgaaggccgagctcgacctgcatatcgtcacccccgatggccagcacgcctactgggcgcatccgcgcctgagcaacagcggcggcctcgatccggacggcgtcgacgggcccggcccggagatgttcaccatgggcgcgccgctgcacggcacctacctgatctacgtgaactactggggcaacctcaacaaccagggctacaacttccaggccggcagcaacgtacaggacgtgatcaccgcgcaggtcaacctggtgttcaacgaaaacagcgtcgacgagaagcacgagaccttcgtcgtgcccctgcgcaccatcggcgacctggtgctggtcaagacctttacctactga

SEQ ID NO: 320842 - DNA, 1770 bp, Pseudomonas aeruginosa
atgagcgagaacaacacccccagccctgccaacggaacccctgcgcccgccgctgcgcgcacccgaagcgccctgtggccggtgctggggatcgtcgccgcgctggccgccggcggtgtgctggcctggcagatgggctggctggagcggctcggcggagggcgcccggccgaagaggacctcggccagccgatcggcgcccaggcacccgcggacgccgacgcgccgcgtgcctaccgtgacctgcgcaagcccgacgcgctgatcgagagcgtgtcgctgagccgcctgccgaaggaaatcctcgaggtgccgttgctgcgcgataccctgaccgaggacttcgtcttctattacgagaacaatggcgaccgcctcggcctgaccggtacgttgcggcggatcatctacgagcacgacctgaccctgaaggacagcctggtcgaggaactgctcgaccaaccggcccaggtcgccctctggcgcggcgccgacggccgcctgcgcgacttcgtggtggtgctcaagcgcggcggcctggcgcgggtgctcgagccgctggcccatatcgccgccgacgaccagcaattgcgcaaggtcggcgagttggcgggaacctcggtctatcgcctgcgctacggcaacgacaaggcgatgctgttcctgtccaagggcgaccggctgttgttgctgtcgaacccgcggatgctcttcgacgatggtggcgaaagcgacgacagcccgctgaacgctccggccagcgaagacctggaggcactgctcgacggcgacgaactgttccccgagcgcttcggcctgccgggccgcggcgagctgcgccagcgcatcaccctcaatgccagcgtcctggccatgggctaccagcgcttcatcccgagcttcgccggggtgcgcttcgagaagggcgagcagggctggagcagctacctggcgctgaacgaggtggaacgccagccgccgctggacttcgccccggtctggcaggccatgccgatgggcgccagcgcctgcgtggcgctgccggtcacccctggcctgtacggggtgatgctggagcgtctgggggccgagcagaagatggcccaggccttctccgagcatctcagcggcgctgccggtctctgctggtacgccagttcgcggctgcattcgccgctgctggtgggccagttgagcgcgccggccagtgccgaactcgacgacgagctgggcaagctgttcggtcgcgtgatcggcgcgaaggaagccaaggtcgagggtggcagcttcccggtggaagaccgggtggatggccagacccgccgctggacccgccaggtcagctcgaacttcggcgcctatccggccagccaggcggacaacccggacagcatcagcggccgcgcgttcttccgcatcggcatggcgcgccatggccagaccctgctgttctccctcgacgaccagttgctcggcaaggccctggacaccctcgacaaacgctatccgccgctcgccgaggtgttgccgaaggatgcgctggtacctgcctacctggcgccgcagccgctctccgaactgctgcaacgggaaaccctcgacagcctgccgcaggacatggagccggtattccgcaatgccgccgacacctacctgatgccgcgcctgaaaaccctcgccggcaagggcagctacgccctcgggctgcctgccggaagccaggccaacgcaccgtggcaatggctgccgctggaatggcggtcgctgtga

SEQ ID NO: 320843 - DNA, 651 bp, Pseudomonas aeruginosa
atggcggtcgctgtgagacgcctgactgccttcggcctggcgctgctcctgctggccagcggcgttgcccgcggcgagcccgcggtaacgctcgacccgcagcaatcgcaggtattccgcgcctggttcgtgcgcatcgcccaggaacagttgcgccaagggccgagtccgcgctggcaccagcaggactgcgccggcctggtgcgcttcgccgccaatgaggcgctgaaagtccacgatggcaagtggctgcgcgccaacggcctgtccaaccgctacctgcccccggagctggcgctcagtcccgagcaacggcgcctggcgcagaactggcagcagggtggcggccaggtcgggccctacgtgaatgcgatcaagctggtgcagttcaacagccggctggtcggtcgcgacctcaaccaggcgcgccccggcgacctgatgttctacgaccagggcgacgaccagcacctgatgatctggatgggccgctccatcgcctatcacaccggcagcagcaccccgaccgataacggcatgcgctcggtcagcctgcaacaactcatgacatggaaggacacccgatggatccccgacgaatccaatcccaactttatcggcatctatcggctggctttcctctctcaatga

SEQ ID NO: 320844 - DNA, 4581 bp, Pseudomonas aeruginosa
atgaatcgcgtcccagtgaagaccacagcaatgagcaacctgcgccgtttcagccgtagcctggcggtcgccgccctggtcctgctgccgttcgccgccgtccaggcggaagacacggtggaaccgagcggctacacgccgatggccggcgaatccttcttcctgctcgccgacagcagcttcgccaccgacgaggaagcgcgggtccgtctcgaagcgcccggccgcgactaccggcgctaccgcatggagccctatggcggggtcgacgtgcgcctgtaccggatcgaacagccgctggagttcctcaagcggcagaagaacctgcaccgggtcctggccgagggacagttcaagggcgaaggcctgtcgaacaccctggcctatctctgggacaactggtatcgcaagtcgcgccgggtgatgcagcgcgccttctcctacgagtcgcggcaacaggtcaccgaggcggtgcccgagctgaagatgggcaacgccatgaccgcgccgacgccctacgacgcgcagccgcaatacgcgccgattcccggcctgccgctggtcagccagttccgctatccgctgtgggacgccaagcccatcgagccgccgcaggacgtcaagctggccggttcctccagcgagttcatcaacgtcgtgccgggcaatgtctacatcccgctgggcaagctgaagccgggcctgtacctggtcgaggcgcttgtcggcaagtaccgcgccaccaccgtggtgttcgtctccaacagcgtggcggtgagcaaggtcgccggcgacgagctgctggtctggaccgcacgcaagcacgaaggcaccccggtgcccgacaccaaggtgctgtggaccgacggcctgggcgtgatgagcagcggcaataccgacgccgacggcctgctgcggctcaagcacgccagtccggagcgctcctacgtgatcggcgaggaccgcgagggcggggtcttcgtctccgagaacttctattacgacagcgagatctacgacaccaagatctacgccttcaccgaccgcccgctgtaccggccgggcgactgggtctcgttgaagatggtcggccgcgagttcaaggacgcccggcaatcccaggccgccgccagcgcgccggtgcgcctgagcgtgatcgacgccagcggcacggtattgcaaagcctggacctccgcttcgacgcgaagagcggcgccaatggccgcttccaactgccggagaacgccgtcgccggcggctacgagttgcgcttcgactaccgcgggcagacctacagcagcgccttccgcgtcgccgaatacatcaagccgcacttcgaagtcgccctcgacctggccaagccggacttcaagaccgccgagccggtgaagggcgagatcgtcctgctctatccggacggcaagccggtggccaacgcgcgcctgcaactgagcctgcgcgcccagcagttgtcgatggtggacaacgaactgcagtatctcggccagttcccggtggaactgagcagcaccgaactgaccacagacggcaagggccgcgccgccatcgaattgccgccggccgagaaacccagtcgctacatgctgaccatcttcgccagcgacggcgccgcctaccgggtcaagaccagcaaggagatcctcatcgagcgcggcgccgcgcgctaccgcctgagcgcgccgcagcgcttcagcgccgccggcgagaaggtcgagttcagctatgccagcgaacagccgaccccgctcaagccgagcagctaccagtggatccgcctggaggaccgcgccaccgatagcggtccggtcgccgacggccgcttcgcgctgaccttcgagcgccccggtacctattccgtggagctgcgcgacgacaagggccagctccttggcgccaccggccactcggtgagcggcgagggcgtgaagtcggtgccgggcaccgtcgaggtggtgttcgacaagcccgagtaccgcaccggcgaggaagcctccgcactgatcaccttccccgagccggtggaggatgcgctgttgtccctggagcgcgacaaggtcgaggccaccgccctgctgtccaagggcgccgactggctgcgcctggaaaagctcaatccgacccagtaccgcgtgtggatcccggtgcgcgaggagttctcgccgaacctgaccttctcggtgctctacaccaagggcggcgactacagcttccagaacgccgggatcaaggtcggcatgccccaggtagagatcgacatcgccaccgacaaggagcgctacgaaccgggcgagacggtgaccgtgaccctggccacgcgcttcgccggcaaaccggtttccagccacctgaccgtcagcgtggtggatgagatggtctatgccctgcaggcggagatcgcccccggcatcgaccagttcttctaccatccgcggcgcaacaacgtgcgcaccagcgccagcctggccttcatcagctacgacgtggcgttgcccggcagcaccagcgcacccggacgggcgaaccgcagcgagcgcggcgtcaaggtactggagcggccgcgccgcgaggacgtcgacaccgccgcctggcagccggagctggtcaccgacgcccagggcaaggccagcttcagcttccgcatgcccgactcgctgacccgctggcggatcaccgcgcgggccatcgacgacaacggccaggtcggccagaagaagcagttccttcgctcggagaagccgctgtacctgaagtggagcgggccgactcgcttccgccagggtgaccagcccgacctcggcctgttcgtcttcaaccagggcgaacagccggtcaaggccgagctgctcagcgggccgcctggcagccagcgcagccagaccctggagctggccaagggagtcaactacattccgctggcgcaacagccgctcagcgatggcgactggagcgccgagctgcgccaggacgggcaggtccgcgaccgcctggcggtgcgcttcaacctgctggccgacggctggcaggtggagcaggtgcagaacctcagcctggcggcggcgagcaacccgctgcaactgccggcggacgcgcgcgacgtacgcctgcgcctggccgatggcccggccgcggcctacctgggcaatctcgatgatctgctggagtatccctacggcggcgtcgagcagaccgccagccaactgctgccgctgagcatcgcctatccggcgctggccggcggcgagccgcggattcgcgaccgcctgcgcctgattatgcagaacagtcgcctgcgcctggtgcagatggctggcccggacgcctggttcgcctggtggggcggcgacgtcgatggcgacgctttcctcaccgcctacgcctactacgccgattggtacgccagccgcgcactggagatccaactgccggccgaacactggcagcgcatcctcgagccctacgccaagcaggcgacgcagaccccgctgctgcagcgcgcgctgatcctggctttcgcccgcgatatgcagttgccggtgaacaccctgctcggcggcctgctcaacgatctggccaacgccggcgaagggcaggcgcgcgcggagccgctggaggccgacgacggcctggtgctgggcgacccggactcggccgtcggcctggccgcggcgcgagtgctggcggtggacctggcacggcaactgcgggttgcggtgcccgcgccgctggccgcccaggccgagacggcgacgcagcgcctgcgtgaggccggcttgccgttcaccgatgccttgctggcctctcgctcggccgtggatggccagcaggccagcgctctgctgcaacgcctggcgccggcgcaatcgaccctggaacgcgccctggccctgacctggctgcagggcgccctggcccaggcgccgcagggcaagctgccgcagccgccgaaggactggcaggcgcagcgcggtgctaccggcgaaacctactggcaatggcgcggccgcggcattccgagctgggtcgacctggacgaggcgccggcccggccgttgccggttgcgctcagctaccgcagcgcccaggcgccgagcgggcaactgccggtgcagatcagccgtcgcctgctgcgcctggtgcccggcgagggggcgttcgagttcaaggtcgaggaggtcggcgacaagccgctttccagcgacgaactgtatctcgacgaagtgaccctgaccgttccggaagacaccgctctacgctacggcatgctggaactgccgctgccgcccggtgcggatgtcgagcgcaccacctggggcatcaagatcagcggcctggccggcgacgaggcgaccaccctggagcgcgcgcgcaacgaaccgggcgagctgttctacggagtgccggtggacagcctgagtggcgagcagcgtttccgtcacctggtgcgtttctcccagaaaggcagcttcaacctgccaccggcccgctacctgcgtctctacgcgccggaacagcaggccctggaagccaagccggcgctggccaaggtcaaggtcgagtga

SEQ ID NO: 320845 - DNA, 1611 bp, Pseudomonas aeruginosa
gtgattgcgttgcgcgcctggctggtcctgctgtgcgccgtgccgttgctgcttcgcgcagcggaggcgccggtccagctggcctggcgcacgacccagggctacgaactggtgagcctggatcgccagcgggtgctcgagcgccggccgttgccggccgtcttcgcctggctgagcgacaccggccaggccgagccgccctatacctgccaggggcgcagccgcgaggaggtctactgctgcgagaatggccagacgatcggtcgtgaccgcgccctggtgcgctcctgcgggctgtatttcgagccgcagcgcctcgccttgcggccggaggcctggcgcggctactggcaggcgcgccaggcaccggcctggttgctcgatctggaacggctgcaaccgcagacgcgggtgccggttaaggagcttctggagcagttgcagcaactgccggcccagggcgaggcgcggcgggtactgctcgatgtggcgttgcaggccggcgacggccatgccgtggccagccttggcggccgcctgcgggtgaagacctggagctggctcgacgaccatgacccgcaggcgcgccagggcggtttcgccggctggctggtcgatggaacgccgctctggctcggcggcccgggaaccagcaaggtgatcctggaccgctacgccgaggtgctcgggcgcttcctgccgagtccgtggccggccgatccgggccgttgcgtggaagtgaacctgttcagccgctatccgctgcgctcggtcagcgatccctccggccacccggccgccgaaggcctgctgcatggtccgcagcaagtgctcttcgccaacggcaatcgactggacatcgccagcgccggcgacctcttcctgcaacgggtggatggcgtgccgcgcctggtcgcgcgggtttcgcgcgaagagtacgtggcgcgggtgctggagcgcgaagcctcggcgcagccgaaggaagccgctcgcgcgctggcggtgaccattcgcacctatctattgcaaaacgccgcgccgcgcggcgaatgcctggccatcgatgacagcagccagcgccagcgcgtggcgccgcgcccggccagcgcgccgacgcggcggatcgctgcctggagcgccgacctggtgctggccggggcgaccgtcaactatcactccgaccagcctggtccggcgcgcctgtcctggaagcacgcggtggagcaagccgggcagggactgggctacgacagcatcctcgcccaggctttcccgcgcagcagcctgagccgctgggacaacccggtggccgcctgccagccgttgccggctgccgaagactggctgcgcaagcagcgccggcagtggcgcgagcgtctcgaccgagagcccggctacgaggagattccgagtttttccgtgtgccgcctggcttccgggcggccctatgtcgatcgcgagcgcgaacgcatcttcgtccgcggcctgtattccctacaggaacgcttggacctcacccacgaatacctgcacctggccttccgcgcccatcccagcggccaggacgaaaactatgtcgaaagcctggcccggcgcctgctactggaatga

SEQ ID NO: 320846 - DNA, 834 bp, Pseudomonas aeruginosa
atgtcgaaagcctggcccggcgcctgctactggaatgactccatgaaccgaatgtcccttgccgccctgctcagttgccttcccctcgtcgcctgggcggacaaccccgtgaaactggatacgccggtctccggctggcgtgccggcgacggttccgccgccaattaccggcaggtggtgaactacccggcgtcctcggtcaacgtcgccgccgaccaggcgaccaccgcgcgcattcgcggcgcgatcgagagccagcccaaggaccgcccggcgacgctggtggtgaacggtgtgagcatgccactgaaggtggacgccgatggcagcttcgaccgcccgttcgccttcccgtccggcagcaacagcgtcgaggtgcgcaacgccgccgggcagtcgcgacgggtccagttctatcacggtggcggcggcggggaagtgccggccaagctgcgcgtgctgctgtcctgggacagcgacaacaccgacctcgacctgcacctggtgaccccggacggcgaccatgtctggtatggcaatcgttcgctggccaacggcgcgaccctggatgtcgacgtcaccaccggctacggcccggaaatcatcgccacgccgacgccgcagaaggggccctacctggtctacgtcaactacttcggcggtggctacggcagcagcgaggatggcgccgaacaggccgcccaggacctgaccacggcgcgcatcaccctggtcaccgaagagggcacgccgaacgagaaacaggaaaccttcctggtgccgatgcgcaagcctggcgagctgacgctggtgaagcgcttcagttatccgtag

SEQ ID NO: 320847 - DNA, 387 bp, Pseudomonas aeruginosa
atgagcgaacaaggcaagaccggcctggagatccgacgtgaagtcatgggcgacgccttcgtcgagcgcgccatgggcaacgccaccgccttcacccagccattgcaggacttcgtcaacgagcatgcctggggctcggtctgggcccgcgaggcgctgccacgcaagacccgcagcctgattaccctggccgccctgaccgccctgaaatgcccgcaggaactcaaggggcacgtgcgcggtgcgctgaacaacggctgcacggtggaggaaatccgcgaggcactgctgcactgcgcggtctatgccggggtgccggcggcgatcgatgcgttccgtgcggcgcaggaagcgatcgatacctggcagggcgaacagcccgcctga

SEQ ID NO: 320848 - DNA, 378 bp, Pseudomonas aeruginosa
atgcccaccccatccgccgccgcgcgcctcgccctcgccgtcctgcccctgttcctcgccggctgctccagcctcgccggcagcggttccgcggataccggcgaagcctcctactatggcagccgccacgcaggcctacgtaccgccagcggcgagcgctacaaccccaacgcaatgaccgctgcccaccgcacgttgccgttcggtgcccgcgtgcgggtaaccaacctcgacaaccgccgcagcgtggtggtgcggatcaacgatcgcgggccgttccgccgcggacggatcatcgatgtatcgcgcaaggccgccgaaggcctgggtatgatccgcagcggcgtggcgccggttcggatagagtcgctggattga

SEQ ID NO: 320849 - DNA, 1446 bp, Pseudomonas aeruginosa
atgcaatgggaaaccgtgatcgggctggaaatccacgcacagctcgccacccaatcgaagatcttctccggcagctcgaccgccttcggcgccgcgccgaatacccaagccagcctggtcgacctggccatgccgggcaccctgccggtgctcaacgaggaggccgtacgcatggcctgcctgttcggcctggcgatcgacgcacggatcgaccggcagaacgtgttcgcccgcaagaactacttctaccccgacctgccgaagggctaccagaccagccagatggaccatcccatcgtcggcaagggccatctcgacatcaccctggaagacggcaccaccaagcgcatcggcatcacccgcgcgcacctggaggaggacgccggcaagagcctgcacgaagacttccagggcatgagcggcatcgacctgaaccgcgccggcacgccgttgctggagatcgtttccgagccggacatccgcagcgccaaggaagccgtggcctacgtcaaggcgatccacgccctggtgcgctacctgggcatctgcgacggcaacatggccgagggctcgctgcgctgcgactgcaacgtctcggtacgaccgaagggccaggccgaattcggcacccgcgccgagatcaagaacgtcaactccttccgcttcatcgagaaggcgatcaaccacgagatccagcgccagatcgagctgatcgaggacggcggcaaggtagtccaggaaacccgcctgtacgacccgaacaaggacgagacccgctccatgcgcggcaaggaagaagccaacgactaccgttacttcccctgtcccgacctgctgccggtggtcatcgagcccgagtacctggcgaagctgcgcgagcaactgccggaactgccggtgcagaagcgcgaacgcttcgagagccagtacggcctgtccacctacgatgccagcgtgctgtccgccagccgcgagatggccgactacttcgagaaggtccagggcatctgcggcgacgccaagctggcggccaactgggtgatggtcgagctgggcagcctgctcaacaaggacggcctggagatcgagcagtccccggtgtccgccgagcaactgggcggcatgatcctgcgcatcaaggacaacaccatctccggcaagatcgccaagatggtcttcgaagccatggccaacggcgagggttccgccgaccagatcatcgaggccaagggcctgaagcaggtcaccgacagtggcgccatcgagaagatgctcgacgaggtgctggcggccaacgccgagcaggtcgagcagtaccgcgccgccgacgaggccaagcgcggcaagatgttcggcttcttcgtcggccaggcgatgaaggcctcgaaaggcaaggccaacccgcagcaggtgaacgagttgctgaagaaaaagctcgaagcgtga

SEQ ID NO: 320850 - DNA, 1455 bp, Pseudomonas aeruginosa
atgctgcatcaattgaccctcgccgagatcgcccgcgccctcgccgacaagcaattttccgccgaagagctgacccgcaccctgctcggtcgcatccggcagctggatccccagctcaacagtttcatcagcatcaccgacgacctggccatcgcccaggccaaggcagccgacgaacggcgcgccaacggcgagaacggcgccctgctcggcgcgccgatcgcccacaaggacctgttctgcacccagggcgtacgcaccagctgcggttcgaagatgctcgacaacttcgtctcgccctacgacgccaccgtggtcgagaagctcaccgccgccggcgccgttaccctcggcaagctgaacatggatgaattcgccatgggctcgtcgaaccagtccagccactacggcgcggtgaagaacccctggagcctcgaccgcgtgccgggcggctcctccggcggttccgccgcggcagtcgccgcgcgcctgctgccggccgccaccggcaccgataccggcggctcgatccgccaaccggcggcgctgaccaacctcaccgggatcaagccaacctacggccgggtttcccgctggggcatgatcgcctacgcttccagcctcgaccagggcggcccgctggcgcgcaccgccgaggactgcgcgctgatgctgggggtgatggccggattcgatccgaaggactcgaccagcgtcgaacagccggtggacgactacctggccgccctgcagaagccgctgagcggcctgcgcatcggcctgccgcgggaatacttcggcgccggcctcgacagccgcatcgccgacgcggtgctggccgtggtcgaggagctgaagacgctcggcgccacggtgaaggacatttccctgccgaacatgcagcacgccatcccggcctactacgtaatcgcgccggccgaggcgtcctccaacctgtcgcgcttcgacggcgtgcgctatggctatcgttgcgacgccccgcagaacctggaagacctgtacaagcgctcgcgcgcggaaggcttcggcagcgaagtgaagaaccgcatcatggtcggcacctacgcactctcggccggctactacgatgcctattacctgcaggctcagaagattcgccggctgatcaagaacgacttcgtcagcgcctttgccgaagtggacgtgatcctcggcccgaccacgccgaacccggcctggaagatcggcgagaagaacgacgacccggtttcccagtacctggaagacatctacaccatcaccgccaacctcgccggcctgccggggctgtccatgcccgccggcttcgtcgacggcctgccggtgggtgtccagttgctcgcgccctacttccaggaaggccgcctgctcaacgtcgcgcaccagtaccagcaggtcagcgactggcacacccgcaccccggccggcttctaa

SEQ ID NO: 320851 - DNA, 291 bp, Pseudomonas aeruginosa
atggcgcttgaacgctccgacgtggaaaaaatcgcccatctcgcccgcctgggcctgagcgaggccgatcttccgcgcaccaccgagaccctgaacaacatcctcggcctgatcgaccagatgcaggcggtcgacaccagcggcgtcgaaccgctcgcccatccgctggaagccacccagcgcctgcgcccggacgcggtcaccgagaccgatcaccgcgacgcctaccagaccatcgcccccgccgtggaagaaggtctgtacctggttccgaaagtcatcgagtcataa

SEQ ID NO: 320852 - DNA, 1038 bp, Pseudomonas aeruginosa
atgttcaaaaaattgcgtggcatgttttccagcgatctgtcgatcgacctgggtactgccaatacccttatttatgtgcgcgagcgcggcatcgtcctgaacgaaccgtccgtggtcgccattcgcagccatggcagccagaagagcgtcgtcgccgtgggcaccgaggccaagcgcatgctcggccgtaccccgggcaacatcgccgccatccgtccgatgaaagacggcgtgatcgcggatttcagcgtctgcgagaagatgctgcagtacttcatcaacaaggtccacgagaacagcttcctgcagcccagcccacgcgtgctgatctgcgtgccgtgcaagtccacccaggttgagcgccgggccatccgcgaatccgccctgggcgccggcgcccgcgaggtgttcctgatcgaagagccgatggctgccgccatcggcgccggcctgccggtcgaggaggcccgcggctcgatggtcgtagacatcggcggcggcactaccgagatcgccctgatttccctcaacggtgttgtctacgccgaatccgtccgcgtcggcggcgaccgcttcgacgaagccatcgtcacctacgtgcgccgcaactacggcagcctgatcggcgaatccaccgccgagcgcatcaagcaggagatcggcaccgccttcccgggcggcgacgttcgcgaagtcgacgtccgcggccgcaacctggccgaaggcgtaccgcgcagcttcaccctgaactccaacgaggtcctcgaggccctgcaggagtccctggcgaccatcgtccaggcggtcaagagcgccctcgagcaatcgccgccggagctggcctcggatatcgccgagcgcggcctggtgttgaccggcggtggcgcgctgctgcgcgacctggacaagctgctggcacaggaaaccggcctgccggtgatcgtcgccgaggagccgctgacctgcgtggctcgcggcggtggccgtgcgctggagatgatggaccgccactccatggacctgctctccaccgagtaa

SEQ ID NO: 320853 - DNA, 993 bp, Pseudomonas aeruginosa
gtgctggccgtgctgtcggtcagcctgatggtggtggacgcccggttcgactatctggagcccgtccgtagcaagctggggatggtgctcacacctttctacggcctggcggaaatgccggtgcgcgcctgggaaggcgtgcgcgaccagttcagcagccgtagcgagctgatcgccgagaacgaacgcctcaaggccgagtccctgctgatgcagcgccgggtgcagaaactcgccgcgctcaccgagcagaacgtgcgcctgcgcgagctgctcaattccgccgcgctggtcgacgacaaggtactggtcagcgagctgatcggcgtcgatccgaaccccttcacccaacgcatcatgatcgacaagggcgagaacgacggcgtcttcgtcggccagccggtgctcgatgccagcggcctgatgggccaggtggtcgaggtgatgccctataccgcgcgggtcctgctgctcaccgacaccacccacagtatcccggtgcaggtcaatcgcaacggcctgcgcgccatcgccgtcggcaccggcaatcccgagcgcctggaattgcgctacgtcgccgacaccgccgacatcaaggaaggcgacctactggtcagctccggcctggggcaacgcttccccgccggctatccggtggccacggtcaaggaagtgatccacgattccggccagccgttcgccgtggtgcgcgcggtgccgaccgcgaagatgaaccgtagccgctacgtgctgctggtgttcagcgacagccgcaccccggaacagcgcgccaacgacgccgccgaggcccaggaagaggcggacaagaaagccgccgccggcgcccaggcgccccagcctgccgcgcaaccggccgccgcgccgtcgccggccaccccggcagcccagggcgctgcgcagcagcccgccgccgcgcccgcgccagctcccacgcagcctgccgctccggcggccaacggggggcgccgctga

SEQ ID NO: 320854 - DNA, 495 bp, Pseudomonas aeruginosa
atggctcgcgcgacccagggttcgaacaatgtctgggtgatctggctgagcctgctggtcgggctggtgctggccgtagcgccgatgcctaccttcaccgagatcggccgcccgctgtggctggcgatgctgctgacctactgggtgttgctgctgcccgagcgcgtcgggatggtcaccgcctggctgctcggcctggcccaggatgtgctctacggcaacctgctcgggcagaacgcgctgatcctcggcctgatcaccttcctcgtgctgtccctgcaccagcgcctgcgcatgttcccggcctggcagcagtgcctggtgctggtggtggtctacggcctggcgcagctgctccagctctggctcaacgccctgaccggcaatcgcccgccgaccctgaccttcctgctcccggccctggtcagcgcgctgctctggccctgggtgtacgccctgctgcagttcgtccgcctgcgtctcaacgtgaggtag

SEQ ID NO: 320855 - DNA, 606 bp, Pseudomonas aeruginosa
atgccgtcgctgtatctcgcctccgcctcgccccgtcgccgtgaactgctgacccagatcggcgttccgctgtccgtgctcgccaccgctatcgacgagtcccccttgccgaacgaagcgcccgccgcctacgtcgagcgcctggcgcgcggcaaggcggccgccgggctggctatgctggaagggcgcggcgaggatggttgtgtcctgagcgcggatacctcggtggtgatcgacgggcgaattctcggcaagcctgtggaccaggccgaggggctggccatgctggctgcgctgtccgggcgcgaacaccaggttctcaccgccgtggccctggccgccgctggcggcgtcgaggcgcgggtagtggagtgccgggtgcgtttccgccagatcgccccggaagaagcgctgcgctactggcagagcggcgagccggcggacaaggcgggcggatatgcgatccagggcctcggggcgatattcgtcagccgcatcgaaggcagttacagtgcggtggtcgggctgcctttgtgtgaaactgcggaactgttgagggaattcggcatcccttgctggcagcccgtgggtggcaacccgccgtaa

SEQ ID NO: 320856 - DNA, 1458 bp, Pseudomonas aeruginosa
atgagcgaagagatcctgatcaatatcacgccgatggagtcgcgcgtggcggtggtggaaaacggcgtcctgcaggaagtgcatgtcgaacgcacccagcggcgcggcatcgtcggcaatatctacaaggggcgggtggtacgggtactgccggggatgcaggcggcgttcgtcgacatcggcctggaacgtgcggcgttcatccatgccgccgagatatccaatcgcgaaggcagtgccgtggaaagcatcagtgccctggtccatgaggggcaggcgctggtggtgcaggtgaccaaggatccgatcggcaccaagggcgcacggctgaccacccacctgtcgattccttcgcgctatctggtgtacatgccgcgcaccagtcatgtcgggatatccctgcggatcgaggacgaagtcgagcgcgagcgcctgaagaaggtggtggccgactgcgtggcggcggaaggcatcgaggggcagggcggcttcatcctgcgcaccgccgcggaaggcgcgggcgaggacgagattctcgccgacatccgctaccttcgccggctatgggaccagatcgccgcgcagatccagaccgtcggcgcgccttcggtgatctacgaagacctgtccctggcgatccgtaccctgcgcgacctggtgaacccgcggatcgagaagatccgcatcgactcgcgagagaacttccagaagatcacttccttcgtcgaagaattgatgccggagatttccgatcgcctcgaacactacccgggcgagcgaccgatcttcgatctctacggcgtcgaggacgaaatccagaaagccctggagcgcaaggtactgctgaagtccggcggctacctgatcgtcgatccgaccgaggcgatgaccaccatcgacgtgaacaccggcgccttcgtcggccatcgcaacctcgaggaaaccatcttcaagaccaacctcgaggcggccaccgcgatcgcccgccagctgcgcctgcgcaacctgggcgggatcatcatcatcgacttcatcgacatggaggacgaggagcatcgccggcaggtcctgcgcaccctggagaagcaactggagcgcgaccacgcgaagaccaacatcatcggcatcaccgagttgggcctggtgcagatgacccgcaagcgcacccgcgaaagcctggtgcagatcctctgcgagccgtgcccctgctgccagggacgcggcatgctgaagactgcggaaaccacctgctacgagattttccgtgagatcctccgcgaggcgcgtgcctaccaggccgactcctacctggtgctggccaaccagaaggtggtggaccggctgctcgacgaggagtcgggtaacgtcgccgatctcgaggcgttcatcggccgcaccatcaagttccaggtcgaggcgatgtactcgcaggagcaatatgacgtggtcctgctctga

SEQ ID NO: 320857 - DNA, 3684 bp, Pseudomonas aeruginosa
atggcggatgtgggaagcctcggaacgcgactgctacggatcgtcctgggtctgtgcgccctggtactggtgctgctggcgctgtacgtcagccttggccggcaactggtgccgctggtggccgaataccgccagcagctggaggacgaagctggcaagcaactcggcataccggtgcggattgccgaactgacgggctcctggcgcggcttcgagcctctggtggtagcgcgcgacatccaggtcggcgacggcgaacagagtctgcgcctggcgcgggtgcggctggcgccggacctgctcggcagcctgctggcgcgccaggtgcggatcggcagcctggagctggagggactcaagctgaccctgcgcgaaggcgaggatggccagtggagcctggatggcctgccgcacagcgacaagcccagcgatccccggaaactcctgcaattcctgctgcagacccaacgcatctcgctgctggacagtcaactggaggtggcgccgcggggaagcgcagcgctgtcgctcagcgcggtcggcgcgaccctgcgcagttcatcggtcggtgggcagagtctcgatgcccgcctgcaactgccggatggccaacccctggcgctgcacgccgaagggcggatcgacagcgaggactggccgcgcagcagcgccaggttctatctcagcctgccgcagagcgactgggcgcaatggttgccggccggtctgacccaggaatggaagatcgcccgggccaaggccggcggcgacttctggttcgactggcgcgacggcaaggcgcaacggctggtggcacggctgctggcgccgcagttgaaggcctcgtatgccgcgcgcaagccggtggaaatcaacgacctgggcatgaacctgttcttcgatcgcgaagcgcagggctggaaggttcgggtcggcgacctggcggcgaatttcggcgagcagcgctggggcgaggtggagttgctgttgcgtcgcgaccagcagaacaacgagccacactggaagctgcaggccgaccgcgtcgacctgacgcccctggtgccggcgatagaagcgctggcgccgctgccggacgcggcggcggagtgggtggcgggcctgaagccgaagggcatcctgcacaacctgaacgccgatttctggccgcagcgagaggtgcccgagcgggtcagctacgcgaccaacctggaaaaggtcggtatctcggcgttccatgaggttccggcagtggaaaatgtcagcggcaccttgaccggcaccctggctggaggccagctcgacgcatcggcgcaggatttcatgctgcacctggccaaggtgtttcccgagccgtggcgctaccgcgaggcccgcacgcggatgttctggagcctggacgaccgcgccttcaccctcggcagccacctgatgcgggtcgagggcgaggagggccgcctggccggcgacatgctgatccgcctgatgcgcgatcccggcgctgaagactacatggacctgcaggtcggcctcagcgacggcgacgcgcgcttcaccgccaagtacctgccgacccagttgccgggaatgaacaaaagcctggcgaactggttgaagacggcgatccgcagtggccatgtcgagcagggctacttccagtggcagggctcgctgaatcgcggcgcggcggccgaagcccacgtcatgaacctctacttcaaggtccgcgacggcgagctggcctaccagcccggctggcccgccttgagcaaaacggtcggcgaggtgttcgtcgaggattccggagtccgcgtgctggcctccagcgggaatctgctgaattcccgggtcagcgacgtcaaggtcgacattcccctcggccgtccgggacagacgccgcacctgtatgtggatggggccgtcgacagtaacctgaaggacggcatcaagctgctccaggaagcgccgatcccgacccgcaagatcttcgccggctgggagggcgatgggcccttgcagggccacctgaagctggatattccgctggaccacgacgaggccggcaagaccggggtggtcgtggatttctccaccgtgggcgcgaccctgaagatgcccagtccgaagctggatatgagcgaagtgaagggcgacttccgtttcgacctggccaagggcctgagcgccccggcggtgcaggcccgggtgctgggcagcgaggtacgcgggcggatcgtcgccgaggggcgcggcgatgcgcgcacgcgcttgctgctcaacggccaggtggcggtcaagtcgctgagcgactggctcggcgctggccagcgtccgttgccggtctcgggacgcctgccgttccagctcaacctgctgctggatggcaaggacagccagttgcagatcgattcggatctcaagggcgccgtcgtcgacctgccggcgccgttcggcaagacggccgcccaggcgcggccgacccaatggcggatgaccctggatggcgccgaacggcgttactgggcgcgttacgacggcctcgccagcttggcctatgcggccccggcggacaagctgctgaacggacgcggcgccctgcgcctgggcggtgacccggcgttgctgccctcggcacaggggctgcgggtgcgcgggcgtctggcggaactggactgggacgcctggcaggccaccctgaagcgctacggcaacggcgaccaggccgccagtagcgctgcgggcctgctgcgcggcgccgacctgcgcatcgacagcttcaagggcttcggccagaagctgaagaacctgaccgtcgacctggcccgccaggagcgggcctggcaactggtgctggtcagcgacctcgcatcggggcgcctggtcctgccggatgccaggggcgcgccgatcgaggtcgatctggaccgcctgaacctgccgaagtcgacccttcccgacgagaacaaggtggaggactcggacccgctggccgccgtcgatccgcgcagcctgccggcggtagacgtgaagatcggccaggtcgccctcggcggccagccgctgggcgcctggagcctgaaggtacggccgggcagcaacggcgtggcgttcaacgacctggacctcgacctgcgtggcctgcacgtcaacggcagcctgcgttgggacggcagtccgggcaatacccgcagcacctatcagggccggatcgagggcaagaacctggcggatgtgctcaaggcctggaatttcgcgccgagtgccaccagcgaacgtttccgcatggatatcaacggccagtggccgggatcgccggcctacatggccctgaagcgcttcagcggcagcatggatgcatcgctgcgcaaggggcagttcgtcgaggtcgaaggcagcgcccaggcgctgcgagtgtttggcctgctcaatttcaacgcgatcaaccgccggctgcgcctggatttctcggacatcctcggcaagggactgagctatgaccgggtgaagggggttctctccgccacggcactgatagtcggcggtccggcggtcggcggcgcggtcttcgtcgtcgacaagctgctcggcgaccgggtctcgcgcttcgccagcgtgcaatacagcgtcaagggcccctggcaggatccgaagatcagcttcgacaagccattcgagaagccccgctga

SEQ ID NO: 320858 - DNA, 849 bp, Pseudomonas aeruginosa
atgtccattgccgtgatccagatggtcagccaggacgacgtgacggccaacctggccgccgcccgtcgcctgctggaacaggccgccgagggcggggcgcggctcgccgtgctaccggaaaacttcgccgccatgggccggcgcgacctggccgaactggggcgcgccgaggcgcgggggaacgggcctatcctgccgtggttgaattccgccgctcgcgacctcaggttgtggatagtcgccggaacgttgccgctgccgccggatgggcaacccgaggcgaaggcgaatgcctgttcgctgctgatcgacgagcacggagagcgggtcgcccgctacgacaagctgcacctgttcgatgtggacgtagccgatgcgcggggccgctatcgtgaatccgacgactatgctttcggtcagaagatcgtggtggcggatacgccggtcggtcgcctcggcctgacggtctgctacgacctgcgttttccggaactctataccgcgctgcgcgaggccggcgcggagctgatcacggcgccgtcggcgttcaccgcggtgaccggcgcggcgcactggcaggtgctggtccgcgcccgtgccatcgagacccagtgctacctgctggcggccggacagggtggcgtccacccacggggccgggagacgttcggccattcggccatcgtcgatccctggggccgggtcctggccgagcggccgcagggcgaagcggtgctgctggcggcgcgcgacgccgcagaacaggcggatatccgccggcgcatgccggtggtggcgcacagacgatttttcccgccggccgaaccgcggccggcgcgtacggagtga

SEQ ID NO: 320859 - DNA, 1443 bp, Pseudomonas aeruginosa
atgagcgagttgttgtcatccgtcagccagcaattgctggcccccggtggtctggagctggacagcctgcccggcattcttcatgaactgaacggcccgggcatcgatgccgccgacctgtatttccagagccaggtctccgagtcgtggatgctcgaggacggcatcgtcaaggaaggcagcttcaatctcgaccagggcgtcggggtacgcgcgcagtcgggcgagaagaccggcttcgcctatagcaatgcgatcaccgccgaggcgttgaaacaggccgcggtggcggcccgttcgatttcccgtgcgggacagaacggcagtgtgcaggcgttcaaggccgtggtgccggctcgcctgtacgccggcgagaacccgctggacgtgctcagccgtgccgagaaggtcgagttgctgaagcagatcgacgccgctacccgtgcgctcgatccccgcatccagcaggtcacggtgagcatggccggcgtctgggagcagatcctggtagcggccagcgacggttcgctggccgccgacattcgtccgctggtgcgtttcaacgtcagcgtgatcgtcgaacagaacggccgacgcgaacgcggcggccacggcggcggcggtcgcaccgactatcgctatttcctccaggaggatcgcgccatgggctacgcccgcgaggccctgcgccaggcactggtgaacctcgaggcgattcccgcgccggccggcaccctgccggtggtgatgggcgcgggttggtccggggtcctgctccacgaagcggtcggccacggcctggagggcgacttcaaccgcaagggcagctccgcctacagcggccgggtcggcgaaaaggtcgcctcgagcctgtgcaccatcgtcgacgacggcaccctggccgggcgtcgcggctcgctgagcgtggatgacgaaggcacgccgagcaactgcaacgtgctgatcgagaacggcgtgctcaagggctacatgcaggacaagctcaacgcccgcctgatgggcgtggcgcgcaccggtaacggccgccgcgagtcctacgcgcacctgccgatgccacgcatgaccaacacctacatgctggccggcgagagcgatccgcaggaaatcatcgcctcggtggagaagggtatctactgcgccaacctcggcggtggccaggtcgatatcaccagcggcaagttcgtgttctccaccagcgaggcctacctgatcgagaacggcaggatcaccaccccggtgaaaggcgccaccctgatcggcaacggtccggaagcgatgagccgggtgtccatggtcggcaacgacctggccctggacagtggcgtgggaacctgcgggaaggacggtcagtcggtgccggtcggcgtcggccagccgaccctgaagatcgatgcgatcaccgtcggcggcaccggcgcctga

SEQ ID NO: 320860 - DNA, 525 bp, Pseudomonas aeruginosa
atggctgaatttcacgacgacgactcgcaattcgaagagaagagcaagtcgcagatcaaacgcgagctgcatgccctgcaggacctcggcgagcgcctgaccaccctgcaaccgcagttgctggagcgcctgccgctcaccgacccgctacgcaaggcgctgctcgaggcgccgaagcacaaggcgcacatcgcccgcaaacggcatatccagtacatcggcaaactgatgcgcgaccaggacgtggacgccatcgtcgccctcatcgaccaggtggactcctccactcgccagtacaacgaacgtttccatgccctcgaacgttggcgcgaccagttgatcgccggcggcgacgcagcgctcgacgccttcgtcggggagttccccgagtgcgatcgccagcacctgcgcggcctggtccgccacgcccagcacgaggccgcgcacaacaaaccgccggccgccgcacgcaaagtgttcaagtacatccgcgaactggacgaaaccaagcgcggcctgcgctag

SEQ ID NO: 320861 - DNA, 1350 bp, Pseudomonas aeruginosa
atgagtctacatgccgcggcagtcggtccctccgtgcttccggaccttcgcgagcaggtcgagcagatcatcgccgaggcccgccgccagggcgccagtgcctgcgaagtggcggtgtcgctggagcagggcctgtccaccagcgtgcgccagggcgaggtggaaaccgtcgagttcaaccgtgaccaaggtttcggcatcaccctctatgcaggccagcgcaagggctcggcgagcacctcggcgaccggcgaggcggccatccgcgagacggtggcggcggcgctggcgatcgcccgccatacctccgaggacgaatgcgccggtctcgccgatgccgcgttgatggcccgcgagttgcccgagctggacctctatcatccatggagcctgagtcccgagcaggccgtggaacgagccctggcttgcgaggcagcggcgttcgccgccgacaagcgggtgaccaaggccgacggcactaccctgaatacccaccagggttgccgggtatacggtaacagccacggtttcatcggtggttacgccagcacccggcacagcctcagctgcgtgatgatcgccgagggcgaaggacagatgcagcgtgactattggtatgacgtcaaccgccgtggcgaggccttggccagcgccgagtcgatcggccggcgcgccgccgagcgcgccgccagccgactgggcgcgcggccggtgcagaccgccgaagtgccggtgctgttcgctccggaaatcgctgttggcctgttcggccatttcctcggggcgatctcaggcggcagcctgtatcgcaagtcatccttcctcgaaggcgcgctgggccagcgcctgtttcccgattggctgagcatcgacgagcggccgcacctggtcggcgcgctcggcagcgccagcttcgatagcgacggcctggcgacctatgccaagccattcgtcgagaacggcgagctggtgtcctatgtcctgggcacctattccgggcgcaagctcggcctgccgagcacggccaacgccggcggcgtgcataacctgttcgtcagccatggcgacgaggaccaggccgctctcatacgcaggatggggcgtggcctgctggtcaccgagttgatggggcagggcgtcaacctggtgaccggcgattattcccgcggcgccgccggctactgggtcgagaacggcgagatccagttcccggtccaggaagtcaccattgccgccaacctgcgcgacctgttccgccgtatcgtcgcggtcggcaaggacatcgaacggcgcggcaacctgcataccggttctgtactggtcgagtcgatgatggtggccgggcgctga

SEQ ID NO: 320862 - DNA, 396 bp, Pseudomonas aeruginosa
atgtccttcgaggcgcacgacccgcaagcattggatcactggtactggctgggcacgcagatccgctgcgcgctcgatcccgacgaaccgcgcctgctcgaccagtacctcggcgaggcgcgctatctcgccggttgggaaggtgtggccgcctggccgctgttcgagaaagcctacaacctcctgctcgataccggtcgcgatccgatattgccctggcactggcgcagcctctgcctcgactacgcctaccggcccctctgcgaacttcagcgactgaccaccaacggcagccagcgacgccggctgcgccagctctccgtacgaatggccaggcaggacctggcgccgtcgatgagcttcgatcacccgcaacaaggaaaccaagatgactga

SEQ ID NO: 320863 - DNA, 1377 bp, Pseudomonas aeruginosa
atgactgacacccgcatcgaacgcgacagcatgggcgaactggcggtcccggcgaccgccctctatggcgcccagacccagcgcgcggtgaacaacttcccggtcagcggccaacgcatgccccatgccttcgtccgcgccctgctgctggccaaggccgcggcggcgcgggcgaacgtctccctgcagcaactggatgcaccgatgggcgaggcgatcgccgagacctgcctgcaactgctgcaggaggacttcatgcagcatttcccggtggatgtgttccagaccggctccggcaccagttccaacatgaacgccaacgaagtggtggcgaccctggccagtcgtcgcctgggcggcaaggtcaatccgaacgaccatgtgaactgcgggcagagcagcaacgacatcattccctcgaccatccacatcagtgccgccctcgagatcagcgaacgcctgctgccggcgctgcgccacctggagcagactatccagagcaaggccggcgaagtgcatgcctatgtgaagaccggccgcacccacctgatggatgcgatgccggtacgcatgagccaggtgctcggtggctgggcgcagcaggtgcgacaggccggcgtgcacatcgagagcgtacttcctgccttgcagcagttggcacagggcggcaccgcggtgggcaccgggatcaacgcccatcctcggttcgccgaacgtttcagccaggagctgaacgacctgaccgggctggcgttccgccccggcgacgacttcttcgccctgatcggttcgcaggacaccgcggtcgctgcgtccggccagttgaagaccctggcggtgaccctgatgaagctggccaacgacctgcgctggatgaactccgggccgcttgccgggctcggcgagatcgagctggaagcgctgcaaccaggctcctcgatcatgcccggcaaggtcaacccggtgatcccggaggccaccgcgatggtcgccgcccaggtgatcggcaatgacgctgccattgccgtcgccggccaatcgggcaacttcgaactgaacgtgatgctgccgctggtggcggacaacctgttgcacagcatccagttgctggccaacgtcagccggctgctggcggacaaggccatcgccagcttcaaggtcaaccagggtaagctcagcgaggcgttggcgcgcaacccgatcctggtcactgcgctgaacccgatcatcggctaccagaaggctgcggaaatcgccaagcaggcctatcgcgagggacggccgatcatcgatgtggcgctggaaaacaccgatctggaccgtgcgcgcctggaggtgttgctggatccggaaaaactcacggctggcggcctctga

SEQ ID NO: 320864 - DNA, 450 bp, Pseudomonas aeruginosa
atgcgtcattggcaacgaacgatcgaacagggcaaccgctgtttcgtcaccggcgcattgatcgatgcgcgtgagcactacctccatgccctggccctggcccaggtgctgctggaacgctggggcgacgccgacgaggcggtgatggcgttcgtcatttcccatcacaacctggccgacttgcacctgcaactggagcaaccggaggagaccgcagaatacctgtgcgcctgccacgagcgcctgttgcgggtcagcgccgaccagaagctgccgctggccctacgccaggcggcccagcatcacagccggcgcacctatgtcgaactgctgtcgttcatcggcgaacacggtgcctatccgcgcaccgagcgcctgctcaagggaccgccgaacgcggaggtccgacccgagttcctcgctccgcccccctcacttcgctatcactga

SEQ ID NO: 320865 - DNA, 612 bp, Pseudomonas aeruginosa
atgccccacgccttgccgcccttgccttacgcctacgatgccctggaaccgcacatcgatgcgctgaccatggagatccaccacagcaagcaccaccagacctatgtgaacaacctgaacgccgcgctggaaggcacgccctatgccgagcagccggtggaaagtctgctgcggcaactggctggtctgccggagaagctgcgcaccccggttgtcaacaatggcggtgggcatgccaaccactcgctgttctggaccgtgatgtcgccccagggcggtggccgtcccgatggcgacctggggcgggccatcgatgagcagctcgggggcttcgaggcgttcaaggatgcgttcaccaaggctgcgctgacccgcttcggcagcggctgggcctggctcagcgtgactccccagggcagcttgctggtggagagcagcggcaaccaggacagcccgctgatgaacggcaatacgccgatcctcggcctggacgtatgggagcatgcctattacctgaagtaccagaaccgccgcccggaatacatcggcgctttctacaacgtgatcgactggcgggaggtcgcgcgtcgctatgcgcaagccctggcctag

SEQ ID NO: 320866 - DNA, 903 bp, Pseudomonas aeruginosa
atgaaggcgttgctccatggcatcgccgaaggtaacgggcggacgctgcgcaacctgctgggcctgctgatcttcatcggcggcggctacctgctcggccgccacgcgctgttgctggccgaactcaacctgccggcgcccatcgtgctggcattgaaaggcggcctgctctgtgccttcggtaccgctctcggggcgatgccggtgctggtggtgaagaccatgccggcgcgcctgtcggatgcgctgctgggcttcggtgccggcgtgatgctctcggcgacggccttctcgctgatcatgccggcgctatccgcggccggcgacctcggctactcgaagttcggcgcggggttcctggtcagcttcggcctggcggtcggcgtgatggggctgttcatcctcggccggctgatgccggacgtccatcccggttgcgagggcgcgccactgtccggtggcattcccccgcgcatcctgctgttcgtcacggccatcgtcctgcacaacatccccgaaggcatggcggttggcgtgtcggccggtgccggcctggacgaggcgaacggcctcgccctgggcatcgctctgcaggatgtgccggaaggtctggtggtggcgctggtgctggccggagtcggtatgtcgcgtttcaaggcgatgctggtcggtgccgcgtcgggcctggtcgagccgctgttcgcggtgctctgcgcctggctggtcggcctctccgcgctgctcctgccctgggggctggccgccgcggcgggagcgatgctcttcgtggtcacccacgagatcattcccgagtcccaccgccagggacatgccgccgaggctacgctgggcctggtgttcggtttctgcctgatgatggtgctggataccgcgctgggctag

SEQ ID NO: 320867 - DNA, 273 bp, Pseudomonas aeruginosa
atgcccgccctcgagatcaccatcatcaacaagctcggtctgcacgcccgcgcggcggccaagttcgtcggcgtcgcggggcgctacccttgccaggtccgggtcggccgcaatcctgaaagctgcgtcgacggcaagagcatcatggccgtgatgatgctggctgccggcaagggcaccaacctgcacctgcataccgaaggcgaacaggaagacgaggcgttgaacgcgctggtcgaactgatcaacaacaggttcgacgagggcgagtag

SEQ ID NO: 320868 - DNA, 861 bp, Pseudomonas aeruginosa
atgcgcctgatcatcgtcagtggccgctcgggctcgggcaagagcaccgccctgaacgtcctcgaagacaacggcttctattgcatcgacaaccttcccgccagcctgcttcccgacctggcgcagcgcgccctgttgcacacggagctactgcagccacaggtggcggtgtcgatcgacgcccgcaacctgcccagccagttgcagcgcttccccgaactgttgcaggaagtgcgggacaaccacatcaactgcgatgtgctgtatctcgacgccgacgacgagacgctgctcaaacgattctcggaaacccgccggcgccacccgctgaccaccgacacccgttcgctggcggaggcgattggcgacgagagccaattgctcggaccgatcgccgacctcgccgacctgaagctggacaccaccagcctcaacctctatcagctgcgcgacaccatcaaactgcgcctgttgaacaagccggaacccggcaccgcgttcctcgtcgaatcctttggcttcaagcgcggcatgccagtcgacgccgacctggtgttcgatgtgcgctgcctgccgaacccctactggaagcccgagttgcgcgatcattcggggctggagccggaagtccgcgagtatctggccgcccagccggacgtcgaggaaatgtaccaggacatcgtcggctacctgaacaaatggctgccgcgcttcgccgccagtaaccgctcatatgtaacagttgcgataggctgtaccggcgggcaccatcgttcggtctacctcgccgagcggattggcgctgcactcagggattccctgaagaacgtgcagattcgccaccgcgatctcagcagctag

SEQ ID NO: 320869 - DNA, 465 bp, Pseudomonas aeruginosa
atgatccgacttgagcaaatcctgacccccggccgttccctcgtgaacgtgccgggcggcagcaagaaacgcgtactcgaacaaatcgccaacctggtagccagggagctgccggagttcgacacccagaccatcttcgaaaacctggtggcccgggaaaaactcggttccaccggcttcggcaatggcatcgccattccgcactgccgcctgtctggctgccagagccccatcagcgccgtgctgcacctggatgctcccgtggacttcgacgcgctggacggcgcgccggtcgacctgctcttcgtcctgctggtaccggaggccgcgactgaagaacatctcgaactgctccggcagatcgccgccatgctcgaccgtgccgacgtacgcgaccgcctgcgcagcgctcccaccgccgaagcgctttatcagatcgtggtagacgtacagaacgggcaatga

SEQ ID NO: 320870 - DNA, 309 bp, Pseudomonas aeruginosa
atgcaagtcaacatcagtggccatcaactggatgtgaccgacgccctgcgcgactatgtcggcgagaaactgagccgtctggagcgccatttcgacaagatcaccaatgttcaggtgatcatggaggtcgagaaactgaagcagaagatcgaagccaccctgcgcatcgccggtggcgagatcgtagccaatgcggaacatgaggacatgtacgcggccatcgacctgctgatcgacaaactcgaccgtcaactgatcaaacacaaagagaagtatctcgaacggcagcaaggcgtaggcgcccgctga

SEQ ID NO: 320871 - DNA, 1494 bp, Pseudomonas aeruginosa
atgaaaccatcgctagtcctcaagatgggccagcagctgacgatgacgccgcagctgcaacaggccatacgcctcctccagctatccaccctggacctccagcaggaaatccaggaagcgctggaatccaatcccatgctcgaacgccaggaagacggcgacgatttcgacaacagcgaccccctcgccgatggcgccgaacaggcggccagcgcgccccaggagagccctctccaggaaagcgccacgcccagcgtcgaaagcctcgacgacgaccagtggagcgaacgcatacccagcgagttgccggtggataccgcctgggaagacatctaccagaccagcgccagcagcctgcccagcaacgacgatgacgaatgggacttcaccgcgcgcaccagcagtggcgagagcctgcacagccacctgctctggcaggtcaacctggcaccgatgtcggacaccgatcggatgatcgcggtgaccatcatcgatagcatcaacaacgatggctatctcgaagagtccctcgaagaaatcctcgccgccatcgatccggaactggacgtcgaactcgacgaagtggaagtcgtgctgcgccgcatccagcaactggaacccgccggcatcggcgcccgcaacctgcgcgagtgcctgctgctgcaactgcgccagttgccgtccaccacgccctggctgaacgaagcgctgcgcctggtatccgactacctcgacctgctcggcggccgcgactacagccaattgatgcggcgcatgaagctcaaggaagacgaactgcgccaggtcatcgagctgatccagtgcctgcatccccggcccggttcgcagatcgaatcgagcgaagccgaatacatcgtccccgacgtcatcgtgcgcaaggacaacgagcgctggctggtcgagctgaaccaggaggcgatgccacgcctgcgcgtcaacgccacctacgccggcatggtccgccgcgccgacagcagcgccgacaataccttcatgcgcaaccagttgcaggaagcccgctggttcatcaagagcctgcagagccgcaacgaaacgctgatgaaggtcgccacccagatcgtcgagcaccagcgcggtttcctcgactacggcgaagaagccatgaagccgctggtcctgcacgacatcgccgaagcggtgggcatgcacgaatcgaccatttcgcgggtcaccacgcagaaatacatgcatacgccgcgcggcattttcgagctgaaatatttcttttcaagtcacgtcagtaccgccgaaggcggggaatgctcgtccaccgcgatccgcgcgatcatcaagaaactggtggccgcggaaaatgcgaaaaagccattgagcgacagcaagatcgctggtttactggaggcacagggcattcaagtggctcgccgcaccgtcgccaaataccgcgaatccctgggcatagccccttcgagcgagcgcaagcgactggtgtga

SEQ ID NO: 320872 - DNA, 726 bp, Pseudomonas aeruginosa
atggcaacgctcaaagcccagcacctggccaaaagctataaaggccggcaagtcgtccgcgacgtcagcatgtccatcgatagcgggcagatcgtcggcctgctcggtccgaacggtgccggcaagaccacctgcttctacatgatcgtcggcctggtccaggccgaccagggcgtggtccgcatcgacgagcagaacgtcacccacctgccgatgcacgggcgcgcccgggccggcatcggctacctgccgcaggaagcctcgatcttccgcaagctgtcggtatccgacaacatcatggcgatcctcgagacccgcagcgacctcgatcgcaacggtcgcaaggaagccctggaaggcctgctgcaggaattccacatccaccacatccgcgacaacctcggtatgagcctgtccggcggcgaacgacgccgggtggaaatcgcccgcgccctggccagcgcgccgaaattcatcctcctcgacgagcccttcgccggcgtggacccgatctcggtcggcgacatcaagcagatcatccatcacctcaaggcgaagggtatcggcatcctcatcaccgaccacaacgtccgcgagaccctggacatctgtgaaacggcgtatatcgtcaatgatgggcagttgatcgcggagggggatgccgagagcatcctcgccaacgacctggtcaaggaagtctacctggggcacgagttccgcctctga

SEQ ID NO: 320873 - DNA, 528 bp, Pseudomonas aeruginosa
atgaggttcgttaataccctcccccttattttcggtctgactgccgccctcggcagctccatggccttggccctgccttcggaccgcgaacaaccgatccgcgtccaggccgacagcgccgaactggacgacaagcagggcgtcgcggtctaccgcggcgacgtcgtggtgacccagggcagcaccaagctgaccggcaacaccgtgaccctgaagcaggacaagaacggcgacatcgaggtcgtgacctcagtcggcaagcctgcctactacgagcagaaacccgctccggacaaggacgtgaccaaggcctatggcctgaccatccagtacttcgtcacgcagaaccgggtcgtgctgatcgaccaggccaaggtgatccaggaaggcaacaccttcgaaggcgagaagatcgtctacgacacccagcgccagatcgtcaacgcgggtcgtgccaccggctcccaggtgaccagcccgcgcccgcgcatcgacatggtcatccagccgaagaaaaaggcccagtaa

SEQ ID NO: 320874 - DNA, 573 bp, Pseudomonas aeruginosa
atgccgaagacactacgccagaaactgctgctcgccctgatcgccctgttgctgatcgtcgcgggctactactggaacgtcgggctcgagctgttcaacgaacagccgacccgtcccggccaggacaacaccatcgactactatgccgagaatgcccatagcctccagtaccaggaggacggcagcctcgactacgagatgaccgcggtgaagctggagcaccagaaagccacggacatcactttcgtcaccacccccgacctgctgctcttccgtggcaacgtgcaaccctggcacatccagagcgcccgcgccgaagtcggaccgaaaggcaaggaggtcgaactcatcgacgacgtgcgcgtcgcacgtaccgatgccaagggccaaccaagcatcctgaccaccactcggctgaccgtattccccgacaagaattatgcacagaccgagcaagccgttaaaatcgacgcggccaatggagtgacgacggctgttggaatgaaagcgtatctgaaagacagccggatgcacctgctgtccaacgtaagaggtcagcatgaggttcgttaa

SEQ ID NO: 320875 - DNA, 540 bp, Pseudomonas aeruginosa
atgagcgatacccattcggccgcggaactcccggtccgggccagccggatacgcctggcgattttcgacgtcgacggcgtgctgaccgacggcaagctgtatttcctcgtcgacggcagcgagttcaagaccttcaacaccctggacggacatggcatcaagatgctcatcgcctccggcgtgcgcaccgccatcatcaccggccgcgacactccggtggtcgaacggcgcgcgcgcaacctgggcatccagcatctctatcagggccgggaagacaagctcgccgtcctcgacgaacttctcggcgaactcggactaggctatgagcaagtcgcctaccttggcgacgacctgcccgatctgccggtgatccgccgcgtcggcctgggcatggcggtagccagtgccgacccgttcgtgcgccagcatgcccatggcgtcaccgcggcccgcggcggcgaaggcgccgcccgcgagttctgcgaactgatcatgcgcgcccagggtacgctcgaagccgcccagagcgcctatctgtag

SEQ ID NO: 320876 - DNA, 975 bp, Pseudomonas aeruginosa
atgagccagaacctcgatttcatccattccgcccagcgcaccatcggcctcgagcgcgacgcggtagacagcctgctggcgcggattggcgacgatttcgtcaaggcctgcgaactgctgctggccggcaagggccgggtcgtcgtcgtcggcatgggcaagtccggtcacatcggcaagaagatcgccgctaccctggccagcaccggcaccccctccttcttcgtgcatccggccgaggccagccatggcgacatgggcatgatcaccaaggacgacgtggtcctcgccctgtccaactccggctcgactgccgaaatcgtcaccctgttgcctctgatcaagcgcctgggcatcaccctgatcagcatgaccggtaaccccgagtcgcccctggccaaggctgcggaagtgaacctggacgccagtgtcggccaggaagcctgcccactgaacctggccccgacctcctccaccaccgtaaccctggtcctcggcgacgccctggcgatcgccctgctcgaagcccgcggctttaccgcggaagacttcgccttctcgcacccgggcggtgcgctgggccgccgactgctgctgaaggtggaagacgtcatgcacgttggcgaagggctgccgcaggtgctgctcggcacctcgctgaccggcgcgctgatggaaatgacccgcaagggcctgggcatgaccgtagtgctcgacgaacatggcaagcttgccggcattttcaccgatggcgacctgcgtcgcgccctggatcggggcatcgacgtccgccaggtcaccatcgaccaggtgatgaccgtccacggcaagaccgtccgcgccgagatcctcgccgcggaagccctgaagatcatggaagacaacaagatcggcgcactggtggtggtcgacgcggacgaccgtccggtcggcgccctgaacatgcacgacctgttgcgcgcaggagtgatgtaa

SEQ ID NO: 320877 - DNA, 810 bp, Pseudomonas aeruginosa
atgagcaccgatagtgcctacgcggtcgagttgaagggcctgaccttcaagcgcggatcgcgggtgattttcgacaacatcgatgtgcgtatcccgcgcggaaaggtgaccggcatcatgggcccgtccggttgcggcaagaccacgttgctgcggctgatcgcctcccagttgcgtccttcgaagggggaggtctgggtcaacgggcagaacctgccgcagctttcgcgcggcgacctgttcgacatgcgcaagcagttcggcgtgctgttccagagcggggcgctgttcaccgatctcgacgtcttcgagaacgtcgcgtttccgctgcgtgtgcatacccagctgccggaagagatgatccgcgacatcgtcctgatgaagcttcaggccgtcggcctgcgcggcgccgtggaactgatgccggacgagctttccggcggcatgaagcgccgcgtcgccctggcccgggcgatcgccctggacccgcagatcctgctctacgacgagccgttcgtggggcaggatccgatcgccatgggcgtcctggtgcgcctgatccgcctgctcaacgatgccctcggcatcaccagcatcgtggtttcccatgacctggccgagaccgccagcatcgccgactacatctatatcgtcggcgacggccgggtacttggccacgggacgccggacgtcctcaaggaaaccgacgatcctcgtatccgccagttcgtcaagggaatcccggatggtcccgttccgttccattatccggcccgcgactaccgggccgacctgctgggagagcgctga

SEQ ID NO: 320878 - DNA, 798 bp, Pseudomonas aeruginosa
atgcgtagagtctctcccctcgaacgtatccgcctgttcggccgcgccggcctggacgtggtcgccgcgctcggccgctcgaccctgttcctcggccacgccctgctcggccggcgcacgccaggcaccggtttgcacctgctggtgaagcaactctactcggtaggcgtgctgtcgctggcgatcatcgtcgtctcgggcctgttcattggcatggtgctggccctgcagggctacaacatcctgatttcctatggttccgagcaggcggtcgggcagatggtggccctgaccctgctgcgcgaactggggccggtggtgaccggcctgctgttcgccggccgtgccggctctgcgcttaccgcggaaatcggcaacatgaaggccaccgaacagctttccagcctggaaatgatcggtgtcgacccgctcaagtacatcgtcgcgccgcgcctgtgggccggtttcatctccatgccgctgctcgccgcgatcttcagcgtggtcggcatctggggtggggcgatggtcgcggtcgactggctgggcgtatacgaggggtcgttctgggcgaacatgcagaacagcgtgcagttcaccgaggatgtgctcaacggcgtgatcaaaagtatcgtattcgccttcgtggtgacctggatcgcggtctaccaaggctacgactgcgagccgacctcggaaggaatcagccgggcgacgacccggaccgtggtctatgcctccctggcggtgctggggctcgacttcattctgactgctttgatgtttggagatttctga

SEQ ID NO: 320879 - DNA, 474 bp, Pseudomonas aeruginosa
atgcaaacccgcaccctggaaatcggtgtcggcctgttcctcctggccggcctgctggccctgttgctgctggccctgcgggtcagcggcctgagcgtgggcaacgccggcgatacctacaaggtctacgcctacttcgacaacatcgccggtgttaccgtgcgcggcaaggtcaccctggccggcgtgacgatcggcaaggtgacggcggtcgacctggatcgcgacagctacactggtcgcgtgaccatggagatcaaccagaacgtgaacaacctgccggtcgattccacggcgtcgatcctgaccgccggcctgctgggcgagaaatacatcggcatcagcgtcggcggcgacgaggacgttctgaaggacggcagcaccatccacgacacccagtcggcgctggtgctggaagacctgatcggcaagttcctgctgaactcggttaacaaagacgaagccaaaaagtga

SEQ ID NO: 320880 - DNA, 648 bp, Pseudomonas aeruginosa
atgctgactcttctgcgtcgcggcctgctggtgttcctggcggctttcccgctgctttccatggcggcgccgaccccgcaacaggtggtgcagggcacggtcgacgaactgctttccgacatcaaggccaacaaggccgcctacaaggccgatccgcaaaagctctacgccactctcgaccgtatccttgggccggtggtcgatgccgaaggcatcgccaagagcgtgatgaccgtcaagtactcgcgccaggcctcacccgagcagatcaagcgcttcgaggaagtgttcaagaacagcctgatgcagttctacggcaacgcgctgctcgaatacgacaaccaggacatccgcgtgctgcctagttcggccaagccgagcgacgatcgcgccagcgtcaacatggagatccgtgacagcaagggcacggtctatccggtctcctacaccatgaccaacctggccggtggctggaaggtccgcaacgtgatcatcaacggcatcaacatcggcaagctgttccgcgaccagttcgccgacaccatgcagaagaaccgcaacgacctcgagaagaccatcgccggctggggcgaggtggtcgccaaggccaaggaaaccgcgaaagcggaagaggccggggcgaaatga

SEQ ID NO: 320881 - DNA, 309 bp, Pseudomonas aeruginosa
atgagccaggccagcctgcgcgaaggcgcggccggcgaactgcagctcgccggcgtgctcgactacagcagcgggccggcgttgcgcgagcagggcggtcggctgatccgcgccagccaggcggcggaactggtcgtcgactgctcggcggtggagcgctccagcagcgtgggcatttccctgttgctggccttcatgcgcgacgcacgcaaggccggcaaggtcctgagcgtcagggcgttgccggacgacatgcgggagattgccaaggtcagcagccttctggagatcctgcctttgcaggaatga

SEQ ID NO: 320882 - DNA, 240 bp, Pseudomonas aeruginosa
atgcaggccgaagacgttaagagccttctccaggaaaaactccccggcacccaggtggaagtcgagggcgaagggtgcaatttccaactgaatctgatcagcgacgaactggccggccagagcccggtcaagcgtcagcagcaggtctacgcccatttgaacgcctggatcgccgatggcagcatccatgccgtcaccatgaaattcttcagccgcgccgcctgggccgagcgttcctga

SEQ ID NO: 320883 - DNA, 1266 bp, Pseudomonas aeruginosa
atggataaactgattattaccggcggtaaccgcctcgatggcgaaatccgcatttccggcgcgaagaactcggcgctgccgatcctggccgcgaccctgctggccgatactccggtcaccgtctgcaacctgccgcacctgcacgacattaccaccatgatcgaactgttcggccgcatgggcgtgcagccgatcatcgacgagaagctcaacgtcgaagtcgatgccagcagcatcaaaaccctggtcgcgccgtacgaactggtgaagaccatgcgtgcctcgatcctggtgctgggcccgatgctggcgcgcttcggcgaggccgaagtggccctgccgggcggttgcgcgatcggttcgcgtccggtcgacctgcatatccgcggtctcgaggccatgggcgcgcagatcgaggtcgaaggcggctacatcaaggccaaggcgccggccggcggcctgcgtggcggtcacttcttcttcgataccgtcagcgtgaccggcaccgagaacctgatgatggccgctgcgctggccaacggccgtaccgtgctgcagaacgccgctcgcgagccggaggtggtcgacctggccaactgcctgaacgccatgggcgccaacgtccagggcgctggctccgataccatcgtcatcgaaggcgtgaagcgcctcggcggtgctcgctacgacgtactgcccgaccgtatcgagaccggcacctacctggtggccgcggccgcgaccggtggccgggtgaagctgaaggataccgacccgaccatcctcgaggcggtcctgcagaagctggaagaggccggtgcccacatcagcaccggcagcaactggatcgagctggacatgaagggcaaccggccgaaggcggtcaatgtgcgtaccgcgccgtacccggcgttccccaccgacatgcaggcccagttcatctccatgaacgcggtagccgaaggcaccggcgcggtcatcgagacggtcttcgagaaccgcttcatgcatgtttacgaaatgaaccgcatgggcgcgcaaatcctcgtcgaaggcaacaccgccatcgtcaccggcgtacccaagctcaagggcgctccggtcatggcgaccgacctgcgcgcatccgcgagcctggtgatcgccggcctggtggccgaaggcgacaccctgatcgatcgcatctaccacatcgaccgtggctacgagtgcatcgaagagaaactccagctgctcggcgccaagatccgccgcgtaccgggctag

SEQ ID NO: 320884 - DNA, 636 bp, Pseudomonas aeruginosa
atgctgaccatcgccttgtccaagggccggattctcgacgataccctgccgctgctcgcagcggcgggcatcgtaccgtcggagaacccggacaagagccgcaagctgatcatcccgacgtccctgtccgatgtgcgcctgctcatcgtgcgcgccaccgacgtgccgacctatgtcgagcatggcgccgccgatctcggcgtggccggcaaggacgtgctgatggagtacggcggccagggactctacgaaccgctggacctgcgtatcgccaactgcaagctgatgaccgccggcgccattggcgcgcctgaacccaagggacgcctgcgggtggccaccaagttcgtcaatgtcgccaagcgctactacgccgagcagggccgccaggtcgacgtgatcaagctgtacggctcgatggagctggcgccgctggtcggtctcgccgacaagatcatcgacgtcgtggataccggcaataccctgcgcgccaacggcctggagccccaggaactgatcgccacgatcagctcgcgcctggtggtcaacaaggcctcgatgaagatgcagcacggtcgcatccagtcgctgatcgataccctgcgcgacgccgtcgaggcgcgacaccgtcactga

SEQ ID NO: 320885 - DNA, 1323 bp, Pseudomonas aeruginosa
atgaccgctcccttcgctatccgtcgactcaatgccgctgatccggacttcgggcgtcatctggatcatctgctgagctgggaaagtgtctccgacgattcggtcaaccagcgcgtcctcgacatcatcgccgccgtacgcagccgtggcgacgccgccgtggtcgagttcacccagcgcttcgacggtctccaggccgcctcgatggccgacctgatcctgccgcgcgagcgcctggagctggctctcacacgtatcaccgtagcccagcgcgaagccctggaagtcgccgccgagcgcgtgcgcagctaccacgagaagcagaagcagggttcctggcgctacaccgaggccgacggcacggtgctcggccagcaggtcaccccgctggaccgcgccgggctctatgtgccgggcggcaaggcgtcctacccgtcctcggtgctgatgaatgcgatcccggccaaggtcgccggggtgtccgaagtggtcatggttgtaccgaccccgcgcggcgagatcaacgagatcgtcctcgccgccgcctgcatcgccggcgtcgaccgtgtcttcaccatcggcggggcacaggccgtggccgcgttggcctacggcaccgaaagcgtgccgcgggtggacaagatcgtcggccccggcaacatctacgtggccaccgccaagcgtcacgtgttcggccaggtcggcatcgacatgatcgccggtccctcggaaatcctcgtggtctgcgacggccagaccgatcccgactggatcgccatggacctgttctcccaggccgaacacgacgaagacgcccagtcgatcctggtcagtccggacgcggcgttcctggaccgcgtcgcggacagcatcgctcgcctgctgccgaccatggagcgcgccgagatcatccgcacctccctggaggggcgcggcgcgctgatccaggtcgccgaccaggcccaggcctgtgcggtcgccaaccgcatcgccccggaacacctggagctgtcggtggccgatccggaaagctggctgccggagatccgccatgccggcgcgatcttcatgggccgctacactgccgaggccctgggcgactattgcgccggcccgaaccacgtgctgccgacctccggtaccgcgcgtttctcttcgccgctgggggtatatgacttccagaagcgttcgtcgatcatcaactgctcggccgagggcgcttcggtcctcggtcgtaccgcctcggtgctggctcgcggcgagtcgttgaccgcccacgcgcgtagtgccgaataccgcatcctcgacgagaaggaggcctga

SEQ ID NO: 320886 - DNA, 1056 bp, Pseudomonas aeruginosa
atgagcaaattctggagtcccttcgtcaaggacctggtgccttatgtgccgggcgagcagccgaagctgtcgcggctggtcaagctgaacaccaacgagaatccctacggtccgtcgccacaggcgctcgccgcgatgcaggcggaactcaacgacgacctgcgcctgtatcccgatcccaacggcgagcggttgaagcaggcggtcgccgcgcactacggcgtacaggccaaccaggtgttcgtcggcaacggctccgacgaggtgctcgcgcacattttccatggcctcttccaacacgacctgccgctgctgtttccggacgtgacctacagcttctacccggtctattgcggcctgtacgggatcgcgcacgagaagatcgcgctggatgaaaggttccgcatccgcgtcgaagactacgcgcggcccaacggcgggatcatcttccccaatccgaacgcgccgaccggctgcctgctgccgctggacgccatcgaagcgatgctgaaggcgtcgccggattcggtggtggtggtcgacgaggcctatgtcgacttcggtggcgagagcgccatcgccctggtcgatcgctacccgaacctgctggtcacccagacgctgtccaagtcgcgctccctggccggcctgcgggtcggcctggcggtcggccatgccgatctggtcgaggcgctggagcggatcaagaacagcttcaattcctacccgctggatcgcctggcgatcgccggcgcggcggcggctttcgaggacgacgcttatttccgtcggacctgccaggcagtgatcgatagccgcgaggcgttgagcgcctctttgcaggcgctgggcttcgaggtactaccgtcggccgccaacttcgtcttcgcccgtcatccgcggcacgatgccgggcagattgcctcgaccctgcgcgagcagggagtgatcgtccgccatttcaagcaggcgcggatcgaccagttcctgcgtatcaccatcggcagtccggagcagaaccaggcgctactggacgccctgcacttcctcaagtga

SEQ ID NO: 320887 - DNA, 369 bp, Pseudomonas aeruginosa
atgcagtcgatcatcgagcacggccaggtgatccgcggctggctcggcgtcgaggtcaaggcgctgaccccggaactggcggagtcgctgggcctcggcgaaaccgccgggatcgtcgtcgccggcgtctatcgcgacggcccggcggcgcgcggcggcctgctgccgggcgacgtgatcctgaccatcgacaagcaggaagccagcgacggccgccgctcgatgaaccaggtggcgcgcacccgtccgggacagaagatcagcatcgtggtgctgcgcaacggacagaaggtcaacctgaccgccgaggtcggcctgcgtccgccgccggcaccggctccacagcagaaacaggacggcggcgagtga

SEQ ID NO: 320888 - DNA, 1191 bp, Pseudomonas aeruginosa
ttgagcggtccggcagggatcgccgcggcgacgccggcgagcctgaccctggccgccggcgagcacgtcgacagcgtggcccggcagaaccagcaggtgaccgccgggcagaaggtggtgatcaacgccggcagcgacatcggcctgttcgcccagggcggcgagctgcgccagatcacccaccaggggccgatgctgctgcaggcgcagaagaacgacatccgcctggaagccgagcagagcgtggaggtcagcgccagccagcagcacgtgctggtcaccgcgaaggagcacatcaccctgatgtgcggcggcgcctacctgaccctcaagggcggcaacatcgagctgggcatgcccggcaacttcgtggtcaaggcggcgaagcacagtcatgtcggcgcggccagcctggaagccgagctgccgcagttcgaggtgggcgagacgcagcggcggttcgtcctcaagcaactggacgggcagacggccatgcccaacgtgccctataccatcaccatggccaacggcgaggtcatcgagggcgtcaccgacgccgaaggcgctacccagctgctgcagaaggatgcgatgaacatcgccaaggtcgatatgaaacacacgaaatcgcccgcctccgcagttgccgggatagcagcggcggttggcgcggcggttgcagtcggcaagctcctgagtggccccgacgccgaggccggacgtgctctcagcgaaggggaaatcagcctggcgaaaggcgtattcggcgattccatcgactattccacggtccgcctgcgcgacgaggactatgtcccctggcagggcaaggactacgtgatggcgccgaacggccacatctacttcggcgaggagttgcgcggcgtggcggactggagcctggagagcctgcagcgccagggtctgttcattcacgaaatgacccatgtctggcagcaccagcatggcgtcaacgtccttctggtgggggcctaccagcaagccaggcagtttctcctaggcgaccagtacgcctaccggttggagccgggaaagacgttgaaggactacaacatcgaacagcagggagacatcgttcgagattatttcctcgagaagaacgagttcggggaagcctctgcgaacagcaggttcgctggcgtactgaaaaacttcccaacgggatactga

SEQ ID NO: 320889 - DNA, 498 bp, Pseudomonas aeruginosa
atgaaatgcaagaccttgctcattgcctgcctgttcggcctgggaagcgcccaggccctggccgtttccaaactgccaccgcagatcccggtgcacgccagctccgggcgcgtgacactggatctacgccccttgctggcggaaaccaacgacgtcgagatcacccgtgtttcggtatgtcggcgggtcggcagccattgccaggaaacgctgtggcggatcgagctcccgcccgggtggcgtgccggggagatcgaggtcttcggcgactatcccggctccagcgtgctcctgcgccggccggagcgcttgcagccagatgggagctacaacgcattcattcatttcaacgagcgtagccgtcggcaccagcaaacggtttccagcattgccgtcgaattctgcctggccggcgaacctggcaactggatgctgctcgacgaagcgacctgcctggcacgacgcaacgccgaggagcggcaaggagagaagccatga

SEQ ID NO: 320890 - DNA, 2151 bp, Pseudomonas aeruginosa
atgaacgatagggttcggtcgaggacgatcgtctctgcccagtccatcaccttgcccaagggcggcgacgtgcacctggtgccgcctccgcccaagccttgcgtgaccatcgtggtgcatggcgtcaacgatctcgcgggttgctacgaacggatcgagcgagggctctgccaggggctcaatgaacgcctggacatgccgccgaccttgcccggcgggcaggccaatcccggctacctgacgccggcgggctacagcctgccggcggacgacgaaggcaaggcagagaaccccgacgtcgtctactaccggcgcaagttcgccagtggcgccggcggggccgccgtacgcagcgtagtcgtacctttctactggggcttccgcgaggaagagcaatacatcaacaagaccgcggcccacggcgaatggctggaccgcaacggcaaccggctggacaagtccggcaccaaggaaggcgggcagttcgtcaatgccaccaccaacctgccggacatgtggggccagggtttcaacggcaagctgttcggtttcatctcgctggactggttcggcggcaccatgacccatccgctgttttcggcggcagggcgcaagtacatggtccttgcggccatgcgcctggccatgttgatcaagatcatccgcaagcgttacccggacgacaccatcaatgtcgtcgggcacagccagggcaccctgttgaccctgctggcacatgccttcctcaaggatgacggcgtggcgccggcggacggggtgatcatgctcaactcaccctacggcctgttcgaacccctcaacgagaagctccagggctggagcagccagcagaccagagaggcgcggctggccacgctcaaaggtatcctcgagttcatctgcggccgacgccatccggtccccgcgctgagcagcgtcgcgttgcgcaactgccaaggctacggcgcgataggcggccccggctgggtgggtggccagggctgccagacgaccatcgacggggaacggctcagcttcgatgagcgcgacaatcgcggcagtgtctacctgtatttcacgccccaggaccagacggtgggacttgccaacgtccagggtatcggctggcgcggcattgctgagcaggtcaaggggctcccgggaaggaccgggctgccgcagggttttcaccagcgcatcttcaccgtacgcaagcgcaatggcgagaaggaaaagatcggcgggcacgcccctccccatgtctatcctcttctgctggccggcgagaagacctgggaagacaccgggctgggcggcaaggacagattcggccgggcgaacttcgaccagggcgacagcgtgctgctgaccgcgccgcgtctgccgttgccgacggaagcgcgattcgatttcgacggagccgtcacggcgccgggagagaactccgccagcggcgtctatcaggtgcgcgataccctcgatccgatcgacgccgccatcggcgtaagcaacggcggctggaaggaaaaggacagcgggcacgccgtcgcgcaacaggtggacgccgcgctggcgtaccgctacgggcgcgacgcgcgcagcgtggagagggcgttgaacgaaggcaaggaattggcccagcagacccatgtgttttccgctcgtgaactgggcaccggcatggttctggtcacccgcgcggaaactccctacgaggcccggctgcgcctgcagacggcggagggccatctggagcccttgtcgttccactcggccatacccaacaacccggagcataaccggcgggtactggcctatgacctggccatcggggccggggacagcgtggatgatgtggttttctatcagtatctgtgtcgggtggcggattggcggttggattggaaggcttcggacaaaggaatatttagtcaaggtgatgcgtctgttgatctgccggatgaagaggtgcgtgctttgtaccgtgcggaagaatctaaaaacagccagttaatagacgccaccgtagcttaccgcaagagtggcgagttccctgtggtagtaggaaatagactgccttccctggtcgggacacaaaccatcctagatcgttaccacgagcaggcggtgcgctttggggggacaatctaa

SEQ ID NO: 320891 - DNA, 1443 bp, Pseudomonas aeruginosa
atgtccgctgatgcttatcacccaccgacaacttcgccgcgcctggaaaccctggacgtgctcagcataggcatgagcctggatgtgtttcgccaggggcaagtgtggaaggccttgcaggagcagaatgccgcacaggccgaggcgttgcatgtcggcagcatcctgccgatggacccgaagaagtatccgacgtctgcggatgacaaggatatggcgtatgaaaagcgccaagcggacgccttggaactagggctgaaaaacttcctggagaaatggccgataccgacggtgacggtggtgcgtggttgggatccgagcactcctaacctacgcttcactccggaggagacgcgggaaagcctgtcagtaaaagtcaatgatctccgtgttccggctggactgcattggcatcggattgccaatttgcaggatggcattatctgtaacgatacgcctgaaggagtactggaggcgttgttcagtttattcgaacgcaaccctgacttgccagcagtgttggtgtatgcgaatgaaggcatcagtatggcgggggcgctttccagtagagatgtaacattgaagtcactaggcgctgtgtcaggccctcggatacctggaacgcttacggatgcaatggtcgccctgatcgtcggccgccccgagcgggtcgactggctacgccagttcgccccctacaccaaggtcaacgaaaaccggatcgaccccgagttccgtggctggggctggcgcaagccgccggtggagttccgccccacgccgttcattccccagccctggaccgagcgggctctggagcagtgggatgcgttgccggtgctggccaggctgcatcggccggtgagtgtgccgctgacccacccggataccggcgaacggctcaagcgcgaagctctcaccgcacaactggccgctgcctggaagacggccagtgccgggctcaggccggcgcccgcccggctgttctacgacggcggtttgaacgccacgccgctggccgaactcaccccggcgctgggcgccgcgcagagttcgctggacttgctggactcgcgggaaagctacgacctgacccagcgcctgggcgacaccggcgcggcctcgcccttcgttggcatcaccctggcgaccatggccagctacctcaacggcgacagcagcatggtgatgccgttgcggcgcaaggaccaggcgaccctgatcggcatcagctcgccgacgcctgggaagaagcccgctcacgacccgttcggcgtcgacctgctgccgcagaccgccagcggcgacggtccgccgccatcggccgacccggtggcgcccgccagtcggctcacgacccggttgccgcccggcgaagactatgccctggaagagttcctgagcagcctcaaacccagcaccgactggcaggacgatttgtag

SEQ ID NO: 320892 - DNA, 186 bp, Pseudomonas aeruginosa
atgtctgcccccaaaacgctcactccagagcagcggatcaaagagcttgagcagcagcttgagttgatgagccagaaggctcagttcttcgagaccgtcgtcgatgtcctgaaaaatgattacggtgtatcggtcgtaaaaaagcgatccggcaagtcctctcgcaaggtcaagtcgcaggactga

SEQ ID NO: 320893 - DNA, 792 bp, Pseudomonas aeruginosa
atgagccgacaggcttactacaagcgcaatcgagttgctgatagcaaagcacgccaggcagatcgggttgtcgaatttgttcaacaaatccggatacgtcagccacgactaggcacacgaaagctgcactatctgctgcattgccagcctgataggcggctccaaattggccgagaccgactatttcaggtcctgggaaagcgccgtttgctggtgttgcccaagcgggcgtatcacaagacaacacaaagctttcaccgcttctaccgccatccgaacctacccaagtcaggcccgaaccaggttgtcccgtcaggaccggagcacgtttgggcggcggacattacttacctgccagccagtagcggcccgctgtacctaagcctggtaacggatgcgtattccagaaaaattgttggccaccatgtgcatgaaagcctgcatgccaagtcagttgcacaagcctttaggcaggccttacgcaaacggcagcgtcgccagtcactggtccaccactcggatcgcggtattcaatatttctcggcgctgtatcagtcactgcatgcacggcatggcgtccagtgctcgatgactgacggatatgactgctaccagaacgcgctagctgagcgcatctacgggatcctcaaaacagagctgctgctgagtagccctgaaaatctggagcaggcaaggaagatggttgctgaagccgtgcagatctacaacacagagcggcctcacatggccctgaaaaacaaaacgcccgatgcggtgcatcgggcgttttga

SEQ ID NO: 320894 - DNA, 933 bp, Pseudomonas aeruginosa
atgcgctcatggcatggcgtagtcacgaaaatcgccaagcaaggcaagggcgccgtggtcaagaatcgactcggcccggaagagcttctggtgcccttcacagtgagtacgctcgtcgaggtcgacctggacgcaaggatctacggaacggatgtggacgacacgccctgggcggagggcgacgaacgaaaggaggtgctggtcggtaccgaagtagaactgctgaccgatacggatacctttcctacccatgcgtcccaggtgctcagcgccaatttccgtttcgccctcgacatcgtcaagggagggctcagcggcccggtcaggaaaggggcggtcctggtcatctaccacgacttccagcaggagatccggagaggcgactccggcagcgccttcgcggaggcggtcgtcgcctatgcgcggaacaagctctacaagccggccttcgcgatcaaggccgataccaactacgcccagttggttcgggatctaggcaaggttgccgcggagagcggcgaacagtacttcatcgatacgatcctcatcgccacccacggcacggctggccaactctggctgggcaacccccacggcgagagcaccgcggacgtcatggcccggcgtgtccagggcaagcagttcgtcgagccccaggcctttggtgcgacccttctcgaactgttcggcaaggaactggccatcgccctctacgggtgcgacttcgccggggacgaggacggagaagcggcggccctcgagctgcgcatcgccgccaacgcgagagcggtctacgccggcaagggcacggtgtatctcaatgccagcaaagagggtcgttccacggtgacctgcagcaaggcgatggtggtctaccggaccgacaagatcgaggtactgggtggaaaccaggtaccggtattcgatatctga

SEQ ID NO: 320895 - DNA, 702 bp, Pseudomonas aeruginosa
atgcttccagacagcatggtgggtagcagcgcgcggcgccttcgtttgcggcggacgcgcgggcgtgtcgggcttggcctggtggccgggctgtcggtactggcaggcatgaccgacgccatcggtttcctcgccaccggcgacttcgtttccttcatgagcggcaacaccacgcgcctggcggtatcgctgggcgagggcgacttcggcgggctggtgcggctgagcgtcgccctggccagtttcgtcgtcggcaacgcgctgggagtgatactggcgcgcttcagcgggcgccgggcggcgccgatcctggtctgctgcgcgatgctgctggcgttgtcggcggtctggccattcgactggaacgtgccggcgctggtcgccgcgatcctcgccatgggcatgctcaacgccgtggtcgagcaggtcaacggcctgcccatcggcctgacctacgtcaccggcgccctctcccgcttcggccgcggcctcggccgctggctgctgggcgagcggcgcaacggctggcgggtgcaactggtgccctggagcggcatgtgcgtcggcgcggtgctcggcgccctactggaacagcaactgggcctcgcggcgatggcggcgagcgcagcgctggcggctcttctcgcgttgctggcactggtgattccgcggccatggcagatggactatatggtgcgttga

SEQ ID NO: 320896 - DNA, 423 bp, Pseudomonas aeruginosa
atggaagcgtgcgatacagcgggcattatggatgcgatcacggctgtcaccggcgtactcacccttctggtggcgtgggcagcattgttttcgtggcgccggcaagagcgtcagaaagcgatattggcgtggaaggccgatctggtggactacgcctacgggtttcccaatctgccggtgatatggggttaccagacgcacaaggacgagatcgaccaggccgcagagcgtttttatcggtgcgtgaaaagctacatggtcatgcgcgagctggtgtcgcggaagcgaatgaaagcctatgagcgaatctggcgccaggctcatttcgttcatgagaaatgtacattcgaagggcaaatgacctgcgccatcgcccgggatctgctttcccaggcttacctgaacgattttctgaaatcttga

SEQ ID NO: 320897 - DNA, 1491 bp, Pseudomonas aeruginosa
atgaaccgcagcgccctggatttccgccacttcgtcgaccacctgcgtcgccagggtgacctggtggacgtgcacaccgaggtcgacgccaacctggagatcggcgccatcacccgccgggtctacgaacgccgcgcacccgccccgctgttccacaacatccgcgacagcctgcccggcgcgcgggtactgggcgcgccggccggcctgcgcgccgacagggcccgcgcccattcgcgcctggcgctgcatttcggcctgccggaacacagcgggccgcgggacatcgtggccatgctgcgcgccgcgatgcgcgcggaaccgatcgcgccgcgccggctggagcgcgggccggtgcaggaaaacgtctggctcggcgagcaggtggacctgacccgcttcccggttcccttgctccatgagcaggacggcgggcgctatttcggcacctacggtttccacgtggtacagacgccggacggcagttgggacagttggtcggtgggccggctgatgctggtggaccgcaacaccctggcgggtccgaccattcccacccagcacatcggtatcatccgcgagcagtggcgccgccagggcaagccaacgccctgggcgatggccctcggcgcaccgccagcggcactcgcggcggccggcatgccgttgccggagggggtcagcgaagccggctacgtgggcgccctggtcggcgagccggtggaggtggtgcgcacgcagaccaacggcctgtgggttccggccaatgccgagatcgtcctggagggcgagatcagcctcgacgaaaccgcgctggaaggcccgatgggcgaataccacggctattccttccccaccggcaagccgcagccgctgttccacgtccatgcgctgagcttccgcgaccagccgatcctgccgatctgcgtcgccggcacgccaccggaggaaaaccacaccatctggggcaccatgatttccgcgcaactgctggacgtggcgcagaacgccggactgccggtggacatggcctggtgctcctacgaggcggcgacctgctgggccgtgctgtcgatcgacgtgcaacgcctggcggccctgggcaccgacgccgcggccttcgccgcacgggtcgccgagaccgtcttcggctcgcatgccggacacctggtgccgaagctgatcctggtcggcaacgacatcgacgtcaccgagatcgaccaggtggtatgggcgctggcgacccgcgcgcatccgctgcacgaccatttcgccttcccgcagatccgtgacttcccgatggttccctacctcgatgccgaggacaaggcacgaggcagcggcggtcggctggtgatcaactgcctgtacccggaacagttcgccgggcaaatgcgtgccgctacggcgtcgttccgccacgcctatccgacggcgctgcgcaggcgagtcgaagaacgctggagcgactacggattcggcgacgcctga

SEQ ID NO: 320898 - DNA, 465 bp, Pseudomonas aeruginosa
atgaccgagacgaacgcactggggctgccccaaggcccgctgtacctgatgacggagatcgtccgccagcgcgaacggcaactcaccgccctgcttgcccctctcgaactggggctgcatgaatggcgtgcgttgcggatcatccacgccttcgacggtgacgtgccgatgagcgtgctcatcgagcactcacagaccgaccgcactgcgctgggccggaccatcgaacggctggtgcggcgcggctgggtcagccgcctgccggatccggacgacgggcgcgccgtgctggtgcgccgcagccccgcggcacaggcggtgttcgagcaggccctggcacaggtcgcagggctcgacgaaaggctgctggcgggtctcggctccggcccggaagaagaggcgctgaccctcgtcctgggcaagttgctgcgggccttcgacgggctttcccgcgtgaggcaatag

SEQ ID NO: 320899 - DNA, 255 bp, Pseudomonas aeruginosa
atgccacgacacccgcacaccaccctgctcctctgcctttgcctgaccctgcccggttgcgagagcggccgcagctacagcctttccgaaggcgcgcctgtcacaggcatccgcatccagcgcgacgaccgctcgccgttgcagcgcctgcgggactgcgaacgccagggttgcagcgagcggcagaagatcgacccgttcacccccgatcctgactacctgcgcgcggaaggccacttcccgctgccctggtaa

SEQ ID NO: 320900 - DNA, 642 bp, Pseudomonas aeruginosa
atgaacgactacatcgcccggctgcgcgagaaatacgacgcccatttcggttgtgcgcccgccatgaccctggattgccgggacttctggagacactgcgtagcggcgccggaaatggcggtcttcgcttatcgcctggaaagcacccggcggccgcaccatgtggtgatcaccgccgggatgagccaggcaccgatgcatttcgcgccctacatgggcaaggcgcgctggtccgccgagctgatctgctatctcgacgaactgggcggcgatgacctgcgccacctgcaatggctcgccggcctgccattccacgagcgcctcgccctgggacatggacatgcggtggcgttcggcttcccgctctacgagcagagcctgctgcggcacttccttctcctcccggcgccgctggaggaggatgcctccctgttcgacggcttcgccctgtcggcgcatccggtcgacctgctgtgggtcgtgccgttgaccgagcaggaataccaggtgaacgtcaaggaacacctcgagggcatcgccaggctgctgaccgacgccggccacccgctcagcctcgaccggcaccgctattgctacgtcaccggccagtcgccggaagggctcgcacgggtgctgcactag

SEQ ID NO: 320901 - DNA, 435 bp, Pseudomonas aeruginosa
atgaaaaccgtggcacaactgttgaacgccaagcagaaccagcaggtgtacaccatcggagcggacgagatggtgctcgacgccctgcgcctgatggcggaaaagaacatcggcgcgctgctggtggtgaaccatggcgaggtggtcggggtggtcagcgagcgcgactatgcgcgcaagatggtcctcaagggccgttcgtccatcggtacgccgatcagcgcgatcatgagcgcgccggtggtcagcgtggactcgaagcagagcgtcgacacctgcatgaacctgatgaccgatcgccacctgcgccacctgccggtcgtggaagacggccagttgctcggcctgctgtccatcggcgacctggtcaaggcggcgatcgccgagcaggccgagctgatccagcaactggaacagtacatccgcggcgactga

SEQ ID NO: 320902 - DNA, 447 bp, Pseudomonas aeruginosa
atgtcctctccgccgaagatccgccgctacattcccgccgaccgcgatgccaccctcgccatctggctggaggcctcgcgcgtcggccacggtttcctcggcgaagccgagttgcagaagcagaaggcactggttcgcgatcattatctggatgcctcggaaacctggctggcgctggacggcgatacgccgctgggcttcatcggcctgctcgatgccttcatcggcggcctgttcgtcgccccgacggcccacgggcgcgggatcggccggcaactggtggagcacgcggcaaccctgaagggcgcgctggaggtcgaggtctacgccgccaaccgcgaggcgctggggttctacgcgcgctgcggcttcgtcgagagcggccgacgcccgcgcgacgacgaggggcgcgcgctggagatcgtccagttgcgccgcgaacactag

SEQ ID NO: 320903 - DNA, 867 bp, Pseudomonas aeruginosa
atgacggattccatccgcgacgtcccggtgttcaagctctacggcgctcccctcgaatggccgaccccggacctgctgcactgcgagtcgatccccgcccgcagtcgtctgcacgactgggagatcaagccgcaccggcacgccgatctcgctcagttgctctacgtgcgcaagggctgggcgcagctccaggtcgagggcgagccgactcgcgtcgagcagccttccatccagttcgtaccgccgttgtgcatccatggcttccagttctccgagcgcatcgacggctacgtgctgacgctcgccgcaccgttgctggcccgcttgcaggcgcacctcggcgcgcagcgccaggcgctggaggcgccggggttgtacccggtgggcgcggaccggcgctatatcgacacgctgttcgacgccatagacagcgagtacgccggcactgcgccggcgcgcgagctgttgttgcagtcgctgatcggcgtgctggcggtgtggctggggcggcaggtgatggtccggcgggcggaggcccggccgggtcgcggtcaggaatacctatcggccttttcgcaactggtcgagcggcatttccgcgagcacctgggaatcgacgagtacgcgcgtcgcctgggcatctccccggcacacctgaacggcgtggcgcgccgcctcagcgggcagaccgcactgggcatcgtgcaccagcgcctgctgctggaggccaagcgcgacctggtctacacggcgatgacggtgaacgagatcgccgaccgcctcggcttcagcgagccggcctacttcacccgtttcttcaagcgcctgagcggcgtctcgccgagcgttttccgtaagggcgactag

SEQ ID NO: 320904 - DNA, 1185 bp, Pseudomonas aeruginosa
atgaagactcaagtcgccatcatcggcgccggtccgtccggcctcctgctcggccagttgctgcacaaggccggcatcgacaacgtgatcctcgaacgccagaccccggactacgtgctcggccgcatccgcgccggcgtgctggaacagggtatggtcgacctgctgcgcgaggccggcgtcgaccggcgcatggcgcgcgacgggctggtccacgaaggcgtggagatcgccttcgccgggcagcgccggcgcatcgacctgaagcgcctgagcggcggcaagacggtgatggtctacggccagaccgaggtcacccgcgacctcatggaggcccgcgaagcctgcggcgccactaccgtctaccaggccgccgaggtgcgcctgcacgacctgcaaggtgagcgcccctacgtgaccttcgaacgcgacggcgaacggctgcgcctggattgcgactacatcgccggctgcgatggcttccacggcatctcgcggcaatcgatcccggcggagcggctgaaggtcttcgagcgggtctatccgttcggctggctcggcctgctcgccgacaccccgccggtcagccacgaactgatctacgccaaccatccgcgcggcttcgccctgtgcagccagcgttcggccacccgcagccgctactacgtgcaggtgccattgtcggagaaggtcgaggactggtccgacgagcgcttctggacggaactgaaggcgcgactcccgtccgaggtggcggagaaactggtgaccggaccttcgctggagaagagcatcgcgccgctgcgcagcttcgtggtcgagccgatgcagcatggccggctgttcctcgccggcgacgccgcgcacatcgtgccgcccaccggcgccaagggactgaacctggcggccagcgacgtcagcacgctctaccggctgctgctgaaggcctaccgcgaagggcgcggcgaactgctggaacgctactcggcaatctgcctgcggcggatctggaaggccgaacgcttctcctggtggatgacttcggtgctgcatcgcttccccgacaccgacgcgttcagccagcgcatccagcagaccgaactggagtactacctgggctccgaggcgggcctggcgaccatcgccgagaactatgtcggcctgccctacgaggaaatcgagtag

SEQ ID NO: 320905 - DNA, 1506 bp, Pseudomonas aeruginosa
ttgtccgatctcgcccagaacccgcccgccgtccgtaccgtcctcgccggcctgatgctgtcgatcttcctcagcgccctcgaccagaccatcgtcgccgtctccctgccggcgatctcggccgacttcgccgacctcgacctgctggcctgggtgatctcggcctacatggtggcgatgaccgtatcgatgccggtctacggcaagctcggcgacctctacggccgccgccgtctgatgctcttcgccatcgtcgtgttcaccgccgcctcgctgctttgcgggctcgcgcagagcatgggccaactggtgctggcgcgagtgctgcaggggatcggcgcgggcgggctgatggcggtgagccaggcgatcatcggcgacatcgtcccgccgcgcgagcgcggccgctaccagggttacttcagcagcatgtacgccatcgccagcgtcgccggcccggtgctcgggggcctgctcaccgagtacctgtcgtggcgctgggtattctggatcaacctgccgatcggccttctcgcgctggccatctcgcggcgaaccctggtcggcctgccggtgccgcgccggcaaccggtgatcgactacctgggcatcgtgctgatggtggtgggcctcaccgcgctgctcctggccatcacccagatcggccagggcgcagcctggagcgaccctgcgctgctcggcctgttcgccctggcggcgctcgccctgctgctgttcgtcgcccaggagcggcgcttccgcgaaccgctggtgccgatgcaactgttcgccgtccgcgccgccaccctcagttggctggttgcgttcttcgccagcttccaggccatctcgctgaccgtgctggtaccgctgcgctaccagagcgttaccggcgccggcgccgacagcgccgcgctgcatctgctgccgctggtcatgggcctgccgctgggcgcgtactgctgcgggcggctgaccgccagcctgggacgctacaagccgctgatcctgctcggcgccgtcctgttgccctgcggcatcgccggcctggccctggtcccggtcggcgaccactggctgtccgggctgtgcatgctgctcaccgggatcgccatcggtacccagttcccgaccagcctggtggccgcgcagaacgccgtggagcaacgccacatcggcgtcgccaccagcaacgcgacgttgttccgctccctcggcggggcggtcggggtggcgctgatgtcggcgatcctgctggccctgctcaagcacctgcggatcggcggcgggctcgaccagggcttttccgagagcgccctgctgagcagcctggacgccgccagcgggccggcccgggtgatcctccagcatgtcctcgcggatgccttcaaggtactcttcctggtcaacgcggcggtggcgctgctcggcctggcggtggcctcggcactgcccgacatgaccctgcgcggccgcggcgcgacgcaaccgacggcaggcgagtga

SEQ ID NO: 320906 - DNA, 447 bp, Pseudomonas aeruginosa
atgacgcgcacggtactggtcctgaacggccccaacctgaatctgctcggcacccgcgagccacagacctacggccggcggaccctgggcgaaatcgccgacgaatgcgcggccttcgccgagacgcgcggcttcgccgtggacttccgccagaccaaccaggaaggccaactgctcgactggatccaccaggcccgcggccgggtcgccggcatcgtcatcaaccccgccgcctggacccacacctcggtggcgctgcgcgacgccctggccgcggtggaactgccggtggtcgaagtgcacctgtccaacgtccaccagcgcgaagcgttccgccaccactcctacgtctcgccggtggcgctgggagtgatctgcggattcggcagcctcggctaccgcctggccctggaacatttcgccgagcgtttcgaggcggccgcatga

SEQ ID NO: 320907 - DNA, 855 bp, Pseudomonas aeruginosa
atgagcgcgccgcgatcggttctcgccggcctgatcggtgccggcatccaggcgtcgcggacccctgccctgcacgagcgcgagggcgacgcccagggcatccgctatctgtaccggctgatcgatctcgacccgctgggcaagtcggcggacgacctggagttcctgctcgccgccgccagcgacctcggcttcaccgggctgaacgtcaccttcccctgcaagcaggcgatcatccccctgctcgacgacctctccgccgaggcacgcggcatcggcgcggtgaacaccgtggtgctgcgcgatggccggcgcatcggccacaacaccgactgcctgggcttcgccgagggctttcggcgcggcctggccgacgcgccgcgccagcgcgtggtgcagatgggcgcgggcggcgccggcgcggcagtggcccatgcgctgctcgccgagggcgtcgagcggctggtcctgttcgacgtcgacccggcgcgggcccaggccctcgcggacaacctcaaccagcacttcggcgcgccacgagcgctcgccggcagcgacctggccggcgccctgggcgacgcccagggattggtcaacaccaccccggtgggcatggccaagctacccggcatgccggtgccggcggaactgttgcgcgccgacctgtgggtcgccgaggtgatctactttccgctggaaaccgagctgctgcgccaggcccgcgccctcggctgccgcacactggacggcggcaccatggcggtgttccaggcggtgaaggcattcgaactgttcagcggggtgacggccgacgccgcgcgcatgcaggcgcacttcgccagcctgggcgactga

SEQ ID NO: 320908 - DNA, 669 bp, Pseudomonas aeruginosa
atgtccaagcctgatcccgccgtcgtggaggaatccgctccgcgcggcaagggacgcaagaacaatcccgagaagacccgccaggacatcctccgcgccgccatcgacgagttcgtcgcccagggcctctcgggtgcgcgggtggacgccatcgccgagcgcacgcatacctcgaagcggatgatctattactacttcggcagcaaggagcagctctaccaggccgtgctggagaagctctacagcgacatccgcggtatcgagggcaccctgcggctgggcgcgctgccgccggccaaggcgatggagaagctggtggagttcagcttcgactaccacgaccggcacgtggatttcgtgcgcatcatcagcatcgagaacatccacaagggcgagcacatcgccagcagcgaactggtgcagagcgtcaacagctcgatcgtccagagcatcgccgagattctccgccgcggcgaagcggaaggggtgttccgcgccgggctggaggcgctcgacgtgcacatgctgatcagttcgttctgcttctaccgggtgtccaatcgctacaccgtgtcgcggatctttcgcaccgacctgcacgacgccgaggttcgccagcggcaccggcggatgattggcgaggcggtattgcgctacatccgtgcctga

SEQ ID NO: 320909 - DNA, 1905 bp, Pseudomonas aeruginosa
atgcagcgttcgatcgccaccgtatccctgagcggcaccctgccggaaaagctcgaggccatcgccgccgccggtttcgacggggtggaaatcttcgagaacgacctgcttcattacgacggcagcccgcgcgacgtacgccggctgtgtgccgacctggacctggagatcctgctattccagccgttccgcgacttcgagggctgccgccgggaacgcctggagcgaaacctggagcgcgccgaacgcaagttcgacctgatgcaggaactcggcaccgacctggtgctggtgtgcagcaacgtcgctgccgatgccctcggcgaaccggcgctgctggccgatgacctccggcagctggccgagcgcgccgccgtccgcggcctgcgcatcggctacgaggcgctggcctgggggcgccaggtgaacacctgggagcaggcctgggacctggtgcggcgggccgaccaggcgaacctcgggctgatcctcgacagcttccacaccctctcgctggacggcgatccccgcggcatcgccgatcttccgggggaaaagatcttcttcgtgcagatggccgacgcgcccttgctggcaatggacgtgctggaatggagccggcacttccgctgcttcccgggtcagggcggcttcgacctggcaggcttcctcgcgccggtcgtcgcgtccggctatcgcggtccgctgtcgctggaggtcttcaacgacggcttccgcgccgcgccgacccgcgccaacgccgtcgacggcctgcgctcgctgctctacctcgaggagaagacccgcgagcacctgcaacgccagacgccgcacgtggcggtggacgagctgttcgcgccgccgccggcgagcctctgcgacggcatcgagttcctcgagttcgccgtcgacgagacgctcggcgcgcgccttggccagtggttgcagcgactgggcttcgccagggccggcgagcaccgttcgaagaatgtcagcctgttgcgccagggcgacatcaacctggtactgaacgccgagccctattccttcgcccacggtttcttcgaggcccacggaccgtccttgtgcgccaccgcgctgcgcgtgcgtgacgccggccaggcgctggagcgcgctcgtgcgtacggaggccagccgtaccgcggactgctcggccccaacgagcgggaaatcccggcggtgcgcgccctcgacggcagcctgctgtatctggtcgagcggcacaccgagggccgcagcatctacgacagcgacttcgtgacgaacgacgccgacacctccggcctcggcctgcggcgcgtcgaccacgtggccctggcgctgcccgccgaaggcctggacagctgggtgctgttctacaagagcctgttcgacttcggcgccgatgacgaggtggtgctgcccgacccctatggcctggtcaccagtcgcgccgtgcgtagcccctgcggcagcgtgcgcctgccgctgaacatttccgaggaccgcaacaccgccatcgcccgttcgctgtccagctatcgcggttccggcgtgcaccacatcgccttcgattgcgccgacatcttcgccgccgtggcccaggccaaggaggccggggtcgcactgctggaaatcccgctgaactattacgacgacctcgccgcgcgcttcgacttcgacgacgagttcctcagcgaactggcctactacaacgtcctctacgaccgcgacgcccagggcggcgagctgttccatgtgttcaccgagccgttcgaggagcgcttcttcttcgagatcctccagcgccgccacgactacgccggctacggcgcggccaacgtgccggtgcgcctggcggcgatggcgcaagcgcggcggggtgtgcgccgggtcaagctgtga

SEQ ID NO: 320910 - DNA, 1326 bp, Pseudomonas aeruginosa
atgatccactcttccagctctcgactgctcgccgccgacgccccgcgggaatcccgcggcggcaggatccgcaacgccttcgccgtcggccggacgcgctggggcatgctcgccctggtgttcttcgccaccaccctgaactacatcgatcgcgccgccctcggcgtgatgcagccgatcctggccgagaagatgagctggacggcgatggactacgccaacatcaacttctggttccaggtcggctacgccatcggcttcatcctccagggccgcttcatcgacaaggtcggggtcaagcgcgcgttcttcctcgccgtgttgctctggagcctggccaccggcgcccacggcctggcgacctcggcggcgggcttcatggtctgtcgcttcatcctcggcctgaccgaggcggccaactacccggcctgcgtgaagaccacccgcctgtggttccccgccggggaacgggcggtggccaccggcatcttcaacgccggcaccaatgtcggcgcgatggtcaccccggccctgttgccgctgatcctcggcgtctggggctggcaggcggcgttcctctgcatgtcggcgctgggcctggtctggctggtgttctggtggcgcaactactacaaccccgaggagcatccgcgggtgaagcagagcgagctggaatacatccagcagcaggaggagccgcccgccacccgcgtgcccttctcgcagattctccgccgccgcggcacctgggccttcgccctggcctactcgatcaccgcgccggtgttctggttctacctctactggctgccgccgttcctcaaccagcagtacggcctgggcatcagcgtgacgcagatgggcatcccgctgatcctgatctggttgaccgccgacttcggcagcgtcggcggcggcatcctttcgtcctggctgatcggccgcggcatgccggcgatccgcgcgcgcctgctatcgatgctgctgttcgcctgcaccatcgtcggcgtggtgttcgccgccaacgccagcggcctgtggatcgccgtgctggccatcgccctggcggtcggcgcgcaccaggcgtggacggcgaacatctggagcctggtgatggactacacgcccaagcacctgatgagcacggtgttcggcttcggcggcatgtgcgcggcgctgggcgggatgttcatgacccagatcgtcggcggcgtactgaccgcgacgaacaacaactacgcggtgctcttcaccatgatcccggcgatgtacttcatcgccctgacctggctgtacttcatggctccgcgccggatcgaagcctga

SEQ ID NO: 320911 - DNA, 1266 bp, Pseudomonas aeruginosa
atgtcgcacccgagccacgtccgcgcgctctgcgcttccctctgcctgggcgccggcctgccagtccatgccgggcacgtccacgccgggcaaggtttcctcgaagacgccaaggccagcctcaccgtgcgcaatttccacctgcaccgcaacttcgtcggcgatgccagccaggacaagaccgaggagtggacgcagagcttcatcctcgacgcccactccggcttcacccagggcagcgtcggcttcggcctcgatgtcctcggtctctacagcctgaagctggatggtggcaagggaacggccggcacccaactgctgccgatccacgacgacggccgcccggccgacgacttcggacgcctggcggtggccggcaagctgcgcgtctcgaacagcgaactgaagatcggcgaatggatgccggtgctgccgatcctccgctccgacgatggccgctcgctgccgcagaccttccgcggcggccagctcagcgccaacgagatcgccggcctgaccctctacgccggccagttccgcggcaacagcccgcgcaacgacgcaagcatgcaggacatgtcgctgttcggccggccagccgccacttccgaccgcttcgatttcgccggcggcgaatatcgcttcaatggcgaacgcagcctgctcggtctgtggaacgccgagctgaaggacatctaccgccaacagtacctgcaactgcaacacagccagccgctcggcgactggctgctgggcgccaacctcggcggattccgtggccgcgacgctggcagcgcgcgcgccggcaagctcgataaccgcaccgtttccgcgctgttctccgcgcgctatgggctgcatagcctctatctcggcctgcagaaggtcagtggcgacgacggctggatgcgggtcaacggcaccagcggcggaaccctggccaacgacagctacaacgccagctacgacaatcccggcgagcgctcctggcaactgcgctacgacttcgacttcgttggcctcggcctacccggcctgaccttcatgacccgctacctgcatggcgaccatgtgcgcctggccggagtcaccgacgacggcagcgaatggggacgcgagagcgagctgggctacacgctgcagagcggcgccttcaagcgtctcaacgtccgctggcgcaactccagccagcgccgcgactggggcagcaatacccgcttcgacgagaaccggctgatcgtcagctatccgctgagcctgttgtga

SEQ ID NO: 320912 - DNA, 879 bp, Pseudomonas aeruginosa
atgaacgcatccacctccccgctgcccgccagcgaccagaccctgcgcggcatcctgctgatctgtgccgcggtgttcctgttcgccagccacgacgggttgtccaagttcctttccggtttctacccgatcgtcatggtggtctgggcccgctacctggtgcacaccctgttgatggtcgccgtgttcgtgccgcgcaacggcctcgcggtgatccgcagccgccgtccgctcatgcagttggcgcgggcgctgtgcctgatcggcaccagcctgttcttcaccaccggcctgcgctacctgcccttggccgaggcgaccgcggtgaacttcctggcaccgctgctggtgaccgcgttatccgtgccgctgctgaaggagaaggtcagcctcggccaatggctggcggtgctcaccggcttcatcggcgtgctcttcatcgtgcgtcccggtggcgcgctgttcaccccggcggcgttgttcccgctcggctcggcgctgtgcttcgggctctaccaactgctcacgcggatgctcgccaacagcgacagcccgaccaccagcaacttccttgccggcatcttcaacacgctcatcatgagcctgctggtgccgttcttctggcagactccaagtcttctccacggcctgatgatgatcgccctgggcggttgcggcatgggcggccacctgctgctgacccaggccttccgccatgcgccgccggcgaccctggcgccgttcagctatggccagatcatcttcgccggcctgctcggcctgctggtgttcggccacgtgccggatgcctgggcgctgctcggcatcctcgtcatctgcgccagcggcctggtggtcgcctggcgccgtggccgctga

SEQ ID NO: 320913 - DNA, 816 bp, Pseudomonas aeruginosa
atggaatcgaggattctttccctggcggcgctcaccgtgctcgagctgtcgcccccggacatggtcgaggctgccgcccgcgccggctacagtcatgtcggcctgcgcctggtgccggcaaccgtggaagagcaccactatccgctgctggccgatgccggcctgcgccggcggaccctggcgcggctgcgcgacagcggagtgcgcacgctggacgtggagatcctgcgcctgcgtccggacacccgcgtcggcgagttcgccgcggtgctggaggtcggcgccgagttcggcgcgcgctatgtgctggtggccggcaacgatgacgacgaacggcgcagcgcggacaatttcgccgcgttgtgcgacctggcgtggccgctcggcctcgacccgcacctggagttcatgccctggaccgggatccgcgacctgcggcaggccgggcgggtggtcgaggcggcggcgcgggacaacgccggcctgttgctggacgccttccatttcgaccgctcggccagcagcctggaagacctgcgggcgatcccgcctgcgcgcctgggctacgcgcaactctgcgatgtcgtcgggccgcgtccgacgtcgatggacgaaatccttcgccaggcccgcgaggaacggcgcttccctggcgatggcgggctcgatctgctggcgctgctgcgcgccttgccggagaacctgccgctgagcctggaggtgcccgcgctggatctgctcgcgcgcggcgtggatggcgcggagcgggcgcggctggcgatcgagcggacccgggcgctgctcgcccgcctgtag

SEQ ID NO: 320914 - DNA, 1044 bp, Pseudomonas aeruginosa
ttggacgcaccgcttcgcatcgccctcatcggcgccggcaatatgggccgccagcattaccaccgcttgcagcgaatcgccggcgcgcgcctgtgtgcggtggccgatccgcagggccaggcgttcgccgcggacgccggcgtgccctggttcggcgatcatcggaggttgctggaagaagcccggccgcaagcggcgatcgtcgccaatccgaacaacctgcatgtcgccaccgccctcgactgcctcgccgccggggtgccgctgctgctggaaaaaccggtcggcgtgcagctcgacgaagtgagcgagctggtggccgtcgcccggcgatctggcgttccgctgctggtcggtcaccatcgtcggcacaatccgctggtcgtgcgggcgcgccaattgatcgccgagggcgcgctcggtcggttgctgtcggtcaccgcgctctggcagttgaagaagcccgacagttatttcgaggtggcctggcgtcgcgagcccggcgcgggaatgttgctgaccaacctgatccatgacctcgacctgctccgccacctgtgcggggaagtgcgggaggtgcaggcgctggccggcaacgctatccgtggcctgcccaacgaagacaacatcgcgctgctcctgcgcttcgccaatggcgccctgggcagcctgaccggttgcgacgctgcggcggcgccctggagctgggagctggcagccggggagaacccggtctatccgcgccaggccgagcaaccctgctacctgctggccggcaccgagggtgccctgagccttccccagctccgccgctggcgctacgccgaggcccggcagggctggcacgacccgctggcggccagcgtggaggccgtggcgacaggcgatcccctgcaacgccagctagagcacttcgtccgggtcgcgcggggcgaggaagcgccattgatggatgccaccgacgccgctcgcaccctggcgctggtcgaggcggttcgcgaggccgcgcgcagtggccgggcctgcgcgccggccagtttctga

SEQ ID NO: 320915 - DNA, 780 bp, Pseudomonas aeruginosa
atggccggtagcctcatcgaacgcgccctcggcttgctcgaactcctcgccagcgatgcccgtggcctgcccctgcaacaactggcggaccgcctggatatccccaagagcgccgcgcaccgcatgctcgccgagctgatccggctcggctacgtgcgccaggacgacgacaccagccgctaccgcctcagcacccgcctggccgcgctgggcttccgcttcctcgcttccagcggggtggtcgacctggtccagccggtgctcgacgggctcgcccgggagaccggcgaactggtgcgcctgggggtgatcgaaggcgatcgccagacctggatcgccaagtcccagggcgccacctccgggctacgctacgaccccgacatggggcgcgaggcgccgctgttctacaccgcatccgggcacgcctggctggccagcctgagcgacaaggcggcgctggcgctggtggagcgccagggcgtaggggcggcgcgggacttcggtcccaacgcgccgcgctccaggagcgagctgctgcgctacctgaagcgcgcccgcgagcacggctatgcctggcagatcgaatgctcggcgccgggcatggcggcgatggccgcactggtgcgccaccccgaggacggacgggctctcggcgtgctcagcgtggccgggccgagcgcacgcttcggcgaggcgcgcatgcacgaactggcgcccctgctcctggccgcggcgcaggacctgtcccacgccagccaggcgtccgagctgttccgctga

SEQ ID NO: 320916 - DNA, 1347 bp, Pseudomonas aeruginosa
atgaacagccccagcctgcccgccgtcgaacgactcgacgtgcaagccttcatcaatgcccagccgctttcgccgtaccaatggcggatcgtcctgctgtgcttcctgatcgtcttcctcgatggcctcgacaccgccgcgatgggcttcatcgctccggcgctgacccaggactggggcatcgaccgcgccagcctcgggccggtgatgagcgccgcgctgatcggcatggtcttcggcgccctcggctccggaccgctggccgaccgctacggacgcaagctggtattggtcgcggcggtcttcctcttcggcctgttcagcctggcctcggcctacagcaccaacgtcgagcaactgctggcgctgcgcttcctcaccggcctcggcctcggcgcggcgatgcccaacgccaccaccctgctttccgaatacacccccgagcgcctcaagtcgctgctggtgaccagcatgttctgtggcttcaacctgggcatggcctgcggcggattcgtctcggcgaagctgatcccgctgttcggctggcacagcctgctgctgctcggcggcctgctaccgctggtcctggcggtagtcctgctgttccgcctgccggaatcggcgcgctacctggtggtgcgcaaccgcggcagcgagcgggtacgccaggtgctggcccccatcgccccggcgcaggtggcgctggcacggagtttccacgtccccgagcagcagacggtgcaggcccgcaacgtgttcgcggtgatcttttccggtacctacagcgccggcaccctgctgctctggctgacctacttcatgggcctggtgatcgtctacctgctcaccagctggctgccgaccctgatgcgcgatagcggcgcgagcctggagcaggcggcgttcatcggcgcgctgttccagttcggcggggtgctcagcgccgtagcggtgggctgggcgatggatcgcttcaacccgcacaaggtgatcggcctgttctacctgctggcgggggtgttcgcctggtgcgtcggccagagcctcggccaggtcaccctgctggcgaccctggtgctgctggccggcatgtgcatcaacggcgcgcagtcggcgatgccgtcgctggcggcgcgcttctatccgacccaggggcgggccacgggggtctcctggatgctcggtatcggccgcttcggcgccatcctcggcgcctggatcggcgccaccctgctgggcctgggctggaacttcgaacaggtgctgaccgccctggtgctgccggctgcactggccaccgccgcggtgctgctgaaggggttggtcagtcacgcggatgcggggtga

SEQ ID NO: 320917 - DNA, 834 bp, Pseudomonas aeruginosa
atgaagaagatgatgcagggcgccgccgccctgatcgcgctcgtcggcgccggggagagcatggcgctggaatggatgagcaacagcgtcggtttccgttacggccagcaattcaccaacccgaacaacccggacaagttcgccaagcgcatctacagcttcacccacgccgacggctatcgctacggcagcaatttcttcaatctcgatgtgttcctttccgacaaccgcgacccgcgcaagggcaccgaccatggtggcagcgaagtctatgcggtctaccgccaccagctctacgcttcgcgggtgttcgaccggccgctgggcaccggcctggtcaaggactacgccttcaccctgggcttcgacgccagccgcaacaacaacctggcttcggccaagaagcgcgccctggtgttcggcccgaccctcaagttcaacggtcccggcgtgctcgacctgagcctgctctactaccgcgagaagaaccacttcggcgtgcccggcgcgcgccatcccgaccacaccttcgacaccacctacatgctcaacctgacctggatgcggccgtttaaggtcggcaaccatgcggcgaagttccagggcttcgtcaactacgtgggagagaagggcgaggactacaacgacaaggacaccgcggcggaaaccctggtccgcaccgccctgatggtcgccgccctgccaggcgacaagcgccagccgaacctgtggctcggcgtcggctacgagtattggcacaacaagttcggcgtcgacggtggcaccggcagccgcacctcgacgccgacgttgaatatggaattcaccttctga

SEQ ID NO: 320918 - DNA, 942 bp, Pseudomonas aeruginosa
atgagccgcaagctgcatatccacgcgcccgcgatccactacttcgacatggttcgccgctgccattcgatccgcgaagccgcgcggcgcctgaacgtcgcctcgtcggcggtgaaccggcagatcctcaagctggaggacgagatcggcgcgccgctgttcgaccgcctgcccggcggcctgcgcctgaccggagccggggagatcttcgcgcgccacgtcaccgtggtcctgcaggacatggagcgcgtgcgttccgaactggacgcgctgcaaggcctgcgcaccggccatgtggagatcgccaccatcgaagcggtgaccagcgacctgctgccctgcgtgctcaaggcgatgcgcgaacgctacccggacatcaccgtcggcgtcaccctgctcggttcccaggcgatacccgaggcggtgagcagtggcgcggtcgacctcggcctggccttcgccctgccgcgcagcgccgacctgcaacaggtcagcgtcggccatttccgcctcggtgccatcgtctccccgcagcacccgttggcgcgacaccaggccatcgccttcgccgattgcgtcgaacatggcctgatcatggccaagagcgagctgtccatccatcacctgctggcgccgctccagcgccgtttgcgcgaaccgcgccgggcggtgctggagagcagctccctggagctgtcgcgacaactggcgcggcgcgggctcggcgtcgccttccagacccgcctggggatcgaggccgacatcgcccagggcgagctgcgtttcctgccgctgaaagacaatggcggcatccacagcgacctcggcctctacgtgcgtaccggccgttacctgccggtggcggtggacgccctggcccggcagatcgccgaggaagtgcgcctgcgcgagcgcgaggaagcgcgcctgaacgaggcctga

SEQ ID NO: 320919 - DNA, 402 bp, Pseudomonas aeruginosa
atggacgagaaacaacgctacgaagccggcatgcaagtgcgccgcgcggtgctcggcgacgcccatgtcgagcgcagcctggccaacctgacgccgttcaacgaagagttccaggagatgatcacccgccacgcctggggcgacatctggacccgtccggggctgccgcgacacacccgcagcctggtcaccatcgccatgctgatcggcatgaaccgcaacgaggaactcaagctgcatctgcgcgcggcgaagaacaacggggtgagccgcgacgagatcaaggaagtgatcatgcagagcgccatctactgcggcattcccgcggccaacgcgaccttccacctcgccgaatcggtgtgggacgagcttggcgtggagtcgcagcaggcgtcccggtag

SEQ ID NO: 320920 - DNA, 792 bp, Pseudomonas aeruginosa
gtgccaaccgtacgcctcgccgacggcgacctgaactactccctggaaggaccggccggcgcgccggtcctgctgttgtcaaactcgctgggcaccgacctgggcatgtgggacacgcagatccccgcactcaccgcccacttccgcgtgctgcgctacgacacccgcggccacggcgcctcgctggtcacccccggaccgtacgccatcggccagctcggcgccgacgtgcttgccctgctcgatgccctcgacctgccgcgcgtgcatttctgcgggctatccatgggcggcctgatcggtcagtggctgggcatccacgccggcgagcggctcggccggctggtgctgtgcaacactgcggcgaagatcgccagcgacgaggtctggaacacccgcatcgataccgtcctgaaaggcggcgagcaggccatgcgcgacctgcgcgacgcctcggtggcgcgctggttcaccgagggcttcgccgagcgcgaaccggcgcaggtcgagcgcatcgtcgcgatgctcgcgaccacctcgccgcagggctacgcggccaactgcgctgcggtacgcgacgccgacttccgcgagcagctcgggctggtccaggcgccgacgctgatcgtcgccggcagccacgatgccgtgaccactccggacaacgcccgcttcatgcaggcgcgcatcgccgacgcgcagttggtcgagttcgccgccgcgcacctgtccaacgtcgaagcgggcgacgccttcagccgccgcctggtcgatttcctgctgtccgcctga

SEQ ID NO: 320921 - DNA, 1380 bp, Pseudomonas aeruginosa
atgagcgacatacccgccaaccagttgttcgatgcctatttcatggcggcgccgatgcgcgcggtgttctccgaccgcggccgcctgcaaggcatgctcgacttcgaggccgccctggcccgcgccgaggcgcgcaccggggtggttcccgcgacggcggtggcgccgatcgaggcggcctgccgcgccgaactgtacgacccgctggcgctggccgaggcggtcgccactgccggcaactcggcgatcccgctggtcaaggcgctgggccgccaggtggcggctggcgacgccgaggccgagcgctacgtgcatctcggcgccaccagccaggacgccatggacagcggcctggtgctgcaactgcgccgtgcgctggccttgctcgagcaggatctgcaacgtcttgccgaggtcctggcggaccaggccgaacggcatgccgacacgccgctggccgggcgcacctggttgcagcacgccaccccggtgaccctgggcatgaagttcgccggcctgctcggtgccttgacccggcaccgccaacgcctgcgcgagttgcgcccgcgcctgctggtgctgcaattcggcggcgcctcggggacgctcgccgcgctcggcgaacaggccctgccggtggccgcggcgctggccgaggagctgggcctggctttgcccgaacaaccctggcacacccagcgtgaccgcctggtggagttcgccagcgtgctcggcctggtggccggtagcctcggcaagttcggtcgcgatgtcagcctgctgatgcagaccgaggccggcgaggtcttcgagccggccggcgccgggcgcggcggttcctcgaccatgccgcacaagcgcaacccggtgagcagcgcggtgctgatcgccgccgccacccgtgcgccggggctggtctcgaccctgttcgcggcgatgccgcaggaacacgagcgcagcctcggtctctggcacgccgagtgggaaaccctgccggaactctgttgcctggtttccggcgcgctgcaacaggcgatcggcctgctcgaaggcctggaggtggacgcccagcggatgcgccgcaaccttggcctgacccacggcctggtgctcgccgaggcggtgagcatcgccctggcccgccgtatcggccgcgaagccgcgcatcacctggtggaacagtgctgccgccgcgccgtcgagcagcgccgcgagttgcgcgcggtgctcggcgaagaggcgcgagtgagcgccgagttgtccggcgacgaactggaccgcctgctcgatcccgcccattacctcggccaggcccgcgcctgggtcgagcgcgcgctcgccgaacaccatgccctgggcttcgacccccatcccgcctga

SEQ ID NO: 320922 - DNA, 1299 bp, Pseudomonas aeruginosa
atgactgcccctgttcaccagtacagcaacgaagaacgccgcaagcgcatcttcgccatcgtcggcgcctcctccggcaacctcgtggaatggttcgacttctacgtctacgccttctgcgcgatctacttcgcaccggccttcttcccctccgacaaccccacggtgcagttgctgaacaccgccggggtcttcgccgccggcttcctcatgcgccccatcggcggctggatgttcggccgcatcgccgacaagcacgggcgcaagaccgccatgctgatctcggtggtgatgatgtgcgccggctccctggcgatcgcctgcatgcccacctacgccagcatcggcaccctggcgccggccctgctgttgctggcgcggatgttccagggcctgtcggtgggcggcgagtacggcaccagcgcgacctacatgagcgaggtggcgctcaagggccagcgcggcttcttcgcctcgttccagtacgtcaccctgatcggcggacagttgctggcggtgctggtggtggtgatcctgcagcagttgctgagcgaagacgaactgcgcgcctggggctggcggattcccttcgtgatcggcgcgatcaccgcggtgatcgccctctggctgcggcgctcgctgaacgagaccgcttcgaagtcgaccctggagcgcaaggaatccggcaccttcgccgagctgttcaagcacaagcgggccttcttcaccgtgctcggcttcaccgccggcggctcgctgatcttctacaccttcaccacctacatgcagaagtacctggtcaacaccgccgggatgagcgccaagaccgccagcgcggtgatgaccttcgccctgctggcgtacatgctgatgcaaccgctgttcggcatgctttccgatcgcatcgggcgcaagacctcgatgctctggttcggcaccctgggcacgctctgcaccctgccgatcctgctcgcgctgaagaccgtgagtagtccctacatggccttcttcctgatcatcctggcgctggccatcgtcagcctgtacacctccatcagcggcctgatcaaggccgagatgttcccgccggaggtgcgcgccctcggcgtcggagtgtcctacgcggtgggcaacgcgatcttcggcggctcggccgagtacgtcgccctggggctgaagtcggtagggatggagaacgtcttctactggtatgtttcagccatgtgcctgctggcgctgctggtctgcgtgagcctgccggacctgcgcaaggtcagctacctgaacgacgagccctga

SEQ ID NO: 320923 - DNA, 1206 bp, Pseudomonas aeruginosa
atgagccgcgaggtattcatctgcgatgccgtgcgcacgccgatcggccgtttcggcggcagtctttccgcggtgcgcgccgacgacctcgcggcggtgccgctgaaggccctggtcgagcgcaacccgggggtcgactggtcggcgttggacgaggtgttcctcggctgcgccaaccaggccggcgaggacaaccgtaacgtggcgcgcatggcgctgctgctggccggtttgccggagagcgtgcccggcgtcaccctcaaccgcctctgcgcctcggggatggacgccatcggcacggcgttccgcgccatcgcctgcggcgagatggagctggccatcgccggcggcgtcgagtcgatgtcgcgcgcgccgtacgtgatgggcaaggccgatagcgccttcgggcgcggccagaagatcgaggacaccaccatcggctggcgcttcgtcaatccgctgatgaaggagcagtacggcatcgacccgatgccgcagaccgccgacaacgtcgccgacgactatcgcgtgtcgcgtgccgaccaggatgccttcgccctgcgcagccagcagcgcgccggcagggcgcaggaggccggtttcttcgccgaggaaatcgtcccggtgacgattcgcgggcgcaagggcgacaccctggtcgagcacgacgagcatccgcgtcccgacaccaccctggaggcgctggcccggctcaagccggtcaacgggccggagaagaccgtcaccgccggcaacgcgtccggggtcaacgacggcgccgccgcgctggtcctggcctccgccgaggcagtggagaagcacggcctgactccgcgcgcgcgggtgctgggcatggccagcgccggcgtcgccccacggatcatgggcatcggcccggtgccggcggtgcgcaagctgctgcggcgcctggacctggcgatcgacgccttcgacgtgatcgaactcaacgaagccttcgccagccagggcctggcctgcctgcgcgaactgggcgtggccgacgacagtgagaaggtcaacccgaacggcggtgccatcgccctcggccacccgctggggatgagcggtgcgcggctggtcctcaccgcgctccatcaacttgagaagagcggcggccggcgcggcctggcgaccatgtgcgtaggcgtcggccaaggcctggcgctggccatcgagcgggtctga

SEQ ID NO: 320924 - DNA, 783 bp, Pseudomonas aeruginosa
atgagcagctacagcaccaacgagatgatgaccgtggccgccgcccgccgcctgcacaacggcgcggtgtgcttcgtcggcatcggcctgccgtcgaaggccgccaacctggcgcgcctgacttcctcgccggacgtcgtgctgatctacgagtccgggccgatcggcgccaagcccagcgtcctgccgctgtccatcggcgacggcgagttggccgagaccgccgataccgtggtccccaccggcgagatcttccgctactggctgcagggcggacggatcgacgtcggcttcctcggcgcggcccaggtcgaccgcttcggcaacatcaacaccaccgtgatcggcgactaccgccagcccaaggtgcgcctgccgggagccggcggcgcgccggaaatcgccggcagcgccaaggaagtgctgatcatcctcaagcagtcgcaccgcaccttcgtcgacaagctggccttcgtcacctcggtcggccatggcgagggcggcgactcgcgccagcgcctgggcttgccgggcaaggggccggtggcgatcatcaccgacctgtgcatcatggagccggaagccggcagcaacgagttcgtggtcacttcgctgcatccgggcgtgacccgcgagcaggtggtcgaggccaccggctgggcgatccgcttcgccgagcgggtcgccgagacgcccgcgccgagcgaggtcgaactcgccgcgctgcgcgacctcgaggcgcgcaccgcggccgcccatggacagaaggggagcgacgaatga

SEQ ID NO: 320925 - DNA, 852 bp, Pseudomonas aeruginosa
atggctgaaatcctctccctgcgcgaagcggtgcgacgcttcgtccacgatggcgacagcgtcgccctcgaaggcttcactcacctgatcccgacggccgccggccacgagctgatccgccagggcaggaaagacctgacgctgatccgcatgactcccgacctggtctacgacctgctgatcggtgcaggctgcgcgaagaagctggtgttctcctggggcggcaaccccggcgtcggttcgctgcaccgcctgcgcgacgcggtggagaagggctggccgcaaccgctggagatcgaggaacacagccacgccgacctcgccaacgcctatgtcgccggcgcctccgggctgcccttcgcagtgctgcgcgcctacgccggctccgacctgccgaaggtcaacccgctgatccgcagcgtcacctgcccgttcaccggcgaagtgctggcggcggtgccctcggtgcgcccggacgtcagcgtgatccacgcgcagaaggccgaccgcaagggcaacgtgctgctctggggcatcctcggcgtgcagaaggaagcggccctggcggcgaagcgctgcatcgtcaccgtcgaggagatcgtcgacgaactggacgccccgatgaacgcctgcgtcctgccgagctgggcgctcagcgccgtgtgcctggtgcccggcggcgcgcatccgtcctatgcccacggctactacgagcgcgacaaccgcttctaccaggactgggacccgatcgcccgcgaccgcgaaagcttcaccgcgtggatcgacgaatacatccgggggaccgaggatttcggggccttccaggccaagctcgcggagggcaagcgatga

SEQ ID NO: 320926 - DNA, 540 bp, Pseudomonas aeruginosa
atgtccatgcgcttgaaattgctgagaaaaaaactcggggtcacgctggagaccctggctgagaagaccggcctgaccaagagctacctgtccaaggtcgagcgcgggctgaacacgccgtccattgccgccgcgctgaagctggcgaaggcgttgaacgtgcaggtggaggagctgttctccgaggaaagcgacggtgtcgacggctacagcatcgttcgtcgcgaccagcgcaagtcgctgtccagcggcgacgacggcccggcctacgcctccctcgcgcagcagatcggcgcccgcgcgctgttgccgttcatcgtccaccccccgcgcgatttcagtcactcgacgttcaaggagcacctcggcgaagagttcatcttcgtccatgagggccaggtcgaggtcgacttcatgaaccagcggatcatcctcgagcgcggcgacgccctgcatttcaacgcacagaagccgcaccgcatccgctccctgggggagacccaggcggaattgctggtggtgatccacagcgacgaatga

SEQ ID NO: 320927 - DNA, 783 bp, Pseudomonas aeruginosa
atggctacgacactggaattacccaaggatcaactgatccagcacgcgctgaagcagatgaaaagcagcctcggcgataatacgtggactgaccggcaaaagctggccctgacctgccggattctcttcgaggccggccacgactccgggctcgccgggcagatcacctcgcgcggcccggaggcggggacctactacacccagcaactgggcctgggcttcgacgagatcagcgccggcaacctgctgctggtcgacgaagacctcaacgtcctccacgggcacggcatggcgaatccggccaatcgcttccacagctgggtctatcgcgcccgcccggacgtcaactgcatcatccacacccacccgctgcacatcgccgcgctgtcgaccctggaagtaccgctgcaggtctcgcacatggacctttgcccgctatacgacgactgcgccttcctcaaggactggccgggcgtgccggtaggcaacgaggaaggcgagatcatctccgccgccctcggcgacaagcgcgccatcctgctctcccatcacggcctgctggccaccggtgcaagcatcgaggaggcctgcgtgatcgcggtgctgctcgagcgcgcggcgaagatgcagttgctggcgatggccgccggagagatcaagccgatcccgccggccctggcgcgcgaggcccacgactggatctccaccccgaagcgccacggcgccgcattcaactactacgcccggcgctgcctgccgcgcaacagcgactgcctgagctga

SEQ ID NO: 320928 - DNA, 882 bp, Pseudomonas aeruginosa
atgtccgcatccatccacggcatcatcggctacaccatcacccccttcgccgccgacggaggtctcgacctgccggccctcggccgctccatcgagcgcctgatcgacggcggcgtgcacgccatcgccccgctcggcagcaccggcgaaggcgcctacctgagcgacccggaatgggacgaggtggtcgacttcaccctgaagaccgtcgcccatcgcgtgccgaccatcgtcagcgtctccgacctgaccaccgccaagaccgtgcgccgcgcgcagttcgccgaatccctcggcgccgaggcggtgatggtcctgccgatctcctactggaagctcaacgaggcggaagtgttccagcactaccgcgcggtgggcgaagccatcggcgtgccggtgatgctctacaacaacccgggcaccagcggcatcgacatgtcggtggaactgatcctgcgcatcgtccgcgaagtggacaacgtaaccatggtcaaggagagcaccggcgacatccagcgcatgcacaagctgcgcctgctcggcgaaggccgggtgcccttctacaacggctgcaacccgctggcgctggaggccttcgtggccggcgcgaaaggctggtgcagcgccgcgccgaacctgatcccgacgctcaacggccagctctaccaggcggtgctcgacggcgacctggagaaggcccgcgcgctgttctaccggcagttgccgctgctcgacttcatcctccgccggggcctgccgaccaccatcaaggccggcctgggcctctccggcctggaggtgggggcgccgcgccttccggtgcaggcgctggataccgagggctgtcggtatctgcaggggttgttggaagagctgcgctga

SEQ ID NO: 320929 - DNA, 1059 bp, Pseudomonas aeruginosa
atgttcaagtccttgcaccagtacgcacacgtgttttcccggttgtccctgttcggcctggcgttcgccgcggcggcccaggcgcagagccagagcctgacggtgatctccttcggcggcgcgaccaaggccgcccaggaacaggcctatttcaaacccttcgagcgaagcggcggcgggcaggtggtcgccggcgaatacaacggcgaaatggccaaggtgaaggccatggtcgacgtcggcaaggtcagctgggacgtggtcgaggtggagagccccgaactgctccgcggctgcgacgaggggctgttcgaacgcctcgacccggcgcgtttcggcgaccccgcgcagttcgtccccggcactttcagcgagtgcggggtggccacctacgtctggtcgatggtgatggcctacgactcgacgaagctggccagggcgccgcagtcctgggcggatttctggaacgtccgcgagttccccggcaagcgtggcctgcgcaagggcgccaagtacaccctggaagtggcgttgctggccgacggggtgaaggcggaggacctctacaaggtacttgccaccccggagggggtcagccgcgccttcgccaagctcgaccagctcaagccgaacatccagtggtgggaggccggcgcccagccgccgcaatggctggcggccggcgacgtggtgatgagcgcggcctacaacgggcgcatcgccgctgcgcagaaggagggggtgaaactggccatcgtctggcccggcagtctctacgatccggagtactgggcggtggtgaagggcacgccgaacaaggcgctggcggagaaattcatcgccttcgccagccagccgcagacgcagaaggtgttctccgagcagatcccctacgggccggtacacaagggcaccctggcgttgctgccgaagacggtgcaggaggcgctgccgaccgcgccggccaacctcgaaggcgcgcgggcggtggatgccgagttctgggtggaccacggcgaggagctggaacagcgtttcaatgcctgggcggcgcgctga

SEQ ID NO: 320930 - DNA, 1383 bp, Pseudomonas aeruginosa
atgaccgctcagctcaacccgcagcgcgacacccgcgactaccagcaactggacgccgcgcaccacatccacgccttcctcgaccagaaggcgctgaaccgcgaaggcccgcgggtgatggtccgcggcgatggcctgcagctctgggacaacgacggcaagcgctacctggacggcatgtccggcctctggtgcaccaacctcggctacggccgccaggacctcgccgccgccgccagccgccagctggaacaactgccgtactacaacatgttcttccacaccacccacccggcggtggtggagctttccgagatgctcttcagcctgctgccggaccactacagccacgcgatctacaccaactccggctccgaggccaacgaggtgctgatccgtaccgtgcggcgctactggcagatcctcggcaagccgcagaagaagatcatgatcggccgctggaacggctaccacggctcgaccctgggcagcaccgcgctcggcgggatgaagttcatgcacgagatgggcggcatgctgccggacttcgcccacatcgacgaaccctactggtacgccaacggcggcgagctgagcccggccgagttcggtcgccgcgcggcgctgcaactggaggagaagatcctcgaactgggcgcggagaacgtcgccgccttcgtcgccgagcccttccagggcgccggcggcatgatcttcccgccgcaaagctattggccggagatccagcgcatctgccggcagtacgacgtgctgctgtgcgccgacgaagtgatcggcggcttcggccgcaccggcgaatggttcgcccacgaacacttcggcttccagccggacaccctgtccatcgccaagggcctgacgtccggctacatccccatgggcggcctggtactcggcaagcgcatcgccgaggtgctggtggagcagggcggggtgttcgcccacggcctgacctattccggccacccggtggcggcggcggtggccatcgccaacctcaaggcgctgcgcgacgagggcgtggtcacgcgggtcagggatgagaccggaccttacctgcaacgctgcctgcgcgaggtcttcggcgaccatccgctggtcggcgaggtccagggcgccggcttcgtcgccgcgctgcagttcgccgaggacaaggtgacccgcaagcgcttcgccaacgagaacgatctggcctggcgctgccgcaccatcggcttcgaggagggcgtgatcatccgctccaccctcggccgcatgatcatggccccggcgctggtggccgggcgtgccgagatcgacgaactgatcgacaagacccgtatcgcggtggatcgcaccgcgcgcgagatcggcgtgctctga

SEQ ID NO: 320931 - DNA, 1434 bp, Pseudomonas aeruginosa
atgaacgacacgccgaacgtgcgtgagccggccctgcgccgcgtgctcgggctgggaccgctgctggcggtggccatcggcctggtggtttcccagggcgtgatggtactgatgctgcaaggcgccgggacggccggcctcggcttcatcgtgccgctgggagtggcctacctgctggcgctgagctacgccttttccttttccgagctggccctgatgattccccgcgccggtagcctgagcagctacaccgaggtggccatcgggcatttcccggcgatcctggcgaccttttccggctacgtggtggtggcgatgttcgccctctcggcggaactgctgctgctcgacctgatcatcggcaaggtctaccccggcgcgctgccgccgatgctggtggcctacggcgtgctcggcctgttcaccctgctcaacctgctcggcatcgacatcttcgcgcgcctgcagagcgcgctggcgctgctgatgatgatcgtcctgctggtgctcggcctgggtgcggtgagcagcgaccacgcttccgcgcagaccgccctggcgagcggctggaacccgctcggggtaagcgccctggcgctcaccgcgatggccgtgtggggcttcgtcggcgccgagttcgtctgcccgctggtggaggagacgcggcgtccggagcgcaacatcccgcgttcgatgatccttggcctgagcatcatcttcctgaccatcgccctctactgcttcggtgcgctgctgtgcatcccgcaggcggaactggccggcgacccgctgccacacttcctcttcgccaaccgtgtgttcggcgagtacggccagctgttcctggtgatcgccgcgatcaccgccacctgcagcaccctcaactcgtcgctggcggcgatcccgcggatgctctacgggatggcgcagaacggccaggccttcccgcaattcaagcagctcagccggcgggcgcgcacgccctgggtggcggtgctgttcgtcgccgcgatcatcggcctgccgatcctgatcctcggccaggacccggactcgatcaacctgctgctgctcgccgccgcgctggcctggctgctggcctacatcatcgcccacgtcgacgtgctggccctgcgccgtcgctatccgcacatcgcccgtccgttccgcacgccgttctacccgctgccgcaactgttcggcatcgccgggatgatctacgcggtggtccacgtctcgccgaccccggaaatgaccggacggatcttcgccagcgccggcgtggtgctcggcgtggtctcgctggtggcggtggtgtggatcaagggcgtgatgcgcaagcccctcttcgtacccgaaccgctcgagacggccggtgagactgcccagggcaagtccgtcgccctcgatcccctgcaatccccttcggcctga

SEQ ID NO: 320932 - DNA, 1491 bp, Pseudomonas aeruginosa
gtgttcgaactcagcgattggcaacggcgcgccgcgacacagcgcttcatcgaccaggccctgatcggcggccgccagcgtccagccgccagcggcgctaccttcgacgccatcgatccggcgagcaatcgcctgctggcgcgggtcgcggcctgcgatgcggccgacgtcgacgcggcagtggccgccgcccgccgcgccttcgacgaaggcccctgggcgcgtctcgccccggtcgagcgcaagcgcgtgctgctgcgcctggccgagctgatgctggcccatcgcgaagagctggcgctgctcgactcgctgaacatgggcaagccggtgatggacgcctggaacatcgatgtacccggcgccgcccacgtcttcgcctggtatgcggaaagcctcgacaagctctacgaccaggtcgcgccgaccgcccagcagaccctggccaccattacccgcgtgccgctgggggtgatcggcgcggtggtgccgtggaacttcccgctcgacatggccgcctggaagctcgccccggccctggccgccggcaactcggtggtgctcaagccggccgagcagtcgccgttctccgccctgcgcctggccgagctggccctggaggcgggggtgccggaaggcgtgctgaacgtggtgccgggcctcggcgagcaggccggcaaggccctcggcttgcacccggatgtggacgcactggtgttcaccggctccaccgaggtcggcaagtacttcatgcagtattccgcgcaatccaacctcaagcaggtctggctggagtgcggcggcaagagtccgaacctggtgttcgccgattgccgcgatcttgacctggcggcggaaaaggccgccttcggcattttcttcaaccagggcgaggtctgttcggcgaactcgcgcttgctggtggagcgttcgatccacgacgagttcgtcgagcgcctgctggccaaggcccgcgactggcagccgggcgatccgctggacccggccagccgcgccggcgccatcgtcgaccgccggcagaccgccgggattctcgccgccatcgagcgggcgcaaggcgagggcgcgaccctgctcggcggtggccgccagttgacgatcaacggttcggacaacttcatcgaaccgaccctgttcggcgacgtacgcccggacatgcagctggcccgcgaggaaatcttcggtccggtgctggcgatcagcgccttcgactccgaggacgaggccatacgcctggccaacgacagccgctacggcctcgccgcctcgctgtggagcgacgacctgcaccgtgcacaccgggtggcgcggcgcttgaatgccggaacggtgtcggtgaataccgtggacgcgctggacgtcgcggtgcctttcggcggcggcaagcagtccggcttcggtcgcgacctgtcgctgcattccttcgacaagtacacccagttgaagacgacctggttccagttgcgctga

SEQ ID NO: 320933 - DNA, 921 bp, Pseudomonas aeruginosa
gtggcgtcctataccttgcggcaactcaagtatttcgtgaccaccgtggaatgcggcagcgtggccgaggcctcgcgcaagctgtacatcgcccagccgtcgatctccacggcggtgaagggtctggaggaaagcttcggcgtgcagctgttcatccgccaccacgcccagggcgtgtcgctgacccccgccggcgcgcgcttctaccgcaaggcccaggaactgctgcggatggcccacgagttcgagcagaacgccctggccgacaacgacgtgatcgccgggcagatcgacatcggctgcttcgagacggtcgccccgctctacctgccgggcctgatcgccggctttcgccaggcctatccgggggtggagatccgcatacgcgacggcgagcagcaggaactggtgcaaggcctcacctccgggcgcttcgacctggccttcctctacgagcacgacctcgactcgaccatcgagaccgagccgctgatgccgccgcaacgaccccacgcgctgctccccgaagggcaccgcttcgccgggcaggcgcaggtgtcgctgcgcgacctgtgcctggaaccgatgatcctgctcgacgtgcagcccagccgcacctatttcgtcagcctgttcgaggaactcggcctgacgccgaacatcgccttcagctcgccgtccatcgagatggtgcgcggcatggtcggccagggcttcggcttctccctgctggtcacccgcccgcattcggaatgcacctacgacggcaagaaggtggtcatggtcgacctcgccgagccggtgtccacctccgggctcgccgccgcctggctgaaacgcgcgcaactgaccaagccggcacgattgttcgtcgactactgccgggagcaactgggcaagcttgccgagcgccggcactga

SEQ ID NO: 320934 - DNA, 930 bp, Pseudomonas aeruginosa
atgctgatcgacgaagaaatcaccctcaagaagctggaaaccttcctcgccttcatgcgcaccggcaacctggcgcgcgcggcggcggaactgggcaccagcaacgtcagcgtgcaccgcgccatccactcgctggaaagcgccctgcgctgcccgctgttcaagcacgagggacgcaacctgaccccgctggaaagcgcctacgtgctcgaggagcgcgcgcagaagctggtccaggaggtactcgacacggtgcgcctgacccgcgaggcggccggcttctccgccgagcgtttcaagctcggcgcgctctattcgctgacggtgaagaccgtgccgcaactgatcatgggcctcaagctgcgacgcagcgcgctgaacatcgacctgatcctcggctccaacgtcgatctgttctaccagctgaagaacatggagctggacgccatcctggtgtcgctcaacgacagcgtcagcgatcccgactgcgagcacctgccgctgttctccgatgacatcttcctcgccgtgccggtggactcgccctacgccaggctcgccgagatcgatctcagcaccctgcgcgacacgcccttcgtcacgctcacccagggcttcgccacccatcaggacggcacccgggtgttccagcaggccggcttcgaaccgcagatcgccatgcaggtgaacgacatattcaccctcctcagcatggtcagctcgggggtcggccatgcgctgctgcccaaacgcatcgaggcggtctacgagaaccgcgtgcggctgatcccgctgcaaccgcgctatcgcctgcagcagcacatcggcgtggtgttcctcaaggccaaggagcgcgacccgaacctgctggcattgctcgcggagtgccggatgtacagcctgcgcctggagcagggggcggcgggatag

SEQ ID NO: 320935 - DNA, 765 bp, Pseudomonas aeruginosa
atgttcgagtccctgaacaaagtcatcaatggctacggcctgatcagcggcttcgccatcatcggcgtgaccatggcggtgtcctactggttgtcggcgcgcctcacccgcgggcgcctgcacggctcggcgatcgcgatcttcctcggcctggtgctgtcctacgtcggcggcgtcgccaccggcgggcagaaaggattggtggacgtgcccctgatgtccggtatcggcctgctgggcggcgccatgctgcgcgacttcgccatcgtcgccacggccttcggggtgaatgtcgaggaattgcgtcgggcaggggtttccggggtggtgtcgctgttcctcggggtcggttcgtcgttcgtcgccggggtcgcggtggccatggcgttcggctacaccgatgcggtcagcctgaccaccatcggcgccggcgcggtcacctacatcgtcggaccggtgaccggcgccgccctgggggccagctccgaggtgatggcgctgagcatcgccgccgggttggtgaaggcgatcctggtgatggtcctgacgcctttcgtcgcgccctacatcggcctgaacaatccacgtacggcggtgatcttcggtggtctcatgggcacctccagcggcgtcgccggcggcctcgccgccaccgacccgaagctggtgccctacggttgcctgaccgcggcgttctataccgccatcggttgcctgctggggccgtcgctgctgtatttcagcgtgcgcggcctggttgggtga

SEQ ID NO: 320936 - DNA, 405 bp, Pseudomonas aeruginosa
atgattatctacggtgtcgcactgctgtctctgtgtaccctcgccgggctgttcatcggcgagatccttggcgtgctgctcggcgtgccggccaacgtcggtggcgtcggcatcgccatgctgctgctgatcttcgtcggcagctacctgggcaagcgtggcctgctctcggcgaagaccgggcagggcgtggagttctggagcgcggtctacattcccatcgtggtcgccatggccgcccagcagaatgtcctcggcgcgctgagcggcgggccggccgctatcctcgccggcatcgccgcggtcgccgtggccttcgccctggtcccgctgctcgaccgcttcggccggaagaaagccgaaggcgccccgccattgaaaccgcgcaccagcgtgcaggggtga

SEQ ID NO: 320937 - DNA, 933 bp, Pseudomonas aeruginosa
atgagcgtgctgttcgcctatcccggccagggcgcccaacgtcccggcatgctcgcggccttgcccgacgaaccgccggtgcgcgcctgcctggagcaggcggcggactgtctcggccaggcgccggccgaactggagagcgccgaggccttgcgcggcacccgcgcggtgcagttgtgcctgctgatcgccggggtcgccgccagccgcctgctggagacgcgcgggcatcggccggggctggtcgccgggctgtccatcggcgcctatccggcggcggtggtagccggcgcgctggacttcgacgacgcgctgcgtctggtggcgctgcgtggcgaactgatgcaggccgcctggcccgagggctacggaatgagcgccatcctcggtctcgaacaggcgcaactggaagcgctgatcctggcggtgcggcgcgagcacccgccgctctacctggccaacgtcaacgccgagcggcaactggtggtggccggcagcgaagcggctctggccgccctcgccgaacgcgcccgtgccgccggcgccagcgcggcgaagcgcctggcggtgagcgtaccgtcgcactgtgcgctgctcgacgaaccggccgcgcgcctggccgaagccttcgccggcatccgcctgcatcggccgcgcgtgccctacctgagcagcagccgggcgcgcctggtcgccgaaccggccgcgctggccgacgatctcgccggcaacatggcgcgccgcgtcgagtggctggcgacattgcgcagcgcctacgagcgcggtgcccgcctgcatctcgagctgccgccgggacgggtcctcagcggtctggcgcggcctctgttcggctgcgccacgccggccttcgaaggctcccgggcggataccctggacgcgctgttgcgcgaggaggaaaagagaacccgataa

SEQ ID NO: 320938 - DNA, 693 bp, Pseudomonas aeruginosa
gtggtcatcgcgaacagctcacagcggggctccagccggcgacggctcgctcctgatccgatgcgtcgcagggcagggccggaaccccatgacttgctcctgggcatggcgccggcgcatttgccggagaatgctccggcctgggtctgcgcggcactgaaggccggctggccggtggtggtgcgccgtgcgccggcagatcctgcgcgggtggccatcggcgtgcgcggcctggcgcgggagcagcgctgggccggctggatgccgttggcggcaatcacccggcgcttgcgcccggaagcgctgggccagcgcgagccggcgatgctgcgcgatctgccggcctggcgtgccttgcgcgacctgcgtgcgccgctgaacgcgctgggactggcctggggcgtgaccggcggcgccggtttcgagctggccagcggggtcgccgtgctgcatccggacagcgacctcgacctgctgctgcgcaccccgcgcccgttcccgcgcgatgacgcgctgcgcctgctgcagtgcttcgagcagtgtccctgccggatcgacctgcaactgcagaccccggcgggcggcgtggccctgcgcgaatgggccgagggtcggccccgggtgctggcgaaaggcagcgaggcgccgctgttgctggaagacccctggcggatcgcggaggtcgaggcatga

SEQ ID NO: 320939 - DNA, 807 bp, Pseudomonas aeruginosa
atgagccaaccgttcgcttcccgtggcctggcctggttccaggcgctggccggtagcctcgcgccgcgtcccggcgatcctgcttcgttgcgcgtcgccgatgccgagctggacggctacccggtgcgtttcctggccgtcgtgcccgatcccgacaatccgttcccgcgcgctcgccagggcgaggtcgggctgctcgagggctggggcctggccgccgccgtcgacgaggcgctggaggccgaccgcgaggcgccacgcaagcgcgcgctgctggccatcgtcgacgtgccgagccaggcctacggccgccgcgaggaggccctgggtatccaccaggcgctggccggggcggtggatgcctacgcccgcgcccgactcgccgggcatccgctgatcggcctgctggtgggcaaggcgatgtccggcgcgttcctcgcccacggctaccaggccaaccgcctgatcgccttgcacgatccgggggtgatggtccacgccatgggcaaggccgccgccgcgcggatcaccctgcgcagcgtcgaggaactggaggcgttggcggcgaaggtgccgccgatggcctacgacatcgacagctacgcgtcgctcggcctgctctggaggacccttccggtggagaccgtcgaggtgccgtcgacggcggacctggtgcgggtccgcacctgcctgggcgaggccctggccgatatcctcggcggcccgcgcgacctcggcggccgcctcggcgcggccaaccgcgaggcgtcggcgcgggtgcgccggctgctgcgcgagcagtggtga

SEQ ID NO: 320940 - DNA, 864 bp, Pseudomonas aeruginosa
atgactgacgtcgcccgcctgctggcgctgcgcagcttcaccgaactgggagcgcgccaacgcgcccgggccctgcttgacgcgggcagcttccgcgagttgctcgatcccttcgccggcgtgcagtcgccctggctggaacgacagggcatcgtgccccaggccgacgatggggtagtggtcgcccgtggcctcctcgacggccagccggcggtgctcgccgccatcgaaggtgctttccagggcggcagccttggcgaagtcagcggagcgaagatcgccggcgcgctggagctggccgccgaggacaatcgcaacggcgttccgacccgggccctgctgttgctggaaaccggtggcgtgcgcctgcaggaagccaacctcggactggcggcgatcgccgagatccaggcggccatcgtcgatctgcagcgctaccagccggtggtggcggtgattgccgggccggtcggctgcttcggcggcatgtccatcgccgccgggctgtgcagctacgtgctggtgacccgcgaggcgcgcctcggcttgaacggtccgcaggtgatcgaacaggaggccggcatcgctgaatacgactcgcgcgaccggccgttcatctggagcctcaccggcggcgagcagcgcttcgccagcggtctcgccgacgcctacctggccgacgacctcgatgaggtacgcacctcggtactcgcgtatttcgccaagggcctgccggcacggccgcgctgccgccgcgccgaggattacctgcggcggctgggcgacctcgataccgccgagcaaccggatgccgccggcgtgcgccggctgtaccaggggctgggccaaggagatgcaacatga

SEQ ID NO: 320941 - DNA, 300 bp, Pseudomonas aeruginosa
atggaaaccctgaccttcgaatttcccgccggcgctccggcgcgcggtcgcgccctggccggctgcgtcggctccggcgacctggaggtgctgctcgagccggccgccggaggcgcgctgagcatccaggtggtgacctcggtaaacggcagcggcccgcgctggcaacaacttttcgcgcgggtcttcgcggcgtccacggcgccggccgcgtcgatccgcatccacgatttcggcgccactcccggggtggtccgcctgcgcctggagcaggcactggaggaggctggccatgactga

SEQ ID NO: 320942 - DNA, 882 bp, Pseudomonas aeruginosa
atgaacgccatcgcgaacctcgcggcgacgccgtgcgccgacctcggcgaatgcctggccgacctggcggtggacgccctcatcgacgaagccgaactgtcgcccaagccggccctggtggaccgccgcggcaatggcgcgcatgccgacctgcacctgggcctgatgcaggcctcggcgctgagcctgtggccgtgtttcaaggaaatggccgacgccgcccagcggcatgggcgcatcgatgcgcgcctgcgcggcgtccttggccaactggggcgcgacggcgaggcggcgatgctgcgtaccaccgaaggcgtgaacacccatcgcggagcgatctgggcgctcggcctgctggtcgcggccgccgctctcgaaccgcgccgcacgcaggccggcgaagtggccgcgcgcgcaggacgcatcgccctgctcgacgatccggcggccgccatcggcgacagccacggcgagcgcgtccgtcggcgctacggcgtcggcggcgcccgcgaggaggcgcgtctcggcttcccccgcgcagtgcgccacggcctgccgcagctatggcgcagccgcgaaggcggcgctggcgagcagaacgccaggctcgatgcgctgctggcgatcatgagcgtcctcgacgatacctgcgtgctgcaccgcgccggccgcgtcggcctcgccgcgatgcaggatggcgcccgcgcggtgctcgccgccggcggcagcgccagtctcgccgggcgtcgccgcctgtgcgagctggaccgccgcctgctggcgctgaacgcttcgcccggcggcgccgccgacctgctggccgcctgtcttttcctcgatcgcctgcccgccgtgtccggtgggtgggctgggagtctctga

SEQ ID NO: 320943 - DNA, 1665 bp, Pseudomonas aeruginosa
atgacgacaccgatctctcccccgccgcagtggtcgcggcgccgccaggaaaagcagcggcgcctcgagcgcgtgcgcggcctggctgacggcgcggtgctgccgcgcgaacgcctggtcgccgcgctggaggcgctgatcgcgccgggcgatcgggtggtgctggaaggcaacaaccagaagcaggcggatttcctctcccgttcgctggcgcgggtcgatcccggcaagctgcacgacctgcacatgatcatgcccagcgtcggccgcccggagcatctcgacctgttcgaactgggcatcgcgcgcaagctcgacttctccttctccggcccgcagagcttgcgcatcggccagttgctcgaagacggcctgctggagatcggcgcgatccacacctacatcgagctgtacgcgcggctggtggtcgacctgatccccaacgtggcgctggtcgccggtttcgtcgccgaccgcgaaggcaacgtgtacaccgggccgagcacggaagacaccccggcgctggtggagcccaccgcgttcagcgacggcatcgtcatcgtccaggtcaaccgtatcgtcgacgacccgcgcgacctgccgcgagtggatatcccggcgtcctgggtggacttcgtggtcgaggccgaccagccgttctacatcgagccgctgttcacccgcgacccgcgccacatcaagccggtccacgtgctgatggcgatgatggcgatccgcggcatctaccagcggcacaacgtgcagtcgctgaaccacggcatcggtttcaacaccgcggccatcgagctgatcctgccgacctacggcgagtccctcggcctgaagggcaagatctgccgacactggaccctcaacccgcacccgacccttatccccgccatcgagagcggctgggtcgagagcgtgcactgcttcggcaccgagctgggcatggagggctacatcgcccagcgtcccgacgtgttcttcaccggtcgcgacggctcgctgcgttccaatcggatgttctgccaactggcaggacaatacgccgtcgacctgttcatcggcgctaccctccaggtcgacggcgacggccattcctccaccgtcacccgcggacgcctggccggcttcggcggcgccccgaacatgggccacgacccgcgcggccggcgccactcgacgccggcctggctggacatgcggggcgaacccgaggccttgctggagcgcggcaggaagctggtggtgcagatggtcgagaccttccaggacggcggcaagccgaccttcgtcgagcgcctcgacgcgctggaggtggcgcgccagaccggcatgccgctggcgccggtgatgatctatggcgacgacgtcacccatgtgctcaccgaggaaggcatcgcctacctgtacaaggcgcgctccctggaggaacgccaggcgatgatcgcggcggtggcggggatcagtccgatcggcctgcgccacgatccgcgcgagacccagcggatgcgccgcgaagggctgatcgcgctgcccgaggacctcggcatccgccgcaccgacgcctcgcgcgagctgctggcggcgaagagcatcgccgagctggtcgagtggtccggcgggctgtaccagccgccggcgcgtttcaggagctggtga

SEQ ID NO: 320944 - DNA, 582 bp, Pseudomonas aeruginosa
atgcacagcgaacgcgtccgttatgtgttggtgcccggttggtacggctcggaagacgcccattggcaaagtcactggcagcgcgcgctgcccaatgcctcacgggtcgagcaacaggactggatcaccccgctgcgcgccgactggatcgccgagctggacgccgagatccgccgccagcccgggccggtggtgctgatcgcgcacagcctgggttgtgtgacagtggcgctgtgggcggcccaggccgagcgccgggtgcacgaccaggtacgcggcgccctgctggtggcgccggccgacgtcgagcgcgagagctgcgccgaggcgctgcgcaacttcgcgccgatcagccgcgagccgttgccgttccccagcgtgctggtgggttccgacaacgaccaggcctgcagcccgcagcgcgccatgcacctggcccgcgcctggggcgcggagacggtgatcctgcccgaggccgggcacatcaacgtgaagtccggccacggcgcctgggaggccggctaccgtcacctgttccgcttgcagtacctgatcgacagccaggctcgtcgccgcgcctga

SEQ ID NO: 320945 - DNA, 213 bp, Pseudomonas aeruginosa
atggccaagaaatttcctctccatcccagccatccggagcgcatctgctggggttgcgaccgctattgctcggcggaatctatgggctgcggcaacggcgccagccgcacccagcatcccagcgaactgttcggcgaggactgggccggtgaatgggaagtcgaaggaacggaggacgccaaggagcaggaggcgccggcacgccaggcctga

SEQ ID NO: 320946 - DNA, 402 bp, Pseudomonas aeruginosa
atggccttctcgacccaggacagcgacgaagtcctttccgaaatcaacgtcaccccgctggtcgacgtgatgctggtgctgctggtggtgttcatcgtcaccgcgccgctgctgaccaactcgatcccgatcaacctgccgaagaccgaatcggtggccccgccggagcagaaggatcccctggtggtgagcatcgatggcgccggcaagctgttcgtcaacaaggacgagatccagccggagctgctggagagcaacctggccgcggccaaggcgaaggacgccgaggtccgcgtgcagttgcaggccgacgaaggggtgaactacggccaggtggcgaaggccatggcttccatcgagcgcgccgggatcaccaggctggcggtgatcaccgcacgctga

SEQ ID NO: 320947 - DNA, 720 bp, Pseudomonas aeruginosa
atgagtctgttaaccaccccgctcgaatccgtcgaaggcgccgtcatctggctgctggtcggcttttccgtggtcacctggggcctggccctggtcaagggcgtgcagttcgcccggcagaagcgccaggaccgccagttccagaagcagttctggagcgccaccagcctcgactccgccggcgagcaggcgcaggacaagcagggcgccggcgcccgcgtggcccaggccggcttcgccgcgatccaggtgcaggacaacggccagcccgacctgacccagtcgatcaaccaccaggaccgtctcgaacgcgccctgcgccagcagatccagcgcgagcggcgttccctggagtcgggcctggcggtgctcgcctcgatcggctcgacctcgcccttcatcggcctgttcggcaccgtctggggcatcatggaggcactcaaggggatcagcgcggccggctcggcgagcctggagaccgtggccgggccgatcggcagcgcgctgatcgccaccggcgtgggaatcgccgtcgcggtgccggcggtgctggtctacaactacttcctgcggcgcctgaagctgaccgccgccgacctcgacgacttcgcccacgacttctacagcctggcgcagaagagcgcgttccgcgtcatcgtccatccctccgccgcgcgccaggccggcaacccctcgcgcaacgtgaaggaggcgtcctga

SEQ ID NO: 320948 - DNA, 801 bp, Pseudomonas aeruginosa
atggcaacaccccagcccgtcgatgcccgcacgcagccctggcgtgagacgcccggcggcgacctggtggcgctcggtcggccggttcgccaggcgttgcacctggttcgccacaacccggcacagggtcgggtgctcagccggcgcgaggcgatcctgctggtcctgttcgccctgaccctgcacggagcggtgatccattggctgagccagcagagaaccccggcgctgcccgaggtgccgccacaggtgccgccgatgaccatcgagttcaccgccccggcgccgccggtggtggaaccgccgccgcccgagccgttgccgccggtggtcgaggaaccgccaccaccggtggtcgacgagaacgcggtgaagccgccgccgccgaagccggtgccaaagccgaaacccaagcccaagccgcaaccccggcccaagccggcgccgaaggccgtcgagccggctccgcccgcgccgccgcaacccgccgcgccacccgccccgccggcgccggcgccgctgacgccgccgtcggcgaacgccggctacctgcacaacccggcgccggaataccccgccctggccatgcgccgcggctgggagggcaccgtgctgttgcgggtgcatgtcctcgccagcggcagcccgagcgagatccaggtgcagaagtcgagcggacgcgaagccctcgaccaggccgcggtgaaagcggtcaagcgctggtccttcgttcccgccaagcgcggcgacaaggccgaggacggctgggtcagtgtaccgatcgatttcaagttgaactga

SEQ ID NO: 320949 - DNA, 1437 bp, Pseudomonas aeruginosa
atgagcatgaacctggtcaccctcctgtacctcatcgcctcggtctgcttcatccaggccctgaaaggcctgtcgcacccgaccacctcgcgccgcggcaacctcttcggcatggtcggcatggccatcgccgtggccaccaccgtcggcctggtgttcaagctgggcgcggagatcgccaccaccggcgtcggctacatcgtcgtcggcctgctggtcggcggtaccgccggctcgatcatggccaagcgcgtcgagatgaccaagatgcccgagctggtcgccttcatgcacagcatgatcggcctggccgcggtgttcatcgccatcgccgcggtggtcgagccgcagtcgctggggatcgtcgcgcacctgggcgacaccattcccaccggcaaccgcctggagctgttcctcggcgcggccatcggcgccatcaccttctccggttcggtgatcgccttcggcaagctttccggcaagtacaagttccgcctgttccagggcaccccggtgcagttctccgggcagcacctgctgaacctggtgctcggcctggcaaccctcggcctgggcctggtgttcatgttcaccggcaacctcaccgccttcgccgtgatgctggcgctggccttcgtcctcggcgtgctgatcatcatccccatcggcggcgccgacatgccggtggtggtgtcgatgctcaactcctattccggctgggccgcggcgggtatcggcttctcgctgaacaactcgatgctgatcatcgccggctcgctggtcggctcctcgggcgcgatcctctcctacatcatgtgcaaggcgatgaaccgctcgttcttcaacgtcatcctcggcggcttcggcgccgaagccgacgccggcggcccggcgggctccaaggagcagcgtccggtgaagtccggttcggccgacgatgcctcgttcctgctgaccaacgccgacagcgtgatcatcgtccccggctacggcctggcggtggcccgcgcccagcacgcgctgatggaactggcggagaagctgacccatcgcggggtcaccgtgaagttcgccatccacccggtcgccgggcgcatgccggggcacatgaacgtgctgctggccgaggccgaggtgccctacgagcaggtgttcgagatggaggacatcaactccgagttcggccagaccgacgtggtcctggtgctcggtgccaacgacgtggtcaacccggcggcgaagaacgatccgaagtcgcccatcgccggcatgccgatcctcgaggcctacaaggccaagaccgtgatcgtcaacaagcgctccatggccagcggctacgccggcctggacaacgagctgttctacctggacaagaccatgatggtgttcggcgacgccaagaaagtcatcgaagacatggtcaaggcggtggagtga

SEQ ID NO: 320950 - DNA, 309 bp, Pseudomonas aeruginosa
atggatatcatttctgacgggatctacaacctgatcatcttcgtgctggccgtgtacgtcggctaccacgtggtatggaacgtcacccctgccttgcacaccccgctgatggcggtgaccaacgcgatttccgcgatcgtcatcgtcggcgccatgctcgctgccgccctgaccgtgaccccgctgggcaaggccatgggcaccctcgccgtggccctggccgcggtcaatgtgttcggtggcttcctggtcacccggcgcatgctggaaatgttcaagaagaaagcgccgaaggcggggggccactga

SEQ ID NO: 320951 - DNA, 1119 bp, Pseudomonas aeruginosa
gtgcagatcggtgtccccctcgagacccatgccggtgagacgcgggtttccgccaccccggaaaccgtcaagaagctgatcggccaaggccaccaggtgatcgtccagagcggcgccggcgtcaacgccagccagccggacagtgcctatgaagccgccggcgcgacgatcggcagcgccgccgaggccttcggcgccgacctggtgctgaaggtggtcgcgcccagcgccgccgagctggcccagatgaaaagcggcgccgtgctggtcggcatgctcaaccccttcgacaacgagaacatcgcccgcatggccgagcgcggcatcaccgccttcgccctcgaggccgcgccgcgtacctcgcgggcgcagagcctggacgtgctctcctcgcaggccaacatcgccggctacaaggcggtgatgctcgccgccaaccactacccgcgcttcatgccgatgctgatgaccgccgccggtaccgtgaaggccgcccgcgtgctgatcctcggcgccggcgtcgccggcctgcaggcgatcgccacggccaagcgcctgggcgcggtgatcgaggcttccgacgtgcgtccggcggtgaaggagcagatcgagtcgctcggcgccaagttcgtcgacgtgccctacgagaccgacgaagagcgcgagtgcgccgaaggcgtcggcggctacgcgcggccgatgccggcctcgtggatggagcgccaggccaaggccgtgcacgagcgcgccaagcagtcggacatcgtcatcaccaccgcgctgatccccggccgcaaggcgccgacgctgctgcacgaggcgaccgtggcggagatgaagccgggctcggtggtcatcgacctggccgccgcccagggcggcaactgcccgctgaccgaggccgaccaggtcgtggtccggcacggcgtgaccatcgtcggccacagcaacctggccgcgctggtaccggcggacgcctcggcgctatatgcgcgcaacatcctcgacttcctcaagctcaccctgaacgccgaaggcttcagcgtgaacctcgaggacgacatcgtcgccgcctgcctgatgtgccgcgacggccaggcggtgcgcaagaacggctga

SEQ ID NO: 320952 - DNA, 900 bp, Pseudomonas aeruginosa
atgagccaatccgccaccgcccggcaacccgaacccgaggtcgccgaggcattccgcatcacccccctggaggcgccgctgggcgccgaagtccgtggcctcgacgcgcgccggccgctggcgccggagcaggtcctggcgctcaagcaggcgctgcgcgagcaccacatcctggtgttccgccagcagcacctcgacgatgagcagtacttgcgcttcgccaccctgttcggctcggtgttccagccgccggcggacatcccggtgctgtcctcgggtggcgacggcaaggtgccggacatcgtcaaggtggccaacaccggcgacggcgaactgggcaacttcgccctgccggcacacatcgaccaccaatggacgccggtgccgtcctccggctcgttcctctacgcactggaggtgccgtccagtggcggcgagacgcgcttcaccaacctggcgcgcgcctacgagagcctcgacgaggcgacccggcgcgagatcgatggcctgcgcctgatcaactacaaccccttcatccgcctgcgcgagggcggctacggcggcggtttcgccacctaccgcacgccggacatcgaaccgatccagggcagcgagcacccgctggtacgcacccacccggaaagcggccggcgcgtactgttcctcagcgcccacaccgaggtggagattcccggctacgaccccgcgcggggccaggcgctgatcggtcgcctgcgcgaacatctggcgcgcccggaactgagctacagccacgcctggtcggtgggcgacatcgtctggtgggacaaccaggccgtgctgcatgcgcgcaacgccttcccggccagcgagcggcggcgcctgaagcgcatcagcctggcgggcagccgtccgttctga

SEQ ID NO: 320953 - DNA, 903 bp, Pseudomonas aeruginosa
atgagcaatgcagcacaagccctcgccacgccggtacggctcgacgtccggccggtcgccggacggatcggcgcggagattcgcggcgtgaccctgtccggcgaactggacgccgccaccgtcgaggcgatccaggccgccctggtacgccacaaggtgatcttcttccgggaccagagccatctcgacgaccagacccaggaggccttcgcccacttgctcggcgaaccggtcgcccaccccaccgtgccgtcccgcgaaggcacccgcttcctcctcgagctggatggcgccgaaggccgccgggccaactcctggcataccgacgtgaccttcgtcgaggcctacccgaaggcctcgatcctgcgcagcgtggtggccccggagtccggcggcgacaccgtctgggccaacacggcgagcgcctacgccgacctgccggcggagctgcgcgagctggccgaccggctctgggcggtgcacagcaacgagtacgactacgccggggtcaagcccagcgcctcggtggagcagttggagaactaccgcaaggtgttcacctcgaccgtctacgagaccgagcacccggtggtccgcgtgcatccgcaaagcggcgagcggacgctgctcctcggccacttcgtgaaacgcctgaagggtctttcgcagcatgactcggcgcatctcttcgcggtgctgcaggggcacgtcacgcgcctggagaacaccgtgcgctggcgctggcaggccggcgacgtggcgatctgggacaaccgcgcgacccagcactacgcgatcgacgactacggcgaccagccgcgcgtggtgcgccgggtgaccctcggcggcgacgtgccggtaggcatcgacgggcaacgcagccggacgatccggaaggcatga

SEQ ID NO: 320954 - DNA, 2373 bp, Pseudomonas aeruginosa
atgaagcaccactaccgcttgccgctccgccgaacgccgcccggcggctccgactacgccctggccctgctgctcgccctcggcggtgcgttgccggccagtgccgccgatgctcccgcgcccgccgaggaagcgccgccgctggccagcagcgtcccggacaaggccgatacggccctgggcaaggtcactgtcaccgcgcgtcgccgcgaggaggattcgcagaaggtaccgacgccgatcaccgtgctcggcggcgagactctcgaggcccagcgcatctcccgggtgcaggacctgcagcaggtgctgcccagcgtcaatgtcgcctacatccatgcgcggcagtcgagcgtcgccgtgcgcggcatcggcaacaaccccgccagcgacggcctggaaggcagcgccgggatctacctcgacaacgtctacctgggacgtccgggaatggccgtgttcgacctgctggacatcgagcaactggagctgctgcgcggtccgcagggcaccctgttcggcaagaacaccaccgccggggtgctgaacatcagcacccgcgcgccgaccttcactaccgagcgtaccgtcgaggtctccggcgggcaggatggctacttccagggccgcggcacggtttccgggccgctcggcgaaaccctcgccggacgcctctcggcctatcgcacccgcgacgacggctacatcaagaacatccacgacgacaactatctcaacggcggcgagcgccagggcgcgcgcgggcaattgctgttcgagccgaacgaggacttcagcctgcgctggatcgccgactacaacgaggaggattcgagcaacggcagcatggtggtctacggcgccgccgagcgtttctggcagcgcgccgcgctggtcggcgcttcgccgttgcgcgatccgcagcgcaggaaggtcaacatcaacggccgccagcacgtcagcgtgcaccagggcggcagctcgctggaggccaactggaacctcgccggcggctaccgcctgacctccatcagcgcctaccgctactggcacttcaccccggccaacgacgagcaactgaacgtctcggcgatcaacgacaccggggtggaagtgcacgaccggcagttctcccaggagatccgcctggcctcgcccaccggcggtgccttcgactacgtggtgggtgcctacgcgttcaggcagaacctcggcaacaagaccttcacctcctacggaccgttggccgacctgtacctgctcggcgccaatctcggcgcgctgaacgacacctactcgaaggccaacggcaagatcgagaccgacagcttcgcgctgttcgcccagggcacctggcacctcaccgaacgcctggacttcaccgccggcctgcgcggtacctacgaggagaagaacgccaaggtcgagcgcttcgctccgctgggcggcgcggcggtcggcggggtcggcgcggcggtgcgcaacggccagctcggcgcctacgattccggcgatctcagccagtacaacttcgccccttcggcgttgctcagcctcagctaccagttcagcgacgacctgctcggctacgccagcctgtcccacggcgagaagtccggcggggtcaacctggcggtgggcagcgcaccgagcgccggtgccgattcgctgctggtcggaccggagcgcgccaacgacgccgagctgggcctgaagagcacgctcttcgaccggcgcctgctgctcaacgccaacctgttctggaccggcatccacggctaccaggccaccaccctgtaccaggcgccgggctcgacccagttggtgcaggtgctggccaacgccggcagcgtgcgctcgcgtggtctggagttcgaggccaccgcgctgccgttgcgcggcctgaccctgaacttcaacggctcctataacgacgtcacctacctgtcgttcaaggatgccccgtgccctgcggaagtcagcacccggcccggcgcgccgagcagttgcgacctcaccgggcagcgcgtggtcggcgcctcgaaatggatcgccaatctcaatggcgaataccagtggcgcctcgacgaccgcttccaaccctacgtcagcgccagctacgcctaccgctccgccgccgagggcacgctggacaactccgacctttcgaagatcgacggctacgccctggtgaacctcgccgccggtctgcgcagcgatctcggcgacggccaactggacacctcggtatggctgaagaacgccttcgacaaggactactacctgagcgccttcgccagcatcaacggctcctacaccgcatcggtggggcagccgcgcacgctcggcgtatcgctgcgctacgacttctga

SEQ ID NO: 320955 - DNA, 918 bp, Pseudomonas aeruginosa
atggatctgcgccaactgcgttacttcatcgccctcgccgaacaccgcagtttcgtccgcgcggcggacgccatgggcatcacccagccggccttcagccgcagcatccagggcctggagcaggagcttggctgtcagttggtggaccgtggcagcaaggacctgcgcccgacgccggaaggccaggtggtgctgcaacacgcgctgagcctggtgcaggggtcggccaacctgatccacgagatcgcccagttgaacaagctggatgccggcgagctgcgcttcggcagcgggccggcgccggcccagcaactggtgccggacgcggtggccgacttcatcaaccgccacccgcgggtgcagatcagcctggacgtggacaactgggaaaagctcagccgcgccctgctccgcgaagagatcgaattcttcgtcgccgacatccgcgacttcgaggccgacccaaacttccagacgcgcccgctgaccccgcgccgcggccagttcttctgccgtccgcaacatccgctgctgggcaaggacagcctgtccaccaacgacctgttcaactacccgctggcctcgaccctgattcccccgggcatccgcaagctgctggcgaacctcagcggcaagatcgacttcgccgccaacatccgctgcgagaacatgcacgcgctgatccgtatcgtccgccagaccgacgccatcggcatcgccagcgacgagaccctgcgcccctacctgcagcgcggcgaactgcaaccgctacagtggcgcaacctgccgcagaacctggatagcctcagcgcccgctgcggcatcatcagccgcagcggctaccggctttcggcagcggccaaggcgatgatcgagacgctggtggaactggaccaggcgcaacacgcggcggcctga

SEQ ID NO: 320956 - DNA, 726 bp, Pseudomonas aeruginosa
atgaacaacaagaccctatgcccttcgctcttgctctgcctttcgctgcttgcaccgctgtcttgtctcggggagaccgccgccgcgccctatccgctggcccacccaccgcgcctggccgactacctcccgccgccgccggcggcggactcggctgcggccgtcgccgatctcggcgcggtgctggaggcgcaacgcctgcgcacgcccgaacaggtacgccgggtacgcgcccacgaccagtgggaggacaacgtcttccccttcgccggcgacctgctgggcgcctcgttcgacaaggaacgcctgccgctgacccggagtttcttcaaccgcgcccaggaaaacctggtcgaggtgctgatgccggcgaagaagcacttcgcccgcccgcgtccctacgaagtgacaccgaaggtgaagccggtgctgccgccgccggagggggagtcctatcccagcggccacaccatggacagctacttcaaggcctcgctgctgagcatgctggtgccggagcatcacgatgcgttcttcgcccgcgccgaggagcatgcgcagagccgtgtgctggccggcgtgcacttccccagcgacctggaaggcgggcagaccgccgccgcggcgctggtggcgagcctgctggccgatccggcggtggccgccgacttcgccgcggtgcgcgaggagctgcgcggcgcgctggggttgccgaaactccagtag

SEQ ID NO: 320957 - DNA, 1359 bp, Pseudomonas aeruginosa
atgcaaaatctcagacgcgctgtattcgccggcctggtcgccggcacgctttccgaaggggcggccgcgacggccggggatgggggcttcgtcgaggacagcgaactgcagttcctcgctcgcacctactacttcaaccgcgactaccgcgacagcccgaacaacgccgggcgcaaccgcttcaagcccaggagcgagcgcaacggctaccgcgaggaagccacccagggcctgcgcctccagttcgcctccggctacacgccgggcagcctcggcttcggcctcgacgcccatgccatgctcggcctgcaactggacagcggcggcggccgcaccggcaccggcaacctgccggtcggcgccgacggccatcccgaccatcgctacggcaaggtcggtggcgccctcaggctacgccacggcgaaacccgcctgaagtacggccagaccaccaccagcgcgccggtgttcgccgccagcagcaaccgcacgctggccggcatggcctacggcctgctgctggaggaccgctcgttcgacgggctgctgctcgagggcgggcgcttcaccgccgcctccggccccggcgaatccaaggtccgcggcgacatcagcaccgtctacggacgcctcggcgcctatccggtgcgcctcgacgcggtcggcttcctcggcggtcaatggcaggccacggagcggctgcaactgtcgctctacgcctcgcgcttcgacgacatctggcagcaggcctatttcggcgccagccatcgccagccgctgggcggggagcgcgcgctgcgggtcgacctcgacgcctaccgcacccgcgacagcggccagagccgcttcggccgcatcgacaccctggccagctccctggccctgggctacgaacaggggccgcagcgcatcaccctggcctaccagcgtgtccatggcgagcagccgttcgactacatggccttcggcgacgggcgctccagcgcgtccatggtactggccaactcggtgggctactccgacttcaacggaccgggcgagcgttcctggcaattacgctatgacctggacctcggcgcgctcggcctgcctgggctcagcctgcacgcgctgcatgcccgcggccgtgccggggccagcgccagcagcgccgccgagagcatctacgccggactctacgggcgtgacgggcggcaccgggaaagcgacctcggcttcgcctaccggatcaaggcgggccccctcgccggcctcgcgctgcgcgcctcgcaggcctggcaccggggcaacgcgagctatctcgacggcgacatcgacgaaacccggctggtcgtcgattactcccgctcgatctggtga

SEQ ID NO: 320958 - DNA, 882 bp, Pseudomonas aeruginosa
gtgatcgcacagttcgtcgcggtggtgctgccgatcctgatctgcaccgggatcggtttcgcctggagccgttccgccgggccggtggatacccgcgcgctggtgttcctggtggccaacgtcggctttccctgcctgctgctgtcgtcgctggaccgccccggcctgtccattggcatggtggccggggtgttcctcgccaccgcgctggcggtgctggcgttcgccctgctgggcctggtcgccctgcgcctgctgcggatgccggtgcggcgctacctgccgtcgatcatgctgccgaactccgggaacatgggcatccccatcgcctacctggccttcggcgaggaggcgctggtgtatgcggtggcgttctccaccctgatccaggtgggccacgcgacgctcggcgtctggttcgcttcgggcgatatcaccccggcgagcatcctgcgcaacccgatgatctatgccctggccgtggcgctgggcctgatcgccctgggctggagcctgccgccgccgttgcgcgatgtgacccgcctgctgggcgggattaccgtgccgctgatgctggtgatgctcggcctgtcgctggccggtctgcgcctgcacgagacctggcggccgttgctgctgtctctggtgcgggtctggggcggtttcgcggtcggctatgggatcgctgccggcctgggcatggaggcggtggcggcgggcaccttcgccatccagtgcgggatgccgaccgcggtgctcacctacctgttggccaagcgttacgacggaccggtgaacgaagtggcaggcatggtgctgatcaccacgctgctggtgctgctctccacgcctttgttcatccagttgctgccgcgcgcgtga

SEQ ID NO: 320959 - DNA, 816 bp, Pseudomonas aeruginosa
atgaatctcgatagcaaattgttcgacgcgacactcgatctcgaacgcgtgaaagtttcggtgagaacgctggtgaagttatcccgccaggaacaatcggcgatcatccggaccctcaacgagtttggtttcctgctgttgcgcagcgaacagggcgaagacaggcaggaacttctcgcgctcaaggagttgttcggccgcgccgccccccacccgcgcgccgacgccgacggcatcgtgccgatcagcaatgcgcggtatgtcagcggctacctcggctccacgccgctggagcacaagctgcacaccgacggcgctttcctcgacaccccggagcaattgtgcagcctgcaatgcgtgcgcaacgcccgggagggcggggagaccctgctggccagcgccggactggccttcgagcgcctgcgccggcgcatgccgaccaagcatctcggcctgctgcgcggcgacgccctgaccatcgtgcgcaagcaccagagcagcacccagccggtgttccgcctgaacggcgaggcgctgggcatcaagttccggcagaacgacggggcggccgaggtggtcgagcatcctgtggcggtggaggccttcgccgaactggtggcggcgctcgaggatccggcctgccaactgcggatcaagctcgagccgggggaaatcctggtgctcgacaacaccgcggtgttgcacgggcgcactgccttctgcgccaacgaactgcgcgagatgcgccggctcaacttcgacggccacggccgcctgcgggcggagctggaactgggcttcaaggtggggttgtga

SEQ ID NO: 320960 - DNA, 1062 bp, Pseudomonas aeruginosa
atgaaagcgcttacgtcttccctgctcggtctgttcgccgcgcctgtcctcgccggcctgctcggtgcctacgtgccgctggcgagcgccgctccgccgaaggaaatccgcatcgcggtgccggacgtcagcgccggcagttcgcactcgggcggcggcgtggtcgacgtgctctacacccgccagttgctggagaaggagttcgccaacgacggcatcgcggtgaaatggagcttcttcaagggcgccggcccggtggtcaacgaagcgttcgccaacggccaggtggacttcgcctacctcggcgacctggcggcgatcatcggcaagtccggaggcctggacagccgcctgctggccgctaccgcgcgaggggtcaaccactatctcggcgtgcagccgggctccggaatcaagaccctggaggatctcaagggcaagcgcgtaggcatctttcgtggcaccgccagccagttgtcgttcgacaatgccctggccagcgtcggtctcagcgagaaggacctgaaggtgatcaacctcgatttcagcgccgccctgtccgccctcgcagccaggcagatcgatgccacctggggcctggccggactgttcgccctgcgcgaccgcgggctcgcggaaattccgctgagcacccgcgacctgaacggcgccggcaccctgcaggcgctgctggtcggctccggagccttcgtcgatgcccatccggacatcaccgagcggctgctcaaggtgcagttgcaggcccaggactggctggcccgcgaggagaaccgcgacgcttacatcgaactggtgtcgaagcaggccagctacccggtggtgatcctgcagagcgagtaccgtggccgcaagctgggcgacgccctgtcgccgcgcctggacgccgatttccttggccggctggatgcttcgatccaggcggccaagcgtttcggcctgatccgtcgcgaattcagcgccgagcagtgggccgcgccggaactgctggaggcggccggcaagctggcgaaggccaaggccgtggcgcaggcggcggagtga

SEQ ID NO: 320961 - DNA, 1617 bp, Pseudomonas aeruginosa
atgaagaatatcgataaaaccctttcgcccgcctggagccggcccctgccgcgcctggcgccgccgccctccgcggctttcgcccggcgcctgggggacggcctgctgccctggttgctgccgctcgggctggcgctgctgtggtgggtcgccagccatcgccactggatgtcggcccaggtgctgccaactcccgagctggtctggcagagcgcccgcgagttgctcgccggcgaactctggagcgaattggcgatcagcctgcggcgcctggcctggggcctgctcgccggggtcgccagcggcgccgcgctaggcgcctggctaggcttcagtccgcgtgccgagcgcctggtcttccccaccttcagcgccctcgcgcaaatccccacgctggcctggatcccgctgttcatgctgttcttcggcatcggcgaactgctcaagctggtggtgctggtgaaagcggtcgtggtgccggtgaccatccataccctggtcggcgtgcgcgacgcccagcccaagctgcgcgaagccgccgcagtactgcgcctgccgccacgcctgctggtctggcggctgatcctgccggcggcgctgccggccttcctcaccgggctgcgcctggccctggcgcagggctggacctcgctgctggcggtcgagttgctggcttccagcgagggtatcggctacctgatggtgcagggccggcaactgttcatgctcgacatcgtgttcgtctgcatcctcatcatcggcctggtcggggtgggcatggaccgcgccatccagtggctcgaccgccgcctgctgcactggccgcaagccgccaccggcgaattccgccggcgcccgccgggacgcggctggcagcgcctgcaggtgtggctgccgccgctggcgctgctgctcctgtggcagtcggcgagcagcgccgaatgggtcgatccggcgatcctcgccagccctctggaagtggcgcgggcgacctggagcggagcgctcgacggcagcctcccaggcgccctgttcgacagcctgaagcgcacgctcggcgggctcctgctgggcggcggcctgggtttcctcggcggcctgctgctcggcctgtggcgcccggcggaacgcttcttcggccccactttcgcggcactgcggcaggtggcgatcttcgcctgggtaccgctgctcaccgcctggttcggcctgggcgaaccggccaagctgacgttcgtcgcaatcgccgccttcttcccgctgctgctggccacccagcgcggcatcgccagcctgccgccgagcctcggcgaggcggcccgggtgctgcgcctgggtccctggcgacggctgctccggctggtcctgccgggtgccgccccgtcggtgttcgccggcctgcgcctggcgctgatctacgcctggctgggaaccatcggcgccgagtacttcatgccctccgacggcggcatcggcagcctgatgatcggcgcccagcaattgttccgcatggacctgatcggcgccggcatgctcctggtcggcctcaccggcgccctgctcaatgccctcggccaacgcatcgaagcgcgcgccacgcgctggagacacgcatga

SEQ ID NO: 320962 - DNA, 840 bp, Pseudomonas aeruginosa
atgaacgcattcaccgcgcccgccacggacaccccgctggtcagcttccgccaggtgcgcaagcacttcgccgtggacggccggcgactggaagcgatccagcagttcgacctggagatcggcgagggcgagttcatcgccatcgtcggcgccagtggctgcggcaagtcgaccctgctgcgcctgctgatcggcctggaccgcgactacgacggcgagatccgcgtcgacggccggccaatcgccggcatcggcggcgaacgcggcatcgtgttccaggagcaccgcctgttcccctggctgacggtgcagcagaacgtcgccctcggcctggtcaacgaagcccttagcgaaaccgacaaggcggcgcggatcgacgaatacatccgcctggtcggcctgcacggcttcgagcgtgcctacccgcaccagttgtccggcggcatggcccagcgcgtggcgatcgcccgtggcctggtggccagcccgcgcctgctgctgctcgacgagccgttcagcgccctcgacgcactgacccgccagcagttgcaggaagagttgctggcgatccgccggcgtacccgtatcaccaccctgctggtcacccacgacgtcgaggaggcgctctacctggccgaccgggtggtggtgatggagccgcgtccggggcggatcaggcgggtggtcgaggtgggcctggcgcatccgcgcgagcgcgatggcttcgacttcctgcgccagcgcgaagcgctgctgcacgaactgaccgccgacggcgagtacgtcgcgccgccgccgcgacgggtggaaaacctgcccttcgaattcatcgcttgctga

SEQ ID NO: 320963 - DNA, 1611 bp, Pseudomonas aeruginosa
atgagcaaacgccccaacttcctggtgatcgtcgccgacgacctgggcttctccgatatcggcgccttcggcggcgagatcgccacgccgaacctcgacgccctggccatcgccggcctgcgcctgaccgacttccacaccgcctcgacctgctcgccgacccgctcgatgctgctcaccggcaccgaccaccacatcgccgggatcggcaccatggccgaggcgctgaccccggaactggaaggcaagccgggttacgaagggcatctcaacgagcgcgtggtggcgctgccggagctgctccgcgaggccggctaccagaccctcatggccggcaagtggcacctcggtctgaagccggaacagacgccccatgcacgcggtttcgagcgttccttctcgctgctgccgggcgccgccaaccactatggtttcgagccgccctacgacgaaagcactccgcgcatcctcaagggtacgccagcgctctacgtggaagacgagcgctacctcgacacgctgccggagggcttctattcctccgacgccttcggcgacaagctgctgcaatacctcaaggagcgcgaccagagccggccgttcttcgcctacctgccgttctccgcgccgcactggccgctgcaagcgccgcgggagatcgtcgagaagtaccgcggtcgctacgacgccggtccagaagcgctgcgccaggaacgcctggcccggctcaaggagctgggcctggtggaagcggacgtcgaagcccatccggtgctcgccctgacccgcgagtgggaggccctggaggacgaggaacgggctaagtcggcgcgggcgatggaggtctatgcggcgatggtcgagcgcatggactggaacatcggcagggttgtgaactacctgcgccggcagggcgagctggacaacaccttcgtcctgttcatgtccgacaacggcgccgaaggcgccctgctggaggcgttcccgaaattcggcccggacctgctgggctttctcgaccggcactacgacaacagcctggaaaacatcggccgcgccaattcctacgtctggtatggcccgcgctgggcccaggcggccaccgcaccatcgcgcctgtacaaggcgttcaccacccagggcgggattcgcgtgccagcgctggtgcgctacccgcggctaagccggcagggtgcgatcagccatgccttcgccacggtgatggacgtcaccccgaccctcctcgacctcgccggtgtccgccacccaggcaagcgctggcgcggccgcgagatcgccgagccgcgcggcaggtcttggctgggttggctttccggcgagaccgaggcggcccacgacgagaacaccgtgaccggctgggagctgttcggcatgcgtgcgatccgccagggcgactggaaggcggtgtacctgccggccccggtgggcccggccacctggcagctctacgacctggcccgcgacccgggcgagatccacgacctcgctgacagccagccgggcaagctggcggagctgatcgagcattggaagcgatacgtcagcgagaccggtgtcgtagagggggcttcgcctttcctggtgcgataa

SEQ ID NO: 320964 - DNA, 753 bp, Pseudomonas aeruginosa
atgtccgtatcctctgcatccctcgccggcaaagtcgccttcgtccagggcggttcccgcggcatcggcgccgccatcgttcgtcggctggccgccgaaggcgccagcgtcgccttcacctacgtcagctcggcggacaagtcccgggccctggcggccgaactcgaaggcgccggagccagcatcctggccctgcatgccgatagcgccgacgcggccgcgctcgtcgccgccgtcgacgaagcggcggctcgcttcggacgcatcgacatcctggtcaacaacgccgccgtcctcgccctcggttcggtggaagagctgccgctggccgacttcgagcggaccctggcgatcaacgtgcgcagcgtcttcgtcgccacccaggcggcggtcaagcacatgggcgacggcgggcgggtgatcagcatcggcagcaccaatgccgaacgcatgccgttcgctggcggcgccacctacgcgatgagcaagtcggcgctggtcggcctgaccaagggcctggcccgcgacctcggcccgcgcgggatcacggtgaacaacgtgcagccgggtccggtggataccgacatgaacccggacgacggcgacttcgccgaggtcctcaagggcctgatggcgctgccgcgctacgcccgcagcgaggaaatcgccagcttcgtcgcctacctggccgggccggaagcggcctacatcaccggggccagcctgaccatcgatggcggtttctcggcctga

SEQ ID NO: 320965 - DNA, 933 bp, Pseudomonas aeruginosa
atggaaaccctcagcaacatccagtgcttcgtccgcagcgccgaggccggtagcttcgccgaggccgccaggcgcctgggcctgacgccggccggggtgggcaagaacgtcgcccgcctggaaagcaacctcggcgtgcgcctgttccagcgcagcacccggcgcctgaccctgaccgaagccggggagcgtttcctgcaagaggtcggcggcagcctggagggcatccagaccgctctcgccaacgtctccagcgtcggcaaccaacccagcggcacgttgaaggtcagcatggggctggccttcggccgcgactacatcctgccgctgctcggcgagttcctcgaacgctatcccgacatcgtgcccgactggcatttcgacaatcgccaggtcgacctcatcggcgaaggcttcgacgccgccatcggcggtggtttcgaactgccgcccggggtggtggcgcgcaacctgacgccgggccacctgatcctcctcgcctcgcccgcctacctccgcgacaagccgccgatccgccatccaggcgacctgggcggcttcgacgggatccgcatccgctcgccgcagaccggccgcgtgcgctcctggccgctgcgccggcgcagcggcgaggaggcgccgatcgagctgcgcgaacgcatgaccatgagcgacccggaagccacctgcgaggtcgccgccatgggcctgggcatcaccctggtatgcatgcagcacgcctatgcctacctggagtccggcgccctggtgcgggtcctgccggactggtacgtcgacgccggcaacaccagcctctactacgcggcgaacaagctgctaccggccaagacccgggtcttcgtcgacttcgtcgtcgactacttccgccgccaggacctggcccggcgcttctccgccttcccaaccggctag

SEQ ID NO: 320966 - DNA, 1173 bp, Pseudomonas aeruginosa
atgcgcgagtccctcggtgtttcgttaccatcccggcccctgctgctgaagctgggcctgctttccctaccctgggcgttgtgcgccgggctgcatgccgtcggcctcggcgtctggctggtcctggcgctcggttggttcgccagcctggccatgctcgtcctcctcctgcgcgcccctcggcaagcggtagcgaatgccaacccgcaggcggatgccgcttcgccggcctggagcgcggcgcaacgggcgctcgccgacgaaaccgcgcaactggacggtcacgcccggcagatcgacgaactgctgcattcggcgatccgccagctcagcgacagcttccacggcctcgccgaacgcatcgatactcagcgcggcctgtcccattcgctgatcgagcgctacgacgggcgcggccaggtcgacgaaggcatcaacttccaggacttcgtcaggaccacccagcagaccctcagcctgttcgtcgaggctaccctggaaaccagccggacctcgcagcaactggtggaacgcatggaccaggtgcggctgaagatcaccgagatcctgcagtcgacccaggacatggacgccatcgccaagcagaccaacctgctcgccctcaacgccgccatcgaggccgcccgagccggcgagagcggccgcggcttcgccgtggtcgccgatgaagtgcgcgcgctgtcgacccgctccacggagttttccgccgccatccgcaagcacgtcgacgtggtccaccacgagatccaggacgccgagagcgcgatctcgcaactggccgacaaggacatgtccttcgccctcgattccaagcacaagatccagggcatgctcgatgacctggaggcgatgaaccggcacaccctgaaggtcatccacgaactggaccggctctcgctggaagtcggccagggcgtcgacgcggcggtcaccgccctgcaattccaggacatgggcagccagttgctcggccagatgcgcaagcaccatgcgcgtcttggcgccttcgccctcggcctcggcgcgctggaggcgcggccgcgccaggaatggcccgaacgggtcgcgcgggaggtcgaggaactgcgccggcccttgcccagcccggtgagccagaacagcgtcaacgtgggcgaagtggaattgttctga

SEQ ID NO: 320967 - DNA, 366 bp, Pseudomonas aeruginosa
atgggcaaaccgattctgatcgtcgacgactcggcgtctatccgccagatgctgagcttcaccctgaagtccgccggctacgaggtggacgaggccgcggacggcaaggaaggcctcggcaaggcccagagcaagagctacagcctggtgttcaccgaccagaacatgccgaacatggacggcctgtcgctgatccgcagcctgcgtaacctggccggctaccgcagcgtgccgatcctcatgctgaccaccgaatcgagcgacgcgatgaagcagcagggacgcagcgccggcgccaccggctggctggtgaagccgttcgacccgccgaaactgctcgaagtgacgcgcaaggtcctgccctga

SEQ ID NO: 320968 - DNA, 1920 bp, Pseudomonas aeruginosa
atgccccaggatatgagccagtttctccaggtgttcttcgaggaaaccgaggaacacctggccaccctcgaactcctcctgatcggtctcgacctggaccggccggacagcgagacgctgcacggcatcttccgcgccgcgcattcgatcaagggttccagcggaatgttcggtttcgacgacatcaccgccgtcacccacgaactggagaccctgctcgaccgcatccgctgtggccagatgcacctgcggccggacatgatcagttccttcctcgaagcccgcgacgtgttgcagcgcctgctcgacgcccatcgcagcggcagtcccgaccccggggtgccgttgctggagacggtcgagcggctgcgcggctggctgcgggtgccggaacaggaagcggcggaggaaggcttcggcctgttcgatgacgcgcccgccagggaaaccgcggacgacgatgccttcggcttcttcgacgaaggcccgggcgctccggaacgagcggccgcaccggaagcgttcgggctcttcgacgaggcgcccggcgcaccggccgcgagcgaagcgttcggcctcttcgatgaggcaccgggttccccaccggcggaggaacgcgccttcggcctgttcgacggcgcccccggcagccccgccgcgcccagtgcgcccgcgcaagccgtcgccgcgacggccaggggcgcagtcgcgcccgtgcgtggcgacggcgagtccggctcgatccgggtcagcgtggaaaagatcgacagcctgatcaacctggtcggcgaactggtgatcacccaggccatgctcggccagctcggcgagcagctcgacccgagccgccacgagcgcctgcagcacgccctggcccagctcgaacacaacacccgcgacctgcaggaatcggtgatgtcgatccgcatgctgccgatcaacttcatcttcagccgcttccccaggctggtgcgcgacaccgccacgcgcctgggcaagcaggtcgagctgcacctgcacggcgagcacaccgaactggacaagagcgtgatcgagaaactcagcgatccgctcacccacatcgtccgcaacagcatcgaccacggcatcgaaacgcccgccgaacgcctcgccgccggcaagccggcgagcggcacggtgaagctcgccgccagccaccagggcggcagcgtggtggtggaggtttccgacgacggtcgcggcctgtcgcgtccgcgtatcctcgccaaggcccgcgagcgcaacctgccggtgcatgacgggatgagcgacgccgaggtctggcaactggtgttcatgcccggcttctccaccgccgaggcggtcaccgagctgtccggacgcggcgtcggcatggacgtggtgaagcgcaacatcggtgccatgggcgggcgcatcgacatcgactcggcgcccggcatgggcactcgcatcggcatccgcctgccgctgaccctggcgatcctcgacggcctgatcgtcgccgtcgaagcggtcaactacgtgattccgctgacctacatcgtcgagtcgctgcaggcgcgcagcgacgacgtgcgcggcctcggcggcgaagacaacgcgatgatccgcgtacgcggcgagtacctgccgctgttcagcctgcacgagctgttgcgcatcggcggcgaagcgccggcgccggagcagggcatcgtggtgatcctcgagtccgaggggcgcagcttcgccctgcaggtggacgaactggtcggccagcagcaggtggtgatcaagagcctggaacagaatttccgccgtgtggagggtatcgccggcgccaccatcatgggcgacggcagcgtcgccctgattctcgacgtcgatgcgctgccacgcctggcggcgcgggaggacaccgccgatgaacggcactga

SEQ ID NO: 320969 - DNA, 486 bp, Pseudomonas aeruginosa
atgaacggcactgaggcaagccaggcgaacggcccggcgcaggaatacctgaccttcaccctgggccgcgaggagtacgccatcgacatcctccgcgtgcaggagatccgcggctacgaccaggtcaccgcgatcgccaacgcgccgcccttcatcaagggcgtgatcaacctgcgcggggcgatcgtgccgatcgtcgacctgcgcatcaagttccacctcgccgaggtcacctacgacccgttcaccgtggtgatcatcctcaacatcggccggcgcatcgtcggcgtggtggtggactcggtatccgacgtgatcgcactgggcggcgacgcgatcaggccgccgccggagttcggcgccagcttcgacaccgaatacctgctcggcctggccaccgcgggcgagcgcatgttgatcctggtggacatcgagagactgatgaccagccgcgaaatggcgctggtcgacgaagccgcggcctga

SEQ ID NO: 320970 - DNA, 2040 bp, Pseudomonas aeruginosa
atgggtctgttcaatgcacatgcggtggcgcagcaacgcgccgaccggatcgccacgctcctccagtcgttcgccgacggccagctcgacaccgccgtcggcgaggccccggcgcccggctacgagcgtctctacgacagcctgcgggcgctgcagcggcaactgcgcgaacaacgcgccgaactccagcaggtggaaagcctggaggcggggctggcggagatgagccgccagcacgaagccggctggatcgaccagacgattcccgccgaacgcctggaaggtcgcgcggcgcgcatcgccaagggcgtcaacgaactggtggccgcgcacatcgcggtgaagatgaaggtggtcagcgtggtcaccgcctacggccagggcaacttcgagccgctgatggaccgcctgccgggcaagaaggcgcagatcaccgaagccatcgacggcgttcgcgaacgcctgcgcggggccgccgaggcgacctcggcgcaactggccacggcggcctacaacgcgcggatcaagagcgcgctggacaacgtctcggccaacgtgatgatcgccgacaacgatctcaacatcatctacatgaaccgcaccgtcagcgagatgctcggtcgcgccgaagcggatatccgcaagcaactgccgaacttcgacgccggccgcctgatgggcgccaacatcgacgtgttccacaagaatccggcgcaccagcggcacctgctggccaacctcaccggcgtgcacaaggccgagctcaacctcggcggccggcgcttctccctcgacgtggtgccagtgttcaacgacgccaacgaacgcctcggctccgccgtgcaatggaccgaccgcaccgaggaacaccgcgccgagcaggaagtctcgcaactggtgcaggcggcggcggccggcgacttcagcaagcgcgtcgaggaggccggcaaggaaggcttcttcctcaggctggcgaaggacctgaacagcctggtggataccgccgaccgcggcttgcgcgacgtctcgcggatgctcggggcgctggcccagggcgacctcacccagcgcatcgaggccgactaccagggcaccttcggccagctcaaggatttctccaacgacaccgcacaaagcctgtcgcggatgctcgggcagattcgcgaggccgccgacaccatcaacaccgccgccagcgagatcgccagcggcaacgccgaactgtcggcgcgcaccgagcagcaggcgtcgagcctggaggaaaccgcctcgagcatggaagaactgaccagcacggtgaagctcaacgccgagaatgcccgccaggccaactcgctggcggccaatgcctcggaagtggcgacccagggcggcaccgtggtgcagaaggtggtcagcaccatgtcctcgatcaacgagtcggcgcgcaagatcgccgacatcatcggggtgatcgacggcatcgccttccagaccaacatcctcgccctcaacgccgcggtcgaggcagcccgcgccggcgagcagggccgcggcttcgcggtggtcgccggggaagtgcgcaccctcgcccagcgttccgccgccgcggccaaggagatcaagacgctgatctccgactcggtggacaaggtggagaacggcaacaccctggtggcccaggccggacagaccatgagcgacatcgtggtggcgatccgccgggtcaccgacatcatgtcggagatcgccgccgcctccgccgagcagagcaccggcatcgaagaggtgaacagcgcggtctcgcagatggacgacatgacccagcagaacgccgcgctggtggaggaagccgcggccgcggccgaggccatgcaggagcaggcgggcctgctcaaccagtcggtggcggtgttcaggctggacactccgccgagcgtggtccagctcgccagcgcgcggccgtccgcgccacgcaccagcgcgccggcgccgctggcccgcagcggcatggcgcgggccagcaaggcgcgcaaggaagacggctgggaagagttctga

SEQ ID NO: 320971 - DNA, 843 bp, Pseudomonas aeruginosa
atgcccacctccacgccttcgccggtgttcggcaaccaggagttccactacacccgcgaggacttccagcaagtacgcgagcggctctaccggctgaccggcatcagcctggccgagagcaaggcgcaactggtctatagccgcctctcgcggcgcctgcgcctgctgcggctcggcagcttcgccgaatatttcacccacctcgaccgcgagccgggcgagcagcagttgttcgtcaacgcgctgaccaccaacctcaccgcattcttccgcgaacgccaccacttccccctgctcgccgacctcgcccgccgccagttgcagcggcatcgcccgctgcgcatctggtcggcggcggcgagtaccggcgaggaaccctattcgatcgccatcaccctggtggaggcgctgggcagcttcgatccgccggtgaagatcgtcgcctcggacatcgataccggggtgctcgactgcgcccgccagggcgtctatccgctggagcgcctggagcagatgccggcgccgctgaagaaacgcttcttcctccgcggcactgggcccaacgccggcaaggcgcgggtggtggaggaactgcggcaactggtggagttccgccagatcaacctgctggaggcagactggtcgatcgccggggaactcgacgcgatcttctgccgcaacgtgatgatctacttcgacaagccgacccagacccgcctgctggaacgcatggtggccctgctgcggccggagggcctgttcttcgccgggcattcggagaacttcgtccacgccagccacctggtgcgctccgtcggccagaccgtctacagcccggcctga

SEQ ID NO: 320972 - DNA, 603 bp, Pseudomonas aeruginosa
atgaatctccaggcccgggaaggcgcgccgctgaaccgctactacgatccgtacttcgcctgcgatgcggtgaagctgttgcccggcgaatacttcgccagcggcgaagacctggtgatcgtcaccgtgctcggctcctgcgtctcggtgtgcctgcgcgacccgctcaacggcatcgccgggatgaaccacttcatgctccccgagcgcggcctcggcggcgacccggcctcgccgtcggcgcgctacggcagccacgccatggaactgctgatcaaccgcatgctggccctcggcgccagccgcgagcgcctgcaggccaaggtcttcggcggcggctcggtactgcgccagatcagcgccgccatcggccagcgcaacgtcgagttcaccctcgactacctggccaccgagcgtatcccgctgctcgccagcgacgtgctggaggccttcccgcgcaagatctacttcttcccgcgcaatggccgggtcctggtgaagtccctggtggagctgaagaacgacaccgtgctgcagcgtgaacgcgactaccgccgccgtatcgaccgcaacgcggacggcggccccatcgacctgttctga

SEQ ID NO: 320973 - DNA, 939 bp, Pseudomonas aeruginosa
gtgctgttcatcccgctcggcttcaccttggcgtggatgtcgatcttcggcaacagcgccctggagcaggccctcggcggcgccagcgaactcggccgggtggccatcgagcagccgtcgatggccctctaccagatgctccagaactacccctggagccgcgcggtgatcaccgtcacggtgctggtgagcttcgtcttcttcgtcacctcggcggactccggcaccgtggtcctctccaccctctccgcccacggcggcagcgccgacgacgacggaccgaagtggctgcgggtgttctggggctcggtcaccgcgctggtcaccggcgggctgctgttcgccggcagcatcgacgcgctgaagtcggcggtggtgctgacctccctgcccttctcgctgatcctgctattgatgatgtggggcctgcacaaggccttctacatggagtcgcagcgccagcgggcgcggagccactccctggcgccgctgatgagcggcaacggcaagcgctccggcggctggaagcgacgcctgtcgcaggccgtgcacttcccctcgcgggacgaggtgtaccgcttcatgaacgacgtggtgcgcccggcgatcagcgaggtttccgaggtgttccgcgagaaaggcctggcggtggacgcccagctcgacccgggcaacgcctcgctgagcctggagatcggtcatggcgagcagcatcggttcctctaccaggtgctgatgcgcggctacttcacgccgtccttcgcgcgtgccggcatgggcggcctgcacctgaagaatcgccgctacttccgtgccgaggtgcatctcgccgaaggtagccaggactacgatctgatgggctacaccaaggagcagatcatcaacgacatgctcgaccagtacgagcggcacctgcagttcctgcacctggtgcgttga

SEQ ID NO: 320974 - DNA, 2037 bp, Pseudomonas aeruginosa
atgcaagaacgcatcccggatgagctgaccctgccagagctcaccctgcgtggcctgatcctcggtgcgctgatcaccgtggtcttcaccgcctccaacgtctacctcggtctgaaggtcggcctgaccttcgcctcgtcgatcccggcggcggtgatctcgatggccgtcctgcgctacttctccggcgccaacatcctcgagaacaacatggtgcagacccaggcctcggcggccggcaccctgtcctcgatcatcttcatccttcccggcctgctgatgatcggctactggagtggcttcccgttctggcagaccgcggcgatctgctccatcggcggcattctcggggtgctctataccattccgctgcgccgggtgatggtggtgcagagcgaactgccgtatccggaaggggtggcggcggcggaaatcctccgggtcggcagcgacggcgccgaggacgaggaagacgcccgcgcgccgcgtgccgccggtaacgcgccggggctctacgatatcctcggcggcggcctggtggcggcgctgttcagcctctggagcagcggcttcaaggttctcgccgaaggcttcagcgtctggctcagtgccgggcaggcggcgttccgcctttccaccggtttttccctggcgctggtcggtgccggctacctgatgggcatcaccgccggcatcgcgatcctcatcggcgtggtgatctcctggggcgtcgcggtgccgttgctgaccgtcaacagcgtgccggccgacggccagagcctgtcggacctggccacccaactgtggagttcgcaggtgcgcttcctcggcgccggcaccatcggcgtggccgcgctgtggaccctggcgaccctgttcaagccgatggtgcggggcgtctgggcctccctcggggcagtgcgcggcaatagccaggcgaacagcctgcgcaccgagctggacatgccggccaagtggatcctgctgatcgccgggatactgctggtctcgctgttcgtggtcttcagccacttcctcggtgccgccgcgccggacatggccagcccgcagttctggagcctggtggcggtatgcgtggtgttcgccttcttcttcggcttcctgatcgccgccgcctgcggctacatggccggcctggtcggttcgtcgagcagtccgatctcggggatcgggatcatcgcggtcatcctggtgtcgttgctgatactcggcttcggcagcatcgagggcggcctgctggaccgccagaacggcaagctggcgatcgccctggcgctgtttaccacctcggtggtgctggccatcgcggcgatctccaacgacaacctgcaggacctcaagaccggctacctggtcggcgccacgccctggcgccagcaggtcgcgctgatcgtcggctgcatcgtcggcgcgctggtgatccccccggtgctggaactgctctacagcgcctacggcttcaccggggccctgccgcgcgagggaatggaccccggccaggccctggccgcgccgcaggcgaccctgatgacggcgatcgccagcgggattttccacgacgcgctgaactggaacatgattctcatcggcgtcgccctgggcatcgccctgatcctcgtcgacctgctcctgcgccgtaccggcaaggcctgcctgccggtgctggcggtgggcctggggatctacctgccgccgaccatcggcatgaccctggtggtcggtgcgctgatttcctggctgctggaaaatgccctgaagaagcgtgcggcggcggccggggtcgacgaagaggcttatgccgaagagccgaagcgacgcggcgtgctgctggcttcggggctgatcgtcggcgagagcctgatgggcatcctgctcgccggggtgatcggcgccaccggcgaggacgcgccgctggcgctggccggcgccggcttcgcgggcatcgcccaatggctgggactggtggtattcgtcgcgatctgcgtgctgttctaccggcgagtgctggcgcgctga

SEQ ID NO: 320975 - DNA, 834 bp, Pseudomonas aeruginosa
atgagcctgaccatccaacccatcagcccggccctgggcgccatcgtttccggcatcgacctcggcgcgccgctggacgacgccggccagcgggccatcgagcaggccctgctcgaacaccaggtgctgttcttccgcgaccagtcgctggaacccaggagccaggcgcgcttcgccgcccgcttcggcgacctgcacatccatccgatctaccccagcgtgccggagcagccggaggtcatcgtcctcgacaccgcggtcaccgacgtgcgcgacaatgccatctggcacaccgacgtgaccttcctcgagaccccggcgctgggggcggtgctcgccgccaagcaattgccgccgtacggcggcgacaccctctgggcgagcagcacggcggcctacgaggcgctgtcggcgccgctgcggcgtctgctggacggtctcacggcgacccacgacatcggcaagtccttcccccgcgagcgcttcggcgtcaccgaggccgacctggcgcgcctggaggaggcccgcctgaagaatccgccgcgctcgcatccggtggtgcgcacccatccggtcaccgggcgcaagggcctgttcgtcagcgatggctttaccacccgcatcaacgaactggagccggccgagagcgatgcgctgctgaagttcctcttcgcccatgccacgcgacctgaattcaccgtgcgctggcgctggcaggaaaacgacgtggcgttctgggacaaccgcgtgacgcagcactacgcggtggacgattaccggccccagcggcgggtcatgcatcgcgccaccatcctcggcgacaagcccttctga

SEQ ID NO: 320976 - DNA, 819 bp, Pseudomonas aeruginosa
atgcccactgataccctcggactcgccgttgccaatcctgtcccgcgcaagcgccgtctgcccggcgaccgtcggcgctgggccgccggtgccagcgtgctggccctggccctgctgtggtgggcggcgacccgtttcggctgggtcgacgtgctgttcctgccggcgcccgaacagctcttcgaagccctgcaacggctatggcaggagggctacctcgatgccagcctgctgcaacacgtcggcaccagcctgctgcgggtgctcctggcgctcggcgcggcggtgctgacggcgatcccgctgggcgtgctgatgggcctcaatcccttggccggagcggccctcgatccgctggtggagttctaccggccgatcccgccgttggcctacctgccgttgatcgtcatctggttcggcatcggcgagctgagcaaggtgctgctgatctacctggcgctgttcgcgccgctgctgatcgctaccgccgccggcgtgcgtcgcgtcgaccgatcgcgggtgcaggcggtgcgctgcctgggggccagccgctggcaggtggtgcgctacgtgatcctgccgagtgccttgccggaggtcctcaccggcctgcgcatcgccctcggcgtcggctggtcgaccctggtcgccgccgagctgatcgcggccaaccgaggcctcggcttcatggtccagtccgccgcgcaattcctcgccaccgacgtggtggtggtcggcatcctgctgatcgccgccatcgccctggccttcgaactggggctgcgctgggtccagcggcgcttcgccgcctggggttga

SEQ ID NO: 320977 - DNA, 792 bp, Pseudomonas aeruginosa
atgagccgtctgacggccgaggcgatcagcctctcattcgaacagcgcggccagcgccgcgccatcctccgcgatctcagcctgggcctggccaagggcgagtcgctggtggtgctgggtccttcgggctgcggcaagtcgacactgctgaacatcctcgccggtttccagaagccggaccagggacgcgtgcagatcgacggccggacactcgaagggcccggcggcgagcgcggcgtggtgttccaggacgacgccctgatgccctggctcaacgccctcgaaaacgtcgccctgggcctgcgcatccgtggcctgggcaaggccgagcgcaccgcgcgggcgcgccaggtcctgcaactggtgggcctccaggagtacgccgagcagtccgtcgcccagctctccggcggccagcggcaacgcctcgggctggcacgcgcgctggcggtcgagccggacttcctgctgctcgacgagccgttcggcgcgctcgacgcgctgacccgcgagcgcatgcaggtgctcctgctggacctgtggaagcagaccggcaagggcctcttcctgatcacccacagcgtcgacgaagccctgttcctggctaccgacctggtggtgatggacggcccgccggcgcgcatcgtcaagcgcctgccggtggacttcgcgcggcgttacgccgccggcgaaacggtgcgttcgatcaaggctgatcccgagttcggccgtttgcgccaggcgttgctggacgaattcctcgatgtcgcggaggccgaacatgcccactga

SEQ ID NO: 320978 - DNA, 1014 bp, Pseudomonas aeruginosa
atgaaacgcccgaattccctgcaccgcctggtggcagccctggcctttgccagcctttccgtcgccgcccaggccgccgacatcacggtcggctaccagaccggcatcgacccgaccaaggtgccccaggccgatggcctgtacgagaaagccatcggcgagaagatcgactggcgccgcttcaacagcggtccggaagtgatcgccgcgctcgcctccggcgacctgcaactcggcaacatcgggtccagcccgctggcagcggcgacctcgcggaagctgccgatcgtcgccttcatcgtttccgcgcagatcaacgccgccgaggcgctggtggtgcgcaatggaagcgggatcgggaaacccgaggacctggccggcaagaccatcgctaccccgttcgtttcaacctcccactacagcctgctcggcgccctcaagcactggcagatcgatccgtccaaggtgaagatcgtcaacctcaacccggccgagatcgctgccgcctggcgtcgcggcgacatcgacggggccttcgtctggtcgccggcgctgggcgagatcaagaaaagcggcaaggtcctcaccgacgccgccgaagtcggccagtggggtgcgccgaccttcgaggtgtgggtggcgcgcaaggacttcgccgagaagcatcctgaaatcgtcgcccgcttcgcccgcgtcagcctcgattccttcgccgactacaacgcgcacaaggccgaatggaccgccgactccgagccggtgaagaagatcgcccggctgaccggcgccgatcccagggacgtccccgaactgctggccggctcgaccttcccggaaagccaggcgcaactgtccgccgacctgctcggcggcggcaccgccaaggctatcgccggcactgccgaattcctcaaggaacagaagcgcgtgccggccgtcctcggcgactactcgccctacgtcagcgccgacttcgtgcgccaggcggagcaggtccaggtcggccagcgctga

SEQ ID NO: 320979 - DNA, 921 bp, Pseudomonas aeruginosa
atgagcgaagcccggctccactcgcccgaccccaggacaccgcgacccatggccggttgggcggcaagcctgcgcgacagtggactgctggcgctggcagtgccgcgcgtgttcgccggcatggagcgggactggggggaaatcttcgctggcgtccgccacctggccgagcaggaactcgagctggcacggcgcctggccctgcatcatctgcagatcgcttccattcgcctgctgggtagtcctgaacagcagcgccgcctgttgccggccagcgtcgagcgccgctggctgtggagcgaggcggtcgatctgcggcgcgcccagcccgaagcgcaggagcactggcggggcggtttcctggtgggtggacggggtagcgattgcttcgccgtggaagacgtggatcgcttgctgatctcagcctggcacgcgccctcccgcgctcacctgatcgctgtcgccgaaacggggcgggcaggcatcgacatctccggcctcgccgatggctcggggcagttcttgcccgccgggcagcggctgcattaccagcggctgcggctgcatcccgaggacatcctggtgccgcccggcctgccgccgaccccgtgcgggcaactgcgcgaaggcttgacccgattggcccaggccaacctcgacctgggccaggctgcgcgggtaccgggcgacgtggcggggcagggagaggcgccgcgtctcctcgccctcgcgctgcgtcttgtcgaactggcggcggagtccttccaggcggcattcgcccgcggcggcgcgctgacattccgcgaaagcgcggcggcgtcgctgctggcgagcgaggcggaggcggtggcccgcgccgggctgctcgcctgcctgcgccgacaggccctggaagcccgtctgctgggcgcggccctgtag

SEQ ID NO: 320980 - DNA, 282 bp, Pseudomonas aeruginosa
atggcactgaccaaagaccaactgatccaggacatcgccgaagccatcgacgcgcagaagaccaccgttcgcagcgcgctcgaccagctcgccgagatcgtcaaggacgccctggagaacgatggcgaaatcaccctgccgggtatcggcaagctgaaggtctccgagcgtcccgcgcgcaccggccgcaacccgcagaccggcaaggcgatcgagatcgctgccaagcgtgtagccaagttcgttccggccaaggcactgaccgacgcgatcaacggctga

SEQ ID NO: 320981 - DNA, 597 bp, Pseudomonas aeruginosa
gtgaggctggccgacatccgccactgggtgttcgacatggacggcaccctgacccgggccgtgcacgacttcccggcgatccgccgagcgctggacatccccgagcaggacgacatcctgctgcacctcgccgccctgcccgaggccgaggcggcggccaagcacgcctggctgctcgaacacgagcgcgccctggccgaggccgcgcggccggcgccgggcgcactggaactggtgcgcgagttgcagcggcgcggcgtgcgcctgggcatcctgacccgcaacgaccaccagttggcgctgatcaccctcgaagcgatcggcctgggcggctgcttccccagcgagcacatcctcgggcgcggcgaggcgcggcccaagccggaccctgatggcttgctgcgcatcgcccgacgctggaacgtgacgccggcggagctggtgatggtcggcgactaccgtttcgacctcgactgcggacgcgccgcgggtagtcgcacggtgctggtcaacctgccggaaaacccctggccggagctggccgactggcacgctgccgattgccatgcgttgctcgagcaactgcaaacgccgtag

SEQ ID NO: 320982 - DNA, 870 bp, Pseudomonas aeruginosa
atgacccagatactggacaacctggtggctttgctgagcctggaacccatcgaggagaacctgttccggggcatgagccaggatctcggcttccgccagctctatggcggccaggtcctggggcaggcgctgtcggcggccagccagacggtggaggacgatcgccacgtacactccatgcacggctacttcctgcgtcccggtgacgccagcatgccggtggtctaccaggtggaccgggtgcgcgacggcggcagcttcagcacccgccgggtcaccgcgatccagaaaggccagccgatcttcaccctgagcagctccttccagtacgacgaggaaggtttccaccaccagatcgagatgcccgaggtggttggcccggataatctgccttcggaactggagctgacccgccagcgcgccgagcggattcccgagcgcatccgcgacaagctgctgtatccgaagcccatcgagattcgtccggtcacccagcacgacccctacgacccgcagcccgacgaaccggtgaagtacctctggttccgtgccgacggcaagctgccggacgtcccggcgctgcacaagtacctgctggcctacgcctcggacttcggtttccttaccacctcgatgcagccccatgccgtttcggtgtggcagaagaccatgcaggtcgccagcctcgaccacgccctgtggttccaccgcgacctgcgcgcggacgagtggctgctctacgccatcgacagcccctgggccggcaacgcacgcggtttcgtgcgcggcagcatcttcaaccagagcggccagctggtcgcctcgtcgagccaggaaggcctgatccgcaagcgtgaggactgggcgtga

SEQ ID NO: 320983 - DNA, 1596 bp, Pseudomonas aeruginosa
atgggcgacggcggcggcgaggtgctctcctaccatcgcctcagcatgcatcgcccggagcgctacgctcccggtcccggcggactggactgggcgacccagccggcgccgttccgccagtaccggggctgccggcaagtcgaactgctgcatcggccgctggaggagtcgccaccctacgacggggtgttttccgggccggcggccgcgccctcccggctcgatcgccgcagcctctcgcagatgctctacgacggattggcgctgtcggcctggaaggaggccggcggcactcgctgggcgctacgggtcaatccgtcgagcggcaacctgcatcccaccgaagcctacctgctgcttcccggcggtaccctggagccggcgccactgctcgcccactaccgtcccgacaaacatgccctggaggtgcgcggcgaactgccggcgccgctggcttcgctgctggatgactgcttgccggccggcggctgcctcctggcattgaccagcgtgccctggcgcgaggcctggaaatacggtgagcgagcctatcgctactgccagcatgacctcggccacgcgctggcctgcctctcgatcgccgcggcgatccagggctgggagatgcgcctgctgcgcggcgtcgccgaaagcgcactggacggcctgttcggccttgaccgggacggcttcgccgagtgcgagagcgtcgacgcactgttctggatcgggccggcgctcacgcaggagccttccctttcgccgcgcctgtgcgaagggctggcggccctgccattggccggcgcaccgaaccggctgtcgcgggagtaccgggactggccggagttgcagcggatacatgggctatgtcgggcgccgcgcctgccggcacgcccgtggagggtcgcaccgggcgagcccggcaacgacaaccccggcctgccgctgcgaccgctgctgcatcggcggcgtagcgcgcagcgcatggacgggcgcgccggcatcgatgtcgggctgctgcgggcctggctgcgcaggctgctgccggagcgctcgccggtgcctttcgcggtcaccggcgaggccgcgcgggtcgatctgctgctgttcgtccatcgcgtccggggcctggtgccggggttgtactggctggatcgcagcggcctgcggccgccgccgatgcgcgaggacttcctctggcagcgcgtcgatccggagttgccgctgtacctgttgcaggaaggcgatgcgcgcgcgctgtcggcgtatctctcctgccagcaggacatcgccggcgacggctgcgtcgcgctcgccatgctcgcccatctcggcgcggcgctcgaagaaggcccctggtgctatccgcggctgtactgggaatgcgggcagctcggccagttgctctacctcgaggcggaggccgctgggctgtctgggacgggtatcggctgctactacgaccccctggtgcatgagctgcttggactaacggatgagtccatggccagtctctaccatttcaccctcggccgcgcggtgtgggacactcgtctttgcaacatgcccgcgtacccggccttgcgccgcgactag

SEQ ID NO: 320984 - DNA, 579 bp, Pseudomonas aeruginosa
atgaacgcgaaccttcccccttccgccatttccgaactgcatggcccgcgcctgctgctgcgcgcctggcgcgacagcgaccgcgaggcgttcgccgagatgtgcgccgacccgcaggtaatggaattcttccccagtgtgctcgaccgcgcgcagagcgacgccttggtcgatcgcgtccaggcgcattttgccgagcgtggctacgggccctgggccctggagctaccgggcgaggcggcgttcatcggattcaccggcctgttcgacgtgaccatggacgtgcacttcgccccgaccgtggagatcggctggcgcctggcgcccgcctactggggccgtggattcgcccgcgaagcggcggaaaccgccttggacttcgccttcgagcggctgcgcctgcccgaggtggtggccttcaccacgccgcccaaccgccgctcctggggcttgatggagcgcctgggcatgcgtcgcgatccggccgaggatttcgaccacccactcctggcagcggatcacccgatgcgccggcatatcctctatcgcgtcgacgcggcccgctgggcggagcggtga

SEQ ID NO: 320985 - DNA, 591 bp, Pseudomonas aeruginosa
atggccgacctgaccagcctgagcatcgagcatctgcgctcgccacggctgtatacccaccgtctgatcctgcggccctggctggtgcaggaccgagccaggttcgccgagctgaatgccgaccggcgggtgatggagttctttccgtcctgcctggatcgcgcccagagcgacgcgttgctgcgccgcatcgacgcgcacttcgccgagcacggttttggctggtgggcgctgcaggtcaagggcggcgatcctttcatcggctacgtggggctggaggtcgtggacttcgatgcgcccttcgtacccgcggtggccatcggctggcgtctcgccgccgagcattgggcggagggcttcgcccacgaggcggccgaggcggcgctgagctacgccttcgatacccttggcctggaccaggtggtggctttcaccgtaccggccaacgagaactccctgggactgatggagcgcctggggatgcatcgcgatcccaccgacgacttcgagcatcccgacctgccccccggccaccgcttgcggcatcatgtgctgtaccggttgacgcgcgaggactggcttcgcagatga

SEQ ID NO: 320986 - DNA, 3639 bp, Pseudomonas aeruginosa
atgcgatcaaaactattcctgctgttcttctgcctgctgctgtcgggcggacgcctgttcgccgtcgaagcgcatccgtccctgacgctgttcagccagttgcgcatcgagcacgaggacatggcgatcgccgaggacgactgggcctggctgcgccacaagggtcacctgagactcggcgcggcgctggacgagacctcgcccttcaacgtccggctcgacgacgagaactacgaaggcataacggcggacgtcgccacgctggtcgggcagttgctcggcatgcgcatcaaggtcgtgagcttcgatacccatgcggatgccgtggcggcgctcgctgccggaaagatcgacctgcttggcagccattacagctcggcgggtgattcctccctggtgctcagccaaccctatgcccgtgatcgattggcggtgttcaagcggatgggggaaaagcgcaactcgccggaggatctcgccggactcagcgtggcggtggcccgggagcatgtcggggaattgcgccagcgtttcccgcgggcgcgtttcgtggtcttcggcagccatgacgaggccgttgccgcggtggctttcggacataccgacctgtatctcgacgatgtgctcagcgcctaccaccggattaatcggtcctattacggctacgtgaggttcgagcggtttgccgatgcccgtctggaagggggctacggcttcctccttcgtcgcggcgacacgaacctgttgcgcgtcgtcaactcggccatcggcgcgatcaaccaggaccgtctcgaaagcatcgccaggcgctgggtcggcagcggttccctgccaacgggccagcgtatcgcgctgacgccgcaggagagtcgctggatcgctcgccacccggtggtgcggttggtcatcaacgacgacctggcgccgctggccttcttcaattccgacgagaccttctcgggcatcgcctccgacctgctggacatgatttcccgccgcaccggcctgcatttccaggtcacgcctcgcagtggcggcttccccgagcagatcggcgtattggccaggaaggaggcggacctggcgatcatgagccgcagcagcaagcgcgaggaaatgctgcgtttcacccgctcgttcctgtccacctcgtacgtcctcgtcacccgggcggacgacaagggacgcgcggagagccccgggagcctcgacggcaagcgcatagcgattcccgccggccatgtgggcatgcaacaggtgcgcgagcgctatccgcaggcctcgatggtggaggtcggcgtcgcgctggatgccatgaacctggtctacgaaggacgggccgacgcggcggtggtgccgctggtcaccgctcgctactacatcgtccggttgttccgcgagaggctggcgatcgccgacctggttcccatcggcgcggccaccgcccacttcgccgttcgccgaggcgacgccgaactccagtcgattctcgacaaggccttgctgagcatctcgccggacgacctgagcgatatcgtcaatcgctggcgctcgccgccgggaatgagcggccagacctgggtcgactacatcctggtgatcaccgagatcctggcgatcgcagcggccttgctgctgttctgcctgggctgggtcacttatcagcgccggcagatcagggcgcgcgcgcgggtcgaacaggcgctcagcgaccagttgcggttcgtcgaggccctgaccgactgcatgcccccgccgctgtatgtgcgcgatgtcaacggacggatgctgtcctgcaaccgcagctacttgcagagcgtcggcctgagttccgaggaggtgatgaaccgcaccgtgctcgagctgcccatggaaaacttcgagaccgctccggagttccatcgcagctacctgatggccatgcgcgagggcaggaccatcgaggcggtctacccggtggcgctgggcggccgggagcgctggatcgaccactggatccagccgttccgcgattccagcgggaccatccgcggtgtcatctgtggctggctggacatcaccgagcaccgccagttgatcgacgaactggaagaagcgaagaacctggccgacgaagcgagccgggccaagaccaccttcctggcgaccatgagccacgagatccgcacgccgatgaacgcggtgatcggcatcctcgaactggcgctcaagcgtgccgagaccggtcgggtggaccgctccagcatcgagatcgcctatgcctcggcgaagagcctgctggagctgatcggcgatattctcgacatcgcccgcatcgagtccggtcgcctcagcctgtcgccgaaacgggccaacctgcgcgagctggtggaatcggtggcacgggtgttcgaaggcctggcccggcaaaagcgcctgagcctggtgctggagatcgattcgagcatcaacggcgacgtactgctggatgccatgcgcttcaagcagatcctctccaacctggtcagcaacgcgatcaagttcaccgacgagggctcgatccgcatccgcatcgatggccgccaggtggagccgtcgctgttgcaggtcaatctctgtgtggaagacaccggcatcggtatttccctgggcgaccagcaacagttgttccggcctttcgcccaggtcaaccgcaacctgcagaacaccgagggcaccgggctcggcctggtgatctcgcgctcgctgtgcgaaatgatgggagggcgcctggtgatgagcagcgagctggggcaggggacgcggatcgacgtcgagctgcgcctgcaagtgctggaaccgatcgtcgagagcgtgcgggcgatcccgctcggcaatcgccaggcgcggcggttgcaggtcctggtggtggacgatcatgcggtcaaccggcagatcctccatcaacagctgagcttcctcggccacgacgtagaggaggcggaaaacggcctgagcgctctcaacctgtggcatgggcaaccgttcgacatggtcatcaccgactgtcacatgccgctgatgagcggctccgacctcgcccgctcgatccgccaggaggagcgcgagaatggcgaggaaccggtggtcatcatcggcctcaccgcggacgcccagccggaggagatcgagcgctgcatccaggctggaatgaacgagtgcctgatcaagcccatcggcctcgatgttctcgaggagcgtcttctggccctgggctttgccgacgacgacctgcccgtcaccatcgacgccgaacccgtcgcgataccgtcggacccccgtctctacgacctggattccctgcatgcgctgaccggcggcgagccgacgatgctcaggcggctgcttgatgaactgctgaccagcaaccgcaaggacctggagaccctcgagggactggtgcaacgccaggagaccggcgaactggccgagctggcgcatcggatcaagggcgcggcgagggtggtgcgtggcgagcaactggtggaaagctgccggcgcctcgaggatgcctgcctcagcccgaacgcctcgttcgcctgggtggaggagtgcgccgttggggtgaaactggcgatcctcgccctggacgagagtctggtggaagagtgcacggattga

SEQ ID NO: 320987 - DNA, 1179 bp, Pseudomonas aeruginosa
atgaatgatttgaatgttctggtgttggaggatgagccttttcagcgcctggtagccgtcacagccctgaagaaagtggtgcccggatcgatcctcgaggcggcggacggcaaggaggcggtggcgatcctggagtcctgcggacacgtcgacatcgccatctgcgacctgcagatgagcggcatggacggcctggcgttccttcgccacgcaagcctgagcggcaaggtccattcggtgatcctcagcagcgaggtggatcccatcctgcgccaggccaccatttcgatgatcgagtgcctgggcctcaattttctcggcgacctcggcaagccattcagcctggagcggatcaccgccctgttgacccgctacaacgctcgtcgccaggacctgccgcgacagatcgaagtcgccgagctgccctccgtggcggacgtggtgcgcggcctcgacaacggcgagttcgaagcctactaccagcccaaggtggccctggatggcggcggcctgatcggcgccgaggtcctggcacgctggaaccacccgcatctcggcgtattgccgccgtcgcatttcctctatgtgatggaaacctacaacctggtcgacaagctgttctggcaactgttcagccagggtctggcgacgcgcaggaagctggcgcagttggggcagccgatcaacctggcgttcaacgtccatccttcgcaactgggttcgcgtgcgctggccgagaacatctcggcgttgctgaccgagttccacctgccgcccagttcggtgatgttcgagatcaccgagaccgggttgatcagcgctcctgccagcagcctggagaacctcgtgcgtctgcggatcatgggctgcggcctggcgatggacgatttcggcgccggctattcgtccctcgaccggctctgcgagtttcccttcagccagatcaagctggacagaaccttcgtccagaagatgaagacccagcccaggagttgcgccgtcatcagcagtgtcgtggcgttggcgcaggcgctgggaatttccctggtggtggaaggggtggagagcgacgaacaacgggtacgcctgatcgaactcggttgctccatagcccagggctacctgttcgcccggccaatgccggaacagcactttctcgactattgctccggatcctga

SEQ ID NO: 320988 - DNA, 630 bp, Pseudomonas aeruginosa
atgcataccgtcctgatcgtcgacgaccaccccgtcatccgcctcgccgtgcgcgtcctgctggaaaagcatggtttgcaggtggtggccgagacggacaatggcgtggatgccatccagttggtccgggagcacgaaccggacgtggtgattctcgacatcggcattcccaaactcgatggcctgaccgtgatctcgcggatcaagtccctggaactgcgcagccaggtgctggtactcacttcgcaatccgcagaggcgttctgcaagcgctgtatccaggtcggcgcccgtgggttcgtcaacaaggaagaagacctgaacaacctgatcaacgccctgaacgccgtgatcgctggctacacgttctttccttcgctcacgttcgataccctcggcaccccgccggagcgcatttccgaaagcgagcttatcggcctgctctccgaccgcgagatgatcgtcctccagcatctcgccatgggctattcgaacaaggccatcggcgagaagctgttcctcagcaacaagaccgtcagcacctacaagacccgcctgctgcagaagctcggcctgggttcgctggtcgacctcgcagagttcgccaagcgcaattcgctgatccactga

SEQ ID NO: 320989 - DNA, 1242 bp, Pseudomonas aeruginosa
atgcccagtcaagcatcctccccttccccccaggtcgccatcgtcggcggcggtcccgcaggcctgatggccgcggaggtcctgagccaggcgggcgtacgcacggaagtgttcgacgccatgccctcggtcggccggaaattcctcctcgcgggcgtcggcggcatgaacatcacccatgccgaggccagggaacaattcctcggccgctatggcaggcgccagaaggaaatcgccgcactgctcggcgaattcgacgcggatgcgttgcgcgcctggatccacggcctgggtatcgacaccttcgtcggcagttccggccgggtgttcccctccgacatgaaggccgcgccgttgctccgtgcctggctcaagcgcctgcgcgagcaaggcgtgctcatccatacccgctgccgttggctgggctggaacgcggacggtacgctggacatccagagcgccgccgagcgcctgtcgatacgggccgacgccgtgatcctggcgctcggtggcggcagttggcagcgcctgggctccgacggcgcctgggtgcccctgctgcgggcccgcggcgtcgaggtcgagcccctgcggccaagcaattgcggtttcgagatcggcggctggagcgagctgtttcgcgacaagttctccggcgctccggtcaaaccggtggccatgggactggcgggcgaaacgccgcgccagggcgaattcgtcgtgacccgcgacggtatcgagggcagcctggtctatgccctctccgccgccatccgcgaacggatcgaggcacagggatcggccgaagtatggctggacttgttgccgaacaggcgtcgcgagcagatcgaggcagccctggctcgcccgcgcggttccaggtcgatggccaatcacctgcgcagccagttgggcatcgatggggttcgggccggcctcctgcgtgaactcacccccgccgccacctatgccgagccggccctcctggcggcggcgatcaagcgcctgccgctgacgctgctgcgcccgcgtccgctggacgaagcgatcagcagcgccggcggcgtgcgcttcgaggcgctcgaccgcaacctgatgctcgctggcctgcccggtgtgttctgcgccggggaaatgctcgactgggaggcgcccaccggcggctacctgttgaccgcctgcttcgccagcgggcgcgtagccggactcggcgcgctggcctggttgcgcggcaggggctag

SEQ ID NO: 320990 - DNA, 1350 bp, Pseudomonas aeruginosa
atgacgttcgcttccctcggtctgctcgaccccctgctcaaggccctcgaagggctcggccacggcacgcctacgccgatccaggcccaagccatacccccggcgctcaagggccgcgacctgctcgccgcagcacagaccggcaccggcaagaccgccggtttcgccctgccgttgctgcagcggctgaccctggaggggccgcaggtcgctgcgaactcggtgcgtgcactggtcctggttccgacccgcgaactggccgagcaggtccacgccagcgtccgcgactacggccagcacctgccgctgcgtaccgcggtggcctacggtggggtcagcatcaacccgcagatgatgaagctgcgcaagggagtggatatcctcgtcgccactcccgggcggctgctcgacctgtatcggcagaacgcggtgaagttcgcccagctccaggcgttggtgctggacgaagccgatcgcatgctcgacctcggtttcgcccgcgagctggacgaactgttcgccgcgctgccgcgcaagcgccagaccctgctgttttccgcgaccttctccgacgccatccgcacgctggcccgtgaactgctgcgcgacccgctgtccatcgaggtcagtccgcgcaataccgcggcgaagagcgtcaggcaatggctggtgccggtggacaagaagcgcaaggccgagctgttctgccacctgttgcaggccaatcgctggcgccaggcgctggtcttcgccaagacccgcaagagcgtcgaggaactggtcggactattgcagcggcagggtatcgccgccgactcgatccatggcgacaagccgcagccggcgcggctgcgcgccttgcagcggttcaaggccggcgaggtagacctgctggtagccaccgacgtggccgcgcgtggcctggatatcgaggaaatgccgctggtggtcaacttcgacctgccgatcgtcgccgaggactacgtgcatcgcatcggccgtaccggacgtgccggtgcctccggccaggcggtgtcgctggtctgcgccgacgaagtggagctgctggcggcgatcgagacactgatcgggcagaccctgcagcgccgcgaggagcccgacttcgcgccggagcaccgggtgccgcagaccgcaccgggcggcgtggtgctgaagaaaccgaagaagccgaagaaacccaaggccgcggagagcgccggcaagcccggcaagatccacttgggcagttggttcgacagcagcgcgccgacggtcaaggcggtgcgcaaggcgccgggcttcggcgcgggcgcggcgggcaagccgaagaagcggccatccggcaaatag

SEQ ID NO: 320991 - DNA, 504 bp, Pseudomonas aeruginosa
ttgagtcgtcccgagtcgcccgcggcgaagaagatcgctgtcttcgccgatgtgcagaacctctactacaccgtgcgccaggcctacggctgccatctcaactacgccgccctgtgggcagacatcgctcgcggcgggagcatcgtcgaggcctatgcctacgccatcgaccgcggcgacccgcgtcagcagcagttccagcagattctgcgcaacctcggtttcacggtgaagctgaagccctacatccagcgtgccgacggctcggccaagggtgactgggatgtcggcatcaccatcgacgtactggatgccgcgccgcgggtggacgaagtggtgctgctgtccggtgacggcgacttcgatctgctgctggagaaggtcatccgcgcccacggcgtcgtggctacggcctacggggtgcctggcctgaccgccaacgcgctgatccgagcggcgtcgcgctacgtgccgatcgagggcggactgctgctcaagggctga

SEQ ID NO: 320992 - DNA, 717 bp, Pseudomonas aeruginosa
atgaaatccgatgagaaaaccctgatcgacggcctgttcagccgcctgcgcgaggccgaggggcagtccgctccgcgtgacgccgaggccgaggcgcagatcaaccagcacctggtgcggcagccggcggcgccgtactacatggcgcaggtggtgctgatccaggaagccgcgctgaagcgcctcgaccaacgggtgaaggagctcgaggcgcaggtcgcccagttgcagcagagccgtccgagcagcggcggcttcctctccggcctgttcggcggcggcgcgcgcgacgagccggcgccgagccaatcggggcgcccggcgggctggggcgagacgcgtttctccaatccggcggcggcggccggcgacatgcgtccgggtatggcgcccgccgcggcggccgcgccttcgcgggccagcggctttctcggcggtgcgctgcagacggccgctggggtcgctggcgggatgctggtggccgacctgctcaccggcatgttccgccacagccagccgcaggaaatcgtcgaggtgatccaggacgtcccggtggataacctcgacgccagccagtttgccgatcccgagccggcgaccgagcgcttcgccgatagcgactatcccgccgacggcggtttcgccgatggcgatttcagcgacagcgacttcaacgacgactccagcttcctcggcgacgacgatttgttcacctga

SEQ ID NO: 320993 - DNA, 582 bp, Pseudomonas aeruginosa
atgaatgacgatgcccagcgctccgcacggtcccaggtcgccctgctgatcgtcgacctgcaacgcggcatgcagcgccacgacctgccgccgcgcaacaatcccggcgccgaggcgcgcatcgtcgaactgcttgccgcctggcgcgccgccggctggccggtggtgcacgtccggcacgtatcccggcagcccggctcgcccttcgcgcccggccagcctggcgtggagttccagccagcgctggcgccgcgcgacgacgaggcggtgttcgagaagaacgttcccgacgccttcatcaacagcggcctgcaacgctggctccatgtccgcgacatccgccaggtggcgctcgtcggggtagccacggagaactcggtggaagccagcgcacgcagcgccggcaacctcggcttccagacctgggtagtggccgacgcctgcttcaccttcgccaagcccgatttccacggcaccccgcgcagcgccgacgaggtgcatgcgatggcgttggccaacctgcacggcgagtacgccgtggtactgcgcgccgccgaactgttgcagcgcttgccggcctga

SEQ ID NO: 320994 - DNA, 1095 bp, Pseudomonas aeruginosa
atgagccaagagcaacagccgatccgcttcgcctactgggtccccaacgtcagcggcggcctggtggtgagcaagatcgagcaacgcaccagctgggacatcgactacaaccgcaagctggcccagttggcggaacgcaacggcttcgactacgccctctcgcagatccgcttcaccgccggctacggcgccgagtaccagcacgagtcggtggccatcagccacgccctgctggcggccaccgagaagctcaaggtgatcgcggcgatcctgcctggcccctggcatccggcggtggtggccaagcaactggcgacgatcgaccaactgaccaatggccgggtcgcggtgaacatcgtcagcggctggttcaagggagagttcaccggcatcggcgaaccctggctggagcacgacgaacgctatcggcgctccgaggagttcatccgcgtgctgaaaggcatctggaccgaggaaaacttcaccttcaagggcgatttctatcgtttccacgactacaccctgaaacccaagccgatccagcagccgcacccggaaatcttccagggcggcagctcgcgggcggcgcgggacatggcctcgcgcgtgtccgactggtacttcaccaacggcaacagcatcgacggcatccgcgcccaggtcgaggacatccgcgccaaggcggcggccaacggccattcggtcaaggtcggagtgaacgccttcatcattgcccgcgataccgaggaggaagcgcgggcggtgctcgacgagatcatcgccaaggccgactacgaggcggtgaacgccttcggcgacgcggtgaaacaggccggcaaggcctcgccggagggcgatggcaactgggccaaatccaccttcgaagacctggtgcaatacaacgacggcttcaagaccaacctgatcggcacgccacggcagatcgccgagcgcatcgtcgcgctgaaggcggccggggtcgacctggtgctgtcggccttcctgcacttccacgaagaagtggagtatttcggcaagcacgtgttgccgctggtccgcgaactggagcaggcccaggctcgcgaagcggcctga

SEQ ID NO: 320995 - DNA, 657 bp, Pseudomonas aeruginosa
atgaatcctctgctgccgctgcgtgacgcctggttcttcttcacccgccacctgaccaccctggtgccgctctgcctgccctggatattcctcgaaagcctgctccagcagcagatcgacgaagccgtcggcccccagcagatgggcgcctggagcctggtcgccggactgctcttctacccgctctacaccgcagccctgatcctgttcatggacgcgcgcgggcgcgacgagcggcctcgcgtcggccagctgtggagcgccgcgctgcgcctgtggccagccttcgcgctactcgcggcgctgacttcgctgctgatcgtgctcggcctgtcgctgctgatcctgccgggcatcttcgtcatggtgaagctgtccttcgccgaattctgcctggtgctgcgcggccgtagtccgctgcaggcgctgcgggaaagcttcgagttcacccgtgggcgattcttcctgatcctcgcctgttcgctggtgatcctgctgccggtctggagcctggaagcctggctcgccgattcggccggcgacgccgtcgtgctgcgggtcgccctgcatacgctcagcgggttcttccagctgctgttgaccatcgtcgccttccgcatctacagcctcggtccggcgccacgcaacgggatgtga

SEQ ID NO: 320996 - DNA, 435 bp, Pseudomonas aeruginosa
atgagcgacgaatcggccaaccccagctgcatttcccacctgtccatcggcaccaacgactttccccgtgcccgagccttctacgacgcggtgatggccgccctcggctgcaaggtgatcctcgaataccccggcgccgtagcctacggcaagctctatccggagttctgggtgcaggcgccgatcgacggccgtcccgccagcgtcggcaacggcagccacgtcggcttcttcgccgacagcaaggcccaggtcgacgccttccacgccgcggccctggccgccggcgcacgcgacgagggcgcgccgggcccgcgtccgctgtacggcgagccctactacgggtgtttcatccgcgacctcgacgggcacaaggtcgaggcctcctactgggacatgagccagggcttcgacgcccacgaccacgcccactga

SEQ ID NO: 320997 - DNA, 837 bp, Pseudomonas aeruginosa
atgccgcgcaaggtattcagcagccaggcctaccgccacaaggtggtgctggtcagcggcggctgttccggcatcggtcgcgcgctggcgctgcgtttcgcccgggccggtgcgcgactggcgatcctcgacctcgaccaggcggcgctggacagtttggtccagcacctgcgcgaccatctcggcggcgaggcgctcggcctgcgctgcgacgtcgccgacgccgatgcggtggagcgtgccgtggcgctggcggtggagcgcttcggcggcatcgacgtgctggtcaataacgccggcatcacccaccgcggtaccttcgccgaaaccggcctgggggttttccgcaaggtcatggcggtgaacttcttcggcgccgtgcattgcacccgcgcggcgctgccgagcctgctcgaacggcgcgggcagatcgtcgtgctcggttcgctgaccggcttcgccccgttgctctaccgcagcgcctacaacgccagcaagcatgccttgcacggtctgttcgataccctgcggatggagctggaaggcaccggcgtcagcgtgaccctggcctgcccgggattcaccgccaccgacctgcgcaagaacgcgctggtcggcgatggctcggtgactcgccagccggtgcaagtgctgggcagccaggtggcatcgccggtggaggtcgccgaggcgatcttccagggcgccgcgcggcgccggcgcctgctggtgctgtccaacgtcaactggcgggcgcggctgctggcgcgcttctttccgcgtctcttcgaaaagctgctggtgccgcgcctgtcgggactcaagccgcaaccctga

SEQ ID NO: 320998 - DNA, 1140 bp, Pseudomonas aeruginosa
atgcgcggcggcaagctctatgctctggtcctttccagcatagtctcgattgcgatgtcactgccccgtctacgcaacctgctgttcgtcggcctgctcctgctggtcggcggtgccctgctcgccagctacctgctgagctggcaacccgccgatcgcgaagccgcgcccctgcattgccagggcgccgcgccggcgctgaagccggggcaggccctgaaggtgatgacctggaacatccagtacctggccggcaagcgctacgtcttctgggacgacctgccggatgccaccggcccggaccagcgccccaccgccgaagacctggcgttcaccctcgacgaggtggtccgggtgatccgcgacgagcagccggacctggtcctgctccaggagatcgacgacggctccagcgccaccgacgatcaggaccaactggcgctgatccaggagcgcatcaacgatctctaccattgcagcgcccaggcctacgagtggaagtcggccttcgtgccgacgccgcacatcttcggcagcgtcggccgcaagcaggccaccctgagccgctatcgcatcgatagcgccgagcggcgccagttgccgccacgcgatggcgggctgttcgaccgcctgttcgggccgcgcccggcgatcctggtcagccacctgccgatcgacggcggcggcgagctggccgtgctcaacgcccgcttcgaccgcccgcaggcgaacgacgacaccctcgagcgccaggtcgagaccacccgtacgctgctcgacgaactgcaggccaggcgcacgccctggctgctcggcggcgacctcaacctgctgccgcccggccagtatccctacctgctggcgccgctgcgcgcgccctaccgggaagacagcgaactggccatcctgagcgggcgcttcccgatggtgccgtcgctggaagaggccagtggcgtcgaccaggttcgctggtacacgcacttccccaacgacccacgggtccaggggccggatcggaccctcgactacctgttccacagcccctcgctgacccgtctcgatgcccgggtccggcgcagcgatacgctgcagatctccaaccacctgccgctcgccgcgcgcttcctgctgccccattga

SEQ ID NO: 320999 - DNA, 735 bp, Pseudomonas aeruginosa
atgcccctacgcaccacaacgcccctgctcgcgctgctggcgttcgccctgctggccgccccgcagctccatgcgcaggacgcaaggccgtcgttgaacgtcggctactacgaattccccccctacatctataccgcccgggatggccacgccgccggttccggcgcccgcctggtccgcctgctgctggagcgggccggctatcgtccggcgttccgcgccctgcccagcgcgcgcctgtacctggggctgcaggatggcagcgtggcgctgtgggccggcgcggccaagccggagctggccgccgacaccctccaggcgcggcgcgtgctcggccacgtcagcctgaacctgtactacccggcgcaccagccggcaccgcgggttccccaggacctggccggacgccggctgatcctgatcagcggctacagctactggaaaccggtcaccgacttcatccaggcccccaacctgcacctgcgcctgtaccgcaccggcacccaccacgccgccttgcgcatgctcgaactcgggcgcggcgactacctgctcgactaccaggcgccggtggaagcggccagccgccaggcgttggcaagccaggaactgtaccgcctgccgctgcggatgatcgtctcgcgccacattcccggcgccgaagcgctgcgcgaccgcctggaccaggcctacgaccagttgcggagcgacggcgccgacctgtccctgctgtga

SEQ ID NO: 321000 - DNA, 408 bp, Pseudomonas aeruginosa
atgcataccgccatcccctgctgcacgatcaacggcgaacagcccgccctgcgcggacaggtctgccagtcgctgctgatccaggaatggtggtgggaaggccgtccggccgatccggtgaacgtggtctacctgcagttcgagcaacgctggtatcgcctctacttcgagggcgagacggtgttctggcgcagcggcgaagcgccgcggccctgcgagaacgacgaaggcccgggcgagtaccgcctgcacgacctcggccggcagcgcggcctggccggtgtgcgcctgctggccctggagttcgtcctcaacggcccgaccctggacagccacttcgacttcgccgacggccagcgcctgagtttccggcacttcctcgacgacgacctgacccgggtgctctga

SEQ ID NO: 321001 - DNA, 2517 bp, Pseudomonas aeruginosa
atgatttccctacccatcgacgccgttgttcccgccctgcgccaggcccttggcgcacaacaccaggccgtcctggaagccccgccgggtgccggcaagaccacccgggtgccgctggccctgctcgacgagccctggctcgccggccaacgcatcctcatgctcgaaccgcgacgcctggcggcgcgggccgcggccgagcggctggccgccgagctgggcgaaaaggtcggcgagaccgtcggctaccggatccgcctggagagcagggtcggcccgaagacccgcatcgaagtggtcaccgagggtatccttgcccgtcgcctgcaagacgacccggcgctggacggtgtcggcctggtgatcttcgacgaattccacgagcgcagcctggatgccgacctggccctggcgctgactctcaatggccgcgaactgttgcgcgacgagccgccgctgaaagtgctggtgatgtcggcgaccctggagggcgagcgtcttgcggcgctgctcggcgaagcgccggtggtgcgcagcgagggccgcatgttcccggtggatatccgctggggacgggcggcgcaacccggcgagttcatcgagccgcgggtgcagcaggcggtgctccaggcgctggcggaggaaagcggcagcgtgctggtctttcttcccggccaggccgagatccgccgcgttcacgaaggcttgcgcgaggcccttggcggtcgccccgaggtgctgctctgcccgctgcatggcgagctcgacctcgccgcccagcgcgccgccatcgagccggcgtcgcggggcacgcgcaaggtggtgctggcgaccaacatcgccgagaccagcctgaccatcgacggcgtacgggtggtgatcgacgccggcctggcgcgggtgccgcgcttcgatccgggtagcggcatgacccgcctggagacccagcgcatctcccgcgcctccgctacccagcgtgccggccgcgcagggcgcctggagccgggcgtatgctaccgcttgtggtcggagagccagcatgagcagttgcctgcctacggcacggcggaaatcctccaggccgatctggccgggctggccctgcaactggcgcgctggggcgtggcgccggaggagctggcctggctcgacgcgccgcccgcggcggcctacgcccaggcccgcgagctgctcgggcggctgggggcgctgaacgccagcggcgcgttgagtgcccatggccaggcgatggccgaattgccgacccatccgcgcattgcccacctgctgctgcgcggccaggccctcggccttggcgaactggcttgcgacgtagcggcgctgctcggcgaacgtgacatacagcgtggcggcggcgccgacctgcacagccgtctcgccctgctcgccggcgaggcccgcgctggcgcctcgcgcggcgcggtacagcgcgcccggcaactggcccggcagttccgcggttacctgcgcggcgccgccagcgaagcggtcgtcgatcccggccatcctcgctggctgggctgtctgctggccttcgcctatcccgaccgcatcgctcgccagcgccgcgccggcggcggcgactaccggctggccaatgggcgcgctgcgcagttcggcgaaccggacagcctgatgaagcagccctggctggtgatcgccgatctgggcagccgccagggccagcgcgaagagcggatctacctggccgccgaactcgatccgaggttgttcgatacggtcctggcggagcaggtcagccagcgcgacgagctgcagtgggacgagcgcgaaggcgtgctgcgcgccgagcgccagcgccgggtcggcgaactggtgctgtccagcgaggcgctacccggcctcgacgaagcggcgcgcagccaggcgctgctcggcctggtccggcgcaagggcctggagctgttgccctggaccccggaactgcgccagtggcaggcgcgcatcggcttgctgcgccggctggacctggaagacaagggcgagagcgagtggccggacgtcagcgacgccgcgttgctggaacggttggaggaatggttgccggcctatctcggcaaggtcacccgcctggctcacttcgccaacctcgacttggcttcgatcctcgccgggctgttgccctggccattaccgcagcgtctcgacgagtgggcgccgaaaaccctggaagtcccctccggctcgcgcatccgcctggactacagcgaaaccccgccgatcctcgcggtgcgcctgcaggaactgttcggcctcggcgacactccgcgcatcgcccagggccgcctggcagtgaagctgcacctgctgtcacccgcgcatcgcccggtgcaggtgacccaggacctggcgaacttctggcgcagcacctatgcggaagtcaagaaggacctgaagggacgctatccgaagcattattggccggacgacccgctggtggccgaggccactgcccgggccaagccacgcaagtag

SEQ ID NO: 321002 - DNA, 417 bp, Pseudomonas aeruginosa
atgcgccttgccacccgcgtttcctgtgccgttctcagtgcagccctgctgagccagttgtcggcctgcggtacgctgttctaccccgagcgacgcggccagatcgacggtcgcatcgatccggccatcgtcgccttcgacgccatcggcctgctgttctatatcatccccggcctgatcgccttcggcgtcgacttcgccaccggcgccatctacctgcccgacgccaagtactcggtcgccccggaagtgctcaaggatgccgtcggcgcggacggcaaggtcgacaaccgcaagctcaaggccatcctcgaacgcgagatcggccgtgaactgccgctcgacgacccgcgcctcatccgccacagcggcagcgtcgagcaactggcggcctatggcctgaagccggccgcctga

SEQ ID NO: 321003 - DNA, 897 bp, Pseudomonas aeruginosa
atgagtcccgattccccccacgcccgcctgctgcgcctggccaccctggcctcgctcggtgtcgccgtcaccctggtcatcggcaaggccattgcctggtggctgagcggttcggtgagcctgctcgccggcctcaccgactccctgctggacagtgccgcctcgctgctcaacctgctggcggtgcactattcgctacgcccggccgacgacgaccaccgctacggccacggcaaggccgaggccctggccggcctggcccaggccatgttcatcggtgccagcgcggtgctggtggctatccaggcggtcgagcaattgcgcgacccgcagcccctcggcgcggccacctggggcatcgcggtgatgctgctgtcgctgctgctcacggcccttctcctggccttccagacccacgtcatccgccgcaccggttccaccgcgatacgcgccgactcgctgcactaccgctcggacctgctgctcaacgccagcatcctcgtggcactgctcctggcccgctacggctggccacagagcgacggcctgttcggcctgggcatcgccctgtacatcctctggagcgccctgcagatcgctcgcgagtcggtgtcgatcctgatggaccgggaactgcctaccgacatcagcgagcgcatgcgcgaactcgcctgcagcgtgccgggagtgctcggcgcgcacgacgtgcgcacgcggatttccggcaaccactggttcgtccagttgcacctcgaactgcccggcgagctgagcctgtcggtggcccacgccctgaccgaccgcgcagtgctggcgatcaagcgcgaatacccgaaggccgaggtgctgatccatgccgacccgcaggaagtggtcggcaaggaaaccgtcagttga

SEQ ID NO: 321004 - DNA, 705 bp, Pseudomonas aeruginosa
atgaacggtggatggtggcgaatgctcggggtgggcgctctctcgctgagcctgtgcgtccaggcgcaggccgacgacggccgagggggacgcggcggacccggcggcgagcgcggtgttgcccacggacaaccgggacctggccgcggcgaagcgtacggcggcagttggggaccgcatcccgactggcgtccgggccgggtggtggaggccttgccgcgcggacacctgcgggtgccctatcgcggcggcgagtatttcttcgacgacggctactggtaccgacccgacggcccgcgctatgtgctggtcgtgccgccccgcggggtgcgcgtccgcagcctgccgccctatgcggagcaggtctggctgggcagcgtgctgtacttccttgccgccggcacttactacctgtggcatgccgacacccgcgagtacgaagtggtcagcccgccgccgcgggcagcgggacccgtttatccggtcagcgggccggccgccagctacgacgtggtggcctaccccgcgcgcggccaggggcccgaccagcagggccgcgaccgctacgagtgccaccgctgggcggtgggcgagagcggcttcgacccggcgggggcgacctacgcgccggccgccgaggtcgccaacgactaccgccgggccatggccgcctgcctgagcgggcgcggctacagcgtcaactga

SEQ ID NO: 321005 - DNA, 510 bp, Pseudomonas aeruginosa
atggcaatcaacctgaaagaaatcctcgccatgaacaaactcgatcgctacgacctgcgtatcctcgaagaactccagcgcgacgcacgcatctccaaccaggaactggcagaacggataggcctgtcgccatcgccctgttcgcgacgggtcaagcagctcgaggacgacggctacatcgtccgccaggtagccttgctggaccgcaagaaactcggtctgagcctcaccgccttcgtcctcataggcatggaccgacacaccccggaacgcttcgaacattttcaggaagtcatcggcaaatgcccggaagtgctggagtgcagcctggtcaccgggatggacgcggactaccagttgaaggtcgtggtgccggacatggaccattaccagaaactcctgctgggtaccctgacgcgcatcgagggggtctccagcgtgcgctccagcttcgtcctcaaccaggtgctggcgagtaccgaactgccgctggagcacctgcgcgattga

SEQ ID NO: 321006 - DNA, 210 bp, Pseudomonas aeruginosa
atggatcccgaactgttcgaagagtggatgatgaccggtctggtgaccgtgcttatcctgttcatggctttcatcgtgtgggacctggcgaagaagtcgaaagccggcaagttcggaaccctgatcctgttcttcgccctcggcctgggcgtactgggcttcatcatcaagggcctggtcatcggcagcctcgaaggcgcgggcatgtaa

SEQ ID NO: 321007 - DNA, 393 bp, Pseudomonas aeruginosa
atgaacgccgccgaccgcgtcatgcagagttatggacgctgctgtgccagcaccggattcttcgatgatttctaccggcatttccttgccagttccccgcagattcgcgccaagttcgccaccaccgacatgactgcgcagaaacacctgctgcgtgccgggatcatgaacctggtgatgtacgcccgcggcatgtccgacagcaagctgcgcgccctcggcgccagccattcgcgcgccgcgctggatatccgcccggaactctacgacctgtggctggacgccctgctgatggcggtcgccgagcacgaccgcgactgcgacgccgagacccgcgacgcctggcgcgacgtgatgggtcgcggcatcgccgtgatcaagtcgtactactga

SEQ ID NO: 321008 - DNA, 627 bp, Pseudomonas aeruginosa
atgtcccgtccaccgcgtccttccccgcgttatcccgtccgccctgcgccacgccgggtggccaaggcgccgccgagcgagccgaagctgctgctgttcaacaagccgttcgacgtactgacccagttcaacgacgagcaagggcgttcgaccctcaaggacttcatcccggtgccgggcgtgtatccggccgggcgcctggaccgcgacagcgagggcctgttgctgctgaccaacgacggtcgcctgcaggcgcgcatcgccgacccccggcacaagctgccgaagacctactgggtgcaggtcgaaggtacgccggacgaggagcaattgcggcgcctgcgcgagggcgtgacgctcaacgacggcccgacgctgcccgccgaggcgcgtctgctggatgagccgacgttgtgggagcgggtgccgccggtgcgttttcgcaagtcggtgccgacccactggctggaattggtgatccgcgaggggcgcaatcgccaggtgcggcggatgacggcggcggtgggcttgccgacgctgcggctggtgcgggtgcggatcggcccctggagcctggacggcctgggcctcggggaatggcgggaagtgccggcgcggctggactga

SEQ ID NO: 321009 - DNA, 1086 bp, Pseudomonas aeruginosa
atgccctccctgcgtcccacctggctgatcagcctgctgaccctggccggctgcgctggcagcgcctatcagggtccgccttcggaccatttcgacggcgaacgtttccgcaatatccagccgaccgcgcacaagagcctgcgcgacctgctcaagtggcagtggaaccgcccgccgcaacgcccgtgggtcgccctgccgccgacggcaacgccgccaagggtgaacgagcgcgcccgcggcgaagaactgcgggtcacctacatcaaccacgccaccctgctgatccagcaccgcggcctgaacatcctcaccgacccggtctggtcgcaacgggtcagcccgctcgccttcatcggcccgaagcgccaccatccgcccgggttgacgctcgaccagttgccaccgatcgacctggtgctggtgagccacaaccactacgaccacctcgacctggaaaccctgcgccagctccaccggcgctggccgacggccaaggtggtcagcggcctgggcaacgccgggctgatccgccagacaggtttcgccgacgtcgtggagatcgactggtggcaggccgtgccgctgggcgctggcctgacgctgcatggcgtaccggtgcagcactggtcgtcgcgcacccgcagcgacaccaaccgcacgctctggctcggcttcgtcatcgactcgccggacggcccgctgctgtttcccggcgataccgggctcggcccggagttcgggctgatcaaccagcgcttcggggcgatgcgtttcgccgccctgccgatcggcgcctacgagccgcgctggttcatgcgcgaccaccacatgaatcccgacgacgcggtgcaggcccatcgcacgctgcaggcgcagaccagcatggccatccacttcggtaccttcaatctcaccgacgaacagcaggacgacccgcccaaggcgctccaggcggcgctgcgcagccaaggcgtggacccggcgaccttcggcacgccgaaacccggcgagcagtggcgcgtcgcaccgcgcaacgtcgctcaggaggccggggccaccaggcgggagcagcagttgcggtag

SEQ ID NO: 321010 - DNA, 567 bp, Pseudomonas aeruginosa
atgccgttcagcgtccccactcatctcagcaacccgctccgtcgcttcgcccgccgcctggtgcccgatgccgcgccggaagtggcagcgccgttgccgatgccggaaagcctggccggcgaaccgtggttctcggtcgggcgggcggtcgaggccctcggcggcgagcgggtcgatggctggatcctggaagaatggcgtggcttggccctgcgcgcgcgtttcagcgcttgctggcgcgatccgcgcggcaacctgtggaatgtcctgccgcaggcgggcgccatcgctttcctggccgacccgcagcggcgctacgaaggcgtgccgctggccgaccagtaccaggcgctcagccgcgatgtcctgctggaagactatctcggcctgcggcgccaactggcccgcgccggcctggacgacgaggcccgcgagcgcctggccgggatggccgcgcgcctggaaagctggctggccctgggcggccgtggcgaccaggcttgtccgtgcggcagcggcaagcgctaccgcaactgctgctcccgcctggtggccccggcctcctga

SEQ ID NO: 321011 - DNA, 1476 bp, Pseudomonas aeruginosa
atgagtatcgattccgacgacgggttcgtcgtcgcccgcacggccgaggaggccgtcgaccgtcttgccgagctgcaccgccaggccaccgcggcgctgagccaggcgctcaagcgctacatcaaggagcgcatcgagccaagcgaggccgagcggcagaacttccactacccgcaactgcgcatcggctaccgctgccagggcgaggtgccgtccaccacccgcgcctacgccaaggtccaggtgccgggcgagtacagcgttaccgtcacccaccccgacgccttccgcaagtacctgctggaacagttgcgtccgctgatggacgatttcaccgtgcaggtgcaggtcggcccgagccaacaggacatcccctatccctacgtggtcgagcagggcgacgagctggccggctccggggtgaccgccgccgagctggcgcgggtgttccccagcaccgacctgtccgccgcttccgacgacatcgccgacggcctctacgaatgggaacgcgccgaccagttgccgctggcgctgttcgacgccgcgcgggtggacttctccctgcgccgcctggtgcactacaccggcagcgactggcgccacgtgcagccgtggatcctgctgaccaactaccaccgctacgtcgaccagttcatccgcctcggcctgacccgcctgcgcgaggacccgcgcttcgtgcgcatggtcctgccgggcaacgtgatcatcgaacgcgggatggacgaaggcgaggccaacgccatcgtcgccggggtggtctggcaccgctaccagatgccggcctaccacctgatcgccgccgatggcgacggcatcaccctggtcaacatcggggtcggcccgtccaacgcgaagaacatcactgaccacctggcggtgttgcgtccgcattgctggctgatgatcggccactgcggcggcctgcggcagtcgcagaccatcggcgactacgtactggcgcacgcctacatgcgccgcgacggcatcctcgaccgcgcgctgccgccgcacatcccgatcccggcgctggccgaagtccaggtcgccttgcaggaagccgccgccgaagtcaccggcgagcgcggcgagtcgctcaagcgacgcttgcgcaccggcaccgtgctcacctacgacgaccgcaactgggagctgcgctgggcccaggagcggccactgatcaacctggcgcgggccatcgcggtggacatggagagcggcaccatcgccgcccagggctaccgcctgcgggtgccctacggcacgttgctgtgcgtctcggacaagccgctgcacagcgagatcaagctgcccggctcggccaacgccttctacgagcgcgcggtgaaccagcacctgcggatcggcatcgccgccctcgacctgttgcgcagccagctcaactcgctgcactcgcgcaagctgcggagtttcgacgagccgccgttccgttga

SEQ ID NO: 321012 - DNA, 432 bp, Pseudomonas aeruginosa
atgcaggagcatccgcgctaccgggagctggtcgagcagggcttcgccgcggccagtttcgttggcgacctcggcatccgtccgctggactgcgggccgggttgggtcgaagcggggctggacatcctgccccgccacgcccagcagaacggcttcatccatgccggggtccaggcgaccctggccgaccatgccgccggggccgccgccgcgaccctggtggaggaggggcagacggtgctgaccctggagttcaagctcaacctgttgcgcccggcgctttgccagcgcctgttgtgtcgtgccgaggtgctcaaggccgggcgccaggtgacggtggtcgaggccgaggtgttcgccgagcgggacggtcggcggcacctgttcagcaaggccaccgtgaccatggcggtggtggcgctggccgaatga

SEQ ID NO: 321013 - DNA, 1650 bp, Pseudomonas aeruginosa
atgaacctgcaccagtacgccgaaacccacgaagtgaccaaccaggtaccgtcgctggatggcgccaacctctaccgcctcgacctgcctctccaggagtgggtgcgtcgctaccagggcggctgggccgaggagcgcctgcagcgctacggtgagctggccggcggcccgctgatggcggccggcttcctggccaaccagcacaagccggagttccatagccacgaccgctacggcaaccgcgtcgacctggtggagttccatcccgcctaccacgagctgatgcgcgccgccatcgagcacgaactgccctcgctgccctggaccgacccgcgccccggcgcccaggtggcgcgggccgggctgtcctacctgcacagccaggcggaggccggcaccggttgcccgttgaccatgacctacgccagcgtgccggcgattcgcctgcaggcggacctggccgagaaatggctgccgaagatcctctcccgcgagtacgacccgcgtaacgtgccgatggagcagaaggcgggcgtcaccatcggcatggcgatgaccgagaagcagggcggcaccgacgtccgggccaataccacgcgggcctacccggtggggattcccggaccggggcaggcctacgaactggtcgggcacaagtggttctgctcggcgccgatgtgcgacgccttcctcaccctggcctacactgacaagggcctgacctgcttcctgctgccgcgccaccggccggacggcagccgcaaccagttctacatccagcgcctgaaggacaagctgggcaactggtcgaacgcctccagcgaaatcgagtatcgcggcgccctggcctggatggtcggcgaagagggccgtggcgtgccgaccatcatcgagatggtcgccatgacccgcttcgactgcatgatcggctccagcgcactgatgcgtcaggcgttgacccaggccgcccaccactgtgcctaccgcaaggtcggcgggcgggtgctggccgagcaaccgctgatgcagaacgtgctcgccgacctggccctggaaagcgaggcggcgctggccctgaccctgcgcatggggcatgccctggaccgtgcccacgacgagcaggaggagaagttcgcccgcctggtcaccgcggtgggcaagtactggatctgcaagcgtgccccggcgatgatcaacgaagcctccgaatgcatgggcggtgccggctacgtcgaggaaaccatcctgccgcggctgtaccgcgaggccccggtgaactcgatctgggaaggttccggcaacgtgcagtgcctggacgtgctgcgtgccctgtcgaaggagccgggggtgctcgacgcgttgttcgccgaactgggcgacggccatggcgacgcccgtctcgccgcgcacatcggcaacctcaaggcggccttcgccgacaccgccgacatccagtaccgcgcccgccagctcaccgaggacgtggcgatcgccctgcaggccaagctgttgctggaagccggcaactccgcggtgtccgacgccttcatcggcagtcgcctgggggacggcgggcgggtctacggcaccctgccgcgcggcgtcgaggtcgaggcgctgttggctcgcgccaccccgcacctggcctga

SEQ ID NO: 321014 - DNA, 648 bp, Pseudomonas aeruginosa
atggtctatcgtgtcaccgaacgccgcctgcaacgcgattccgcgctgcgcgagcgcatcctccagctaggcctgcggcgtgtcgcggagggcggtttcgccgcgctgaccatgcaggccctggccgacgacgcggggatcgccaccggcagcctgtaccgccacttccggggcaagggcgagctggcggcggaaatcttccgccgcgccagccagcgtgaggtcgatgccctggccgtcgtcctgcgcggtcccggcgcgcccgcctggcgcctggccgagggcttgcggcgcttcgccgcgcgcgcctggagcagccagcggctggccttcgccctgatcgccgagccggtggatcctgaagtcgacgagcagcgcctgcgctatcgcgaggcctacgccgcactgttcgtcgaactgctcgaggagggccggcgcagtggcgcattccagctttccctggtgccgcttgccgcggcctgcctggtcggggccatcgccgaggcgctggtcggccccttgtctcccccggcgcgcgccgctcgcgacagcggccagccggaaccgagtctggagccggtgagtacggctctggtgaacttctgcctgcgcgcggtgggcgcgcctgtctgcgaggaaccctcatga

SEQ ID NO: 321015 - DNA, 2388 bp, Pseudomonas aeruginosa
atgcggcactggctgattctctttcttcttgcgttgccgtgcctggcgggtgcggtgagcttcaacgagcaggtcgagcgcctgccgctggggcagtccatcgacgtgttcgaggacgtgcgcggtagcgccgatatcaacgacatcacctcgcgggccatcgacagcagcttccgccgccatgacaaggacgtgctcaatgccggctattcgcgctcggtgttctggttgcgcctggacctggactaccggccggtcgcctccagcgatccgcgcacctggctgctggagctggcctatccgccgctggacaagctcgacctctacctgcccgatggccagggcggctaccgcctcgcccagcgcaccggcgacacattgccgttcgccagtcggccgatccggcagaacaactacctgttcgaactcggcctcgagccgaacaagccgcagcgtgtctacctgcggctggaaagccaggggtcgatccaggcgccgctgaccctgtggtcgcccaaggcctacctggaggagcagcccgaacgcatctatgtgctcggcatcatctatggcgtgctgctggtgatgctgatctacaacctgttcatcttcctcagcgtccgcgataccagctatctctactacatcctctatatcgcttcgttcgggctctaccaggtctcggtgaacggcgccggcatcgagtacttctggcccgacagcccctggtgggcgaacgccgccacgccattcctgatcggttcggcggcgctgttcggctgccagttcgcgcgcagcttcctgcatacccgcgaccacagcgtgtgggtcgaccgcggcctgctggcgctgatggcggtcggcgcgctggtcatgctgatggcgctgaccatgagctacgccgtggccctgcgcctggccacctacctggcgctggccttcaccggcctgatcttcgccgccggcatcctcgcctggctgcgcggcatgcgcgtggcgcgctatttcatcatcgcctggaccgccttccttctcggcggcatcgtcaacaccctgatggtcctcggctacctgccgaacatgttcctcaccatgtatgccagccagatcggttcggcgctggaggtgggcttgctgtcgctggcactggccgaccggatcaacgcaatgaaggaggagcgcgcgcgaatcctccaggagtccagccgcaagctggaagcgctgaaccaggaactggccaacagcaaccgcctgaaggacgagttcctcgccaccgtcacccacgaactgcgcaccccgatgagcggggtgatcggttcgctggagctgatgcagacggtgccgatggacgtcgaactcgccgagtaccagcgcaccgccgccggttcggcgcgggacatgatgcggatggtcaacgacatcctcgccctcatcgaactgcaggccggcaagctctacccgcgccgcgagccgttcagcctgcgcggcctgttcgacagcctgcgcgcgcagtacgcgccgcgcgccgaggagaagggcctgcgcttcgccctgcaactggacgacagcctgccggataccctcgaaggtgatgccggcaagctggcccaggcgctgggctacctggtcgacaacgcgatcaagttcaccgccaggggcagcgtgaccctgcgcgtcgccgccgggcgtacccatgacggggtggcgctgcgggtggaagtgatcgacaccggcatcggtttcgacatggccgccggcagcgacctctaccagcgtttcgtccaggccgacagctcgttgacccgtggctacggaggcctcggcatcggcctggctctgtgccgcaagctggtggagctgcttggcggcgagctgacccacgagtcccggccgggacagggcagccgcttcctcctgcgcctgcaactgacccagccggcccagggcctggcgccgccgccgcggcgcgccggcgggcaggcggtgcggcgtcccgaggagtgcacggtgctggtggtggaggacaacgccatcaaccagttggtgactcgcggcatgctgctcaagctcggctaccgggtgcgcaccgccgacaacggcagcgaggccctggagttgctggcgcgcgagcggccggacggcgtactgctcgactgccagatgccggtgatggacggcttcgccacctgtcgggcgatccgcgcgctgcccggctgcgcggaactgccggtgctggcgttgaccgcccacagccacagcggcgatcgcgagcgctgcctggcggcgggcatgagcgactacatggccaagccggtcaagttcgaagagttgcagaccctgctgcacgattggctgctgtgccagccgatcgtcaccaagtccgcctga

SEQ ID NO: 321016 - DNA, 816 bp, Pseudomonas aeruginosa
gtggtaagctcacgcgccatgaaaacaccgacttcccgccccgtagtgctctgcctgtccggtcacgaccccagtggtggcgccggactgcaagccgacatcgaagccctgctcgcccagggctgccacgccgccccggcggtcaccgcgctgaccgtgcaggacaccgtcaacgtcagcgacttccgcgtcctcgaccgcgagtgggtgctggcccaggccaacgccgtactcgccgacctgcccgtcgcggcggtcaagttgggtatgctcggttcgctggagatggtcgacacggtggccgagatcctcgccgcccacccgcacttgccggtggtctgcgatccggtgctgcgcgccggcggcggcggtgcgctgggcaagggcgacgtcggcttcgccatgcgcgagcggctgctgccgcgcgccaccatcgccacgccgaacctgccagaagcgcgcctgctcgccgacctgcccgagggcagcgccgaccagtgcgccgagcgcctgctggaacactgcgagcacctgttgatcaccggcggacacggcgacgaaagcgaagtgcacaatcgcctgtacagccgcgacggcagccaccgcaccttcacctgccagcgcctgcccggcagctaccatggctccggctgcaccctggccagcgccctggccggtcgcatcgccctcggcgaagcgctgcacggcgccgtacagagcgccctcgactacacctggcggaccctgcgcgacgccgagagtccgggccacggccaatacgtgccgcgccgcctgcccaccgacttctgtcactga

SEQ ID NO: 321017 - DNA, 630 bp, Pseudomonas aeruginosa
atgaaactgcgcggcctgtacgccatcaccgatagccagctactggacgacggccgcctgctgccctacgtcgaagccgcgctacgcggcggcgcgcgcctgctgcaataccgcgacaaatccagcgaccaggcgcggcgcctgcgcgaggcggaaagcctgcgcgaactctgcgaacgccacggcgcgcagctgatcgtcaacgacgacgccgaactcgccgcgcgcctgggcgtcggcctgcacctcggccagaccgacggttcgctgtcggcggcgcgcgccctgctcggccgccaggcgatcatcggcgccacctgccacgcccaactggaactggccgagcaggcggtggccgagggcgccagctacgtcgccttcggccgcttcttcaattccagcaccaaacccggcgcccccgccgccagcgtcgaactgctcgaccaggcccggccgcgcctgcacctgccgatcaccgccatcggcggcatcagcctcgacaccgcgcccggcctgatcgcccgcggcgtcgatctggtcgccgtgatccatgcgctgttcgccgccgcgtccgccgccgaggtggaacgccgcgcccgcgccttcagcgccctgttcgaacctgcctga

SEQ ID NO: 321018 - DNA, 1284 bp, Pseudomonas aeruginosa
atgtcccgttccgaaacgctgttcaacaacgcccagaaacacattcccggcggggtcaactccccggtgcgcgccttcaagagcgtcggcggcaccccgctgttcttcaagcacgccgaaggcgcctatgtactggacgaggacgacaagcgctacgtggactatgtcggctcctggggcccgatgatcctcggccacagccatccggacgtgctcgacgcggtgcgccggcaactcgaccacggcctgtcctatggcgcgccgaccgcgctggaagtggaaatggccgacctggtctgctccatggtgccgtcgatggagatggtgcgcatggtcagctccggcaccgaggcgaccatgagcgccatccgcctggcccgcggctacaccgggcgcgacagcatcatcaagttcgaaggctgctaccacggtcactccgacagcctgctggtgaaagccggctccggcgccctgaccttcggcgtgccgaactccccgggcgttccggcggccttcgccaagcacaccctgaccctgccgttcaacgacatcgaggcggtgcgcaagaccctgggcgaagtcggcaaggaggtcgcctgcatcatcgtcgagccggttgccggcaacatgaactgcgtgccgccggcgccgggcttcctcgaaggcctgcgcgaagcctgcgacgaacacggcgtggtgctgatcttcgacgaagtgatgaccggcttccgtgtcgccctcggcggcgcccaggcctactacggggtcaccccggacctgtcgaccttcggcaagatcatcggcggcggcatgccggtgggcgccttcggcggcaagcgcgagatcatgcagcagatttccccgctgggcccggtctaccaggccggcacgctctcgggcaacccgctggcgatggccgccggcctgaccaccctgcgcctgatcagccgccccggtttccacgacgaactgaccgcctacaccacgcgcatgctcgacggcctgcaacagcgcgcggatgccgccggcatccccttcgtcaccacccaggcgggcggcatgttcggcctgtacttcagcggcgccgacgccatcgtcaccttcgaggacgtgatggccagcgacgtcgaacgcttcaagcgcttcttccacctgatgctcgacggtggcgtgtaccttgcgcctagcgccttcgaggccggcttcacctccatcgcccatggcgacaaggagctggaaatcacgctgaacgccgccgaaaaagccttcgccgcgctgaaatga

SEQ ID NO: 321019 - DNA, 549 bp, Pseudomonas aeruginosa
atgttccgtaccggccgcaccctcgccctgggttgcctgttgatcctccagccgctgctcgcgcaggcgggaggcaactcgttgctgattccagcgaccggccgctgcgcgctgaacaccgttcccgaagaattgcagcaggcgctcgccgcctgccagcaggtcgccaatggcggcgacgccgaggcgcaatacgaactgggcgaattcttctacgacggcgagcgcatcccgcgcgacctccaggccgccctcaactggttcgagaaagcctcgctacagggccatgcccaggcccagtaccacctcggcaccatgttcttccgtggcgaaggggttccggcgaacaacgtacaggcctacatcgtgctgaagatggcagcggtgaacggcgccgaggacgccctggacagcgccgacctggtagccgagcagatgaaccgcgacgaactggacatcgccacccgggtgctggggcagatcttccgcaactacctgatcgaactgcagactgccggcggcgtcacgcccttcgcgccgctgccctga

SEQ ID NO: 321020 - DNA, 333 bp, Pseudomonas aeruginosa
atgaacaagcgcgaaaaccccatctacaaggtgattttcctcaaccagggccaggtcttcgagatgtatgccaagcagatctaccagagcgatctgtggggcttcctggaaatcgaggagttcgtcttcggcgagcgcacccaggtggtggtggaccccagcgaggagaagctcaaggcgcagttcgaaggcgttctgcgcagcttcgtgccgatgcacgcgatcgtccgcatcgacgaggtcgagcgcctgggtacgccgaagatcagcgaggccaagggcgcaggcaacgtcatgccgttccccatgccgatgcccggcaagagcgactga

SEQ ID NO: 321021 - DNA, 1341 bp, Pseudomonas aeruginosa
atggccaagaagcttttcatcgaaacccacggctgccagatgaacgagtacgactcgtcgcgaatggcggacctgctcggtgaacaccaagccctcgaggtgaccgaaaacgccgccgaggccgacgtcatcctgctcaatacctgctcgatccgcgagaaggcccaggaaaaggtgttttccaagctcggcatgtggcgcgagctgaagcagcagaatcccgacctggtgatcggcgtcggcggctgcgtggccagccaggaaggcgccgcgatccgtgagcgcgcgccctatgtcgacgtggtcttcggcccgcagaccctgcaccgcctgccggaaatgatcgacgccgcgcgcagcacgcgcaagccgcaggtcgacgtgtccttcccggaaatcgagaaattcgaccgcctgccggaaccgcgggtcgatggccccaccgccttcgtctcggtgatggaaggctgcagcaagtactgcagcttctgcgtggtgccctacacccgcggcgaggaagtcagccgaccattcgacgacgtgatcgccgaagtgatccacctggccgagaacggcgtccgcgaagtcaccctgctgggacagaacgtcaacggcttccgcggcctgacccacgatggccgcctggccgacttcgccgaactgctgcgggtggtcgccgccgtcgacggtatcgagcgcatccgctataccacctcgcacccgctggaattctccgacgcgctgatccaggcccacgccgaggtgccggagctggtgaaattcatccacctgccggtgcagtcgggctccgaccgcgtgctggcggcgatgaagcgcaaccataccgtgctggaatacaagtcgcgtatccgcaagctgaaggccgcggtaccggacatctgcatcagctccgacttcatcgtcggtttccccggcgaaaccgagaaggacttcgagcagaccatgaagctggtggaggacgtcggcttcgatttctccttctccttcatctacagcgcgcggcccggcacgcccgccgccgacctcgccgacgacctgccggaagaagtgaagaaacagcgcctgcagatcctccagagccgcatccaccagcaaggctacgagatcagccggcgcatggtcggcagcacccagcggatcctggtcaccgacttctcgaagaaggacccgggcatgctccaggggcgcaccgagaacaaccggatcgtcaacttccgctgcgacaatccgcgcctgatcggccagttcgcccaggtgcacatcgacgacgcgctgccgcactcgctgcgcggcaccctgatcgacagcaccctgcattga

SEQ ID NO: 321022 - DNA, 1023 bp, Pseudomonas aeruginosa
ttgaacgccccccaggaacttcatcgctttatcctcgagccgttcgacgcccgcagcttcgcgacactttgcgggcagttcgacgagcatctccaccagatcgagaaacgcctcgacatcgagatccgcaaccgcggcaaccagttcgaactggccggcgaaccgcgccggaccaaggttgccgaacgcctgctgcagcgtctctaccgcgaggcgcagaacggcaccgatctcactcccgacaccgtgcacctgtacctgcaggagtccggcctggaagacctcgaggaattgcagagcgcgccgcaggtcaccctgaagtcgcgcaaggcgcacatccgcccgcgcggcgccaaccagcagcgctacgtcaaggcgatcctcgaccacgacatcaacttcggcatcggcccggccggcaccggcaagacctatctcgccgtggcctgcgccgtcgacgccctggagcgcgagcagatccgccgcatcctgctggtgcgcccggcggtcgaggccggcgagaagctcggtttccttcccggcgacctgtcgcagaagatcgacccctacctgcgcccgctctacgacgcgctctacgagatgctcggcttcgaacacgtggccaagctgatcgagcgcaacgtcatcgaggtcgcgccgctggcctacatgcgcgggcgcacgctgaacaacagcttcatcatcctcgacgagagccagaacaccacagtcgagcagatgaagatgttcctcacccggatcggcttcggctccaccgcggtgatcaccggcgacgtcacccaggtcgacctgccccgcggcacccgctccggcctcaagcacgtgatcgaggtcctgcaggacgtccccggcatcagcttcacccacttcaagcccaaggatgtggtccgccacccgctggtgcagcgtatcgtcgaagcctacgagcgtcacgagagccgccagcaaggccaggtgcggccggtcgagggaacgggcaagggcggtcacgatgccgcttga

SEQ ID NO: 321023 - DNA, 483 bp, Pseudomonas aeruginosa
atgccgcttgagctcgacctgcaggtcgccagcgccgccccggacctgccctccgaagcgcagttccgcgcctggtgcgaactggccctgcgccagcgtccggagtcggagctgaccatccgcctggtggacgaggccgaaggcctggaactgaacagcacctaccggcacaaggactacgcgaccaacgtgctgtccttccccgccgatgtcccggacgagcttctcgatatcccgctgctcggcgacctggtgatctgcgccccggtggtcgcccgcgaagccctggaacagcgcaagccgttgcaggcccactgggcccacctggtgatccacggctgcctgcacctgctcggctacgaccacatcgacgacgccgaagcggaagaaatggaaacactggaacgtgaattgctggcggaactgggtcatcccgatccgtacgcctgcgacgacgaagagccaccgagcaaggaaaaatga

SEQ ID NO: 321024 - DNA, 840 bp, Pseudomonas aeruginosa
atgagcgaagaccgatcgagcaacgggcacaagtcctggctggacaagatcacccaggcttttgcccacgagccgagaaaccgccaggagctactcgagctgctgcgcgatgcccacgacaacaagctgctggacagcgaggcgctgtccatcgtcgagggggcgatccaggtcgccgacctgcaggtgcgcgacatcatggtgccgcgctcgcagatgatgagcatccgctcgacccagacgccgaaggaattccttccggccatcatcgaagccgcccactcgcgctacccggtggtcggcgaaagcctcgacgacgtcatgggcgtactgctggccaaggacctcctgccactgatcctgcacaacgacgagcgtcccttcgacatcaaggaactgctgcgtccggctaccttcgtccccgaatccaagcgcctcaacgtgctgctccgcgaattccgcgccaaccgcaaccacatggccatcgtcatcgacgaatacggcggcgtggccggcctggtgaccatcgaggacgtgctggaacagatcgtcggtgatatcgaggacgagcacgacgtcgaggaggacagctacatcaagccactgcccagcggcgatttcatcgtcaaggcgctgccccccgtggacgccttcaacgacttcttcggctcggaattctccgacgaggaattcgataccgtgggcggcctggtgatgagcgccttcggccacctgcccaagcgcaacgaagtggtcgagctgggcgagttccgtttccgcgtactcaacgccgacagccgccgcgtccatctgctgcgcctgtctcccctgcagaactga

SEQ ID NO: 321025 - DNA, 1536 bp, Pseudomonas aeruginosa
atgcgttggatttctcgtcccggctggcccggacacctgctggcactcgccgcaggcgcgctcacacccctggccctggcgcccttcgactactggccgctggcgatcctctcgatcgccctgctctatctcggcttgcgcggccttcccggcaagtccgccctgtggcgcggctggtggtacggtttcggcgcgttcggcgccggcaccagctggatctacgtcagtatccatgactacggcgccgcctcggtgccgctggcaagcctcctcatgctcggcttcaccgccggcgtcgccttcttcttcgccctgccggcctggctgtgggcgcgctgcctgcgccgcgacaacgcgccgctgggcgacgccctggcgttcgccgccctgtggctggcactggagctgttccgcagttggttccttaccggtttcccctggctctacgccggctatagccagttgcagggaccgctggccgggctggtaccggtgggcggcgtatggctgtcctccttcgtcatcgccctcagcgcggccctgctggtgaacctgccgcgcctcttcccgcacggtgccagcctgcttctggggctggtcctgctgctcggcccgtgggcggccggcctctatctcaagggccacgcctggacccattcggccggcgaaccgctgagggtagtggcgatccagggcaacatcgcccaggagctgaaatgggacccgaatcaggtccgcgcgcaactcgacctctaccgcgacctgagcctgccgcagcaggacgtcgacctgatcgtctggccggaaaccgcggtgccgattctccaggacatggccagcggctacctcggcgccatgggccaggtcgccgacgagaagaacgccgcgctgatcaccggggtcccggtgcgtgaacgtctcgccgacggcaagagtcgctacttcaacggcatcaccgtggtcggcgaaggcgcgggcacctacctcaagcagaagctggtgccgttcggcgagtacgtgccgctgcaggacctgctgcgcggcctgatcgccttcttcgacctgccgatgtccgacttcgctcgcggtccggccgaccagccgttgctcaaggccaagggctaccagatcgccccgtacatctgctacgaagtggtctacccggagttcgccgccgcgctcgcggcgcagagccaggtgttgctgacagtgagcaacgacacctggttcggcacttccataggccctttgcagcacctgcagatggcacagatgcgcgccctggaaagcggtcgctggatgatccgcgcgaccaacaacggcgtcaccggcctgatcgatccctatggccggatcgtccggcagatcccgcagttccagcagggcatcctgcgcggcgaggtgattcccatgcagggcctgacgccctatctgcaataccgcgtctggccgctggccgggttggccggcgtgctgctgctatgggctctgctcggccgccagttgcgtccgcaggagcgacgcctgttcggctga

SEQ ID NO: 321026 - DNA, 762 bp, Pseudomonas aeruginosa
atgccgatccgttatttcttcaagcaacttctgctgccgccgggcggcctgttgctgctgctgtttttcgctttctggtggcgcaccagccgaccgaggctggcgcggctgtgcggtgtctgcgggttcttcggtctgtggctgatgagcatgccgctcagcgtggagtggatggggcgctggctcgaaagcgaaccggccctgctggcggaggatctgccgggcctggcgcagcgcgccgacgccatcgtcatcctcggtgccggccggcagaccaacgacccggcctggggcgacgatgcgccgagcctgctggcggccgagcggctgcgctatgccgcgcggctggccaagacctcggcgctgccggtactgatcagcggcgggttgcattacggacgcccgcccagcgaggcggcgctgatggccaatgccctgttgcaggacttcggcgtgccgacgcgctggcaggaaggtctcagccgtaccacctgggaaaacgccaccctgagcgccccgcagttgcgcgaggccggcgtgcgccgggtggtgctggtgacccaggcctggcacatgcagcgggcacgctggagcttcgagcgccaggggttcgaggtgatcccggcgccggtcggcttcctcggcggggccaacctgcggcccttcggcggctggctgccggaagcgcaggccttctggcagagcggcatgctgctgaacgaggcgatcggcctggtcggctatcgcctgttctaccgctga

SEQ ID NO: 321027 - DNA, 432 bp, Pseudomonas aeruginosa
atggctgagctgcaacgcgcgagtgtgacgggaggtgggctgtacgagaggctgctgcagcgtctcgccctggctctggatgaagcggatacggccgagcgcctgcgtgacgagcatcccacggagcttgagttgcgtggtttgagcgaagcggagatggggctgatacgcgcctatctcgaccaggacctgcactggttgcgcggctggcatgcggccgccgaggagctggcgctgctcgagcgccagcccggcaggacaccccggccgccccggccgcaaccgccggcgccccgtcgccacgtctcgttgaaacagcggcaactgctctgtgcgctctgcggtgcgccggtgcagtggagcaaggggcatggcgtgttgccgtgcggccattgcggctcgcaactgttccgttcgggcaacggccgctag

SEQ ID NO: 321028 - DNA, 2622 bp, Pseudomonas aeruginosa
atgcacgagcaatatcagccactcgagatcgaaacccaggcccagaactactggaaagaacaccagtccttcctcgtcagggagctacccgacaaggagaaattctactgcctgtcgatgttcccgtatccgagcggcaagctgcacatgggccacgtgcgcaactacaccatcggcgacgtgatcagccgctaccaccgcatgcagggccgcaacgtgctgcagccgatgggctgggacgcgttcggcatgccggcggaaaacgccgcgatgaagaacaacgtcgccccggcggcctggacctacgacaacatcgcctacatgaagtcgcagctggacagcctcggcctggcgatcgactggagccgcgaggtcaccacctgcaagccggactactaccgctgggagcagtggctgttcacccgcctgttcgaaaaaggggtgatctaccgcaagaacggcacggtcaattgggatccggtcgaccagaccgtactcgccaacgagcaggtgatcgacgggcgcggctggcgctccggcgcgctgatcgagaagcgcgagatcccgatgtactacttcaagatcaccgcctacgccgaggaactgctggagagcctcgacaacctgcccggctggccggagcaggtgaagaccatgcagcgcaactggatcggcaagtcgcgcgggatggagatcggcttcccctacgaccaggcctccatcggccacgccggccaactgaaggtgttcaccacccgtccggacaccctgatgggcgccacctacgtcgccgtcgccgccgaacacccgctggccacccaggcagcgcagaacgacccgcagttgcaggcgttcatcgacgaatgcaagcgcggcggcgtcgccgaggccgacatcgccacccaggagaagaaaggcatggccacttccctgttcgtcgaacacccgctgaccggcgacaagctaccggtatgggtcgccaactacgtgctgatgaactacggcgaaggcgcggtgatggcggtgcccggccatgacgagcgcgacttcgagttcgccaacaagtacggcctgccgatccgccaggtgatcgccaaggtcgagggcgacaacgacttcgagtccagcgtctggaaggagtggtacggcgccaaggacgagtccgtgctcaccgtcaactccggcaagtacgacaacctcggctaccaggccgccttcgacgccatcggcgccgacctcgaggccaagggcctgggccaggcgcgcacccagttccgcctgcgcgactggggcatcagccgccagcgctactggggctgcccgatcccgatcatccactgcgaggcttgcggcgacgtcccggtgccggccgaccagttgccggtggtgctgccggaagacgtggtaccggacggctccggttcgccgctggcgaagatgccggaattctacgaatgcaactgcccgaaatgcggccagccggccaagcgcgaaaccgacaccatggacaccttcgtcgagtcgtcctggtatttcgcccgctacgcctgcccgcagttcgaaggcggcatgctggacaggaaggcggccgactactggctgccggtcgaccagtacatcggcggcatcgagcacgccatcctgcacctgctctatgcgcgcttcttccacaagctgatgcgcgacgaaggcctggtcggcagcgacgaaccgttcaagaacctgctgacccagggcatggtggtcgccgatacctactaccggaccaccgccaacggcggcaaggactggttcaacccggccgacgtcgaggtcgagcgtgacgccaaggccaaggtcgtcggcgcgcgcctgaagagcgacggccagccggtcgagatcggcggcaccgagaagatgtcgaagtcgaagaacaacggcgtcgacccgcaatcgatgatcgaccagtacggtgccgatacctgccgcctgttcatgatgttcgcctcgccgccggacatgagcctggagtggtcggacgccggcgtcgagggcgccaaccgcttcctccgccgcgtctggcgcctggctcacgcccacgtcagcgccggcctccccggcgcgctggacgtcgccgccctgagcgacgcgcagaagcaggtccgccgcgccatccacctggcgatcaggcaggccagccaggatgtcggccagcaccacaagttcaacaccgccatcgccgcggtgatgaccctgatgaacgtgctggagaaggcgccgaaccaggacgcccaggaccgcgccctgatccaggaaggcctggaaaccgtggtcctgctgctggcgcccatcactccgcacatctgccacgtgctctggggccagctcggccatgccgaagcggtgatcgatgcgcgctggccgagcgtcgacgagagcgcactggtgcaggacaccctgcaactggtggtgcaggtcaacggcaagctgcgcggacacatcgacgtggccgccagcgccagccgcgaggatgtcgaggccgccgcgcgcgccaacgagaacgtgctgcgtttcaccgaaggcctgagcatccgcaaggtcatcgtggtaccgggcaaactggtcaacatcgtcgccaactga

SEQ ID NO: 321029 - DNA, 624 bp, Pseudomonas aeruginosa
atgaaacgtatcctgaccagcgccgcgctgatcggtatgaccaccctgctggccgcctgcggcttccaactgcgcggcctgggcgatgcgcaattcgcgctcaaggaaatcgacgtgtccgcgcgcaacgcctacggcccgaccgtgcgcgaactgaaggaaaccctggaaaacagcggcgtgaaggtcaccagcaacgcgccctaccacctggtgctggtccgcgaggacaaccagcagcgcaccgtcagctacaccggttccgcgcgcggcgcggagttcgagctgaccaacacgatcaactacgagatcgtcggcgccaacgacctggtcctgatgagcaaccaggtacaggtgcagaaggtctacgtgcacgacgaaaacaacctgatcggttccgaccaggaagccgcgcagctgcgcagcgagatgcggcgcgacctgatccagcagttgtccatgcgcctccaggcgctgaccccggcgcaactcgacgaagcccagcgccaggcagaagccaaggccaaggcggaagccgaagccctgcgcgccgccgacgaggcggagcgccagcgccgcgccgccgagccgcagcagtcgccgatcgagttccccaccccgtga

SEQ ID NO: 321030 - DNA, 1038 bp, Pseudomonas aeruginosa
atgaagctgactcccgcgcaactcgccaagcacctccagggccccctggcgcccgtctatgtcgtcagcggcgatgaaccgctgctctgccaggaagcctgcgatgccattcgccaggcctgccgcgagcgcgacttcggcgagcgccaggtattcaatgccgaagccaacttcgattggggcttgctgctggaggccggcgccagcctgtcgctgttcgccgagaagcgcctgatcgaactgcgcctgccctccggcaagcccggcgacaaaggcgcggcgattctccaggaatacctgcaacggccgccggaagacaccgtgctcctgctcagtctgcccaagctcgatggcagcacgcagaagaccaagtgggccaaggccctgatcgatggcaacgccgcgcagttcatccaggtctggccggtcgacgtccaccagttgccgcagtggattcgccagcgcctgtcccaggccggcctgtccgccagccccgaagccctggagctgatcgccgcgcgcgtggaaggcaacctgcttgccgccgcccaggaaatcgaaaagctcaagctgctcgccgagggcaaccagatcgacgccgccaccgtacaggccgcggtcgccgacagcgcacgcttcgatgtcttcggcctgatcgacgctgcccttggcggtgaagcggcccacgccctgcgcatcctggaaggactgcgcggcgaaggcatcgagccgccggtgatcctctggggcctggcccgcgagatccgcctgctggctggcctgtcccagcaatacggccagggcatcccgctggagaaagccttcgcccaggcgcgtccgccggtctgggacaagcgccgtccgctgctgacccgtgccctgcaacgccactccagcagccgctggaaccagatgctgagggatgcccagttgatcgacgcgcagatcaagggacaggcacccggcagcccctggagcggtctctcgcttctcgccctgagcctcgccggccagcgcctcggcctgccggcagcctga

SEQ ID NO: 321031 - DNA, 153 bp, Pseudomonas aeruginosa
atggcaaagaaaagcaagcggccgaacaaggccaaatccctggtcgcccagccactgttccgcagccgccaggaacaggcgaagaaaggcaaaggcagctaccgccgcgaagcctcccgtaactgggaggcttctttcgttatggcggcctga

SEQ ID NO: 321032 - DNA, 228 bp, Pseudomonas aeruginosa
gtggatatcgttcgccatatgttcggtcactgtcgggcggccaatggtttcgtccgtaccgctccgccgcctgtcgaagcctcgcggcgcacccgagtcgggatcggcgacgggtcgcgcggcatgctcgaggccttcgacttcttcttcctggccttcgttctgcgcgacatggctacccgcttcggcgtcggcatcgaacgcccgagcctggttcgtgcgctgtaa

SEQ ID NO: 321033 - DNA, 1347 bp, Pseudomonas aeruginosa
atgcgtaaccccgaacgatccgccctgctgaaggtgagcgggctgctgggcagcaccgtcgtcgccatggggcttggcctctccagcgcgtgcgcgcagaagaatccgacagtcgaatacaaccagcctgccgctccccagcagaccaaggctcccttctccggcgccggcccggccgcctcggtgcccgctggcgcgccgaacgaggcccagcctgggcaaagcttcgaacagtggcgcgacgccttccgtcaacaggcgctggccggtggaatcgatgcgcagaccttcgatcgcgccttcgccagcgtccagcccgatcccgccgtggtcgaagcagaccgcagccagccggaattcacccgaccggtatggaagtacctggaaggcgccctcgatccgctgcgcgttcgccagggccaggcgcgcctggcgcagcatgcgcgcatcctcggcgaagtcgacgcgcgctatgcggtggatgcggatgcggtggtggcgatctggggcatggagagcaactacggttcgcacatgggcaacaagaacgtgatccgctccctggcgaccctcgcctatgaaggacgccgcccggaattcgcccacgcccagttgctcgccgccctgaagattctccagcacggcgacgttccggcctccttcatgatcggctcctgggccggcgccatgggccagacccagttcatcccgaccacctacaaccagtatgccgtggacttcgacggcgacggcaagcgtgacatctggggctcgcccggcgacgccctggcctccaccgccaactacctgaaagcctccggctggatcgccggacaaccctggggtttcgaagtccgcctgccggcaggcttcgactattccctggcggaactcaccatccgcaagcccctgggcgaatggcaagggatgggcgtacaaggcgtcaacggcggccccctgccctccggactctccggcgaacaggcctcgctgctgctgccggccgggcaccgcggcccggccttcctggtgctgcacaacttccgcgccatcctcaagtacaacaactccagcgcctacgccctggccgtcggcctgctcgccgacagcttcaagggcggcggccggatagtcggcgcctggccgctggaggatgttccgctgagccgctcgcagcgcatcgagctgcaacggcaactggccgcccgcggacacgatccgggcgcggtggatggcatcatcggcgccaatacgcgcaaggcgatccgcgcctgccagcaggagttcggctggccggcggacggctatccgaccccggcgctgctcgaccgcctgcggacgccatag

SEQ ID NO: 321034 - DNA, 891 bp, Pseudomonas aeruginosa
atgagccgctatgccttcgtttccaccgatgtcctggatatcgcctacctggagtggagtccgcagggggcgcgcagcgccgtcttgttgcacggttggccggacagcccgcatacctggaaagacctggcggagtccctggcggacgccggctatcgggtgctggcaccagccctccggggattcgccccgacccgcttccgcgatgcgtctactccgcgcagcgggcaactggcggctctggcttgcgatctgctggcattcgtcgacagcctggcattgcaacgtcccctgctggtcggccatgactggggggctcgcgcggtggccagtgcctgcggactgcgcgagggcgtagcctcgcacctggtgatgctctcggtggggtacgccagcaacgatccgcagcaagttctttccctgccgcaggcccgtagcttctggtaccagtggttcatggctacgccacgcggagagcgcgcgctgcgcgaggagggcgaggcgttcgcccggcagatgtgggacacctggtcgccgccgggatggtatgccgagcgcgatttccaggaggccgcccaggccttctccgggccggactgggtggccgtggtgctgcactattaccggcatcgctggggcttcgtcgcggggaagccgcgctacggggcggcggaacagcgcttgctcccggcaccgcgcctggcgctgccgaccctggtgctgcacggcggcgcggatgcctgcacccaccccgacggctcccgcggacgcgagcactacttcagcgggcgttaccagcggctggtgctggagggcgtcggccattttccgcagcgcgaggcggccgcccaggtgacggacgctatcctgcggttctgcgcggatgactag

SEQ ID NO: 321035 - DNA, 894 bp, Pseudomonas aeruginosa
atggagcttgccgtccccacctcccaatccctggatatcgtgttgttgcgtacctttctcgaagtggtcgacagcggcggtttcgccctcgccgcggacaatctcgcgctcaccccctccgcagtcagcgggcatatcaagcgcctggaacagacagccggcgtcagcctgctcagccgcaccactcgccgcctggagctgacccaggcgggcgagacgctctacgcctatgcccgcaacatcgtcgagctggagcgcgaggcccgcgccaggctgcacggcacgccgatccgcgaccgcctgcgcatcggcgcttcggaggacttcgccagcgcctggctgccacgcgtcctgcaacgctttcgccgctggcaccccgaagcatccatcgaactcaaggtcggtatcaccaccgacctgctccgccagcaggcccaggggcgcaccgacgtggtgttcggcaagcagtgccggcgggtaggagacgacggcgaactgctctgggaggaaccgctggtctgggccgcggcgaccgcgatcgagctgcccgcgggcgaaccgctgccgctggcgctgttccccgaaccctgcgtctaccgcgaagcggcgattacagccctcggcgccgctgcgcgaccctggcgcctggtgttcgagagcgccagcatggccggctgcctgtccgccgcgctggccggtttcgccgtgacggtggtggcgcgcagccagatgcgcgaggggctgcgcgaactgggcccggaacagggttttccgacgctgccggaggcgcgtttctacgccttctcgcgccaacccagcctggcggccgatgccctgatcgaggcggtgcggcagctcggccagcgcagtcgcttcgttaccgcacagggatga

SEQ ID NO: 321036 - DNA, 984 bp, Pseudomonas aeruginosa
atgagcactgttgtggagaagtccggagaagccaagccgggcaaggtggaagtcggcgtgaagctgcgcggcgcggaaaaggtcgcgcggattccggtgaagatcattcccaccgaggaactgccgaagaaacccgactggatccgcgtgcgcatcccggtttcccccgaggtcgaccgcatcaagcaactgctgcgcaagcacaagctgcacagcgtctgcgaagaggcgtcctgcccgaacctgggcgagtgcttctccggcggcaccgcgaccttcatgatcatgggcgatatctgcacccgacgctgcccgttctgcgacgtcggtcatggccggccgaagccgctggacgtcgacgagccgaccaacctggccatcgccatcgccgacctgcggctgaagtacgtggtgatcacctcggtggaccgcgacgacctgcgcgacggcggcgcccagcacttcgccgactgcctgcgcgagatccgcaagctctcgccggggatccagctggaaaccctggtgcccgactatcgcggtcgcatggacatcgccctggagatcaccgccaacgagccgccggacgtgttcaaccataacctggagacggtaccgcgcctgtaccgctcctcgcggccgggctcggacttcgagtggtcgctggacctgctgcagaagttcaagcagatggttccgcacgtaccgaccaagtccgggctgatgctcggcctgggcgagaccgacgatgaggtcatcgaggtcatgcagcggatgcgcgagcacgacatcgacatgctgaccctcggccagtacctgcagccgtcgcgcaaccacctgccggtgcagcgcttcgtgcatccggacaccttcgcctggttcgccgaggaaggcgagaagatgggcttcaagaacgtcgcgtccggccctctggtgcgttcgtcctaccatgccgaccagcaggcgcacggcaacaagatcggctga

SEQ ID NO: 321037 - DNA, 654 bp, Pseudomonas aeruginosa
atgggactcgagctgggcttccgtgagctcggcgaggttccctacgaaccgacctggcatgccatgcagcgcttcgttgccgaacgcgacaaatcggtaatggacgaagcctggctgttgcagcaccctgcggtcttcacccaggggcaggccggcaaggcggagcatgtgctgttccccggcgacatcccggtgatccaggtagatcgcggcggccaggtgacctaccacggccccggccagttggtcacctacctgctgctcgatgtccgccgcctgggactgggcgtgcgcgagctggtcagccggatcgagcagagcctgatcggcctgctggcgtcctatgacgtgcaggccgtggccaagccggacgcgccgggtgtctacgtcgacgaggcgaagatcgcctccctcggcctgcgcatccgcaacggctgttccttccatggcctggcgctgaacctggacatggacctgcgaccgttccaacgaatcaatccctgcggctacgccgggatgcccatgacccaactgcgcgacctggttgggccggtggattttgccgaggtgtgtacccgattgcgcgctgagctcgtctcacgccttggctacgctgaacagaagacccttacgggcgggatcgaactgacatga

SEQ ID NO: 321038 - DNA, 282 bp, Pseudomonas aeruginosa
atgaccgatacccctgacgttcaacccccgaaaatcgaattcccctgcgagcgttatccgatcaaggtgatcggcgacgccggcgaaggtttctccgacctggtcgtggaaatcatccagcgccacgcgccggatctcgacgtcgagaccctggtggtccgtgacagcagcaaggggcgattcctctcggtgcaggtgctgatcaccgccaccgatgtcgaccaactgcaagccatccataacgacctgcgcgcgaccggacgcgtgcacatggtgctctga

SEQ ID NO: 321039 - DNA, 1161 bp, Pseudomonas aeruginosa
atgaacatcaccactatcgcgaaacgcttgtcactgcttgtcctgttcatcgcccctacggctggctgggctgctgaatccatggttccggcgccgccgcaactggccgccaagtcgtacgtcctgatggacggcgagagcggccaggttctggtcgagaacaacggcgaccagcgcctgccgccggccagcctgaccaaactgatgaccgcctacatcgccaccaaggagatcgaggccggccgcatcggcgagaacgacctggtcaccgtcagcgaacatgcctggcgcaccggcggttcgcggatgttcatcaaggtcggcagccaggtatcggtgagcgacctgctgcatggcatcatcatccagtccggcaacgacgccagcgtcgccctggccgagcatatcgccggcagcgaagacgccttcgccgacatgatgaacaccaccgcgcagaagctgggcctgaccaactcccacttcatggacgccaccggcctgcccaacccggaccactattcctccgcccgcgacatggcggtactggcccgcgcgatcatctacggcgagccgagccactacgcgatctacgcgcagaaggaattcctctggaacaacatcaagcagccgaaccgcaacctgctgctgtggcgcgacaagaccgtcgacggcctgaagaccggccacaccgacgaagccggctactgcctggtggcttccgcggtacgcgacggccagcgcatgatcgcggtggtgttcggcaccaacagcgagcaggcccgcgccgccgagacccagaagctgctgacctatggcttccgcttcttcgaaagccgcaacttctacaagaagggcaccgagctgaccaagggcctggtctggaagggttccgagcatgaagtgaaagctggcctcgccgaagatctgaccatgaccctgccgcgcggccagatgcagaagctgcaggccagcatggtcctggagccgcaactgatggcgccgatccagcagggccaggtgatcggcaaggtggaagtgaagctggacgacaaggtcatccgcagcgccgacctggtcgccctcaacgccgtcgaggagggtggtttcttccgccgcctgtgggatagcatccgcctgttcttctacggtttgttcaactga

SEQ ID NO: 321040 - DNA, 1029 bp, Pseudomonas aeruginosa
ttgagcaagcgtgtccgctcctccctgatcctgcccgccgtctgcggcctcgggctggcggccgtgctgttgagcagttgctccagcaaggcgccccagcagccggccaggcaggcgggcatttccgggccgggcgactattcccgtccgcatcgcgacggcgccccctggtgggacgtcgacgtgtcgcggatccccgatgcggtgccgatgccgcacaacggttcggtgaaggccaacccctacaccgtgctgggcaagacctactacccgatgaacgatgcgcgggcctaccggatggtcggcaccgcgtcctggtacggcaccaagttccacggccaggccaccgccaacggcgagacctacgacctctacggcatgaccgccgcgcacaagaccctgccgttgccgagctatgtgcgggtgaccaacctggacaacggcaagagcgtgatcgtccgcgtcaacgaccgcggcccgttctattccgaccgggtcatcgacctgtccttcgccgcggcgaagaagctcggctatgccgagaccggcaccgcgcgggtcaaggtcgaaggcatcgacccggtgcagtggtgggcccagcgcggccggccggcaccgatggtcctggcgcagcccaagcaggcggtggcccaggccgctcccgccgcggcgcagacgcaggcggtggcgatggcccagccgatcgagacctacaccccgccgccggcgcagcacgcggccgccgtgctgccggtgcagatcgactcaaaaaaaaacgcttcattaccagccgatggcctgtatctccaggtgggcgccttcgccaacccggatgcggcggagctgctgaaggccaagctgagcggcgtgacggctgcgccggtgtttatcagctcggtcgtgcgcaaccagcagattctgcaccgggtgcggctgggaccgatcggttcggcggacgaggttagccgcacccaggacagcatccgcgtggccaaccttggccagccgacgctggtacgccccgactga

SEQ ID NO: 321041 - DNA, 1011 bp, Pseudomonas aeruginosa
atgcaagtactgcgtacatgggcggccaggggcgtccaatgggtcggcgtagccggcgtcattggcctgtccggggcggcccaggcgggggactacgacggctcgccgcaagtggccgagttcgtcagcgaaatgacccgcgactacggcttcgccggagagcagctgatggggctgttccgcgacgtgaaccgcaagcagtcgatcctcgatgcgatctcgcgcccggccgagcgggtcaagcagtggaaggaataccggccgatcttcatcagcgacgcgcgcatcagtcgtggcgtcgacttctggaacaagcatgccgaagacctggcgcgggcggagaaggaatacggcgtgccggccgagatcatcgtctcgatcatcggcgtggaaaccttcttcggccgcaacaccggcagttaccgggtgatggacgcgctgtccaccctcggcttcgactacccgccgcgagccgacttcttccgcaaggagttgcgcgagttcctcctgctcgcccgcgaacagcaggtcgacccgctcagcctgaccggctcctacgccggcgccatgggcctgccgcaattcatgccgagcagcttccgcgcctacgcggtggacttcgacggcgatggccacatcaatatctggagcgacccgaccgacgccatcggtagcgtcgccagctacttcaagcagcacggctgggtcaccggcgagccggtggtctcggtggccgagatcaacgacgagagcgccgagagcgcggtgaccaggggcgtcgacccgaccatgagcctgggcgagctgcgtgcccgcggctggcgcacccacgatgcgctgcgcgacgaccagaaggtcacggcgatgcgtttcgtcggcgacaagggcatcgagtattgggtcggtttgccgaacttctacgtgatcacccgctataatcgcagcgccatgtatgccatggcggtttatcagctggcgggcgagattgcccgcgcgcgaggtgcccattga

SEQ ID NO: 321042 - DNA, 1146 bp, Pseudomonas aeruginosa
ttgaacagtaacttcgaccgcaccctgtccaacgaagacgtgatgcgccggcgcgccagcctgctgcagcgcctgcacatcgacgggattctcctgctgctgttgctgatcctcggcgccaccggcctgttcgtcctctattcggcgagcggcaagagctgggacatgctgatgaagcaggccacctcgttcggcctgggactgggcatgatggtggtcatcgcccagatcgagccgcgcttcatggcccgctgggtgccgctgggctacctggtgggggtcgcgctgctggtggtggtcgacgtgatcggccacgacgccaagggggcgacgcgctggatcaacatccccggggtgatccgcttccagccctcggagttcatgaagctgctgatgccgatgacggtggcctggtacctgtccaagcgcaacctgccgccggggctcaagcacatggtgatcagcctggcgatcatcatcaccccgttcgtgctgatcctgaaacaacccgacctcggcaccgccatgctgatcctcgcttccggcggcttcgtgctgttcgtcggcggcctgcgctggcgctggatcgtcggcgcggtgtcggcggcggtgccgatcgccgtggcgatgtggttcttcatcatgcacgactaccagaaacagcgggtgctgaccttcctcgacccggaaagcgacccgctgggcaccggctggaacatcatccagtctaaggcggccatcggttccggcggggtattcggcaagggctggctgctgggcacccagtcgcacctggattttttgccggaaagccacaccgactttatcattgcggtcctcggcgaggagttcggcctggtcggcgtctgcctgctgctggtgctctacctgctgctgatcagtcgtggcctggtgatcaccgcccaggcgcagacgctctacggcaaactgctggccggtggcatcaccatgacgtttttcgtttatgtcttcgtgaatatcggtatggtgagcgggttgttgccggtggtgggggtaccactgcctttcattagttatggcggaacttcgctggttaccctgttgtcagggttcggggttctgatgtcgatccatacccatcggaagtggatcgcccaggtttga

SEQ ID NO: 321043 - DNA, 1941 bp, Pseudomonas aeruginosa
atgccgcagccgatccacctgaaagaccacgagaaagacgcccgcctggtgcgtcggcgcgtcatcgtcggggcggtggcggtggtcttgctgaccctggtgctggtggcgcgcatgtaccacctgcaggtgacccagtacgagtaccattcgacgctgtcggagaacaaccgggtccatgtgcagccgatcccgccgacccgcgggatcatcttcgaccgcaacggcgtgatcatcgccgacaaccggccgagcttcagcctgaccatcacccgcgaacgcaccgaggacctgcagaagaccctcgacacgctggtggagatcctcggcctgaccgaggacgaccgggccatcttcgagaagcgcatgaagcaggggcggcgtccgttcgagccggttcccatcatgttcgaactcaacgaggaacagatcgcccgcatcgcggtgaaccagttccgcttgccgggcgtcgacgtggcgacccagttcgtccgccactacccgctgaaggagcactttgcccattcggtcgggtacgtcgggcggatcaacgagcaggaactgaagaacctcgacccgatcaactacagcggcacccaccatatcggcaagaccggcatcgagcgcttctacgagagcgagttgcacggcacggttggctacgaggaagtcgagaccaacgcccgcgggcgggtgctgcgggtgctcaagcgcaccgacccgattcccggcaaggacatcgtcctgagcatcgacagccgcctgcaggaggccgccgagaacgccctggccgggcggcggggcgccatcgtggcgatccagccgtccaccggcgacgtgctggcgatggtcagccagccgagctacgaccccaacctgttcgtcaccggcatcagcttcaaggcctatgccgagctgcgtgactccatcgaccggccgctgtacaaccgcgtcctgcgcgggctctatccgccgggctcgacggtgaagccggcggtggcgctggccggcctcgacgccggggtggtcacgccgacctcgcgggtcttcgaccccggctactaccagttgcccaactacgaccacaagtaccgtaactggaaccgctacggcgatggctgggtgagcctggagtcggcgatctaccggtccaacgacacctatttctacgacctcgcgcacaagctggggatcgaccgcctgcacgccttcatgagccgcttcggcttcggccagaaagtcgccctggacatgttcggcgaagccgacgggctgatgccctcgcgcgaatggaagcgcaagacccgccgccaggtctggtacccgggcgagaccctgatcctcggcatcggccagggctacatgcaggcgacgccgatccaactggcgcagatgaccgcgctgctggccaacaagggccactggatccgcccgcacctggccaagaccatcgacggccagccgccggtcgaccccgacccgatgcccgacatcgtgctgcgcgacccggccaactgggaccgcgtcgactacggcatgcagcaggtggtgcatggcgcccgcggcacggcgcgcaaggtcggcgccacttcggcctacctgatcgccggcaagagcggtaccgcccaggtggtggcgatcaagcagaacgagcgctacgaccgctccaagctgctcgagcggcaccgcgaccacgccctgttcgtcggcttcgcgccggccaacaacccgcagatcgcggtggcggtgatggtggagaacggcgagtccggctccggcgtcgccgccccggtggtcaagcaggtgatggacgcctggctgctcgacgagcacggcaagctcaaggccgaatacgcggaacccgtcgcgccgctcgcggcggcggtggccaagcccgaacccacggcagccgagccggaggcgcccgcccttgaacagtaa

SEQ ID NO: 321044 - DNA, 468 bp, Pseudomonas aeruginosa
atgcggttgcgcctgatcgcggttggctcgcgcatgcctcgctgggtcgaggaaggctggcaggaatacgtcaagcgcctgccggccgagctgtccctcgaactggtggagatcccgctcaacacccgcggcaagaacgccgacgtggcgcgcctgatccgtcaggaaggcgaggccatgctggcgcgcgtgcagccgggggaacgggtggtgaccctggaggtcgaaggtcggccctggagcaccgagcaactggctcgcgaactggatcgctggcgtctcgacgcacgcaccgtgaatctcatggtcggcggcccggaagggctggcgccggaggtctgcgcgcgcagcgagcagcgctggtcgctgtcgccgttgacgctgccgcacccgttggtgcggatcctggtcggcgagcagatctaccgggcctggaccgtattgtccgggcacccctaccacaaatag

SEQ ID NO: 321045 - DNA, 357 bp, Pseudomonas aeruginosa
atgcaaaccgaacaactcgtccaagtggccatcgatgccctggaagacctcaaggcccaggacatcgtgaccctcgatgtgcgggacaagaccagcgtcaccgactacatggtgatcgcctgcggcagttccagccgccaggtcaagtcgctggccgacaacgtcctgaccaaggccaaggaaaacggcgtcaagcccctgggcagcgaaggcctggagtccggcgaatgggcgctgctcgacctgggcgacgtggtggtccacgtgatgctcccggcgacccgccagttctacgacctggagcgcctgtggcagggcgccgagcagagccgcgcccagcaccagccggaagagtga

SEQ ID NO: 321046 - DNA, 645 bp, Pseudomonas aeruginosa
atgggcaaacgtatcggcctgttcggcggcactttcgaccccgtgcatatcggacatatgcgcagcgccgtggaaatggccgagcagttcgccctcgacgaactgcgcctgctgcccaatgcgcggccgccgcaccgggaaaccccgcaggtgtcggccgcgcagcggttggcgatggtcgagcgggcggtggcgggagtcgagcgattgacggtcgatccccgcgaactgcagcgcgacaagccgtcctacaccatcgacaccctggagtcggtgcgggcggagctggcggccgacgaccagttgttcatgctgatcggctgggatgccttctgtggcttgccgacgtggcaccgctgggaggcgttgctggatcactgccacatcgtcgtgttgcagcgtccggatgccgacagcgagccgccggagtcgctgcgcgacctgctggcggcgcggagcgtggccgacccgcaggccctgaaagggccgggcggacagatcaccttcgtctggcagacgccgctggcggtgtccgccacccagatccgcgcgctgctgggtgccgggcgctccgtgcgtttcctggtgccggacgcggtattgaactacatcgaggcgcaccacctgtatcgtgcgccacactga

SEQ ID NO: 321047 - DNA, 1266 bp, Pseudomonas aeruginosa
atgaccgagtccgtcctcgactatatgagccgccttggccgcgatgcccgcgccgcctcgcggttgctcgcgcgcgccgccaccgcgcagaagaaccgcgccctgctggccgcggccgatgcgctggacgccgcccgcgcggagttgtcccacgccaacgagcaggacctcgccgccggccgcgccaatggcctggagccggcgatgctggaccgcctggcgctgaccccggcgcgcatcgacgacatgatcgagggcctgcgccaggtcgccacgctgcccgacccgatcggcgagatccgcgacatgcgctatgtgccctcgggtatccagatcggcaagatgcgcgtgccgctgggcgtggtcgggatcatctacgaatcgcggccgaacgtgaccatcgacgccgccagcctgtgcctgaagtccggcaacgcgaccatcctgcgcggcggctccgaggcgatccactccaaccaggcgatcgcccgctgcatccagcagggcctggccgaggccggcctgccggccgccgccgtgcaggtggtggaaaccaccgaccgcgccgcggtcggtgcgctgatcagcatgcccgaatacgtcgacgtgatcgtcccgcgcggcggcaagggcctgatcgagcgcatcagccgcgaggccaaggtgccggtgatcaagcacctggacggcatctgccacgtctacatcgatgtcgccgccgacctggacaaggcgattcgcgtcgccgacaacgccaagacccagcgctacgcgccgtgcaacaccatggagacgctgctggtgcatgccggtgtcgccgagcgggcgctgccgcccctggccacgatctaccgcgagaagggcgtggaactgcgcggcgacgccgcgacccgcgcgctgctcggcgcagacgtgctggaggctaccgaggaggactggcgtaccgagtacaacgcgccgatcctgtcgatccgcatcgtcgacgggctggacgcggcgatcgagcacatcaacacctacggctcgcagcacaccgacgcgatcattaccgagaacttcagcgatgcgcggcgtttcctcgccgaagtggattccgcttcggtgatggtcaacgcctcgacccgcttcgccgacggcttcgagtacggcctcggcgccgagatcgggatttccaccgacaagctgcacgcccgcggcccggtcggcctggaaggcctgaccagcgagaagtacgtcgtcttcggcgacggtcacgtgcgcacctga

SEQ ID NO: 321048 - DNA, 1224 bp, Pseudomonas aeruginosa
atgcgctaccgtaccgactacagcgcacagtcgctgagcagcgaaccggatatcctcttcctagacggctggcaactgcgctaccaggccttcgccgcccgcgccgacgacccgcgcccgccggtgctcctgctgggcggcgcgttccagagcttccgctcgttcaccggcgaggtcagcgaactgctcgccgagcacccggtgatcctgctcgacctgccgagccagggcggcaacctgcaactggcggcggaactgagcctggaagacctcgccgacctgatcgcggccttcgccgaacagctcggcctgccgccgttgatgcccatcggcctgtcctacggctcggccctggccgcgctgttcgccgcccgccatccgcgccgctgcgcgcgcctgctactggccggcatcaccgcattcggccgccccggtgcgcggctgctgctggaagaagccctggcccggctcgacgagggcgaccagagtgccttcgcccacggcgtactgaccggcctgatcaacccgctacagctggaacgtaccggcgtctccccggtatttcgcaaggccatgctgcgccagttgcaacgcctgaccgcggcggagatcgaacgctaccggcagaatagccggcgcctgctggccttcggcggcttcgagcggcacccgacctgcccgaccctggtgctcgccggcgagtacgaccatttcacccagccctgggaacatgcggtgttcgcccatgcctgcgggaacgccgagttcgccctgatccacgacgccgaccatcttgcccagttcgaacgacgcgaggcctgcgcccggctctacggcccgttcctgcgcggcgaggcactgccggagcgcgccgagggcagcacgcggatcccgcgcacgcgcctgctcggcctggagcgacgcttcgaggtccgccatcggccagcccaggggcacgctcggctggaacatccgcagttcggcgtctatgcggcggaactggtggaactcggctatttcggcgggcggctgcacgccgagctgcccgaatcccgcccgcaacgcggctggcggttgtgctgcgacggcctggcggacttggacatcctgcccctgcgctcgaccgccggcggcttcgccttcatcttcccgcactccgatccggcggccagcgccggactggccgacctcctcgccgcctgggagcgagcggaggtcgcctga

SEQ ID NO: 321049 - DNA, 858 bp, Pseudomonas aeruginosa
atggttgaacgagagcgtgtcgacagtgcccacatcacgcccagcgcccattacaccgggtacgtctggttccgccatcggctcgccgaaccggccttcgccaccgtcttcggccgctgggtacacggcttcgtcgcgccgatcaactggggcgcgcagctcggtttcggactgaacatcgaggatttcctgttacaaagacacctcatgatcgacgcgcgcctgacccaggccgtcgaacgcgagggagtggtccaggtggtggaaatggcctgcgggctctcgccgcgtgggcgacgcttccggcaacgctatccacagttgcgctacctggaggccgacctgccgccgatggccgcgcgcaaggcggcgttgctccgcgagcaggggtggctgggcccggagcacgcggtggcggctgtggatatcctcgccgaggacggcgagcgcagcctcgccgcgctgttcgccgggctcgatcgcgagcgcccgctggtggtgatcaccgaggggttggtgaactatttccagcgcccggtgatcgaggccttctggagtcgcctggcgaccgaacttaaacgcttcccccagggcacctacctgaccgacctctatcccgatctccgcgagcacccgcgctaccggcagatccgttggggagtggggatcatcgggcggctgacgcggggaagctatccgttgcattaccgcaatgccgcggaaatcgaggcggccttcgcccgctgcggcttcgcctccaccctggtgctcgacccgcagcgcgaaggcgccgccctgggcttgccgcagggacgcctgccgagcctggtgcgggtgatcgaaagccgcacggcatag

SEQ ID NO: 321050 - DNA, 720 bp, Pseudomonas aeruginosa
atgtcccgcgatcccatccttagtttgccctggcccgacgcccggccgctccccgacaccttcttcgaccgcgatgcgttgctggtcgcccgcgagttgctgggcaaggtgatccgccatcgccagggcaatctctggctggcggcgcgaatcatcgagaccgaggcctactacctggaggagaaaggcagccatgcctcgctcggctacaccgagaagcgcaaggcactgttcctcgacggcgggcacatctatatgtattacgcgcgcggcggcgactcgctgaacttcagcgccggcgggccgggcaatgcggtgctgatcaagtccggccatccctggctggatcgcatcagcgaccacacggcgctggagcggatgcagagcctgaacccggacagccagggccggccccgcgagatcggccgcctgtgcgccggccagaccctgctgtgcaaggccatggggctgaaggtgccggagtgggacgcacagcgcttcgacccgcagcgactgttcgtcgacgatgtcggcgagcgccccagccaggtgatccaggccgctcggctgggcattccgaaggggcgcgacgaacacctgccgtaccgtttcgtcgatgccaccttcgccgccttctgcacccgcaacccactgcgccgcggccaggtcgccgggcgcgactatcatctactcggacatcaggacccgcacctgcaatga

SEQ ID NO: 321051 - DNA, 1314 bp, Pseudomonas aeruginosa
atgagtctcgacagcttcaacgcctggatggccgccaaccccgagtggctggggctggccatcttcctcatcgccttcctcgaatgcgcggccatcgtcggtatcgtcctccccggcgtggtgctgctgttcggcgtcgcggtgatcgccggcagcggcgccctcggcctcggcgaaaccctgctgctggcctacgccggcggggtgctgggcgacctcagctcgtactggatcggccgccgcttccaccagaacatccgccgcctgcccggcctgcgcagccatccgcagtggatcaccgccgccgaggtgtacttcgaacgctacggtatcgccagcctgctggtcggccgcttcatcggcgccctgcgaccgatgctgccgatggtcgccggcatgctcgacatgccgttcggccgttttctcggcgtttcgctgatcgccgccgccggctgggcggtcgcctacctgttgcccggctgggccaccggcgcagccctgcgcctgccgttgccggaaggcttctggagcgaagccgggatcgtcgcggcctgcctggcggtgctggtcggcgtggtagtccaggccagcctgcggcgcaaacgctgggcaaccgctgtggcggccgcgctgagcctggtcctgctgctggcgatgaccgtcgcctggccgtacctccaggacctcgaccagggcctgatgacgctggtccaggagcatcgcaacgccgacctgaacccggtgatggtggtggtcacccggctcggcgatttccgcacccagttcatcgccggcgcgctgctcggcggtatcctcctgctgacccggcaatggcgtccggccatcttcgccatcggcaccctggtgggtaccgcgctggccaaccagaccctgaagaccctgttcgcccgcgcccgcccggaagtgctggccgaaccgctgagcagcttcagcttccccagcggacacagctcggcgtccttcgccttcttcctcaccctgggcgtcctcgccagccgccagcaaccgccgcgctggcgcctgacctgggtactgctggcggtgatcccgtcgctgagcatcgccctgtcgcgggtctaccttggcgtgcactggccgtcggacatcgtcgccggcgccctgctcgccactacggtctgcgccgccagcctgtggctgagccagcgccgcgagtcgctgccggcgctgccgcaacgggtctggtggctgctgttgccggtctgcgtggcgaccctggcgatcgccgccggctgggccctgccggaagccattgcgcgctaccggccgctgtga

SEQ ID NO: 321052 - DNA, 594 bp, Pseudomonas aeruginosa
atgaagttgccgttgtttcccctcaacgccgtgctgttccccggttgccgcctggacctgcagatcttcgaggcgcgctacctggacatgatcagccgctgcatgaagcagggcaccggtttcggcgtggtgaccatcggcgaagggcgggaggtcggcgaagcgccgagccgcctggcgatggtcggctgcgaggcctcggtccgcgactggcagcagcgcccgaacggcctgctgggcatccgcgtggagggcggtcggcgtttccaggtgctgtcggtggaggtccaggccgaccagctcagcgttggcgagatcgaatggttcgaagacctgccggagcaacccctgacctacgaacacaacgatctcgccgcgttgctcagcgtgctggccgagcatccgatggtggccgcgctggagatgggcggcgagcctggcggccagcaggacctggccaaccagttggcctacctgctgccgttcgataccgaacgcaagctcgaactgctcgccctgcccgacgcgcagatgcaactggcgcggatccaggtgctgctggagcacctgcagggcgagttgggtatcgactga

SEQ ID NO: 321053 - DNA, 711 bp, Pseudomonas aeruginosa
atggcctggcaggccgccctcgaggcggtgatccaccatccgctgttcggcgtcggcgtgaccctgggcgcctaccagttggccctggccgcctatgaacggacccgctgggtgttcctgcagccggtgctggtatcgatgctggtggtgatcggcgtgctgctgctttgcggcatcgactacgacgaatacagtgccagcgccaaggtcctgaccattctcctcggccccgccacggtggccctggcggtgccgctgttcctcaacctgcggcgtatccgccaattgttctggccgaccctgctgaccctggtggtcgccggtacgctggcgacggtgctgggcatcgcattcggctggctgttcggtgccgagccgcggatgctgatgagcatggcgccgaagtcggtgacctcgccgatcgccatgctggtggccagccagatcggcggcgtggcggcgctggccgccgtgttcgtactgatcaccggggtgctcggggcgatcctcgggccggagctgctgcgcgccatcggcgtccggcaccccgccgcgcagggcatggcgctgggcatgacggcccacgcggtaggcacttcgcgggccttgcaggaaggcgaggagtgcggcgccttcgccgccctggcgatgagcctgatgggcgttgccaccgcagtgctgctaccgttggcggtagcgctggttgcctga

SEQ ID NO: 321054 - DNA, 411 bp, Pseudomonas aeruginosa
atgtcccggcgggctgggcataatggtcggcccttgctggaggtgcccatgttgcttcgtggtctgacctggctggtgctgttccagttgctcggcacaggtctgaacgttctgttgttgcccatgctgcccggtccgatcatcggcctggtgctgctgttcggttatttcctggcgcgtggcgaggtcggcaagccggtcaacgaggcggccggctcgttgctgcgctacctgccgctgctgctggtgccggcggcggtcggggtgatggcctatgcgcgggagatcgccgccgacttctgggccatcgtcggcgcgctggtactgtcgctggtgctgtcgttcctgttcgccggctggatgatgcagaagctcatcgatcgccagcaacgtcgccgggaggagtcctga

SEQ ID NO: 321055 - DNA, 456 bp, Pseudomonas aeruginosa
atgccattcgtacccgtagcagcgctcaaggactatgtcggcaaggatctcggccattccgaatggctcaccatcgaccaggagcgggtcgaccagttcgccgaatgcaccggcgaccaccagttcatccacgtcgatccggagaaggcggcgaagacgcccttcggcggcaccatcgcccacggtttcctgtccctgtcgctgatcccgaagctgatggaaggcctgctggtgcttcccgaaggactgaagatggcggtcaactacggcctcgatacggtgcgcttcatccagccggtgcgggtcggctcgcgggtccgcctgggcctgaccctgctcgacgtcaacgagaagaatcccggccagtggctgatcaaggcgcgcgccaccctggagatcgaaggccaggagaaacccgcctacatcgccgagaccctcagcctctgcttcgtctga

SEQ ID NO: 321056 - DNA, 1740 bp, Pseudomonas aeruginosa
atgcttcgccccgccaggtctctctcgctctgctccgccctggtcatcctgctcgccgcctgtggcgagggcgaaccgctgctcccggccgatgcgcgcctgccggacggcgcgcgctatcgcggcgagctggtggacgggcgcctggaaggccagggccggctggactacgacaacggcgcctggtacgccggccgcttcgagcatggcctgctgcacggccatggcacctggcagggcgccgacggcagccgctacagcggtggcttcgcggccggcctgttcgacggtcagggacgcctggcgatggccgatggcagcgtctaccagggcggtttccgccagggcctgttcgatggcgaaggcagcctggaacaacagggcactcgctaccgcggcggtttccgcaagggcctgtacagcggccagggcacgctggacggcagcgatggcagccgctaccagggcagcttccgccagggccgcctggaaggcgaaggcagcttcagcgacagccagggcaaccagtacgccggtaccttccgcgacgggcaactgaacggcaaggggcgctggagcgggcccgatggcgaccgctacgtcggccagttcaaggacaaccagttccatggccaggggcgctacgaaagcgccagcggcgatgtctggatcggccgcttcagcgaaggcgcgctgaacggccccggcgagcttctcggcgccgacggcagccgctaccgcggcggtttccagttctggcgcttccatggccagggcctgctcgaacaactggacggcacccgctacgaaggcggcttcgccgccggcgcctatgccggccaaggcaccctggaccgcgccgacggcagccgtgagcagggactctgggccgacggcaagcgcatccgcgacgccgccggcaaggccctgcccgacactctggaaatcggcctgttggcccagggtcgcctgctcgacgaagaactgcgcaagatcccggcctcgacgccggccagcgaactctatgccctgagcctgggcggcgatggccgccagggcgtgttcctgcgcgaggccgattacgccggcgacctgctcggccagcgtttcgccgctcgtggcgtgattcgcctggtcaaccaccgcgaccacttcggcgaccgcccgctggctacccgggaaagcctgtcccgcgccgtgcgcaccctggccgaacgcagcgggccggaagacctggtcttcatctacctgaccagccacggctccagcgaccaccagttggccctggacatgcccggcctgaacctcggcgacctgccggccgcggaactggccgaactgctcgcgccgctgcgccagcgcgacaaggtgctggtggtatcggcctgctacagcgggggcttcatcccgccgctgaaagacgaacgtaccctgatcctgaccgccgcgcgtgccgaccgggtctcgttcggctgttccgacgacgccgacttcacctatttcggccgcgccttgctggccaatgcgctgaaccgcaccgacgatctgtccaaagcgttcgaactggcgaaagaggaagtgcgtcaaagggagaaggaggaaggtttcgaagcttcggaaccgcaagcctggttaccggaacgcgtgctcgcgcactggcggacgctgcgggggcagcaagccgagcgcgcgctcgcgtcccgggaaggaaaaaccggcgagggcgcggcgggcaaatag

SEQ ID NO: 321057 - DNA, 276 bp, Pseudomonas aeruginosa
gtgctgctgctggtcctggcggtgcagttgggcggttgcgccaccgtgcgcaccctggatgcggccaagccaggggcgccggtggtctacgccggcacccggctggattggtacagcctgcacggcggctgctgccccatggaacgcttcggcgcggaggcgccggcccatccggggctcgacctgccgggcagcgcgctgctggacaccctgttgctgccgttctcgctggccaccgccatcggcctcaacctcggcgtcagcggcggcatgtag

SEQ ID NO: 321058 - DNA, 630 bp, Pseudomonas aeruginosa
atgagcggtccggaacgcattaccctggcgatgaccggcgcctccggcgcccagtacggcctgcgcttgctcgattgcctggtgcaggaagagcgcgaggtgcacttcctgatctccaaggccgcgcaactggtgatggccaccgagaccgacgtggccttgccggccaagccgcaggcgatgcaggccttcctcaccgaatattgcggtgccgccgccggacagatccgcgtgttcggccagaacgactggatggcgccgccggcctccggctccagcgcgcccaatgccatggtgatctgcccgtgttccaccggcaccctgtcggcggtcgccacgggggcctgcaacaacctcatcgagcgcgccgccgatgtcgccctgaaggagcgccggccgctggtgctggtgccgcgcgaggcgccgttctccagtatccacctggaaaacatgctcaagctgtccaacctcggcgcggtgatcctgccggcggcgccgggcttctaccaccagccgcaatcggtggaggacctggtggacttcgtcgtcgcgcgaatcctcaacaccctggggattccccaggacatgctgccgcgctggggggaacagcaccttgtcagcgacgagtag

SEQ ID NO: 321059 - DNA, 1356 bp, Pseudomonas aeruginosa
atgcacatccacgtactcggcatctgcgggaccttcatgggctcgctggccgtgctggccaaggaactgggccaccgggtgaccggttccgacgccaacgtctacccccccatgagcacccagctgcaagcccagggcatcgagttgatgcagggctacgatccggcccacctggagccggcgccggacctggtagtgatcggcaacgccctgtcgcgcggcaatccggcggtggagcatgtcctgaacaagggcctgccctacgtttccggcccgcagtggctggccgaccacgtgctgcaaggacgctgggtgctggcggtggccggtacccacggcaagaccaccaccaccagcatgctcgcctgggttctggagcacgccggcatgagcccgggcttcctgatcggcggggtgccgcagaacttcggggtttcggcgcgcctgggcggtacgccgttcttcgtggtcgaggccgacgagtacgacagcgccttcttcgacaagcgctcgaagttcgtccattaccgcccgcgcacggcgatcctgaacaacctggaattcgaccacgcggatatcttccccgacctcgcggccatcgagcggcagttccaccatctggtgcgcactgtgccgggcgagggcctgatcattcgcccgagcgccgagaaagccctggagcgcgtactcgggatgggctgctggaccctggtgcagaccaccggcgaaggcggccagtggcaggcgcgcctgctcgccgaggacggctcgcgcttcgaggtgctgttcgacggcatcgtccagggcgaggtggactggccgctgaccggcctgcacaacgtcgccaacgccctcgccagcctggcggcggcgcgccatgtcggcgtgatgcccagccagggcgcggcggcgctcagcgagttccgcaacgtcaagcggcgcatggagaaggtcgcggaggtccggggcgtgaccctctacgacgacttcgcccaccatccgaccgccatcgccaccaccctcgacggcctgcgcaagcaggttggcgcggatacccaggtgatcgccatcgtcgagccgcgttccaactcgatgaagctcggcgctcatcgcgacggcctgccggacagcgtgcgccaggccgaccaggtgctctggtacgcgccgccgaacctgggctgggacctggccgccaccgccgcgcaatgcgcgataccgtcgcaggtctgcgataccctggaggcgatcatcgagcaggtgcgccagcaggccaggcccggcgcgcaagtggtgatcatgagcaacggcggcttcggcggcttgcacggcaagctggccgcggcgctggccgagtga

SEQ ID NO: 321060 - DNA, 1932 bp, Pseudomonas aeruginosa
atgcctgccagttccatgagccgccacgcgcggcaagtgctgaccgtcgcccagggcaagatcccgccgggcggccctgcgaccgatccgtccatcgcccgctcctggctgcgctgcctggaacagcaccatctcgatcccggccagccgatggcgccgatggtgctggagcacgcgcgcatgctcgaacgccgcgagcgcctgcaacaggtgctggagatcgccgatggcgagatgcacagcctctaccagcagctttccggcaacgaccacgcggtactgctcaccgatgcccgcggggtgatcctcaattgcgtcaacgccgacgcccagcgccagaccttcgaacacgccggcctctggctcggtgccgactggagcgagccctgcgaaggcaccaacggcatcggcacctgcgtggtcgagcggcaggccctgaccatccagcaggaagagcacttccgtagccgccataccggcctgacctgctcggcgagcccggtgttcgatccgcagggcgagctgatggcggtgctcgacgtgtcttcggcgcgccaggaagtctcgcggcagagccagttccacaccatggcgctggtcaacctgtcggcgaagatcatcgagggctgctattttctccgtcgcttcgagggctcctggctgctgcgcttccatgtccagggcgactatgtcggcctgttcagcgaagggctgctggccttcgaggaagacgggcggatccgcgcggtgaaccagagcgcgctgaacctgctcggttgtccgcgccagcgcctgctcggccagccggtggagaccttcttcgattgccgtctcgacgacctgctcggtcgcgcctcgccgcaacccagcgccagctggccgctgcgcacccgcgagggacggaccctgtacgccatgctgcgcggcgcgccgcgggcgataccccaggccctggcggtgcccacggcagcgaagccggcgcctgccgcgcccggcctgtgcctgggcgacgccgagctggccgccgatttccgccgggcgctgaaggtctacgcgcgcgacgtgccgctgctgctcaacggcgagaccggttccggcaaggaggccttcgccaaggccgtgcacctggccggcccgcgcgcggaacaggcgttcgtcgcgctgaactgcgcggcgatcccggaaaccctgatcgagagcgaactgttcggttatcgcggcggcagcttcaccggcgcgcgcaaggagggcatgcgcggcaagttgcagcaggccgacggcggcaccctgttcctcgacgagatcggcgacatgccgctggccttgcagacccgcctgctgcgggtgctggaagagcgccgggtagtaccgctgggcggcgagccggaggatgtcgacgtgcgcctgatcagcgctacccaccgcgacctggccgggctggttgccgatggacgcttccgcgaggatctctactaccgcctcaatggcatggtcgtgagcctgccgccgctgcgcgagcgcagcgaccgcgaggagctgctggactacctgctggccgaggaggccaggggccagcgcatccagctcgacggcgaggttcgccagggcctgctggcctaccgctggccgggcaacgtccggcagatgcgcacggtgctgcggaccctggtggcactctgcgaggacggccgggtcggcctgcgcgacctgcccgcggatatccgccaggccctggcggcgctgccgcccgccgcagcggcgcccgccccggccgcgggcaacagcctggacgacgccgagcgagccgcgttgctggcggcgctggacggccagcgctggcacgtgagccgggtggccgagcaactggggatcagccgcaacaccctgtatcgcaagctgcgccggcacggcctggtgcgcggccaggcctga

SEQ ID NO: 321061 - DNA, 1440 bp, Pseudomonas aeruginosa
atgaccaatctgctgctttaccaacgcatcgcccagcagttggccgaggacattcgccgtggcgtctaccagccgggcgagcgggtaccgtcggtgcgcaagctcagtacccaattgaacgtcagccacgccaccgtgctgcaggcctacgccaccctcgaggaccagggactgatccgcgcccgtccgcaatccggcttctacgtccaccgcaccccggcgctgaccgcgccgaccccggatatcgcgcgggtcgagcgtcccggcctggtcacccgcagcagcatcatcaaccaggtgctcgccgagtcccgccgcgaaggggtattcccgctcggcgcggcggtgccgcacgtggactacctgccggtgcgcgccttgcaccagcaactggccaaggtcacccgcttccagagcccacgggcgttcagctacatgttcagccccggtttcgagccgctgcggcggcaggtggcgatccgcatgcgcgacgccggcgtggtggtcgacccgtcgcaggtgaccatcacccacggctgcgtggatgcgatccacatggccctgcgggtgctgacccgtcccggcgacctgatcgccaccgagtcgccgagctactacggcctgctgcaactggccgacgtgctgggcctgaaggtcatcgagatccccagcgacccgcgcaccgggatcagccttgaagcgctgcaactggcggccaaccagtggtcgatcaaggccttggtgctgaccgcgcggctgagcaatcccttcggcgggacgattcccgaggatcgccagaagcaactgctgaaactgaccgccgaacacaacatcggggtggtcgaggacgacatctacggcgaactgatgttcgaccagggccaggcgcgctcgctcaagtcccacgaccgcgacggccgggtgatctactgctcgagtttctccaagaccatctcgcccggcgtacgcatcggctggatcatcgccgagcgctaccaggaggagatccgtcgcttgcagaccttcaccacccattcggcctgcaccgtgacccagatgggcgtcgccgcctacctggagaacggcggctacgaccgccacctgcgctacatccgccaggagtaccggaagaacatgaccgcctaccagttggcggtgcagcagtacttcccggaaggtacgcagatgacccggcccaagggcggcttcatcctctgggtcagcctgccggccaaggtcaacaccaaggaactccacgtgcgggccctggagcagggcatcagcatcgccccggggctgatcttcagcaacaccgagcagttcaacaactgcctgcggctgacctgcgggattccctggaaccgcgaggcggagcgggcgatcatgaccctcggcatgcttgccgggcagctttgccaggaaggccttatcgccgcctga

SEQ ID NO: 321062 - DNA, 369 bp, Pseudomonas aeruginosa
atgatccgccagccccgctttgcccgtttcgtcctgccgttgttgctgagcctgtgccagccgtccttcgccgccgaactccgcgcggttgccgaagcacgccgccaggaactcctgctggaggactcgccggtggcgtgcggcgaggcgggctgcacggcgcgggaaagcctcagcctggtggcgttgcaggtgcaggcccgggttctggtcacccgcctcggccgcgatgatttttccccggccgcccgccagcccgccgccgtcccggactaccgcctgttcggcgatctcggcctggcgccaagccccttcgcctggcaagcgttgaccggcgagagcgcggcggcggacgcgttgcgtttctga

SEQ ID NO: 321063 - DNA, 639 bp, Pseudomonas aeruginosa
atgagttcgaacgaaaccctgccggggctggtgatcgccgattccttcccggtcatgcagtgggcgctgcagcgctacctcagcgaggagtgcggacgccaggtgctggcggtggtcggcgatagcgacagcctggtggagcgcctggccgacctgccgccggaaagcatcctgatcaccgagctgggcttgcctggccagcgcagccgcgacggtatccacctggtggaatggctgacccggcactgcccgcaaatgaaggtgatggtctactcggtgttcagcgtgccgttgctggccaaggcggtcctgcgcagcggcgcctcggcctacatcagcaagcgcagcccgctggagacgttgaaggcggcgctggagtgcatggcgctcggacagaccttcctcgaccccggcctgcacccgcagcggcataccggcaagccgctgagccccaccgaggtggacatcctctggcgcctggcgcgtggcgacacggtcagcgagatcgcccagcggaccatgcgcagcgtgtcgaccatcagcacccacaagaagaacgcgatggtcaagataggcctcaacagtgacgccgaactgatcgccctgggcgtgatgaactggctccacgaactcgcctga

SEQ ID NO: 321064 - DNA, 810 bp, Pseudomonas aeruginosa
atgccgggcaaagcgactctcttcgccaccctgctggcctgcgccgcgctggctggctgcgccgaccacaagctcagcgaacagtcgctggccaaggcgcagagcgagttcgaccaggtcaaggaagattccgacgtgctccgcgcggcgcccaaggatgtgatccgcgccggcgaatcgctggcccgcgccgaacgcctgtccagctactggggcagcagcagcgacgtgatccagtatgcctacctgagccagcgctacagcgagatcgctcgccagcacgccttgctcaacctcaaccaggagcgcctgacccgcctgcaactggagcgcgagcgcctgcaactggccctgcgcgaagccaagctgctcagcgtgcaggagcagggccagcgcctgagcgaggagatcgccagtctcagcaccgaggaaaccgagcgtggcctggtgctcacccttggcgacgtgctgttcgacttcaaccgcgccgaactcaagccggcggccaaccgcaccgcgctgaagctggtgcagttcctccagctcaatccgcggcgggtgatccgcatcgaaggctataccgacagcgtcggcgacaggcaggccaacctcgacctgtcgcgcgagcgcgcccaggcggtggccgacgtgctcgccgatctcggcgtggatcccgcgcgcatgcaggtggtcggctacggcgaagccttcccggtcaccgacaacgcctccaaccgggggcgggcgcagaaccgccgggtggagatcgtcttctccaacgacaagggccagctcagcgcgccgcgctga

SEQ ID NO: 321065 - DNA, 345 bp, Pseudomonas aeruginosa
atgatggccgcaggcctcgccgcgctgaccctgagcggttgtgcgagcaacgacccggctccgctggagcagatgcgcctgaccgaacaggcgctggagcaggccaaggcggtgggtgccaccgacgacgtggccgagctgaaactggcccaggacaagtacgccgcggcgcagatcgcgatgaccgcggagtcctacaagaaggcgcgcctgttggccgagcaggccgagctggacgcacgcctcgccgagtccaaggtgctgacgcagaagagcaaggaccagctcggcgagctggacaagagcctgaaacgtctgcgcaagcaactgggggagaccgactga

SEQ ID NO: 321066 - DNA, 849 bp, Pseudomonas aeruginosa
atgtcctttcgctgttccccgtgccgcctggccggcatcctgctggcggcgctgttcgttccggggctggccgcggcggccggctcctgcgagcgcctggtggccaccggcaacccggagtaccccccctacctgtggcgcgacccgcaggatccgaagcgcctgatcggagccaatgccgacctgttgcagcgcctgggcaaggagctcggcgtgcgcatcgacgtgctctacagcggctcctgggagaaggcccaggaagaggtgaccagcggtcgcgccgacctgctcgccggggcctacctgaccctggcacggctcggcagcatggactatgtgcatccgccgttcctgatgaccagcggggtggtctgggtgaacaaggacgccgcgttcccgttcatcggccgcgacgacctgatcgggcacaagggcagcgtgctggccggcagcagcctgggcgaggagttcgaccgcttcgccaaggccagtctcgacctgaagccggtgccgagcctgacccagggcttgcaggacctgatgctcaagcgcagcgagttcctcctctaccaggcgttgcccgggcaggcccaggtcgaggcgctgggcatggccgacgacctggaggcgctggaaccggtgctgagcagcgaggggctgtacctgacgctgtcgcacaactccgcctgcaacgatccgtggctgcgcggacaactggcgaaaaagatgacagaattgtcggctgccggcgttcccgtaacgctcttgcaggacaatctcgaacgctggaaagcccagcaattgccggcttccggcgccagttcgactacgcaggaaagtgacttgtga

SEQ ID NO: 321067 - DNA, 1680 bp, Pseudomonas aeruginosa
gtgagtgacgcccagcaggttccggccatcgtcatcctcggccagggcgcgctggataccgcgcggcgggtccaggcgcgctatcccggggcgctggtccacgggctcgccgggcgggtcgaggccgaccgttcctatacggacttcggcgacaccctgcgcgaactgtattgcgccgaccgcccgatcgtcgccctgtgcgccgccggcatcgtcattcgcagcctggcgccgttgttgcaacgcaagggagcggagccgccggtgctggccctggccgaggacggtagtgcggtggtgccgctgctcggcgggctggccggggtcaaccggctggcgcgggaaatcggcgaggtgctggccgtggcgccggcgatcaccaccagcggcgagctgcgcttcggcacctgcgtgctcaacccgcccgccggttatgtcctggccgacctggagcagggcaagcgcttcgttgccgatttgctcggtggccagccggtgcgcgtcgagggtgccgccggctggctcgacgcggcccgtttgccgcgcgacccggcggcggcgctggcgattcacgtgacgccctcggcgcgtgcgccgcgggccgaggaactgctgatccatccgcgctgcgtgctggcggcgctcgaacctgccgacgcggctgtggacgcggtgcgccaggcgctggtcgatgccggcctggccgcggcggcgctcggcgggttgctggccgacagcgcgcggatggccgatccgcgcctgcaggccgccgccgatgcgctcggcgtaccgctgcgcttcctgccgcaggccgatcccgctgcgcgcctgcgccaggccttgcccgccgccgagcaggtcggcgaccggctggcggtggccgccgcgcccttggcgatggaccgcatcggccagcgtcgcggccgactcacggtgatcggcctggggcccggctgcgccgagctgatggtgcctgcggcgcggcgggcgctggacgaggccgaggacatcctcggctaccagacctacgtcgacatggccggacccttccgcgccggacaggtgctgcatggcagcgacaaccgcgaggaattgcagcgcgcccggcatgccttcgaactggcggcgacgggcagggcggtggtgttggtatcgtccggcgaccccggcgtgttcgccatggccgccgcggtgctggaagccctgcatggcgctggcgagccggcctgggacgcggtcgagctgcggatcttccctggcgtctcggcggccctggccaccgcggccagggcgggggcgcctctgggccacgatttctgcctgctgtcgctgtccgacaacctcaagccctgggaggtgatcgagcggcgcctggacctggccggcgccgccgacctggcgatggctttctacaatccgatctcgcgggcgcggccctggcaactgggacgggcgctggagatcgtcgcccgccatcgttcgccgcagaccctggtggtgctcggtcgcgacatcgggcggcccggtgagcgcctgctgcgcaccaccctgggcgagctgcgtgcggagcaggtggacatgcgcaccctggtgatcatcggctcgtccactacccgcagcttcccgcgcgccgacggcgaagcctgggtctacacgccgcgctggtacccatcggaatag

SEQ ID NO: 321068 - DNA, 753 bp, Pseudomonas aeruginosa
atgatgagtgtcgtgaagggccgcctgctgggcctgggcgtcgggcccggcgatcccgaactgatcaccctcaaggccctgcgcctgctgcgcgcggcgccggtggtcggctatttcgtggccaagggcaagaagggcaacgccttcggcatcatcgaggcgcacctggaccaggcccaggtgcgcctgccgctggtctatccggtgaccaccgagaagctggaaccgccgctgtgctacgagaccatcatcagcgatttctacgacaccgccgccgaacagctggccgcgcacctggacgccggccgcgacgtggcggtgatctgcgagggcgacccgttcttctacggttcctacatgtacctgcacgaccgcctggcgacgcgctacgaaagcgaagtggtgcctggcgtctgctcgatgctcggcggcgcggcggtgctcggtgcgccgctggtgtaccgcaaccagagcctctcggtgctctccggagtgctgcccgaggaggagttgcgccggcgcctggcggatgccgacgcggcggtagtgatgaagctcggccgcaatttcgacaaggtccgccgcgtgctggtcgagcttggcctcgagcgccgcgcgctgtacgtcgagcgggcgaccatggccaaccagcggatcgtgccgttggaacgggtggagccgatggcctcgccgtacttctcgctgatcgtcgtccccggcgacaagtggcagggaggggccggcggtgagtga

SEQ ID NO: 321069 - DNA, 627 bp, Pseudomonas aeruginosa
atgattgactacatccgcgatggccaggcgatctatcgccagtcgttcgccaccatccgcgccgaagcgaacctcgccggcatcccggccgaccttgaaaagctcgcggtcagggtgatccacgcctgcggcatggtcgacgtggtcgacgacctgcgcttctcgcccggcgccggcgccgccggccgcgccgcgctggccgccggcgcggcgatcctctgcgacgcgcggatggtcgccgaaggcgtgacccgctcgcggctgcccgccgccaaccgggtgatctgcaccctcaacgaagcggacgtgccggcgctcgccacggaactcggcaatacccgctcggcggtggccctggagcactggcgcgagcacctggagggcagcgtggtggtgatcggcaacgcgccgaccgcgctgttctacctgctggaaatgctcgacgccggcgcgccgaaaccggcgctgatcctgggcttcccggtcggcttcgtcggcgccgcggaatccaaggagatgctcgccgccgatagccgcggggtgccctacgtgatcgtccgcggtcgccgtggcggcagcgccatggccgccgcggcggtgaacgccctggccacggagcgcgaatga

SEQ ID NO: 321070 - DNA, 1371 bp, Pseudomonas aeruginosa
ttgaacgacgaccagaccccggcgcccctgcccgtaccacgtccgtcgccctgtcccggcctgctgcgtatcgtccaggcgctggacggcggcatctgccgcatcaagctcgacgccggccgcctggacgccgcccaggcacgcgccgtggcggccgcggcgcgggattgcgccagcggcgtgatcgaggcgaccaaccgttccaacctgcaattgcgtggcgtccgccgcggcgaggaagagcggctcgtccgccgcctgctggacgccggcctcggtccccggcatggggccctggccggcgccgacgacgtgcgcaacctgatgctcagcccggccgccgggctcgatccgcacctgtcgctggacgtgcgcccgctggccgcgcggttgctgctgcggctccaggcggacagccgctaccacgcgctgtcggccaagttcgccatccagctggacggcggcgaagacctggcgatgctcgaacatccccatgacatctggctctcgccgatgcccgcggcgccgaccgcgacgctggtcttcggactcgccggctgcccggcccgcgaccgccccctggcggcgttgccggcggagcggggcgagtccctggtgctggcgttgctcgacctgttcctcgagcgcgcccagccgcaacagacgcggatgcgccacctgttgcaggagctggacggagaacccttgctggaggccttgcaggcgcgcctggatttccctctgcggcgtgacgagcgggtggcggcctggcggcgttcgccggggcgtccgtggagtcatctcggcgtccagccgcaacgccagccgggcctggtgatggtcggcgcggcggcgccgctcggccggctcgacagcgcttgcctggagggcctggccgagctggtcgaacgccatggcgacggcagcctgcgcctgaccccctggcaaggcgtgctcctgccgaacctggcgcacgccgaggccgaccaggcgctgctcggcctgcgcggactcggcctgctgaccgagcccgatgcgccgttggcgcggctgatcgcctgcagcggttccagcgcctgcgccaggggcctggccgacaccaagggcgacgccttgcgcctggccgaacgcctcggcccgcgcagcgacctgccgcaactgcacctgtgcggctgcgaacggtcctgcgccgccgcccaccgcgcgccgctcaccctgctggcgcgcagcggcgggttctacgacctgtaccggcacgacccatgccaccccggattcggccagttgctggccagccgcctgactttcgccacggccgccgactacctggcggccctgccttcccagcccacttccggaaaacccgcatga

SEQ ID NO: 321071 - DNA, 1248 bp, Pseudomonas aeruginosa
gtgtcatcggcagactcgacgccgccctggctgaccctggtgggcatcggcgaggacggttatcccggcctcggcaagcaggcccggcgtgccctgctgcaagccagccggatcgtcggcgcggcgcgccagctggaactgctgccgccgtgcatcggcgccgcccgcgaaacctggccgacgccgttctccctggaaccattgctggcccggcgcggccagccgacctgcgtgctggccagcggcgacccgatgctgttcggcgtcggcgccagtctcgcccggcaactgccggcgaccgaactgcggatcctgccggcgccttcctccctctcgctggccgccgcccgcctcggctgggccctgcaggaggtcgcctgcctgtcgctggtggcgcgcccgctggcagcgctgcaggcacaggtccacgacggccggcgcctgctggtcctcagcaacgacggcgacagcccggccgccatcgcccgcctgttgaacgcccgtggcttcggcgccagtcgcctgagcgtgctggaacacctcggcgggccgctcgagcgccgtctcgacggcctcgccggcgactggtcgctgccgcgcgccgccgatctcaacctggtggcggtggaatgccgcgccggcgccggcgccgtgcgcctgccgctgaccccgggcctggccgacgaggcctatcgccacgacggccagttgaccaagcgcgacgtccgcgccgtgaccctggcgcgcctggcgccctgccccggcgagctgctctgggacgtcggcgccggttgcggctccatcggcatcgaatggatgcgcgcgcaccccagttgccgggcgatcgccatcgaagccaacgacgagcgccaggaacatatccgccacaaccgcgacgccctcggcgtaccgtccctgcacctggtcgccggcagcgccccggaggcgctgctggaactgcccgagccggacgccatcttcatcggcggcggggtcaccgccgagggcgtgctggaaacctgctgggagcgcctgcggcccggcggccgcctgctcgccaacgcggtcaccctgcagagcgaacgggtgctgctcgactggcagcaacgcctggggggcgacctcacccgcctcggcgtcgcccacgcgcgaccgctgggcggtttcgatacctggcgccaggccttgccgatcaccctgctggaattgcgcaaacccgccgccaggaagcctccccgcgatgcgtga

SEQ ID NO: 321072 - DNA, 1101 bp, Pseudomonas aeruginosa
atgcgtgaggaaacccccgagcagcccgcgccgttgcgcagcggctacaccaccggcagttgcgccaccgccaccagcctggcggcggcgcgcctgctgctgggcggcacgatcagcgacgcggtgcagatcgtcctgcccaagggccagcaggtgctgatgcgcctggaattctgccgcgcctgggaaaacggcgcggaagccggcaccctcaaggatgccggcgacgatcccgacgtcacccacggcgccctggtgttcgcccgggtgcgcctgagcgccgagcctggcgtgcgcttccatgccggccccggggtcggtacggtgacccgcccggggctgaccctggcggtcggcgagccggcgatcaatccggtgccgcgacagatgatcgaacgccacctcgcccagctcgccgccgaacggggctacgccggcggcttcgaggtcgccatcggcgtggagggcggcgccgagctggcgctgaagaccatgaacccgcgcctgggcatcctcggcgggctgtcgatcctcggcaccagcggcatcgtccggccgttctcctgctcggcctatatcgcctcgatccatcagggcatcgatgtcgctcgcgccaacggcgtccgtcacatcgccgcctgtaccggcaacgccagcgaggacgccatgcgccggcgctatgcgctgccggagatcgccctgatcgagatgggcgacttcgccggcgcggtgctcaagcacctgcgcagggcgccggtggaaaagctcagcctgtgcggcggcttcggcaagatcagcaagctcgccggcggccacctcgacctgcacagccgccattccagcatcgacctgccgcaattggccggctgggccgccgcgctcggtgccagcaccgcgctacaggacagcatgcgcgccgccaacaccagccagcaggcgctggcccaggcacacgctgaaggcgtggccctgggcgatgcggtctgcgcccacgccctgcgcttcgcccgcggcatcgtgcccaccgaggtggcgctggaagtcttcgccatcgaccgccagggcaacctggtcggccaggcctgcgaggagcgccgatga

SEQ ID NO: 321073 - DNA, 729 bp, Pseudomonas aeruginosa
atgaagcgcctgttgctgctcggcgggatcggtgaggccctggccctcgcccgccggctcggtccggcgcatctctacagcctcgccgggctgggcaaggtgcccggcgacctggcctgccgggtccgggtcggcggctacggcggcgccgaagggctggcggcgttcatcgacgagcagggcttcgacctgctggtggacgccacccacccctacgccgcacggatcagccagaacgccgtgcgcgccgcgcgactggccggagtgccctgctgggcgctgcgccggcccggctggcaggccgggcccggcgacgactggcgcgaggtagccgactggcgcgagctgatcgccgccctcgcacccttccgccgtccgctgttcaccctcggccgcgaaccgctggagcatctcggccaggtcccgccgcaccagcactggaccgtgcgctgcctgcaaggccagccggccgcgccgcgcgccgaggtgatcggcgcgcgcgggccgttcagcctggatggcgaacgggcgttgttcgagcgcctcgcctgcgacgtgctggtgagcaagaacagcggtagccaggccaccgagccgaagctccaggtggcgcgggaaatgggcctgccggtgctggtcctggcacgtccgccgctgccgccggcggaccgcgagttcgccgacggcgaggcgctgctgacggcgatccgcgattgggaaagcgcctga

SEQ ID NO: 321074 - DNA, 570 bp, Pseudomonas aeruginosa
gtgaatcccgtttccctgatcttcctcgccttcgccatgtccaccgatgccttcgccgcggccatcggcaagggctccagcctggatcggccgcgcctgtcggaggcgctgcgcaccgggataatcttcggcgtgatcgaggccatcacccctctggtcggctggctgcttggccaggccgccagccagttcgtcgccgactgggatcactggatcgccttcgtcctgctggtgctgctcggcctgcacatgatccacaacggcctgcgcgcggatcatgcgacggaacaggaaaagcccggccagcattcgttctggattctcgcggtgacggcgctggccaccagcatcgacgcgctggcggtgggcgtcggcctggccttcgtcgatgtcaacatcttcctcgccgccggtgccatcggcctggccaccatgaccatggtcaccctcggcaccatgctcggccgggcgctcggcgcggtgaccggcaagcgcgcggagatggtcggcggggtggtgctgatcctggtcggcgcgaccattctctacgagcatctcagtgcggcgtga

SEQ ID NO: 321075 - DNA, 2157 bp, Pseudomonas aeruginosa
atgccccgcttcagccgtttgcgcaccgagcctttcgccctcggcctatccaccagcctgctgctggtaccgcccgccctcgccgaaaccgaggaagccgccctcgccctgcccagccagttggtcagcgttcgccaggatcccgccgaactcgaccacatcgacctcgccactccggtcagtgccggttcgcgcctgggcctcagcgccctggacaccccggcgagcaccagcagcatcagcggcgaggaagttcgccgacgcaacaaccccagcgtccaggccgccgttacccgcagtcccggcatcagcttcatcggcacccccggagatggcggtaccggcctctcggcgcgcggcttcagcggccatgcgtcggtgatgcaactgttcgacggcacgcgcctgtacaccggcatgggcacggtgaacttccccagcgatccgtggatggtcgagcgcatcgacgtgatccgcggcccggcctcggtgctgtacggcgaaggcgccaccggcgcggtgatcaacgtggtgccgaagaagcctttcgccggcgagatccgcaaccacctgcgcctcggctacggctcctacgacaaccgccagttggccctggacagcggcggctcgctgaccgacagcctcagctaccggctcaacctgaaccagcagcagagccacggctggatcgaccgtggcgactcgcgcaacctgggcatcagcgcggcgctgcgctggcaggccagcgacgatctggccttcaccctcgcccacgactatggcgaccaggagccgatgaacgacttcggcaccccgctggtcggcggcaagtaccacaagcgcctgcgcgagaagaactacaacgtgcgcaacgacgtgcagcgctacaacgaccagtggacccgcctgaccagcgactggagcctttccgacaacgtcaccgcgagcaaccagctgtactacatcaaggcccgccgccactggcgcaacgccgaaacctacgaatgggacgtcccgcgcgaagagctgttgcgcagggactacctgcgcatcagccacgagcaggagcagatcggcgaccgccagaccttcgccttccagcacgccctgttcggcctcgacagccgcaccctggtcggcgccgagtacaaccgcatccgcttccgcctgagcaacaactcgccctataccgatgtcggcggcgactacatcgacccctggcatcccgcgcccggctacttcgaaagccgctcgccctaccggccgcactcgcgcagccagacccgcaccttcgccctgttcgccgagaaccgcctgcagctcaacgagcgcctgtcgctggtgaccggggtgcgccgcgaccagaaccatatcgaccgcgacgacctgcgcgccggcacccgcagcgaccgcagcctgcagggcggcaactggcgcgccgggctggtcttcgcgctgaccccggaactgtcgctgtacggccagtactccaccagcgaggacggcgtgagcaacctgatcaccctcaacgcggcccagcagcagatggacctgacccactcgaagcagaccgaggtcggcctcaagcagctgttcccggacggtcgcggcgaatggaccctggccgcctaccatatcgtcaagaagaagctgctcagcgccaacccgctgccgccgcacgacgcgcagcaggtcggccagcagagttcggacggcctggaggccagcctggaactgaacctggcccaggactggcggctgtcggcgaacgccgcgctggtgcgtgccgaatacgacgacttcgacgaaacgatcgacgggcagacctactcgcgcaacggcaatcgccccaggaacgtgccacggcgcaccgccaacctctggctggacaagtccttcgccgagaccctgcgcgtcggcgccgggctgcgctacgtcgaccggcgctacgccgacgccgccaaccaggccagcctgcccggctacacggtggtcgacgccaacctgagctggcgggtacggccggacctgaccctcggccttgagctgtacaacctgttcgaccgccagtacgccctggctgacaacaacaacggccagcaatggatcatgggccagccgcgctcgttcaacgtcaccgccgacttcagtttctga

SEQ ID NO: 321076 - DNA, 774 bp, Pseudomonas aeruginosa
atgtcgtcccttcacctcgatgccctgcactggtcgcccgacgcctccaccgagttgctgcgcggcgtgcatctggaagtcccggccggcagtttcgtcggcctgatcggccccaacggcagcggcaagaccagcctgctgcgctgcgccttccgctatgcgcgaccgcagcgcggccgggtggtgctcgacggcgacgacctctggcgccagccgccgcgctgggccgcccggcgtatcgcggtggtgttgcaggagttccccgaggacttcggccttgccgtcgaggacgtggtcgccatgggccgcacgccgcacaagggcctgttcgacggccacggcgcggacgaccgccagcgagtccgccaggcgctgctccaggtcggtctcgaagggcgtgccgcgagccccttcgccagcctctccggtggcgagaagcagcgcgccctgctggctcgcgcgctggttcaggagccgcgcctgctgatcctcgacgaaccgaccaaccacctcgacccgcgctaccagctggagcttctgcgcctgctgcgcagcctcggcctgagcaccctggcgagcttccatgacctcaatctggcggcggccttctgcgaccgcctctacgtgctcgacggcggccgcatcgtcgcccagggcacgccgaccgaggtgctcgacgccgacctgctgtggcgggtattcggcgtccgcgccctggtcgaccgccaccccctcgccgaccacccgcgcctgacctggattacccaagcatga

SEQ ID NO: 321077 - DNA, 972 bp, Pseudomonas aeruginosa
atgaagcacccgatcctgcaccacctgctgctcggcgccctgctcgcctgcgccgatgccgcgctggccgagcgctacccgctcagcgtgcgcagctgcgagcgcgaagtgacgttcgagcgcgcgccgtcgcgcgcggtcagccacgacatcaacctcaccgagatgatggtcgccctcggtctgcagacgcgcatggtcggctataccggcatcagcggctggtggaagaatgccgatcccggattgatcgccgcactcaagccgctgcccgagctggtggcgcgctaccccacggcggaaaccctgctcgatgtcgacgccgacttcttcttcgccggttggggctacggcatgcgcgtcggcggcgacctcactccggccagcctggagccgctgggggtgaaggtctacgagctgagcgaatcctgcgcgcagatcggcgagccgcgccgcgccagcctcgacgagctgtaccgcgacctgcgcaacctgggacggatcttcgacgtcgaaccgcgcgccgagcgcctggtcgccagcctccaggcacgcatcgagcgcgcccgcgccggcatcccggcgaacaccgaggcgccgcgggtgttcctctacgacagcggcgaggaccgccccttcacctctggccgcctgggcatgccgcaggcgctgatcgaggccgccggcggccgcagcgtgaccgacgacgtggcggccagttggacccaggccaactgggaaagcgtggtcgcccgcgatccgcaggtcatcgtcatcgtcgactacggcgagaccagcgccgcgcagaagcagcgcttcctcgaagagaacccggcgctgcgcagcctgaccgcgatccgcgagcgacgcttcatcgtcctgccctataaccaggccacgccgggcatcggcaacgccgcggcgatagaaaccctggtcgccggcctccaccctcgggcgccacgtccatga

SEQ ID NO: 321078 - DNA, 1032 bp, Pseudomonas aeruginosa
atgaccctgttccgcagccctcgcgcctattgcctgttgctgggcagcctggtcatgttgctcggcctgtcctgcgtggtcgccctcggcttcggtccggcgcgactggacagcggcctggtcggccgcatcgtcctccagcgcctgttcggcgtggcggcggagcccggtgcctggagcgccggccaggagcacatcgtctggctgatccgcgccccacgggtactgctcggcgcctgcgtcggcgccggcctggcgctggtgggagcggccctgcaggcggtcacgcgcaatccgctggccgatccgcacctgctcggcgccacctccggcgcgaccctcggcgcggtgttggtggtgctctacatcggcgaggtgatcggcctgctgaccctgccgctggcggccttcctcggcgccctcggcagcatgctgctggtgctcggcgtggccagtcgcggcggccgcctgggcagcgaccggctgttgctggcgggggtcgcggtgtcgttcgtgctcctggcgctggccaacctgctgctgttcctcggcgaccaccgcgccgcctcctctgtgctgttctggatgctcggcggcctcggcctggcgcgctggtcgttgatctggctgccggcgctgtgcgtggccggcggcctgctggtactgctcgggctgggccgtgcgctgaacgcgctgatggccggcgaacagaccgccgtgaccctcggcctggacgcccgtcgcgtacgcctgtgggtcttcgtctgctgctcgctgctgaccggcgtgctggtctcggtgagcggcgccatcggcttcgtcggtctcatgctgccgcacgccgcgcgcctgctggtgggtgccgagcaccgccgactgctgccggtgtgcgccctgctcggcgcgctgttcctggtctggatggatgtcgccgcgcgcaccctgatcgccccccaggacctgcccatcggcatcgccaccgcggccatcggcgggctgttcttcattctcctgctgcgtcgccgcagctga

SEQ ID NO: 321079 - DNA, 867 bp, Pseudomonas aeruginosa
atgttgaaacccgacatcactgccttcttcgacccggccacctccacctacagctacgtggtgcgcgacccgtccagccgcgcctgcgccatcgtcgacccggtgctcgactacgacccggccgccgggcgcaccagccatgccagcgccgaacgcctgatcgcccatgttcgccagcacgacctgcaggtggaatggctgctggagacccacgtgcacgccgaccacctgtcggcggccatcttcctgcagcgcgaactgggcgggtgcctggccatcggcgcgcgaatcacccaggtgcaggcgaaattctccggcctgttcaacctcggcgaggcgttcccggtggacggccgccagttcgagcacctgttcgaggacggcgagtcgttccgcatcggcgccctggaatgccgcgcgctgcataccccggggcataccccggcgtgcatgacctacctggtcggcgacagcgccttcgtcggcgataccctgttcatgcccgactacggcaccgcccgctgcgatttccccggcggcgacgcgcgccagctgtatcgctcgatccagcgcctgttcgcgctacccgacgcgacccgcctgttcatgtgccacgactacacggctcccggccgcgacgagcaccgctgcgaaaccagcgtcggcgagcagcgccggcacaacgtgcacgtccgcgaaggcgtcgacgaggaggcgttcgtcgccatgcgccagcagcgcgatgccaccctcggcatgccaaccctgatgctgccggcgatccaggtcaacatgcgcggcggcaacctgccgccggtggaaggcaacggggtgcgttacctgaagatcccgctggatctgttctga

SEQ ID NO: 321080 - DNA, 594 bp, Pseudomonas aeruginosa
atgcaatccctcgtgcccttcctgctgttcgccgtcgtcgcctcgatcacccccggaccgaccaacatcctggtcctgagcaacagccagcgccacggcctggccgccgcctggccgatcgtgctcggcgcctgcgcggcggtggcggcgctgatcctgctgctcgggctcggcctgggcgagttgctgcgacgccatccgctgctccagcaggggctcgcctggctcggcgtcggctggctcagctacctggcctggagcctgttccgcagcgcgggcggcatcgacggcgcggagccgccgcggcgcctcggcgtgctcggcggcgcggcgttgcaactggtcaatcccaaggcctggatgatggccctcgccgcgctggcactgttcgccggggaaggcgccggacaggccgggcggatcggcctgctggcattgctgttcttcctggtttcgctgccgtgcctggccagttgggccttgctcggcgtcggcagcgcgcggctgctgcgctcgccgtcgctgatgaaacgcttcaaccaaggcatggcgctgttgttgctggcatcggcctgggccgccctgctgctctga

SEQ ID NO: 321081 - DNA, 837 bp, Pseudomonas aeruginosa
atggggagccgagactggatcgacctggcccgcgacgccgagaccgggatcgagaccctgcgcgcccatttcgagggccacgcctacgatccgcactggcacgacagctacctgatcggctacaccgagatcggcgtgcagcaattcaactgccgccgacgccgacacgacagcaccgccggccaggtattcctggtcgaaccgggggagatccacgatggtcgcgcgccgatcgccggcggcttcacctactcgatgctgtacctgcagccggactggctgcggcgcgaactgcgggcgaccttcgacgatgcgcccagcgaccgcgaccccggcttccacgccaacctcaccgaagacccgcgcctgaccctggccatcgcccaggccttccgcgtcctgcatggccgcgagctgcgactgctgcggcagaccgccctggagctggtgctggagcggctgcgcgtgcacctcggctggcgcgaggcgaagccattcgatccgcgcctgccgctggtggcgcagaaagcccgcgactacctgcatgcgcacttctaccaggacatcggcctggacgagctggccagcgcctgcggcaccgaccgcttccgcctgaaccgtgcattcaaggccgcctacggcttgccaccctacgcctacctggtccagttgcgcctggccaaggcgcggcagatgctcgctgtcggcgggcaaccggcggacctcgccagcgctctcggtttcgccgaccagagccatctcggccgctggttccggcgcgcctacgggatgaccccggcggcctaccgccggcagtgcacccagcttccagactga

SEQ ID NO: 321082 - DNA, 774 bp, Pseudomonas aeruginosa
atggtcgaccactccatcaaaggcaagaccgtcctcatcaccggcggcgccaagaacctgggcgggctgatcgcccgtgatctcgccgcccacggcgcgaaggcgatcgccatccactacaacagcgccgcgagcaaggccgatgccgacgccaccgtcgccgcgctgcaggcagccggagccaaggcggtagcgctgcagggcgatctcaccagcgccgcggccatggaaaagctgttcgccgacgccatcgccgcggtgggcaagccggacatcgccatcaacaccgtcggcaaggtgctgaagaaacccatcaccgagatcagcgagaccgaatacgacgagatgagcgcggtcaattccaagtctgcgttcttcttcctgcgcgaagccggcaagcacgtcaacgataacggcaagatctgcaccctggtgacctccctgcttggcgcctataccccgtactacgccgcctatgccggcaccaaggcgccggtggagcacttcacccgtgccgcttccaaggagttcggcgcgcgcggcatctcggtcaccgcggtcggcccgggccccatggacacgcccttcttctaccccgccgaaggtgccgatgcggtggactacctgaagaacgccgcggccttgtcgccgttctccaaaaccggcctgaccgacatcgacgacgtggtgccgttcatccgccacctggtcagcgaaggctggtggatcaccggccagaccatcctcatcaacggcggcttctcgaccaagtga

SEQ ID NO: 321083 - DNA, 258 bp, Pseudomonas aeruginosa
atgcacgtgaccctggtaatcgccggcggcatcgtcctgctcggcctgttcctgctcttcggcaaactctgggatgccgggccggcgctcgctgccggcctgttcctgccgacctggctggccgtcgcgctggtcaacctgtgggtcggcgtccagcacgccggctacggcttgcgcgaagaactgccgatcctgctgctggtctttctggtcccggcggcactggcaggcgtggcgatctggctggcgccgcgctag

SEQ ID NO: 321084 - DNA, 1638 bp, Pseudomonas aeruginosa
atgctgcaatggttcgctaacctgtcgttccgcaggaaaatcgccctgccgatcctcctgctcgcggtgcttctgctgctggtgggcgcgctcggcgtgcatggcatcgcccagctgaacgaatccaaccagcgcctgggcaagcgttttctccccggcatcgccctgctgctcaacgccgaccgtgatctctaccaggccttcgtcgccgagcgcagcctgctcgagggccacctgagcgccgagcagatcgccggcctgaggaacgatcacgcggaaaacctgcagcaggccctggatcgggtgcgccagtacgcggcgatgcagccgggcgaggcggaactggccaaggtcgccgagttcgagcgcggctatgccctctggagcgcgacctcggcgcgggtgctgagcctggcggccagcgatccgagcgccgcggcgcagctcagctacggtgacagcgatcgccagttcggggcgatgcgcgaggtgatcaaccagctcgacgagatggaagaggcggccgcggccgctgacggcgaggcgtcctccgcgctgggcgagcgccaccgctggcagcaggtggcgctggtggcgttcggcctgctggtgtgcctgtcgctggtgctggtgttccccggcctggtgacccgtccgttgcagcgtctgctgcaacgcctggaagagatcgccaacggcgatggcgacctgcgcgtgcgcctggaggtcacttcgcgcgacgaacccggccgcctcggcagcgccttcaacgccttcctcgacaagttgcagccgctgatccgcgaggtcggccgggtcaccggcgaggtcgccgattcagccggttcgctggccggcatgaccgccgccaacgatcgtctgatcaacagcgagcacgcatcggtggaccaggtcagcaccgccgcgacgcagatgagcagcgccgtccacgaggtggcgcgcaatgcccagagcgccgcgcaggtggccgatgacgcccgccggcaggcgcgcgagggcgccaacgtggtggaagcgaccatcgaggtgatccgccagttggcgcaggaagtggagagcagttccgagagcatccagcaactggcccaggaaaccgccagcatcgacgcggtgctgacggtgatcaagggcatcgccgaacagaccaacctgctcgccctcaacgccgccatcgaagccgcgcgggctggcgagcagggtcgcggtttcgccgtggtggccgacgaggtgcgggcgctggcggcgcgtacccaggattcgaccaaggacatccaggcgcgcatcgagcgcctccaggccggggtgcagaacgccgtgcgggccatgcagtcgggcagcctcaaggcgcgcgacagcgtcgagcgcgccgccggggtcgacggcgtgctggccgccaccggcgacgcggtggggcggatcaacgacctcgccgcgcagatcgcctcggcctgcgaggagcagagccgggtaatcgacgaaatcgcccgcaacatcagcgaggtgcgcgagctttccgcccaggcggcggaacattcggagcagggtaccggggccagccgccggctgtccgagctgtcctcggaactggcgcggctggtcggccgtttccgcgtctga

SEQ ID NO: 321085 - DNA, 990 bp, Pseudomonas aeruginosa
atgatgacaacctttcgttgtcacctcggtaagcccgtgaaactccaccagttgcaagccctggtcgccagtgccgacgcgggcggcatccgcgccgccgcccgcgtcctggggatttcccaggcggccgtgacccgcgcgctgcgcgaactggaaaccgaacagcatctgccgctgttcgtccgcacgcccagcggcctgaccttcaccgaatacggcaaggcgctgctgatccacgcccggctggtgctcaagcaactggagcacgcgcaggtcgaactcgaccacctgcgtggccaggccagcggccggctgtgcatcggggtgacgccttgggtggcgctgaccttcctctcggaggcggtgcaggcgttccgcgagcgcatgccggaggtgcgcctggagcttttcgaaagcctgatggcggtggcccagccattgcttcgcgacggcagcatggatttcgccatcggcccgctgcacggcgcccaggcggcccaggagttcgcctgcgagaagctgctcgactacgacaccgcggtgctggtccgccaggggcatccgctggcgggttgcggctcgatccacgagctgctggaacaggactgggcgttgaactacaccggcgacggccacgacgccctgatgcgcgagttgttctggcgccacggcgccttgatcgacgagcggcgcatcgtccgcgcgcactccgtggcgatcctgcagaccctggtggagcaggccgacatgtgcacctgggtgccggcgatcataggcgccgccccgccgttgctcggccgggtggtgccgctggcgctgcgggaaaccttcgagccacgacggctgggcatcatcacccggcgcggcggagccctcagcaatccggcgcaatgcttcgtcgagtgcctgctgcaggcgatccgccgccacgcccgctcggcgaagaaggatgaccggcgcctgttcgaaaccctgcgcctgctagtctga

SEQ ID NO: 321086 - DNA, 1170 bp, Pseudomonas aeruginosa
atgaccgagcctgccgtcctgcccgccatcgcggcgctgcgggaagagatggttaccttgcgccgccatatccatgcccacccggagttgggtttcgaggaacggcgaaccgccgcgctggtcgccgaatgcctggaggcctggggctaccaggtcagccgtggggtgggtcgcaccggcgtggtcggcaccctgtgccgcggcgagggcccagcgctgggcctgcgcgccgacatggacgcgctgccgatccaggaagccaccggcctgccctacgccagccaggtggacggcgtgatgcacgcctgcggccacgacggccacaccgcgatgctcctcgccgcggccaggcacctggtcgagtcgccgcactggcgcggcaccctgcaactgatcttccagcctgccgaagagggcctcggcggtgcccgcgcgatgctcgacgacgggctgctggagcgcttcccctgcgacgccatcttcgccatgcacaacgtcccgggataccccgtcggccacctgggcttccatcccggccccttcatggcctcggccgataccgtggtcatccgcgtgatcggcagtggcggccacggcgcggtgccgcagcgcaccgtcgacccggtggtggtctgctccgccatcgtgctggccttgcagagcatcgtctcgcgcaacgtcgacccgcaggacaccgcgatcgtcagcgtcggcgcgatccatgccgggacggtctccaacgtgatcccggccagcgccgaaatgatcctcagcgtccgggccctgaccgcggaaacccgtgccctgctggagcgccgcatcggcgaactggcccgcggccaggccgccagcttcggcgcgcgggcggaggtcgactaccggcattgccatccggtgctggtcaaccatcccgggcagaccgcgttcgcccgcgaggtggcccgcgactggctgggcgaggaatgcctgatcgacggactgcggccgttcaccgccagcgaggatttcgccttcatcctcgaacgctgtcccggcagctacctggtgatcggcaatggccagggcgagagcggctgccagttgcacaaccccggctacgacttcaacgacgactgcctggccgtcggcgccagctactgggtgcgactggccgagcgcttcctggcctga

SEQ ID NO: 321087 - DNA, 786 bp, Pseudomonas aeruginosa
atgacaagaaccctcggcagcatcgccctctccctcctcctcgccgcaccggccggcgccgccgactggaccggcaaggtcctgcgcctgggcgtcgacccgacctacccgccgctcgaatacaagcagccggacggccgcctggcaggcttcggcatcgagatcggcgaagccctctgcgcggagctgcgagcccgctgcgaatgggtcgaaagcaactgggacggcatcatcccggcgctgctgtcgcgcaagatcgacgccatcgtctcgtcgatgaccatcacgccgaaacgcgcacagcacatcgccttcaccgaccgcgtctccaacgcgccgagccgcctggtggtacgccgtggctcggcgctcctgcccgacgccgagagcctgcgcggcaagcgcgtgggggtcggccagggctccaaccaggaggcctacgccaaggccgaatgggccgccaagggggtgcgggtcgtctcctaccagaaccaggaccaggtctacgccgacctcgtcatgggccgcctcgacgcctcgctgcaaggcgcggtgcaggccagctacggcttcctcgacaagccggtcggcaaggatttcgaactggccggagcggtgctggacgaccctcgctacttcggggtcggcgacggcatcggcctgcgcaaggaggacgtggcgctgcgcgaggacctgaacaaggcgctggcgacgatccgcgccaacggaacctacgcgcgaatcaacgcccgctacttcgatttcgacctctacggcacgccctga

SEQ ID NO: 321088 - DNA, 690 bp, Pseudomonas aeruginosa
atgttcctcgacggcttcggcccgcagatactcgccggcaccctggtgaccctgaaactggcgctgggctccctgctcggcgccgtgctcatcggcctcctcggcgccagcgccaagctcgccgccaaccgcccgctgcgcgccctggccagcggctatacgacgctgatccgcagcgtccccgacctggtcatcatgctgttgctgttcttcagcctgcagatcctcctcaaccgcgtcaccgacgccctcggcatcggccaggtcgacatcgacccgttcgccgccggctgcgtcaccctggcgttcatctatggcgcctacttcacggaaaccttccgcggcgccttccaggcggtcccggccggccaggtcgaagccgcgcaagcctacggcatggggcgctggcgagtgttccgccgggtactcctgccgcagatgctgcgctacgccctgccgggcatcggcaacaactggcaggtgctggtcaagtccaccgcgctggtctcgatcatcggtctcggcgacctggtcaaggccacccaggacgccggcaaaggcaccctgcagttcttccacttcaccctggtctgcgggctgatctacctggccatcaccgcaatctccaacgccgcgctgctgtggctggagcggcgcagctcgctgggcgtcaggaggccgctgccatga

SEQ ID NO: 321089 - DNA, 714 bp, Pseudomonas aeruginosa
atgaacgcggtactcgacgaatactggcaggcctacctgtggaccgacggcctgcaactgaccggactggcgatgaccctgtggctgctgatcctcgccgtggcgcttggcttcctgctggccatcccgctggcagtggcgcggacctgcggcaacccgctgctgcgctacccggtctggctctacacctacgtgttccgcggcaccccgctgtacatccagttgctgttcttctacaccggcgtctacagcctgaatgccatacgcgcccaggactttctcaacgcgttcttccgcgacggcttcaactgcacggtgctggccttcgtcctcaacacctgcgcctacatgacggaaatcttcgccggcgcgatcaggaacacgccccacggcgaagtggaagcggcgcgcgcctacggcatgggcggcttcaccctctaccggcgcatcgtcctgccctcggcgctgcgccgggcactgccgtacttcagcaacgaagtgatcctgatgctgcactccacctcggtggcgttcaccgccaccgtgccggacctgctcaaggtggcccgcgacgtcaattccgccacctatgcgccgttcctgtccttcggcatcgccggcgcgctctacgccggcaccgccttcctgctgatctggctgttccgccgcggcgagctgcgctggctggcctacctcagaccgcaaacccactga

SEQ ID NO: 321090 - DNA, 768 bp, Pseudomonas aeruginosa
atgtacagcctgcaggtcgaagacatccacaagcgctacggcagccatgaggtgctcaggggcgtttcgctcagggccggcaagggagacgtgatcagcatcatcggctcctccggctcgggcaagagcaccttcctgcgctgcgtcaacttcctggaaaagccctgtgccgggcgcatccgcgtcggcgacgaggaactgcgcacccgtcccggagccctgggcgagctgcgcgccgccgatccccggcagttgcagaggatccgcagccggctggcgatggtcttccagcatttcaacctgtggagccacctgacggtgctggagaacgtggtcgagtgcccggtcaacgtcctgagaatgaaccgcgacgacgccgtggcccgcgcgcgccactacctggccaaggtcggcctggcggagaaggtcgaacggcagtatccctgcgaactctccggcggccagcaacagcgcgtggcgatcgcccgcgccctggccatggagccgcaggtgatgctgttcgacgaaccgacctcggcgctcgatccggaactggtcggcgaagtgctgaaagtcatgcagcagttggccgaggaaggtcgcaccatggtcctggtcacccacgagatggccttcgcccgccaggtttccagccatgtgatcttcctccaccagggcgtgatcgaagagcaagggacgccggaccaggtgttcggcgcgccgcgcagcgagcgcctgcgccagttcctcgccggcaacctgaaatga

SEQ ID NO: 321091 - DNA, 1332 bp, Pseudomonas aeruginosa
atgccccgttcgatcgtcatcgtccacggctggagcgacgattcgaagtcgttccgccgcctcgccgagcagctggaagcctggttcggcagcgcgccgacgcagatccgcctcgccgactggatctccctgcaggacgacgtcacctacgccgacctcgccgccgccctggatcgcgcctggaccgcccaggggctgtcgcgggcaccgcgcacggttgacgtggtggtgcacagcaccggcgccctggtgctgcgcgactggctgacccgccacttcgaccccgccagcgcgccggtcaagcgcttcctgatgctcgccccggccaacttcggctcgccgctggcgcacaagggacgctccttcatcggtcgcgtactgaaaggctggaaccgcttcgtcgggcagaccggcacccaggtgctgaagggactggagctgggctcgccgtactcctggcaactcgccgagcgcgacctgttcggcgccgaggcctggtacggcgccggccgcctgctcgccacggtgctggtgggcaatgccggctacagcggcgtcgaagccatcgccaacgaagccggcggcgacggcacggtgcggatcgccacggcgaacctcaacgcctgccgcctgagcctcgaactggatgtccgccagcgcgccaggcccggctggcgcctggaagaatcgcgcggcgagatcgccttcgccatcgtcgacggcgagaaccacgccagcgtggcgctgaaggaccgcggaccgaagaacccgcataccctggagctgatccgcgccgcgctggaggtcgaggacgccgattaccggagcagcggcgcaagcttcccctggcagcgccgcatcgatcagctcgaccccggcatcgagcgccgctcgccgcgctacctgaacctggtcagccacgtctgcgacgacctcgaccaggaggtgcgcgactacttcatccagttcttccgcaagctgaacagcgaccggcgtttcgaacagcgcttctacgagcaggtcatcgccgacgtccatccctacgaggacaaccccgcctaccgctcgctgtacctgtcgatcgagtccctcgacgacctgctcgccggtttcgccgtggacaccctgtcgctcagcgtgtcggcccagccgccgttcgatccgccgcgccagccggtcggctataccgcggtgggccccggcgacagcgaaggcctggcaattccgctggcgcaggtgccgcgcttcctcgcagcccaccgcaccctgctgctgcgcatccgcctgacgcgcctggtggacagcggcgtattcgtcttcaggaacccctga

SEQ ID NO: 321092 - DNA, 1509 bp, Pseudomonas aeruginosa
atgaagaagggagcgacgcttttcgccgtcctctgggcggtactcggcctgggcctgctggtcggtttgccggtggccattcatttcattctcggccagtacgacgaggccggcttcagcgggtcgcaactggtcttcgaggaacagggccattcctacctggcgttcaccctcgacgactatcgcgccaacgaagtggacaacggcgtggtacacggcagcagccgcagctatgcccaggtggtcgacctggaggacggcagcctgcgctggagcatgcgcctggatgccgacaacgagcgcggcgacgactggggttccggcgaactgctgggccagtcgtcgcgctacctgttcttcctgcgcaacgaactctacgtactcgaccggcgcgacgccgcccctgcgctggcgttcgacgagctggagcggcgcactggcggcctgccgttgaagtcggcgccctgggggaaggacgcctatcgctacgacgaaggccggggcggattgctgatgctcgcgctggacggccgcgtctggttcctcgacggcgacagcctggccctgcgcgaagctccggaagtcgatgccgcgcggtatttccacggcgacccgccgccgccggcgaatgccgggatcgactggcaggcgccgggcctgacgcgcctgcccgacggacgcctgctgatcctcgccagcgatcacgaggcccgagcgctggagcgtggcgaggcgctgccggcagcgaaccaacgggcgcgacgccagcgcctgtcactgggcaccctggattggcggtcgccggcggagaatcgactgcgtccgctgctcgacgcggccttcctgcaggctggcctgctgcccgatccagccgctgccgaagagccgcagcggctgctcgatcgaccgtccgagcggcagcgccagcatccgtcgctgccgcccgagccgcagccgccggaagagttcgacgagcgcgtggagcgttttcccagtacccgtgcgttccttgcggcgcgtgacgcctaccgccaggaacggcgacgctggattgccgcgcacgatgcctggcgggaacgggtcgccgacctggaggcggcggcggatgccgagtaccgtcgccggcgcgacgagcagacgcgcgaggaggcgttgtaccgtcgctatgcctcggcgctgccgggcggcgattccaggttggcgcgccgtccctggcgagtcgacggcaactggctggtgctgcaccggcgcagcctggccgagcgtagcgagctgctgctcagctcggtgtctggcgacggcagcttgctctggaccctggagctgctcatcgagcgtcccgagcggctgttccgcctggatgcccacaacctgcttctcagcggccgtggagaggaaggcgggcggttggtgcgggtcgatctgcgccggggcagcggcatcgtccatcgcctcgggcgcggcggcgcgccattgcagcgggtcgagtggcccgaaggccaaccgtga

SEQ ID NO: 321093 - DNA, 615 bp, Pseudomonas aeruginosa
atgacagagttgctagctttcctgaccatcactgtgcttgcggtgatcagccccggcgccgatttcgccatggtctcgcgcaacagcctgctgtattcccgccgcgccggcctgctcaccgcgctgggcatcggcgcgggggtaacggtacatgtcggctacagcatcctcggcgtcggcgtgctggtgcgcgagtcgctggcgctgttcaccgcgctgaagctggcgggcgccgcctacctggtgttcctcggcctgcgcatgctgctggcgcgagaggactcggtggcggaggaggcggcgggcggcgccggggtttcgtcctgggcgatgttgcgcagcggcttcctgaccaatgcgctcaatccgaagacctgcctgttcgtggtcagcctgttcatgcaggtgatcgatccgcataccgcgttgccggcgcaactgggctacggggccttcatcgcgctcgcccacgtggcctggttcggcctggtcgcctgctttctctcgagcccggcggtgcgcggccggctcctgcgtttccgccggcgcatcgaccagttcttcggcgccctgctggtcggtttcggcgtcctgctgggggcgaaaagcccatga

SEQ ID NO: 321094 - DNA, 927 bp, Pseudomonas aeruginosa
atgaatactgacaatcatggtgaggaaaactcaccattcaggcgccgtcgcctgccctcgctgaacgccctgcgctgcttcgaggccgccgcccgcctggagaacttttcccgtgccgccgaggccctgtgcctgacccacggtgccatcagccgcgccgtgcggaccctggaggaggaactcggttgtgcgctcttcgaacgccgcggccagcgggttttcctcagcgaggccggcaggcgcctgctcgccggcaccggcccggccctcgacctgatcgagcgcaccggcgagaccctgcgcgcggaggccggccccaccgcgctggtgctgtcctgcgaaccgaccttgctgatgcgctggctgatcccgcggatcgccggattcatgcaggaacagccacgactgtcgatccagctggtcgccggcggcgggccgttcgccttcggccgcggcatcgacctggcgatccgccgcaacgacttcccctggccgcccggcagccatgcccactggctgttcgacgagcaggtcgggccggtctgccgggcgagcgacgtcgaacggcatttccacctcgatgcaggcccgcccgggcttcgcgccgtcgcaccgcgcctgcacacggcgacccgcccgcaagcctggaacacctggacccgtctcgccggacaggcgccagcgacgaccgaagggcagcgcttcgagcacttctacctgagcctgcaggcggccggcgccggactcggcgtagccatcggcccctggcaactggtgcgcgacgatctgtccgccggcctgctggcggcgccgctgggattcctcgccgacggcagcagctatcacctgctgaccccgcgaccgttgcaggccggagagcctgccacgctgctgctggaatggctgcgccgcagcgcggcggcctga

SEQ ID NO: 321095 - DNA, 591 bp, Pseudomonas aeruginosa
atggcaacgcgaggcaggccacgggcattcgacagggacaccgccctgcagcgagccatggacgtgttctgggtgcgtggctacgaaggcgcttcgctggcggccctgaccgaggcgatggaaatcaggccgcccagcctgtatgccgccttcggcagcaaggaagggctgttccgcgaagccctggcccactatctcggccagcacggccgctatcgccgggatgtcctcgatggcgcgccgagcgcccgcgagggcgtggccgagctgctccgcgagaccgtcgcgcgcttctgttccgacgagttcccgcgcggttgcctggtggtgctcgcggcgctgaccggaaccccggaaagcgaggcggtgcgggacgcgttgagcgccgagcgcggcgagtcgatccgcctgttccgtgagcgcatgcggcgcggcatcgctgacggcgacctggcggcggacaccgacgtggaggagttggcgaccttctatgccaccgtgctgttcggcctcagcgtgcaggccaaggaccgggtgccttgcgagcgcctgctggcggtggtcgaacgggcgctgcgcgcctggccctga

SEQ ID NO: 321096 - DNA, 1110 bp, Pseudomonas aeruginosa
atgtccaacctgctcctctccccgctcgccgtaggcaacctggccttgcgcaaccgcatcgtcatggcgccgatgacccgctcccgggcgcaacagccgggcgacgtgccgaccgccctgaacgctctctactatgcgcagcgcgccggcgccgggctgatcgtcagcgagggcacgcagatttcccgcctcggccagggctacgcctacacccccggtatctacagcgaggcgcaactggccggctggcgccaggtcaccgaggcggtgcacgccgccggcggactgatcgccgcgcagctctggcatgtcgggcgcatgtcgcatcgctcgctgcaggccggcggcgaggcgccgatcgcgccctcgccgatccaggccaaggcccaggtgttcatcgccgatggccagggcggcggatccatggcgccggccgacgcgccgcgggaaatgaccctggaagacatccgccgggtccgcgacgaattcgtccgcgccgcgcgcaacgcgctcgacgccggcttcgacctggtcgagctgcatggcgccaatggctacctaatcgaccagttcctcgccagcgccagcaaccggcgcagcgatgcctacggcggtagcctggagaaccgcgcgcggttcctgctggagatcgtcgacgcgctggtcgccgcggtcggtgccgagcgcgtcggcctgcgcctgtcgccctggggcacgatcaacgacatgcacgacgacgagccggaagcgatgaccctttaccttgccgaagccctgcagcgacgcggcatcgcctacctgcacctggccgagtgggaatggagcggcggcccggcctacccgcaaggcttccgcgagcgcctgcgcgaacgcttccgcgcgccgctgatcgtctgcggcaactacgacgccgagcgtgccgaagcgatactccaggccggactggccgacgcggtggcgatcggccggccgttcatcgccaaccccgacctggtcgagcggatccgtctcggcgcgccgctggccgaggccaaccaggcgcggttctacggtggcgacgctgccggctacaccgattacccgaccctcggccagtccgctacggcctga

SEQ ID NO: 321097 - DNA, 1179 bp, Pseudomonas aeruginosa
gtgctattgccgatcctcctgctggccgccgccggcttcaccatcctgaccaccgagttcgtcatcgtcggcctgctcccggcgcttgccgcagacctccaggtcagcgtcgcccaggccggcctgctggtcagcctgttcgccttcagcgtcgccgccttcggtccgttcctcaccgccgcgctggcgggcgtcgaacgcaagcggctgttcgtcgcctgcctgctgctgttcgccgcggccaatgcgctggccgccgtggccggcgatatctggacgatggccgtggcgcgcttcgtcccggccctggcgctcccggtgttctgggccatggccagcgaaaccgccgcgcacctggccggcccctcgcgcgaagggcgcgccgtggcgctggtgttcttcggcatcgtcgccgccaccgtgcttggcattcccatcggcacgctgatcgccgacgcctggggttggcgcctggcattcgccgcactcgccgcgctggccctggccaaggcgctgctgctggccgcctggctgccgcgcattcccggacggccgggcatctcgctgcgcagccaggcgagcgtgttgcgccaaccgctggtgctcggccacctgttgctgtcgctgctggtcttcaccggcatgttcaccccctacacctacctggccgacatcctccagcgcctggccggcttcagcggttcgctggtcggctggacgctgatgggcttcggcgcggtaggcctgctcggcaactggctcggcgggcgcctggtggatcgcagcccgctgggcgcaaccctgctgttcgtcctgctgatggcgctgggcatgctcgccctggtgccgaccctcggcaacgcctggctgctcgccgccaccctggcgacctggggcgtggcccaggcagcactgttcatcgtcggccaggtgcgggtgatgaagtccgcgccgcgggccccggcgttcgccgcctcgctgaacatctccgcctgcaacgccgggatcggcatcggcgccctcgcgggcagccgggtgatcgacggcagcggcctggcgccgctcggcgaggtcggcgcgctggtctgcctggcggcgatggccgtggccctgctgctgatgctggcgccacgccaagctgccaccgagccgtccctcggcggccacatccctcactga

SEQ ID NO: 321098 - DNA, 960 bp, Pseudomonas aeruginosa
atgatcctcgatagactctgccgcggcctcctggccggcatcgccctgaccttctccctgggcggcttcgccgccgaggaattccccgtcccgaatggcttcgaaagcgcctaccgggaagtcgacggcgtgaagctgcactacgtgaaaggcggccaggggccgctggtgatgctggtacacggtttcggccagacctggtacgaatggcaccaactgatgccggaactggccaagcgcttcaccgtgatcgcgccggacctgcccggcctcggccagtccgagccgccgaagaccggctatagcggcgaacaggtcgccgtctacctgcacaagctggcccggcaattcagcccggatcgcccgttcgacctggtggcccacgacatcggtatctggaacacctacccgatggtggtgaagaaccaggccgacatcgcccgcctggtgtacatggaagcgccgatcccggacgcgcggatctaccgcttcccggccttcaccgcccagggcgagtcgctggtctggcacttcagtttcttcgccgccgacgaccgcctggcggaaaccctgattgccggcaaggaacgcttcttcctcgagcacttcatcaagtcccattccagcaacaccgaggtgttcagcgagcgcctgctggatctgtacgccaggtcgtacgccaagccgcacagcctgaacgcctcgttcgagtactaccgcgcgttgaacgagagcgtgcggcagaacgccgaactggcgaagacccgcctgcagatgccaaccatgaccctcgccggcggcggccacggcggcatgggcacgttccagctggagcagatgaaagcctatgcggacgacgtcgaaggccatgtcctgcccggctgcggccactggctgccggaagagtgcgccgcgccgatgaatcgcctggtgatcgacttcctcagccgcggtcgctga

SEQ ID NO: 321099 - DNA, 132 bp, Pseudomonas aeruginosa
atgagtagtgagcacgatggcaaggaccaggacgacctgttctccccgttgccttacctgctggtttccggcgctgtcgtgctcatgaccctgctgctgcgctgcctgttctgcccgggcgagcagttctga

SEQ ID NO: 321100 - DNA, 273 bp, Pseudomonas aeruginosa
atggcggaaaagacgcaggatatgcacttgccgtccttgaaagtgcacggcgaagtgttcgaagactatagaaacgaagcgatcgagttcaattacatctgtgtcagcttgctgtcggcaaaacgtcagcggaaagacaacggaatatatttcccgataatgcttgagggtcagccgcgccccgccccaggctctgccggcgtggcgcgagcgccggggcgaaggaaaaaccaacttacaatgatcccgacccggaattattccgccaagtag

SEQ ID NO: 321101 - DNA, 582 bp, Pseudomonas aeruginosa
gtgacgcatccagcgaccgtctacagcctgtccacccgcctgctgcactggagcatggcgttctgtttcatcggcgcgatcgtgctggcctatttcgtcatcggggtgctcggccacgaccacccgcagcgcctgccggtactcaacctgcactgggtgctgggcctgctggtcggcctgctgctggtccctcggatcgtctcgcggctgcgcgggccgcgcctgccagcggtccccggcacgccgctggagcaccgcctggcgcactacgcgcacctgtcgctgtatgccttgatgctggtgatgccgctcaccggctacgtcggcacccgcctgcccaccgacttcggcctgttcgtggtacccagcttcaaggacaccgcgctgttcgcctggatttcgcaaacctggaacctgagctgggaggcgttcgagaagcccttcgacgccgttcaccgcgtggtcggcctgtggctgagcacctcggtggtgctgctccatgcgctcgccgccggctaccaccagtgggtccgccgcgacggcaccctggagcgcatgctcggccgtcgccagcgccgctga

SEQ ID NO: 321102 - DNA, 249 bp, Pseudomonas aeruginosa
atggccagcctgcactgccagcaccgcagctacaccatcaccgccgacgtcgtcgagcatccgggcattcccacgccctgggccggcggctgccacatcaccgatcccgaaggccacaccagcaagcgcatcgccctgcccgtgcgcttcgccttcctcgccgacctggaaaacgcccagcgcgcctccatcgcccacggcaaatggctggtggaccagcgcctggaccgcggcaaggcgctgttctga

SEQ ID NO: 321103 - DNA, 1530 bp, Pseudomonas aeruginosa
atgaaaacgacgtcctccggaaccccacccgttccacggcctgaagacgagaacctcggtgtcggcgccaacatggcctacggcctgcaacatgtgctgaccatgtatggcggtatcgtcgcggtccccctgatcctcggccaggccgccggcctcgcgcccggcgacatcggcctgctgattgccgcttcgctgttcgccggcggcctggcgaccctgttgcaaaccctcggcgtgccgttcttcggctgtcagttgccgttggtccagggggtgtccttcgctggcgtggcgaccatggtggcgatcatcggcagcggtggcagcggcggcattcccgcagtgctcggcgcggtgatggcggcctcgctgatcgggttgctgatcacgccgatcttctcgcgcatcaccaaattcttcccgccgctggtgaccggcatcgtcatcaccaccatcggcctgaccctgatgccggtcgccgcgcgctgggcgatgggcggcaacagccacgcgccggacttcggcagcatggccaacatcggcctggcggcgatcaccctggtcatcgtgctgctgctgagcaagctcggcagcgcctcgatctcgcgcctgtcgatcctcctggcgatggtcatcggcaccgtcatcgcggtgttcctcggcatggccgacttctccaaggtcaccgaaggcccgctggtggcgtttcccacgccgttccacttcggcatgccgaccttccaggtcgccgcgatcatctcgatgtgcatcgtgatcatggtgaccctggtggaaacctcggcggacatcctcgcggtaggcgagatcatcgacaccaaggtcgactcgcggcgcctgggcaacggcctgcgcgcggacatgttctccagcatgctggcgccgatcttcggctccttcacccagagcgccttcgcccagaacgtcggcctggtggcggtgaccgggatcaagagccgctacgtggtcgccaccggtgggttgttcctggtgatcctcggcctgctgccggtgatgggccgggtgatcgccgcggtgcccaccgccgtgctcggcggcgccggcatcgtgttgttcggcacggtcgccgccagcggcatccgcaccctgtcgaaggtggactaccgcaacaacatgaacctgatcatcgtcgccacttcgatcggcttcggtatgatcccgatcgccgcgccgaccttctacgatcacttccccagttggttcgccaccatcttccattccggcatcagttcctcggcgatcatggcgatcctgctcaacctggcgttcaaccacttcaccgccggcaactccgaccagcagtcggtgttcgtcgccgccagcgagcggaccctgcgctaccaggacatcgccgccctgcacgaaggcgactatttcctcgacggcaagctgtacgacgcccagggcaacgaagtgccgctggccggcgacgacagccatggcgcgccgccgcgacggcgcagcgaaaccgctgaagccggcagcgcctga

SEQ ID NO: 321104 - DNA, 1611 bp, Pseudomonas aeruginosa
atgagcaacaagaacaatctcagatacgcactcggcgccctcgccctctcggtttccgccgcatccctggcggcaccttcggaagcgcaacagttcaccgagttctggacgcccggcaaacccaacccgtcgatctgcaaatcgccgttgctggtcagcaccccgcttggcctgccacgctgcctgcaagccagcaacgtggtcaagcgcctgcagaagctggaggacatcgccagtctcaacgacggcaaccgcgccgccgccacgccgggctaccaggcctccgtcgactacgtgaagcagaccctgcagaaagccggctacaaggtcagcgtgcagcccttcccgttcaccgcctactacccgaaaggcccgggtagcctgagcgccaccgtgccgcagccggtcacctacgaatgggagaaggatttcacctacctgtcgcagaccgaggcaggcgacgtcaccgccaaggtggtcccggtggacctgtccctcggcgccggcaacacctccaccagcggttgcgaggcggaagacttcgccaacttcccggccggctcgatcgcgctgatccagcgcggcacctgcaacttcgagcagaaggccgagaacgccgcggccgccggcgccgccggggtgatcatcttcaaccagggcaacaccgacgaccgcaagggcctggagaacgtcaccgtgggcgagtcctacgagggcggcatcccggtgatcttcgccacctacgacaacggcgtggcctggtcgcagaccccggacctgcagttgcacctggtggtcgacgtggtacgcaagaagaccgagacctacaacgtggtcgccgagacccgtcgcggcaacccgaacaacgtggtgatggtcggcgcgcacctcgactcggtgttcgaaggccccggtatcaacgacaacggttcgggcagcgccgcccaactggagatggccgtgctgctggccaaggcgctgccggtcaacaaggtgcgcttcgcctggtggggcgccgaggaagccggcctggtgggctcgacccactacgtgcagaacctcgccccggaagagaagaagaagatcaaggcctacctgaacttcgacatgatcggctcgccgaacttcggcaacttcatctatgacggcgacggttccgacttcggcctccagggtccgcccggctcggccgccatcgagcgcctgttcgaagcctacttccgcctgcgcggccagcaatcggaaggcaccgagatcgacttccgctccgactacgccgagttcttcaacagcggcatcgccttcggcggcctgttcaccggcgccgagggcctgaagaccgaagagcaggcgcagaagtacggcggcaccgccggcaaggcctacgacgagtgctaccacagcaagtgcgacggcatcgccaacatcaaccaggacgccctggagatccacagcgacgccatggccttcgtgaccagttggctgtcgctgtcgaccaaggtggtcgacgacgagatcgccgccgccggccagaaagtacaatcgcggtcgctgcagatgcagaagagcgccagccagatcgaacgctggggtcacgacttcatcaagtaa

SEQ ID NO: 321105 - DNA, 1140 bp, Pseudomonas aeruginosa
atgtcgccgatttcagtcgttatcgccggttacgcccgttcgccgttccacttcgccaggaaaggcgcgctggtcgatatccgcccggatgacctggccgccgcggtgctcaaggggctggtggagaaactcgatctcgaccctgcgctgctggaggacgtggtcatgggctgcgcctatccggaggcggaacagggcatgaacatcgcgcgcatcgccagtttccgtgccggcttcccgcagagcctcggcggtgcgaccctcaaccgtttctgcggttcgtccatgagcgccgtccactacgccgccgggcaagtcctgctgggcgccggagaagccttcatcgccgccggggtagagtcgatgacgcgggtgccgatgggcggcttcaacctgtcgcccaatcccgcgttgctgcaggactatccggcggtatacatgagcatggggcagaccgccgagaatgtcgccgagcgctacgccgtcagccgcgtcgagcaggaagagatggccgtacgctcccacgccaaggcagtcgccgcgcgcgaggccggcttgctgcgccaggagatcgtcgccatcgacacccccgccggccgggtcgccgaggatggctgcatccgcccgggtaccaacctggagagcctggcccagttgaagccggcgttcggcggcagcgtcaccgccgccacctcgtcgccgctcaccgatggcagcgccgcgctgttggtctgtagcgaggacttcgcgcgccgccacgggctggcgatcctggcgcggatcaaggcggtggcggtggccggttgtgcgccggagatcatgggcatggggccggtgcaggcgacgcgcaaggttctgcaacgggccgggctgggcatcgccgacatcgacctggtggagatcaacgaggccttcgccagccaatccatcgcctgcatccgcgaactggggctggacatggacaggatcaacctggatggcggcgccctggccatcggtcatccgctgggcgccaccggcgcgcggatcaccggcaaggccgctgcgttgctgcggcgcaccggcgggcgctatgccatcgccacccagtgcatcgccggcggccagggcgtggcgaccctgctggaagcggtggagtga

SEQ ID NO: 321106 - DNA, 645 bp, Pseudomonas aeruginosa
atgggtgcggatgccaggagcagacccggagccctgcgcggcggtcttggcggcgccctgagccagggtgcggagggcgccatccaatggttgccgaccctgctgcgtggacgtccccgacagcgccgcgacctgcttcgccagccgcgcagccggcgcccgggcgaactctggctggtgatcgtcgatgcctccgccagcacccgccggtacggcgccctggcccaggccaagggggtgttggcgacgctgttcgaggaggcctatcggcagcgtatccgcctggccgtgctgcacgccaccgggcagcaggcgcaatggctctggcaggggcagaaggcctcgcgggagttgcaggactggctgcgccagctgggcgccggcggcggtacgccgctgctcgacgccctgcaccaggccgctggctggctggcgcgccgacagcggcagaaacccgccgagcatcagcgtctgctggtgcttaccgacggccgtctgcgcgactggccggcgctgccggaggctgcctgcccgagcctgctggtcgacctcgaaagcggcccgttgcgcctgggcaaggccgagcgcctggcccgggaactgggggccgagtatcggcatatcagtgaattgaacgaagtctga

SEQ ID NO: 321107 - DNA, 1017 bp, Pseudomonas aeruginosa
atgagcgctaccgtgcattaccccctgtccgccgtggtcgccgccgacgaactgaagctggcgctgtgcctggccgcggtcgatccggcgatcggcggggtactgatcgaggggccgcgcggaatggccaagtcgaccctggcgcggggcgtcgccgaactgctgccggcgggcgagttcgttaccctgccgctgggcgccagcgaggagcgcatcgtcggcagcctcgacctggacgccgccctcggcgaaggtcgcgcgcggttttccccgggcgtgctggccaaggccgacggcggcgtgctctacgtcgacgaagtgaacctgctgccggaccacctggtggacttgttgctcgacgtcgccgccagcggcgtcaacctggtcgagcgcgatggcatttcccaccggcatccggcgcgtttcgtgctgatcggcacgatgaacccggaagagggcgaactgcgcccgcaactgctcgaccgtttcggcctcaacgtgcgtctcgacacccagccgccgccggccgagcgggcagagatcatccgtcgccggctggccttcgatgccgacccgcaggccttcgccgaacgctgggaaggccagcaggacaccctgcgccgccgttgcgccgaggcgcgccggcggctggcgcggattcccctggacgatgcggcgctggacagcatcgctcgacgctgcttcgaggcggctgtcgatggcctgcgcgccgacctggtctggctgcgcgcggcgcgcgcccatgcggcctggcgcggcggcgagcggatcgaggcggaggacatcgatgcggtggaacatttcgccctgctgcatcgccgtcgccagtcgaacccgccaccatcggcggccaatccaccgccaccgcccgcggcggcccctgtcgcgctcccggagcgcaccggcaacggcgaagggcagtggggtgaattgccggctcggccggtggccatggggaccgcccgcgagctgccgcgctggccaaaaaagccctga

SEQ ID NO: 321108 - DNA, 1095 bp, Pseudomonas aeruginosa
atgaactcatccgtatccgcactgaccaccctttcgccgaacgtccaggccgtcgccctgcccagcgccaccgcccgtaccgccctggaacgcctgcccagcccgctcgaactcaaggcccgccagccgttgccgctggagctggccagccaggtcgccgccagccgcgacgccatccgcgccatcctcgacggcgacgacccgcgcctgctggtggtagtcggtccctgttcgatccacgatccccgctccgccctcgaatacgccgaacgcctcgccgcgctgagcgacgaactcgacggccagttgctcctggtgatgcgcgcctacgtggaaaagccacgcaccacggtgggctggaagggcctcgcctacgacccgcacctggatggcagcgacgacatggccgccggcctggcgctatcccggcaactgatgctggacatgctgcgcctcggcctgccgctggccaccgaactcctgcaaccgctggccgccggctacttcgacgacctgctgagctgggcggcgatcggcgcgcgcaccagcgaatcgcagatccaccgcgagctggtcagcggcctcggcctgccggtgggcttcaagaacggcaccgacggcggcgtcggcatcgcctgcgacgcgatccgttcggcggcccacggccaccgccatttcggcctcgacccgcacggtcacccggcgctgatcgagacccgcggcaatccggacacccatgtggtgctgcgcggcggccgccacggttcgaactacggccccgagcaggtgcaggccgtgcgccaggccctggaaagccagggcatcgccacgcggatgatggtcgattgcagtcacgccaacagcggcaagaacccgctgaaccagcccggcgtcctcgccagcgtgctggaccagcgcctggccggtgccagcgacctggtcggggtaatgctggaaagccacctgttcgacggttgccaggcgctcggcggcgaactgcgctacggcgtctcgatcaccgacggctgcctcggctgggaaggcaccgagcggattctccgcgacgccgcccggcggctcgccgagcggcgctga

SEQ ID NO: 321109 - DNA, 3747 bp, Pseudomonas aeruginosa
atgcacctgttgcgcacccaacccggcggcttcgttcccgacgacggcatcgcccacctggcccagactcccgccgagctggtgatcctctgcagcggcgattcgcacctcgcattgctggccgaggccgcccgtgcgctgccggacgactacccgagcctgcgcctggccaaccccatgcaattgcagaaccacgcctcggtggacctctacgtcgaggaagtgctgcggcacgcgcgggtgatcctgctttcgctgcacggcggcatcggctactggcgctacggcgtggagcaactggtggcgctggccgagcgcggcgcgctgctgatcccggtgcccggcgacgaccgccccgacccggagctgagcgccctcggcaacctgccggcggagcaggccgagcgcttctggcaatacttgcgccagggcggcctggagaacgccgggcagttctaccgctgcctggccagccagtgcctcggccgcgactacgcctggcgcgaaccgcaggcgctgccgcgggtggcgctgttccatccacggcatgccgaggcgaccctggaacactggcgtgccgactggcaggccgggcgtccggtggtcgcgttgctgttctatcgcacccacctgcaggcagccaacaccgccttcatcgcacgcttctgcgaacgcctcgcggcgcaggggctcaacccgttgccgatcgcgctggccagcctcaaggaaagcgcctgcctggcgcaggtggaagactggctggagcgcagcgacgccgcgctgatcgtcaataccaccggtttcgcccagtccaatccggaggcgcccgagttgcgtccgttccgtcgcgacgtgccggtattgcaggcgatctgctcgctggacaaccgcccgctctggctggacaacccgcaaggcctggggccgcgcgacctggccatgcacgtggcgctgccggagctggacgggcgcatcgtcacccggccgatcagtttcaagggcctggcctggcgcagcgaacgcagcgagagcgacgtggtctgctatctcgccgacgacgagcgcatggatttcgtcgccgaactggcgcggcgctgggccgagctggcgcgcaagccaaacgcggaaaaacgggtggcgctggtgctggccaactacccgacccgcgatggccggatcggcaatggcgtcggcctggacaccccggcggcggcgctgaacatccttcgtgccctgcgccagcagggctatccggtcgacggactgcccgccagcggaaccgagctgatccgccagttgctcggcggcgtcagcaacgacctggagcatctcgacctacggccctgcgcccagagcctggcgctggacgactacctggcctgcttcgcacgcctgccggagcgcaatcgccaggcggtgctggcgcgctggggcgagccgcaacaggacccgatgttccgcgacggacggatgatggtcgccggcctgcgctatggcctgaccttcgtcggcatccagccggcgcgcggctatcagctcgatccggcggcggtctaccacgatcccgacctggtgccgccgcacggctacctggcgttctacttctggctgcgccacgcctaccgcgccgatgccctgctgcacgtcggcaagcacggtaacctggaatggctgccgggcaagggagtcggcctgtccgccgaatgctggccggacgcgttgctcggtccgctgccgaacatctatccgttcatcgtcaacgatccgggggagggcgcccaggccaagcgccgcacccaggcggtgatcatcgaccacctgatgccgccgctgacccgcgccgagagctacggcccgctgcgcgacctggagcgcctggccgacgagttctacgatgcctcgctgctcgacccgcgccgcgccgaacagttgcgcggcgagattctcgtcctcctgcgcgacaaccgtctcgaccgcgagatcggcttgcagctcagcgacgatccggacagctggctgccgcagctggacgcctatctctgcgacctgaaggagtcgcagatccgcgacggcctgcatgtgttcggcgagtcgccgagcgggcgattgcgcctggataccctgctggcgctgctgcgggttccgcgcggcgatggcaagggcgccaacgccgggttgctgaagagcctggcggacgaccttggcctgggcttcgatccgctggcctgcgacatgggcgaggcctggcagggcgcgcggccggcctgcctggaagagcggggcggggagccctggcgtactctcggggatacccgcgaacgcctggaattgctggcgttgcactggatagaacgctgcctgggcggcgaatcgccgcctgccacctggcgtgccagcggcgaggtgttgcgcggcttgtgcgaacaggtggcaccgaccctggacgcctgtggcggggccgagatcgacgggctgctggcagccctcgaagggcgcttcgtaccggccggtccgagcggcgcgccgagtcgcgggcgactcgacgtgctgcccaccggacgcaacttcttctcggtggacgtgcgcaacctgccgaccccgaccgcctggcgcatcggcttccagtcggccaacctgctgctcgagcgtcacctgcaggaacatggcgatcacctgcgccagctcggtctctcggtgtggggcacggcgaccatgcgcaccggcggcgacgacatcgcccaggccctggccctgctcggcgtgcgaccggtctggcaggccggcagccagcgcgtcgccgatttcgagatcctcccggtctccctgctggaccgcccgcgggtcgacgtgacgctgcgggtctccgggttcttccgcgacgccttcgccaacctgatccgcctgttcgatgcggcggtgcaggcggtcgccgagctggacgaggcggaggagctgaacccgctggccgctcgcgtacgcctggagcgccagcgcctcgaggcgcagggcacggcgccggcggaggcgcgccggcaggccggctggcggatcttcggcgccaagccgggtgcctacggcgccggcgtgcagggcgcaatcgaagagcggctgtgggagacccgcgccgaccttgccgaggtctacctgaactggggcggctacgcctacggtgccgccgacgacggcacgccggcgcgggaacgcttcgcccagcgcctggaacgcctgcaggcggtgctgcacaaccaggacaaccgcgagcacgacctgctcgattccaacgactactaccagttccagggcggcatgctggcggcggtggaaaccctgcgcggcgcgccggtggccagttaccacggcgaccacagccagccggacaacccgcgcatccgcacgctcaaggaagagctcaaccgggtggtgcgggcgcgggcggtgaatccgaagtggatcgccgggatgaagcgccacggctacaagggcgccttcgaactggcggcgacggtggactacctgtgcgccttcgatgccaccagcgagctgatcgacgaccaccagtacgcgctgctggccgacgcctacctgctcgacgcggagacccgcgagttcgtccgccagcacaatccgcaagccttgcgcgacatggccgagcgcctggtggaggcgcagcggcgcgggctctggcaggagccgggggcctatcgcgaggccctggagaacctgctgctggacgtcgaagaggaatag

SEQ ID NO: 321110 - DNA, 1053 bp, Pseudomonas aeruginosa
atgaaaaccctggcgaaactccccgtcaccatcgtcaccggcttcctcggcgccggcaagaccaccttgctccggcacatgctggacaacgccgaaggccggcgcatcgcggtgatcgtcaacgagttcggcgaactcggcatcgacggcgagatcctcaagcaatgttccatcggctgcagcgaagaagaggcgcagggccgcgttttcgagctggccaacggttgcctgtgctgcaccgtgcaggaagagttcttcccggtgatgcgcgagctggtggcgcgccgcggcgaccttgaccagatcctcatcgagaccagcggcctggccctgcccaagccgctggtgcaggctttccagtggccggaaatccgcaacgcctgcacggtcgacgcggtgatcaccgtggtcgacagcccggcggtggcggccggcaccttcgccgcccatcccgagcaggtggaccagcaacgccgccaggaccccaacctcgaccatgaatcgccgctgcacgaactgttcgaggaccagttggccagtgccgacctggtgatcctgaacaaggccgaccagctcgacgccgaggccctggcgcgggtccgcgcggagatcgccggggagctgccggcggcggtgaagatcgtcgaggcgagccggggcgagctgccgctgccggtcttgctgggactcaacgccgaggccgagctgcacatcgacggccggccgacccaccacgaccacgaaggccacgaggaccacgaccacgacgagttcgactccttccacgtcgatctccccgaggtggaggaagctgcgctgctcgaggccctcggtgagctggtggagcgtcacgacatacttcgcatcaagggtttcgccgccattccgggcaagcccatgcgcctgttggtacagggcgtcggcaagcgcttcgacaggcatttcgaccgcaagtggctggccgacgaagtccgcagcacccggctggtggtgatcggccaggagctggaccaggccgccattgccaaccagctgcgcacagcgcttgcctga

SEQ ID NO: 321111 - DNA, 183 bp, Pseudomonas aeruginosa
atgtccagcagcaccctggcgcacgccagctccaccacctccctgtcgaagcgactgagcctggccatcggcgccggcctgctcggcgcgctgctggtctatttcgccggtttctcgcacatcgacgcggtacacaacgccgcccacgatacccggcacagctccggcttcccctgccactga

SEQ ID NO: 321112 - DNA, 702 bp, Pseudomonas aeruginosa
atgatcaagcgcatcgcccagaccgccggcttcgccggcctgctcgccgccctgctgctgaccctgctgcagattctctgggtcaccccgctgatcctcgaggcggagacctacgagaagagcgagccggtcgcggcccagccccacgaacacacccccggcgtcgccgcccatgtccacgacgaggaggcctgggagccggaggacggctggcagcgtaccctctccaccaccggcggcaacctggtggtggcggtcggcttcgccctgatgctcgccggcctcttcaccctgcgcgcgccgggccagacctggcagggcctgctctggggcctggccggctacgcggtgttctgcctggcgccgtcgctgggcctgccgccggagctgccgggtaccgccgcggccgacctggtgcaacgccagtactggtggatcgccaccgccgccgccaccgcggtgggcctggccctgctggtgttcggcggcaactggccgctgaagctggtcggcgccgtcctgctggcgctgccgcacctgttcggcgcgccgcagcccgaggtccatgccagcctggcgccggaagccctggcccagcgtttcgtggtcgcctcgctggtcagcaatgcgctgttctgggccgccctcggcctggccgctgcctggctgttccggcgcaaccggggcggcgtcgacgcctga

SEQ ID NO: 321113 - DNA, 429 bp, Pseudomonas aeruginosa
atgcccctgcccatccccagcctgctgatcgccggcatcggctgccgccgaggctgtagcgccgagcatctgcgcgcgctgctggagcgaacgctgggcgaacacgggcgcagcctggccgagctggacgccctcgccagcatcgacggcaaacgcgacgaacccggcctgcggcaactggccacgctgctcgaacgccccgtgcatttcctcgcacccgccgtcctgcacgactacgagccgcgcctgctcagcccctccgccgtcgcgctgcgcgaaaccggctgctccagcgtcgccgaggccgccgccctggccctggccgaacgcctgggtggcggtcgcgccgatctgctcggggcgaaacgcagcaacgatcgggcgagcatcgccctggcacgtcttctcaccgaacgagaactcccatga

SEQ ID NO: 321114 - DNA, 753 bp, Pseudomonas aeruginosa
atgaccgtctatttcatcggcgccggtcccggcgaccccgacctgatcaccgtcaaggggcagcgcctgatccgccagtgcccggtgatcctctacgccggctcgctggttccgcaagcgctgctcgaggggcaccaggccggccaggtggtgaacaccgccgagctggacctcgaacagatcgtcgagctactcgcgcaagcccatcgccgcggcctcgacgtagcccgcgtgcattccggcgatccctccctgtacggcgccatcggcgagcagatccgccacctgcgcgaactcggcatcccctatgagatcgtccccggggtcaccgccaccgccgcctgcgccgccctgctcggctgcgagctgaccctgcccgaagtgtcccagacgctgatcctgacccgctacgccgcacgcacgaagatgccggaaggcgagagcctgggtgacctggcgcggcaccgggcgaccctggcgatccacctgggcgtcgcccacctggcgaagatcgtcgaggaactgctgccgcactacggcgccgactgcccggtcgcggtgatccaccgggccagttggcccgaccaggaacaggttcgcggcaccctcggcgacatcctgcccaaggtcgccgccaggaatttccgccgcaccgcgctgatcctggtcggcgaggtgctggccgccgaaggcttcgccgactcttcgctgtaccgcgccgagcatcgacatctctatcgacccggcgaatga

SEQ ID NO: 321115 - DNA, 948 bp, Pseudomonas aeruginosa
atgaaacgattcctcctcggtctggttctgctgctggcggtcgccgccggcgtcctctacttcgtcccggctaccctcctcgccagcgtacgcaccgtcgagcgcggtctcgccggtctcagcgagcacagcgtgcaggtcgacaacctggagatcgcctacctggaaggtggctcggagaagaacccgaccctgttgctgatccacggcttcggcgccgacaaggacaactggctgcgcttcgcccggccgctgaccgagcgctaccatgtggtcgccctcgacctgcccggcttcggcgacagcagcaagccgcaacaggccagctacgacgtcggcacccaggccgagcgagtcgccaatttcgccgccgccatcggcgtgcgccgcctgcacctggccggcaactccatgggcgggcacatcgccgcgctctacgcggcgcgccatccggaacaggtgctatcgctggcgctgatcgacaacgccggggtgatgccggcgcgcaagagcgaactgttcgaggacctggagcgcggcgagaatcccctggtggtgcgccagccggaagacttccagaagctgctcgacttcgtgttcgtccagcaaccgccgctgccggcgccgctcaagcgctacctcggcgagcgcgcggtagccgcgtcggcgttcaacgcgcagatattcgaacaactgcgccagcgctacatcccgctggagccggaactgccgaagatcgaggcaccgaccctgctgctatggggcgaccgcgaccgcgtgctggacgtctccagcatcgaggtgatgcgtccgctgctgaagcggcccagcgtggtgatcatggaaaactgcggacacgtgccgatggtcgaacgcccggaggaaaccgcgcagcactaccaggccttcctcgacggcgtacggaacgcccaggtggccggtcgctga

SEQ ID NO: 321116 - DNA, 1197 bp, Pseudomonas aeruginosa
atgatcatcaaaccgcgcgtgcgtggcttcatctgcgtcactacccatccggcaggctgcgaggccaacgtcaagcaacagatcgactacgtcgaggccaagggccccgtcgtcaacggaccgaagaaggtcctggtcatcggttcctccaccggctatggcctggctgcccgcatcaccgccgcgttcggttccggcgccgataccctcggggtgttcttcgagcgtccgggcagcgagagcaagccgggcaccgccggctggtacaactcggcggccttcgagaagttcgcccacgagaaaggcctgtatgcccgcagcatcaatggcgacgctttctccgacgaggtgaagcggctgaccatcgagaccatcaagcgcgatctcggcaaggtcgacctggtggtctacagcctggccgcgccgcgccgtacccatccgaagagcggcgaagtgttctcctcgaccctcaagccgatcggcaagtcggtcagcttccgtggcctggacaccgacaaggaagtgatcaaggacgtggtcctggaggcggccagcgaccaggaggtcgccgataccgttgcggtgatgggcggcgaggactggcagatgtggatcgacgcgctgctggaggccgacgtgctggccgacggcgcgaagaccgccgcgttcacctacctgggcgagaagatcacccacgacatctactggaacggttccatcggcgcggccaagaaggatctcgaccagaaggtcctcggtatccgcgacaagctcgccccgctgggcggcgacgcgcgcgtgtcggtgctcaaggcggtggtgacccaggccagctcggcgatcccgatgatgccgctgtacctgtcgctgctgttcaaggtgatgaaggagcagggcacccacgaaggttgcatcgagcaggtcgacggcctgtaccgggagagcctgtacggcgccgagccgcgcctcgacgaggaaggccgcctgcgtgccgactacaaggaactgcagccggaagtgcagtcccgtgtcgaggagctgtgggacaaggtaaccaacgagaacctttacgaattgaccgacttcgctggctacaagagcgagttcctcaacctgttcggtttcgaggtcgctggggtcgactacgagcaggacgtcaacccggacgtgcagatcgccaacctgatccaggcctga

SEQ ID NO: 321117 - DNA, 930 bp, Pseudomonas aeruginosa
atggctatcctggttatcgctgagcacaacaacgcggccctggcggctgccaccctgaacaccgttgccgctgccaaggccattggcggcgacatccacgtgctggtcgccggacagaacgttgccgccgtggccgaagccgccgccaaggtcgagggcgtctccaaggtgctggtcgccgacaacgccgcctacgcccaccaactgccggaaaacgtcgcaccgctgatcgccgagctgggcaagaactacagccacgtgctggccccggctaccaccaacggcaagaacttcctgccgcgcgtcgccgcgctgctggacgtcgaccagatctccgagatcgtcgaagtggtcagccccgacaccttcaagcgtccgatctacgccggtaacgccatcgctaccgtgcagtcctcggctgcggtcaaggtgatcaccgtgcgtaccaccggcttcgacgccgtcgccgccgaaggcggttcggctgccgtcgagcaggtttccggcccggccgatgccggcaagtccgccttcgtcggcgaagagctggccaagtccgaccgtccggaactgaccgctgccaagatcgtggtctccggcggccgcggcatgcagaacggcgacaacttcaagatcctctacgccctggccgacaagctgggtgccgcagtcggcgcttcccgcgccgcggtcgacgccggtttcgtgccgaacgacatgcaggtcggccagaccggcaagatcgtcgccccgcagctgtacatcgcggtgggcatctccggtgccatccagcacctggcgggcatgaaggactcgaaggtgatcgtcgcgatcaataaggacgaagaggctccgatcttccaggtcgccgactacggcctggtcgccgacctgttcgacgccgtaccggagctggaaaaggccgtctga

SEQ ID NO: 321118 - DNA, 750 bp, Pseudomonas aeruginosa
atgaaggttcttgtagcagtcaaacgagtggtcgactacaacgtcaaggtccgcgtcaaggcggacaactccggcgtcgacctcgccaacgtcaagatgtccatgaaccccttctgcgaaatcgccgtggaagaagccgtgcgcctgaaagagaagggcgtggctaccgagatcgtcgctgtctccgtcggcccgaccgccgcccaggagcaactgcgcaccgcgctggcgctgggcgctgaccgtgcgatcctggtggagagcaacgacgagatgaactccctggccgtggccaagctgctcaaggccgtggtcgacaaggagcagccgcagctggtgatcctcggcaagcaggccatcgacagcgacaacaaccagaccggccagatgctcgccgcgctgaccggctacgcccagggcaccttcgcctccaaggtcgaggtcgctggcgacaaggtcaacgtgacccgcgagatcgatggcggtctgcagaccgtcgcgctgaacctgccggccatcgtcaccaccgacctgcgcctgaacgagccgcgctacgcgtcgctgccgaacatcatgaaagccaagaagaagccgctggacgtggtgaacccggacgccctgggcgtttccaccgcttccaccgtgaagaccctgaaggtcgaggcgccggctgcacgctccgctggcatcaaggtcaagtccgtggctgaactggtagagaaactgaagaacgaggcgaaggtaatctaa

SEQ ID NO: 321119 - DNA, 1656 bp, Pseudomonas aeruginosa
gtggaacgcgaatacatggaattcgacgtcgtcatcgtcggcgccggccccgccggtctgtccgccgcatgccgactgaagcagaaggccgccgaagccggtcaagagatcagcgtctgcgtggtcgagaagggttccgaagtgggcgcccacatcctctccggcgcggtgttcgagccgcgcgcgctgaacgagctgttccccgactggaaggaactcggcgcgccgctcaataccccggtgaccggcgacgacatctacgtcctgaagagcgccgagagcgctaccaaggtgcccaacttcttcgtgcccaagaccatgcacaacgagggcaactatatcatctccctgggcaacctctgccgctggctggcccagcaggccgaaggactgggcgtggagatctatccgggcttcgccgcccaggaagcgctgatcgacgagaacggcgtggtccgcggcatcgtcaccggcgacctcggcgtcgaccgcgaaggcaacccgaaagaaggctactacacccccggcatggagctgcgggccaagtacaccctgttcgccgaaggctgccgcgggcacatcggcaagcaactgatcaagaaatacaacctggacagcgaggccgatgcccagcactacggtatcggcatcaaggaaatctgggacatcgacccgtccaagcacaagcccggcctggtggtccataccgccggctggccgctgaacgacgaaaataccggcggctcgttcctctaccacctggagaacaaccaggtgttcgtcggcctgatcatcgacctgtcctacagcaacccgcacctgtcgccgttcgacgagttccagcgctacaagcaccacccggtggtcaagcagtacctggaaggcggcaagcgcgtggcctacggcgcccgggccatctgcaagggcggcctgaattcgctgccgaagatggtcttccccggcggcgcgctgatcggttgcgacctcggcaccctgaacttcgccaagatcaagggcagccacaccgcgatgaagtccggcatgctcgccgccgacgcgatcgccgaggccctggccgccggccgcgaaggcggcgacgagctgtccagctacgtcgatgcgttcaaggccagctggttgtacgacgaactgttccgcagccgcaacttcggcgcggccatccacaagttcggcgctatcggcggcggcgcgttcaacttcatcgaccagaacatcttcggcggcaagatccccgtcaccctgcatgacgacaagccggactacgcctgcctgaaaaaggccagcgaagcgccgaagatcgactacccgaagccggacggcaagctcagcttcgacaagctgtcctcggtgttcctctccaataccaaccacgaggaagaccagccgatccacctcaagctggccgatgcgagcattccgatcgagaagaacctgccgctctacgacgagccggcccagcgctactgcccggcaggcgtgtacgaagtggtggccaacgacgacggcagcaagcgcttccagatcaacgcgcagaactgcgtgcactgcaagacctgcgacatcaaggacccggcgcagaacatcacctgggtggcgccggaaggtaccggcgggccgaactaccccaacatgtaa

SEQ ID NO: 321120 - DNA, 570 bp, Pseudomonas aeruginosa
atgagtgataccggcaaggccaacgacctgctggcgcagatccccaggggcgaaaagaagggcctgccgcccgtgcacctgtggaatccgccgttctgcggcgacatcgacatgcgcatagcccgcgacggcacctggttctacctgggcacgccgatcggacgcaagccgatggtgaagctgttctccagcatcattcgccgcgacggcgacgactatttcctggtgactccggtggaaaaggtcggtatccgcgtcgacgatgcgcccttcgtcgcggtgaccctgcaggtgcagggcgagggcggggcgcaggtactgcgcttcgccaccaacgtcgaggacgaggtcgaggcggacgccgggcatccgctgcgcgtcgagatcgacccccgcagccaggaacccacgccctacctgcgggtgcgcgacaacctcgaggcgctggtgcatcgcaacgtgttctaccagctggtcgagctggcggtgccgcgccggatcgacggcatcgaatggctcggcgtctggagccacggcgagttctttcccatcggcccgcagccggactga

SEQ ID NO: 321121 - DNA, 633 bp, Pseudomonas aeruginosa
atgttgcacctgttccgtatcgccctggcgatgctcctcctgggcagcctgtccgcctgcatgaagcccagcgacctggccgacggcgccgactactacctgcgcgacgccggggtgctcgatcacagcgccagccagcgcagcaacaaccggcggatccaggccgactccttcatctacatcggccagggcccgttcgtgccgccgggctaccggtacgcgcggccgaacgtggtggccgagcaggccttcgaaggtttcgtcgagtatttcccgctggtgcgccgcgccaaggcgccgctcggcctggacgacgcgatgcgcgaggcgcgtgccgccggcgctcactacctgctgtactgccgtttcgcccggggcgacaacaggatcggcaactgggaggagtgggaagacgaagaggaactcggccgggtcgggcgcgatcgcagtgtcatccaggtcatgctgatcgagaccagcacccgtttcctggtggacagcgcgaccatccgcagccgcggcggtttcctgacgttctacgacgccaccccggaagacctgctgcgtcccccgctggagcaatacgcccaggaattgctgggcctgaacagtcgaggaacaggctatgagtga

SEQ ID NO: 321122 - DNA, 897 bp, Pseudomonas aeruginosa
atgagtgtccgtgaattccccatccactacatcgaaccggtgttccggcccccgagcgaggcgcattcgctgatcctcccggtgaccaatggctgttcctggaacaaatgcggcttttgcgagatgtatacccagccgcaaaagaaatttcgcgcccgcgacgagaacgaggtactggaggagatccgccgctgcggcgagcgcctgatcgtcaagcgggtgtttctcgccgatggcgacgccctggtattgccgacccgccggctgctcgcggtgctgcaggcgattcgccagcacttgccggaggtggagcgggtatccagctactgcctgccgcgcaacctgcgcaggaagtcggtcgacgagttgcgcgaactggccgacgccgggctgcgaatggcctatgtcggcgccgagtccggcgacgacgaagtgctggcgcgggtcaacaagggcgagacctattcctctaccctggatgcgctggaaaagcttggcgaggcggggatcagtcgttcggtgatgatcctcaacggtctgggcggaatgaccctgagcgcgcagcacgcggacaactccgcgcgcctgatgaacgccgcccagccggagtacctgtcgaccctggtggtgagtttccctaccggcgagcagcgtttccgtgctggcttcgccgatttcgaggcgctggatcggcgtgccctgttcgtcgaggtcgaacgcctgttgcagggtttggagctcgaagacacggtatttcgcagcgaccacgcttccaactatctggtgctcaagggcgaactgggtgccgacaaggcgcgcctgctggccgaggtccgccaggccatcgagcagccgcagcacgctgccctgcgccaggagtggcagcgtggcctgtga

SEQ ID NO: 321123 - DNA, 639 bp, Pseudomonas aeruginosa
atgcagaaagagcctcgcaaagttcgtgaatttcgtcgccgtgaacaggagattctcgataccgccctcaagctgttcctcgaacagggggaagacagcgtaacggtcgagatgatcgcggatgccgtcggcatcggcaaaggcacgatctacaagcacttcaagtccaaggcggagatctacctgcgcctgatgctggactacgagcgcgatctcgccgccctgttccattccgaagacgtagcccgcgacaaggaagccctgtcgcgcgcctacttcgagttccgcatgcgcgatccgcagcgctaccgcctgttcgaccgcctggaagagaaggtggtgaagaccagccaggtgccggagatggtcgaggagctgcacaagatccgcgcctccaacttcgaacgcctgacccaactgatcaaggagcgtatcgccgacggcaagctggagaacgttccgccgtacttccattattgcgctgcctgggcgttggtgcatggcgccgtggcgctgtaccactcgccgttctggcgcgaggtgctggaagaccaggaaggtttcttccacttcctgatggatatcggcgtgcgcatgggcaacaagcgcaagcgcgaaggcgacgctcccagcgcctga

SEQ ID NO: 321124 - DNA, 1134 bp, Pseudomonas aeruginosa
atgaattgttaccaggacgaattcgaccagaccaacggtctgcgctacctcaaccacgcagcggtcgcaccctggcctagacgcgccgccgacgcggtgagcgccttcgcccgggagaacgtcgcccacggcgccagcgactatccggaatggctgaagatagaacatcgcctgcgcgagcgccttgcccgactgctcaatgcgcgcgccggcagcgacctcgccctggtcaagaacacctccgaggcgctttccttcgtagccttcggcctggattggcgagagggcgaccaggtcgtcatctgcaacgaggagttcccctccaatagagtggtctgggaagccttgcgcccgcgcggcgtcgaagtggtcgaggtcggtctcgccggcgacgatcccgagagcgccctgctcgccgcctgcggcccgcgcacccgcctgctgtcgatcagcgcggtgcagtacgccagcggcctgcgccttgacctggagcgcatcggcgcgggatgtcgccgccgcggggtgctgttctgcatcgacgcgatccagcagctcggcgccctgcccttcgacgtacaggcctacgattgtgccttcgccatggccgatgggcacaagtggatgctcggccccgaagggctgggcgtcttctattgccatcccgagcagcgcgagcgcctggcgctgcacgaatatggctggcacatgctggaacatgccctcgattacgagcgtcgcgactggcggccggcgcgcagcgcccggcgcttcgaatgcggcagcccgaacatgctcggcgcgatggccctggaggccagcctggggctgttggaggaggtcggcatggagcgggtcggcagagacatcgccgagcgcgtccagtggctacaggacggtctgtcgggaattcccggggtacgcctgcacagcccgcggaacccgagccgacgcgcgggcatcctgaccttcagcctggacggccaggacaatcggacactcttcgaaacgcttcgccaggaacgggtcatttgcgcccagcgtggcggaggtatccgtttttccccgcacttctacacgagttcgacggtgatcgacgataccctggcgatcttgcgccaggtcgcaggcacctag

SEQ ID NO: 321125 - DNA, 777 bp, Pseudomonas aeruginosa
atgctggtcgattcccactgccacctcgatcgcctcgacctggccgcccatggcggctcgctcgatgcggcgctggatgccgcgcgagcgcgtggcgtcggtcaattcctctgcatcggcgtcagcgccgacaatgcccaggcggtgaaggccctggccgagcgctatgccgacgtgcactgttcggtgggcgtgcacccgctggacctggagcccggaagcgcgccagcgctggactggctgctgggcgaactggcgcatccgcgggtggtggcgatcggtgagaccggcctcgactaccactacgaaccggaagccgccgagttgcaacaggaggcgtttcgcctgcacctggaagccgcgcggatcaccgccaagccagtgatcgtgcacacccgcgaggcgcgcgccgacacgctggcgctgctgcgcgaggcggcgttgccgcaggccggcgtgctgcattgcttcaccgaggactgggaaatggcgcgatcggcgctggacctgggcttctacatttccctgtccggcatcgtcaccttccgcaatgccgatgccctgcgcgaggtggctcgccaggtaccggccgaccggctgttggtggagaccgactcgccctacctggcgccgattccccatcgcggcaagccgaacctgccggaatacgtgcgcgatgtcgccgaattcctcgcgacgttgcgtggcgtcagcctggaaaccctggcggagcagactaccgccaatttccatcggctgtttccgttggcccgctag

SEQ ID NO: 321126 - DNA, 357 bp, Pseudomonas aeruginosa
atgagtttgccacccaatctggggccgcgtaacggcatcctgtccttgaccatcaaggacaagtccgtgctgtacgccgcctacatgccgttcatcaggaacggcgggctgttcattcccaccaacaagaactacaagctcggcgacgaagtcttcatgctgctcaacctgatggaagagccggagaagatcccggtggccggcaaggtcgtctggatcaccccgaagggcgcccagggcaaccgtgcggcgggcatcggcgtgcagttcaacgacggtgacaacaccgcccgcaacaagatcgaaacctacctggccggggcgctgaagtcggaccggccgacccacacgatgtaa

SEQ ID NO: 321127 - DNA, 987 bp, Pseudomonas aeruginosa
atggctgatatctatccctggcagcaggcgctctggagccaactgggcggccgcgcccagcacgcccacgcctatctgctctacggtcccgccgggatcggcaagcgtgccctggccgagcattgggccgcccaactgctctgccagcggcctgccgccgctggcgcatgcggcgagtgcaaggcctgccagttgctggccgccggtacccatccggactacttcgtgctggagccggaggaggcggagaaaccgatccgggtcgatcaggtccgcgacctggttggcttcgtggtgcagaccgcgcaactgggcgggcgcaaggtcgtgttgctcgaacccgccgaggcgatgaacgtgaacgccgccaacgccctgttgaaaagccttgaagagccgtcgggcgatactgtgctgctgctgatcagccaccagcccagccgcctgttgccgaccatcaagagccgctgcgtgcagcaggcctgccctttgccgggcgcggcggcgagtctggaatggctggcgcgggccctgcccgacgagccggccgaggccctggaggaactgttggcgctttccggcggctcgccgctcaccgcccagcgcctgcacggccagggcgtgcgcgagcagcgcgcgcaggtggtcgagggggtgaagaagctgctcaagcagcagatcgccgccagcccactggccgaaagctggaacagcgtgccgttgccattgctcttcgactggttctgcgactggacgctgggcatcctgcgctaccagttgacccacgacgaggaggggctggggttggccgacatgcgcaaggtgatccagtacctgggcgacaaatccgggcaggccaaggtgctggccatgcaggactggctgctgcaacagcggcagaaagtgttgaacaaggccaacctcaaccgtgtcctgcttctcgaagccctgctggtgcagtgggcaagcctgcccgggccgggctag

SEQ ID NO: 321128 - DNA, 633 bp, Pseudomonas aeruginosa
gtgaccggcctgttcgtcaccctggagggcccggaaggggccggcaagagcaccaaccgcgactacctggccgagcgcctgcgcgagcgcggcatcgaggtgcagttgacccgcgagcctggcggcacgcctctcgccgagcgcatccgtgaactgctgctggcgcccagcgacgagccgatggccgccgataccgagctgttgctgatgttcgccgcgcgggcccagcatctcgccggggtcatccgcccggcgctggcgcgcggggccgtggtgctctgcgatcgcttcaccgatgccacctatgcctaccagggcggcgggcgcggtttgccggaggcgcgcatcgccgcgctggaaagcttcgtccagggcgacctgcggcccgacctcacgctggtcttcgacctgccggtggaaatcggcctggcgcgggcggcggcgcgtggccggctcgaccgtttcgagcaggaggaccgacgcttcttcgaggccgtgcgtcagacctacctgcagcgcgccgcgcaggccccggagcgttaccaggtgctcgatgccgggttgccgctggccgaggtgcaggctggcctggatcggctgctgccgaatctgctggagcgtctgaatggctga

SEQ ID NO: 321129 - DNA, 1050 bp, Pseudomonas aeruginosa
atgcgcaaactgctggtgctgctggagagtggcctgttgttcgttggcctctgcgtcggcctggctgcatggcagcagcagcgggcgctggagcagcccctgcaattgaccgaggagcgcctgctggacgtttcctcgggctccacgccgggcggcatgctcgcgcgtctggagcaggaaaaggtgctccatggcgcgttctggctgcgcctctactggcgtttcaacctgccgggccaggccctgcacagcggcgaataccgcctcttgccggggatgaagggcgccgacctgctggaactctggcgtgaaggcgaggtggtgcagtacagcctgaccctggtcgagggctggagtttccgccaggtgcgcgaagcgctcgccaggcagggcaagctggagcagaccctggccggcctgagcgacggcgagatcatgcaacgcctcggcaagcccgacgaagtggccgaagggcgcttcttccccgatacctaccgctacacccgtggcatgcgcgacatcgacatactgcgcaaggcctaccagcgcatgcagaccatcctcgccaaggaatgggatggccgcagccaggacctgccttatcgcgacgcctaccaggcgctgatcatggcctcgctggtggaaaaggaaaccggcgtgccggaagagcgttcgcagatcgccggcgtcttcgtccgccgcctgcagcgcggcatgctgttgcagaccgatccgacggtgatctatggcatgggcgagcgctacaacggcaagatcacccgcgccgacctgcgcgaaccgaccccttacaatacctatgtggtgccgggcatgccgccgaccccgatcgccctggccgggcgcgaggcgattcgcgccgcgctgcatccggccgagggtgagaccctgtatttcgtggcgcgcggcgatggcagccatgtgttctccagcagcctggacgaacacaacaaggcggtccgcgagtaccagttgaagcgtcgctcggactatcgctccagccccgcgcccatcaccccgccgccacaatga

SEQ ID NO: 321130 - DNA, 816 bp, Pseudomonas aeruginosa
atgctggactgggtcgacggccggcccgccgccgagctgtccgtgcgtgatcgcggactggcctatggcgacgggctgttcgagaccctggcggtgcgcgccggcacgccgcgtctcctggaacgccacctggcgcgcctggaagaggggtgtcgacgcctggcgatccctctcgacgccgcggcgttgcgccaggagttgctggcgttctgcgcggcgctgggcgacggtgtcgccaagctgatcgtcacccgcggcgagggtttgcgtggctacgcgccgcctgccgaggcctcgccgcggcgaatcctctccggatcgccgcgtccggcctatcccgagcgccactggcagcaaggcgtgcgcctgttcgcctgccgcacgcgcctggccgagcagcccctgctggccggcctcaagcacctcaatcgcctggagcaggtcctcgcccgtgccgagtggagcgacgccgggcatgccgaagggctcatgctggacgtgcacgagcgggtagtggagggcgtgttcagcaacctgctgctggttctcgacggcaccctcgtggcgcctgacctgcggcgctgcggcgtcgctggagtgatgcgcgcggaattgctcgagcgcgccgaaggaatcggcgtcccgctggcgatacgggatgtttccatggctgaactggcgacggccgacgaggtctttctgtgcaacagccagttcggcatctggccggtccgggcattggacgagcacgtctggccggtcggcgagctgacccgtaaactgcaagaccaacttcgcgacgacctggatttctga

SEQ ID NO: 321131 - DNA, 1245 bp, Pseudomonas aeruginosa
gtgtcgcgtagacgcgtcgtcattactggcatgggcatgctgtcgccgctgggcctggatgtcccgagcagttgggaaggtattctcgccggtcgcagcgggattgccccgatcgagcatatggacctgtccgcctattccacccgcttcggtggttcggtcaagggtttcaatgtcgaggaatacctgtccgccaaggaagcccgcaagctcgacctgttcatccagtacggtctcgccgccagcttccaggccgttcgcgattccggcctggaggtcaccgacgccaatcgtgagcgtatcggcgtatccatgggttccggtatcggcggcctgaccaatatcgagaacaactgccgatccctgttcgagcaggggccgcggcgcatctcgccgttcttcgtgcccggttcgatcatcaacatggtttccggcttcctgtcgatccacctgggtctgcaggggcccaactacgccctcaccaccgcctgcaccaccggtacccacagcatcggcatggctgctcgcaacatcgcctatggcgaggccgacgtgatggtcgccggcggttccgaaatggctgcctgcggtctcggcctgggtggtttcggcgcggctcgcgcgctctccactcgcaacgacgagccgacccgtgccagccgtccgtgggaccgggatcgcgacggcttcgtcctgtccgacggttccggcgctctggtgctcgaagaactggagcacgcccgtgcccgcggcgcgcggatctatgccgagctggttggcttcggcatgagcggcgacgccttccacatgaccgcgccgccggaagacggcgccggtgccgcccgctgcatgaagaacgcgctgcgcgatgccggcctggatcctcgtcaggtcgattacatcaacgcccatggcacctccaccccggccggcgacatcgccgagatcgccgcggtgaagagcgtgttcggcgagcatgcccatgcgctgtcgatgagttcgaccaagtcgatgaccggccacctgttgggtgccgccggtgcggtggaggcgatcttcagcgtgctggccctgcgcgaccaggtcgccccgccgaccatcaacctggacaacccggacgaaggttgcgacctcgacctggtggcccacgaagccaagccgcgcaagatcgacgtggccctgtcgaactcgttcggtttcggcgggaccaacggcaccctggtgttccgcaggttcgccgactga

SEQ ID NO: 321132 - DNA, 237 bp, Pseudomonas aeruginosa
atgagcaccatcgaagaacgcgttaagaagatcgtcgctgaacaactcggcgtgaaggaagaagaagtcaccaacagcgcttccttcgtcgaagacctgggcgccgactcccttgacaccgtcgagctggtgatggctctggaagaggaattcgagaccgaaatccctgacgagaaagctgaaaagatcaccaccgttcaggaagccatcgactacatcgttgctcaccagcaataa

SEQ ID NO: 321133 - DNA, 744 bp, Pseudomonas aeruginosa
atgagtctgcaaggtaaggtcgcattggtaaccggcgccagccgtggcatcggccaggcgattgcgctggaactggggcgcctgggtgccgtggtcatcggcaccgcgaccagcgcgtccggcgccgagaagatcgccgaaaccctcaaggccaatggcgtcgagggtgcgggcctggtcctggacgtttccagcgacgaatccgtagccgcgaccctggagcacatccagcagcatctcggccaaccgctgatcgtggtcaataacgccggcatcacccgcgataatctgctggtgcgcatgaaagacgacgagtggttcgatgtggtcaacaccaacctgaacagtctctaccgtctgtcgaaagccgttctgcgcggtatgaccaaggcccgctgggggcgcatcatcaacatcggttccgtggtcggcgccatgggcaatgccgggcaaaccaactatgccgcggcgaaggccggcctggagggcttcacccgtgcgctggcccgggaagtcggttcgcgtgccattaccgtgaatgcggtggcgccgggcttcatcgacaccgacatgacccgcgagctgccggaagcccagcgcgaagcgctgctgggccagattccgctgggtcgcctggggcaggcggaagagatcgccaaggtggtcggcttcctcgcttcggacggcgcagcctatgtgaccggggccaccgtgccggtcaatggtgggatgtacatgagctga

SEQ ID NO: 321134 - DNA, 939 bp, Pseudomonas aeruginosa
atgtctgcatccctcgcattcgtcttccctggccagggttcgcaatccctcggcatgctggccgagctgggcgcccagcaggcgctggtgcgcgataccttcgccgaggcctccgaggcgctcggttacgacctttgggcgctggtccagaatggtcctgaagagcgcctgaaccagaccgacaagacccagccggccatcctcacggtttcgatcgcgctctggcgcctctggctggccgagggcggtgcgcgcccagcgttcgtcgccgggcacagcctgggcgaatattccgcgctggtcgcggccgaaagcctggcgttcgccgatgcggtcaagctggtcgagcgtaggggccaactgatgcagcaggcggttccggcggggcagggcggcatggccgcgatccttggcctggaagacgccgatgtattggcggcctgtgccgaggcggcccagggcgaggtggtcagcgcggtcaacttcaacgcgccggggcaggtagtgatcgccggtgccgcggctgccgttgagcgtgccatcgaggcatgcaaggcacgcggcgccaagcgcgcggtggcgctgccagtcagcgtgccgtcgcattgcgaactgatgcgtccggccgccgagcagttcgccgcctcggtcgaaagcctgcagtggcaggcgccgaagattgcgctggtgcagaacgtcagcgccgccgtgccggctgatctcgatacgctgcgccgcgacctgctggcacagctgtacagcccggttcgctgggtggagagcatccagctgctggcggaaaagggcgtcaccgagctggtcgagtgcgggccgggcaaggtcctggcaggcctcaacaggcgctgcgcgaagggcatcaatacccatggcctggatggcgtcgaggcgttcgccgccacgcgcgccgccctggcctga

SEQ ID NO: 321135 - DNA, 981 bp, Pseudomonas aeruginosa
atgggtggggacttcggtccccactgcgttgttccggcctctattgccttcctggccgagaattcctcttcgcaactgatcctcgtcggtcagcctgccctcctcgaagaactcctttcccgctatccgtcgctcgaccggcagcgcctgcgtgtgcatgcggccagcgaagtgataggttcagacgaacgtccctcccaggccttgcgtggcaagccggacgcttccatgcgcgtggcgctggagctggtccgcgacggccgggcgcacgcgtgcgtcagcgccggcaataccggggcgttgatggcgctgtcgcggcacctgctgaagaccctgcccggtatcgaccgccctgcgatggtgacggcggttccgaccgagaaggggcattgtcatctgctcgacctcggcgccaacgtggattgcagtgccgagcatctctatcagttcgcggtgatgggcgcggtggcggcagaggccttgggctgcgtctcgccccgggtcgccctgctcaacgtggggaccgaggagatcaagggcaaccagcaggtcaagctggcggcgagtctgttgcagaaggcgcaggggttgaatttcagcggatatatagagggcgatggcctgtatcgcggcgaggccgacgtggtggtctgcgacggtttcgtcggcaacatcctgctgaaggccagcgaaggcctggctgccatggtgtcggcgcggatcgaacagcgcttccgcgatggactggcggcgaagctggtcggtgcgctggcgttgccgctgctgcgccggctgcgcggcgatatcgctccggcacgctataacggcgccagtttcctcggattgcaggggatagtggtgaaaagccatgggtctgccgccgaggagggtttccagagcgccttgcgtcgcgcggcactggaagtccgggaaaacctgccgcaacgattgcatggccgtctcgagcatctgctgctctaa

SEQ ID NO: 321136 - DNA, 183 bp, Pseudomonas aeruginosa
atggctgttcagcagaacaaaaagtctcgttccgctcgtgacatgcgtcgttcccacgatgcgctcgagtccaatgctctgtccgtggaaaagagcaccggtgaagtccacctgcgccaccacgtatccccggacggcttctatcgcggccgtaaggtagtagacaagggctccgacgagtaa

SEQ ID NO: 321137 - DNA, 537 bp, Pseudomonas aeruginosa
atgttgaatgggccgattccacctcatatcgatccgcgcaagttggtcgaccgcggcgccaccctcgagggtgtgtacgcgctcgccgatatgccgcgtgtatgcgagcaactgaccagcgatgccggtgaggtgcgcgtgaaggtttccttcgagcgcgaccaccagaagctggcggtcatgcatatgcagctcgataccgaggtgagcatggtatgccaacgctgcctggatgcggcggccattcccgtgcatggcgaatatacctacgccattcttcgggaaggtcagtccgccgacggtctgccgaaggggtacgatgcgctggaagtgggggaggaacccctggacctgctggcgctggtcgaggacgagctgttgctcgccttacccatcgttccggcccatgaccccgaagtatgtcagcacccggctggattcgtcgtcgaagacgagccggagtcgagcgaagtcgaggacaagcgtcctaatccgttcagcgtactggcacagttgaagcgtgacccaaacgtttag

SEQ ID NO: 321138 - DNA, 579 bp, Pseudomonas aeruginosa
atgcccgacctgatcctcgcctccagctccccctaccgacgcgaactcctgacccgcctgcgccttcccttcgaaagcgccagccccgatatcgacgaaagccatcgccccgaggaaagtgccgaagaactggtgcgccgcctttccgccagcaaggccgaagcgctggccggacgctatccgcaacacctggtgatcggctccgaccaggtcgccgtactcgacggcaacatcctcggcaagccgcacacccccgaacgcgccatccagcagctacgggacgccagcggcaagagcgtgaccttcctcaccggactggccctcctcaacagcgccagccgacgcatccaggtggcatgcgtgccgttcaccgtgcacttccgccacctcgacgagagccgcatccgccgctacgtcgaagcggaacgcccgctggactgcgccggcagcttcaaggcggaaggcctgggcgtcagcctgttccgctccaccgaaggagaggacgccaccagcctggtgggactgcccctgatccgcctggtcgacatgctcctcgaggaaggcgtcgaaattccctga

SEQ ID NO: 321139 - DNA, 981 bp, Pseudomonas aeruginosa
atgtctgacgagtggaagtcggaaacgccgaaggcgaatgacgacaagagctggaagctgctggagaaggcggtcctcgccggggtccaggagcagcggcgggcgcggcgctgggggatattcttcaagtcgctgaccttcatctatctctttgtcgtgctgctggccttcagtccgttcggcagcctggagaaatcggcctcgcgcagcggtagccacacggcactgatcgaggtgaagggcatgatcgccgacgatgagccggccagcgccgacaatatcgtcacggccctgcgcgcggcgttcaaggatgagggtaccaaggggatcgtcctgcggatcaacagtccgggcggcagtccggtgcagtcgggctatatctatgacgagattcgtcgcctgcgcggcgagcacccgaacgtcaaggtctatgcggtgatcagcgacctgggtgcctccggcgcctactacatcgccagcgccgccgaccagatctacgccgacaaggccagtctggtcggttccattggcgtgacggcggccagcttcggtttcgtcggcaccatggagaagctcggtgtcgagcggcgcgtctatacctccggcgagcacaagtcgttcctcgatcctttccagccgcaaaagcccgaggagacccagttctggcagcaggtgctggataccacccacaagcagttcatcgacagcgtgaaaaaagggcgcggcgaccggctcaaggtcgaggggcatccggagctgttctcgggtctggtctggtccggcgaacaggcattgcagctgggtttgatcgacggcctgggcaatgccagctatgtggcgcgcgaagtggtgaaggagaagaagatcgaggactacaccgtgcaggagtcgcctttcgatcgcttcgccaagaagttcggtgccagtgtggcggagcgcctcgcgctgtggatgggctggcaggggccggtactgcgctga

SEQ ID NO: 321140 - DNA, 693 bp, Pseudomonas aeruginosa
atgactgactacgcgttgctggtattcgattgggacggcaccctggtcgactcgatcgcgcgcatcgtcgattcgatgaaggcggcggcgcgggaaaccgctctgccggagcgggacgatacccggatcaagggcatcatcggcctcggcttgcccgaggcgatcgcttcgctctatccggaggttggcgatcctgctctggtcgagcgtttccggtgtgcctacagcgagcattacctggcgcaggaagcgcagccgtcgcggttgttccccggcgtggccgaagccatggtgcattttcgcgaggccgggttccgcctggcggtcgccaccggcaagagtcggcgcggcctggaccgggtgctggcggggcatggctggagcgatttcttcgatatcacccgctgcgccgacgaaacggccagcaagccggacccgttgatgcttcacgagatcctggcgcactgccgggtcgagccggggcgggcgctgatgatcggtgattcgccgttcgacctggaaatggcgcgacgggcggggatggattcggttgcggtggcctatggcgcccaatcgctggagcagttgcggccttatgcgccgcggctggaagttgagcatttcaccgagttgcgcgcctggttgggcggtgctcgacgtgaggcggtttcaggagtggttgagcatgtctga

SEQ ID NO: 321141 - DNA, 957 bp, Pseudomonas aeruginosa
atgactactcccgcctctccgaccaccggtgtccagctgctcgatgtgccgccggaactggctggtcaacgtatcgacaatttccttatcgcccgtctcaagggtgcgcccaagaccctgatctatcgcatcctgcgtaagggcgaagtgcgcgtgaacaaggggcggatcaagcccgactatcggctccaggccggagaccaggtgcgcgtgccgccgctgcgcctggccgagcgtgatgagccggcgccgctggcgcaggggctgctggagcggatggaggcggcgatcgtctacgaggacaaggcgctgatcgtggtcaacaagcccgccgggatcgccgtgcatggcggcagcggcgtgagcgccggggtcatcgaggtgtttcgccagttgcgccccgatgccaaggatatcgaattggtgcatcgtctcgatcgcgatacctccggcctgctgatgatcgccaagaagcgcagcatgttgcgtcacctgcatgaggccctgcggggcgagaagatcgtcgacaagcgctatcacgccctggtccgtggccactggccggctggcaagaagaacgtgcgcgcgccgctgctgaagaacaacctgcgttcgggcgagcgaatggtagaggtgaacgtcgagggcaaggacgcgctgaccgagttccgggtgctgcgtcgcttcggcgatttcgccaccctggtggaagcacgcccgatcaccgggcggacccaccagatccgcgtgcatgccaagcacgccgggcatgccatcgccggcgacccgaagtatggcgacgaggatttctcccgcgagatccgcgagctgggcggcaagcgcctgttcctgcatgccgcgcagttgcgcgtgccgctgcccgacgggcaggtgctggagctggaggcgccggtggacgagatgtggcagcgttcgctggagcgtttgaatgactga

SEQ ID NO: 321142 - DNA, 3165 bp, Pseudomonas aeruginosa
gtgccgatcgccgtttccggtagccccggaaaccattggtactacatgaaaagaatgctgatcaacgcgactcaacccgaggagttgcgtgttgcactggtcgacggccaacgcctgttcgacctcgacatcgagtcgggcgcccgcgagcagaagaaggccaacatctacaaaggccgcatcactcgcgtcgaacccagcctcgaagccgccttcgtcgacttcggcgccgaacgccacggcttcctccccctcaaagaaatctcccgcgaatacttcaagaaatcccccgaaggccggatcaacatcaaggaagtcctgagcgaaggccaggaagtcatcgtccaggtcgagaaggaagagcgcggcaacaagggcgccgccctgaccaccttcatcagcctggccggccgttacctggtgctgatgccgaacaacccgcgcgccggcggcatctcccgccgtatcgaaggcgaagagcgcaacgagctgcgcgaggccctgaacggcctcaacgcaccggccgacatgggcctgatcgtgcgcaccgccggcctcggccgcagcaccgaggaactgcagtgggacctcgactacctgctgcaactgtggagcgcgatcaaggaagcgtccggcgaacgtggcgcgcccttcctgatctaccaggaaagcaacgtcatcatccgcgccatccgcgactacctgcgccaggacatcggcgaagtgctgatcgacagcatcgacgcccaggaagaagccctgaacttcatccgccaggtgatgccgcagtacgccagcaaggtgaagctgtaccaggacagcgttccgctgttcaatcgcttccagatcgagagccagatcgagaccgctttccagcgcgaagtgaagctgccgtccggcggctccatcgtcatcgacccgaccgaggccctggtttccatcgacatcaactcggcgcgcgccaccaagggcggcgacatcgaggaaaccgccctgcagaccaacctggaagcggccgaggaaatcgcccgccagctgcgcctgcgtgacatcggcggcctgatcgtcatcgacttcatcgacatgaccccggcgaagaaccagcgcgccgtggaagagcgtgtccgcgaagccctcgaggccgaccgcgcgcgcgtccaggtcggtcgcatctcgcgcttcggcctgctggaaatgtcccgccagcgcctgcgtccgtccctcggcgagaccagcggcatcgtctgcccgcgctgcaacggccagggcatcatccgcgacgtcgagtcgctgtcgctggccatcctgcgcctgatcgaggaagaagccctgaaggaccgcaccgcggaagtccgcgcccgcgtgcccttccaggtcgccgccttcctgctcaacgagaagcgcaacgccatcaccaagatcgaactgcgtacccgcgcgcgcatcttcatcctgccggacgatcatctggaaaccccgcatttcgaagtccagcgtctgcgcgatgacagccccgaactggttgccggccagaccagctacgaaatggccaccgtcgagcacgaagaagcccagccggtcagctcgacccgcaccctggtccgccaggaagcagcagtcaagaccgtcgctccccagcagcccgcaccgcaacacaccgaagcaccggtcgagccggccaagccgatgcccgagccgagcctgttccagggcctggtgaagtccctggtcggcctgttcgcaggcaaggatcaacctgccgccaagcctgctgaaaccagcaagccggctgccgagcgccaaacccgccaggacgagcgtcgcaacggccgccagcagaaccgccgccgcgatggccgcgatggcaatcgccgcgacgaagagcgcaaaccgcgcgaggagcgtgcagagcgtcaaccgcgcgaagagcgcgccgaacgcccgaaccgcgaagagcgcagcgaacgtcgccgcgaagagcgcgccgagcgcccggctcgcgaggagcgccagccgcgcgaaggccgtgaagagcgcgccgagcggacaccccgcgaagagcgccagccgcgcgaaggccgcgaaggtcgcgaggaacgcagcgaacgccgccgcgaagagcgcgccgaacgcccggcccgcgaagagcgccagccgcgcgaggatcgccaggctcgcgacgccgcggccctggaagccgaggcattgccgaacgacgagagcctggagcaggacgagcaggacgataccgatggcgagcgcccgcgccgccgctcccgcggccagcgtcgtcgcagcaaccgccgcgaacgccagcgcgaggtcagcggtgagctggaaggcagcgaggcgaccgataacgccgccgcgccgctgaacacagtcgcagccgccgctgctgccggtatcgctgtcgccagcgaagccgtagaagcaaacgtggagcaagccccggccactaccagcgaggctgccagcgaaaccacggcaagcgatgaaaccgacgcaccgaccagcgaagccgtcgaaacccagggcgcggacagcgaggccaatgccgatgaaaccgccgacatcgaagcgccggtgaccgtcagcgtggtccgggacgaagccgaccagagcaccctgctggtcgcgcaagtcactgaagaagctcccttcgccagcgaaagcgtggaaagccgcgaagacgccgagagcgccgtgcaaccggcaacggaagcggccgaagaagttgccgctccggtgcccgtcgaagtagcagcccctagcgagcccgcagccaccgaggagccgaccccggccatcgcggcggtgccggccaacgcgactggccgtgccctcaacgacccacgggaaaaacgtcgcctgcaacgcgaagccgagcgtctggcacgcgaagccgcagcagcagccgaagcggcagctcaggccgctcccgccgtcgaggagatcccggctgtagcgagcgaggaagcgtcggcccaggaggaacctgctgcaccccaggctgaagaaatcacccaggccgacgttccgtcccaggcggacgaagcccaggaagcggtacaggccgagcctgaagcttccggcgaagacgccgccgacacggagcacgcgaaaaagaccgaggaaagcgaaacctcgcgcccgcatgcctga

SEQ ID NO: 321143 - DNA, 1020 bp, Pseudomonas aeruginosa
gtgagcctggaactgcaagagcattgctcgctgaagccctataacaccttcggcatcgacgtgcgcgcccgcctgctggcccacgcccgggacgaggctgatgtgcgcgaggccctggccctggctcgggagcgtggattgccgctgctggtgatcggtggtggcagcaacctgctgctgacccgtgacgtcgaggcgctggtattgcgcatggccagccaggggcggcgaattgtttccgatgccgcggattcggtgctggtcgaggcggaggcgggcgaggcctgggacccattcgtgcaatggagcctggaacggggcctggccggtctggaaaatctcagcctgattcccggcaccgtgggtgcggcgccgatgcagaacatcggcgcctatggcgtggagctgaaggacgtcttcgacagtctgacggcgctggatcgccaggatggaaccctacgtgagttcgatcgccaggcctgccgtttcggctaccgcgatagcctgttcaagcaggagccggatcgctggctgatcctccgcgtgcgcctgcgcctgacgcggcgggagaggctgcacctggactacgggccggtacgccagcgcctggaggaggagggcatcgccagtccgacggccagggacgtaagccgggtaatctgcgccattcgccgggagaagctgcccgaccccgccgtattgggcaatgccggcagcttcttcaagaacccgctggtggatgcggcgcaggccgaacgcttgcgtcaggccttcccggatctggtcggctatccgcaggcggacggtcggctgaagctggctgcaggctggctcatcgacaagggcggctggaagggtttccgcgatggcccggtgggggtacacgcgcagcaggcgctggtcctggtcaaccatggcggcgccactggtgcccaggtccgggcattggccgagcgtatccaggaggacgtccgtcggcgtttcggcgtcgaattggagcctgaacccaatctctactga

SEQ ID NO: 321144 - DNA, 465 bp, Pseudomonas aeruginosa
atgcgcgtcctgttcgtctgcctgggcaacatctgccggtcgcccaccgccgaaggcgtgttccggcgcaaggtcgaggaggccgggctggcctcccgtatccatgtcgattccgccggcaccgccggctggcatgtcggcaaggcacctgaccagcgcacccgcctggccgcgcaaaggcgcggctacgatctgtcggcactgcgtggacgccaggtcggcatcgaggatttctcctgccatgacctgatcctggccatggacctgtccaacctggccgacctcgagaccctgcgtgccgggcgcggtgccgccgaactggatctgttcctgcgtcgctacgggtccgagcgggacgaagtacccgatccctactatggcggcgaagaaggcttcgagcaggtcctcgacctgatcgaacatgcctgcgaccgtctgttgatcgaagccaaggggcgactgtga

SEQ ID NO: 321145 - DNA, 765 bp, Pseudomonas aeruginosa
atgacccaggcgttcactgtcgtcattcccgcccgctacgcctccactcgtctgcccggcaagccattgcaggatatcgccggccagccaatgatccagcgcgtctggaaccaggcccgcaagagcgccgccagccgcgtggtcgtcgccaccgacgacgaacgcatcctggcggcgtgccaggggttcggcgccgaggcgctgctgacacgtgccgagcacaactccggcaccgatcgcctggaggaagtcgcttcccggctcggcctggccagcgatgccatcgtggtcaacgtccagggcgacgagccgctgatccccccggcgctcatcgaccaggtggcggccaacctggcggcgcacccggaggccgccatcgctaccctggccgagccgatccatgaggtctccgcgctgttcaatccgaacgtggtcaaggtcgccaccgacatcgacggcctggccctgactttcagtcgtgcgcccttgccctgggctcgcgacgccttcgcccgcgatcgcgacagcctgccggagggcgtgccctatcgtcgccacatcggcatctacgcctatcgcgtgggtttccttgccgatttcgtcgcctggggaccgtgctggctggagaacgccgaaagcctcgagcaattgcgcgcgctctggcacggggtgcgaatccatgtggccgatgcccgcgaaaccatgcttccgggcgtggatacgccggaagacctcgaacgcgttcgccgcgtgctggggggctga

SEQ ID NO: 321146 - DNA, 186 bp, Pseudomonas aeruginosa
atggacccgaaactcctcgatatccttgcctgcccgttgaccaagggcccgctggtgctcagcgaagacaagaccgaactgatcagcaagcaggccggcctggcctatccgatccgcgacggcatcccggtgatgctggagagcgaggctcgctccctgaacgtggacgagcggctggacaagtaa

SEQ ID NO: 321147 - DNA, 963 bp, Pseudomonas aeruginosa
atgtcgttctccgagcggctgctcgccgcctggtaccaggggcatccggcgctggcgttgctgcgtccgctggaggctctctattccgggcgcaagcccgcctatcgggcgccgctgccggtgctggtggtaggcaacatcaccgtcggcggaaccggcaagacgccgatgatcctctggatgatcgagcactgcagggctcgcggcttgcgggttggcgtgatcagccgcggctatggtgcccggccgcccaccacgccgtggcgggtgcgggccgagcaggacgccgcggaggccggcgacgaaccgctgatgatcgtccggcgcagcggcgtgccgctgatgatcgacccggatcgtccgcgcgccctgcaggcgctgctcgccgaagagcagttggacctggtcctctgcgacgatggcttgcagcactatcgcctggcgcgcgatctggagctggtgctgatcgatgccgcgcgcggtctcggcaatggtcgttgcctgccggccggtccgttgcgcgaaccggcggagcgtctggaaagcgtcgacgcgctgctttacaacggcgccgacgaggatcctgacggcggttacgcattccgcttgcagcctactgcgctgatcaacctgcagagcggcgagcgccgaccgctggagcattttcccgcgggccaggaggtccatgccctggccgggatcggcaatccgcagcgtttcttcaggacgctcgaggcgctacactggcgggcgattccgcatgccttcccggatcacgcgacctacacggcggccgaactggcgttcagcccgccgctgccgctgctgatgaccgagaaggatgccgttaaatgccgggctttcgcagcggccgactggtggtacctggcggtcgatgcggtgccttccccagcattcgtcgcctggttcgacgcccgactcgagcatctcctggcgcgctga

SEQ ID NO: 321148 - DNA, 441 bp, Pseudomonas aeruginosa
gtgaaattccgccgcagacgggcgggtgccgcccgtgaagacgtcttcatcaacctggcgtcgctgatcgacgtgatcttcgtcctgctgctgttcttcgtggtcagtaccaccttcacccgccccgagcagctcaacatcgagctgccatcggcggagagcggcgaaaccgccggcaccgagcagaagcaactggaactctcggtggatgccgaggggcactacgccttgaacgggcaggcgctggccaagagcgacctggccaccctgatggcggcgatgcagcgtgaatcggcgggcgacaacaacctgccggtggtgatcagcgccgatgccaagtccacccaccagtcggtggtcacggcgatggacgcagcgggcaagctgggcttcgtccacctgcgcatcaccacggtcgagaacacggcggccaagccctga

SEQ ID NO: 321149 - DNA, 636 bp, Pseudomonas aeruginosa
gtgtgggaactggttcaagccggcggctggatgatgctgccgatcattctgagttcgatcgccgccaccgccatcgtcgcggagcgcctgtggacgctgcgcaagagccgcgtcgcgccgcccgagctgctcggccaggtgtggaagcagatcaagggcaagcaactgagcgcccagaagctcaaggacctgcgcgccaactcgccgctgggagagatcctcgccgccggtctggccaactccaagcacggtcgcgagatcatgaaggagtgcatcgaggaggctgcttccggtgtcatccacgagctggagcgctacctcaacgccctcggcaccatcgccgcgatggcgccgctgctgggcctgctgggtacggtgttcggcatgatccagatcttcggcgccttcatggacaacggcatggccaactcgccgatgcttgccgcgggcatctccaaggcattgatcaccaccgccgccggcctgctggtggcgattccggcggtgttcttccatcgctacctgctgcggcgggtcgacgaactggtgatcgccatggagcaggaggccatcaagctggtggaagtggtgcagggcgatcgtgaagtcgactacgtcgaggaaggcaaagcgtga

SEQ ID NO: 321150 - DNA, 1137 bp, Pseudomonas aeruginosa
atggcgctggggctggcgatgccgctgctggcgctgggcctgccgttgagcctgagcggagcgccggccaacctgctggcggtgccttggatcgaactgctggtagtgcccccggccctggcggggagcctgctgctgtgggtgcccgggctgggcgaggggctgcttcgcgccgctggcgtttcgctggacctgctgtttcgtgcacttggcctgctggcgggcctggccgaggcctggcagccacccgccgcagcggcctggagcgtagcgctgggcatgctcggcgcgctctgctggctggcgccggctggcttgccgttgcgtgccctcggtgccgcgttgctactgccggcgttgttgccgtcatcgccgcctgtcgaatgggggtgggcggaagtgcgggtgctggacgttggccaggggctggccgtgctggtgcgtacccgggagcatgccttgctctatgacagcggtgcgcggcagggggcgttcgacatgggcgagcgggtggtggtgccggtgctgcgcagcctggacctgcggcgcctggacggcctgttgctgagccatgccgacaacgaccatgcaggcggtgctcctacggtcgcttcccgattcccgccgggttggctggtcagcggcgaacccgcgcgcctgccttcgccgttgttcgcggacagctgcgacgagcggagctggtcctgggatggcgtggttttcgaacagtgggcatgggcgcaggccggcgacagcaacgaccgctcctgtgtgctgagggtcgaggccgatggcgaagtcctgctgctgaccggggacatctcgcgtgcggccgagcatgcctggctggcgcgacaggccgatccccgggtcgactggttgctggcgccgcatcatggcagccgcagttcctccggagtcgccttcgtgttgcgtacgcgacctcgccatgtgctggtctcgcgaggttggcgcaacgccttcggccatccccatggcgaagtgatggagcgttacgcgagggtcgccgcgcaggtccacgacacggcacgcgacggtgccctgacgtttctcctcggaagccgtggcggcgcacgccgggagcgtgattcggcgcacttctggcgggaaaaatga

SEQ ID NO: 321151 - DNA, 765 bp, Pseudomonas aeruginosa
gtgaggcagacgctgcgccagggcgcgctaggcgtcgccgggctgttgacgctgttcgccctgtggtggctcggcgtggccctgttcggcgccgccgacggcctttcggcacgcttctcgccgcaggcgacgttgctcagcctgggtgaactgctggaacgccgcgaactctacgagcacgtgctggtgagcctgaaacgggtcctgctgggcttgttcctggcgctgctggtgggagtgccgctggggctgctggtgggcgcctcgcgcaacctggaagcggcgaccactccggcgttccagttcctgcggatgatctcgccgctgtcgtggatgcccatcgcggtgatgctgatgggcgtgggcgaccagccgatctatttcctgctggccttcgccgcgctctggccgatcctgctgaataccgccgccggcgtgcgccagctcgacccgcgctggctgcaactgagccgcagcctcgccgccacgccctgggaaaccctgcgccgggtgatcctgccgggcatcctcggccatgtgctgaccggcgtgcgcctggccatcggcatcctctggatcgtcctggtgccctgcgagatgcttggcgtcagcgccgggctcggctactacatcctcgacacccgcgaccgcctggcgtactccgagctgatggcgatggtgctgctgatcggcctgctcggctacctgctcgacgcggcggcgcgcggactctaccggcgctgggcgcacggggcgctcgggtag

SEQ ID NO: 321152 - DNA, 1200 bp, Pseudomonas aeruginosa
atgtgcctggacgacccgacccattcccgacgtgacatcctcaagctcgccgcgctgctcagcgctgccggcgcgttgccgctgctgagcagcctgcaggcgcgtgccgccgccgaacccgacgcgccggtgcgcatcggctacctgccgatcaccgacgccacgcccttgctggtggcccatgccaacggcctgttcgaggccgagggcatccaggccgaacggccggtgctgttgcgtagctgggcgcaggtgatcgaggcgttcatctccggccaggtcaacgtcatccacctgctgtcgccgatgaccgtctgggcccgctacggcagcaaggtgccggccaaggtggtggcctggaaccacgtcggcggctcggggctcacggtggctccggagatcgccgacgtgcgccagctcggcggcaagagcgtggcgatcccgttctggtactcgatccacaacgtggtgttgcagcaactgctgcgcgacaacggcctgcgcgcggtgagccgtgcggtgggcgcggcgctggccgccgacgaggtcaacctggtggtgctgccgccttcggacatgccaccggcgctggccagcaagcgcatccacggctacatcgtcgccgagccgttcaacgccctggcggagaacctcaaggtcggccgggtacagcgcttcaccggcgatgtctggcgcaaccacgcctgctgcgtggtgttcatgcacgaacacgacctggagcggcggccgcagtggtcgcaaaaggtggtcaacgccatcgtcaaggcccagctatggactcgcgagcaccgcgccgaggccgcacagttgctgtccaaggccggagccaaccgctatacgccgcacgcaccggaggtcctcggccgggtgctggcgccgggcgccgaggagcagcaggcctatctcgccagcggcgcgatccgccacgccgactggcaggagcggcgcatcgacttccagccctatccctatccgagctacaccgaggaactggtgcggcggctgaaggacaccctgatcgaaggcaataatgccttcctcgccagcctcgatccgcgccaggtggccagtgacctggtggacgaccgcttcgtccgccaggccctggcagaggtcggcgggttgcaggcgttcggcctcgccgagggcttccagcgcagcgaggagatcagcccgtga

SEQ ID NO: 321153 - DNA, 837 bp, Pseudomonas aeruginosa
atgagcgaggcgctcctcgacgctcgcgggatcgccctcggctatccgcgcggtgccggctggcaggcggtgctcggcgatttcgaattgcgcctgggcgccggcgaggtggtctcgatcctcggtcccagcggcgtcggcaagtccagcctgctgcgcgtgctggccggcctgcaggagccggccgccggcagcgtgcgggtactcggcgagcccctgcgcggaccgcatccgggcgtcgcggtggcgttccaggaccccagcctgctgccctggctgaacctggagaagaacgtcgccttcggcctcgatttcgcccgccagccgcacctcgacgcggccacccgccaggcccgcgtcgaccaggcgatcgccgcggtcggcctggaacatgcccatgcccgctacccggcgcaactctctggcggcatggcccagcgcaccgcgctggcccgctgcctggcgcggcagccgaaagtgctgctgctcgacgaacctttcggcgcgctggacgaagtgacccgcgccgacatgcagcagctgctgctgcgggcgatccacgagcgcggcaccgccgtggtcctgatcacccacgatatcgacgaggccctgctgctctccgaacgcatcctgctactgggtgacagcccggcgcggaccctcggcgagtggcgcatcgacctgccgcagccacgcgcggagctggtcgaggaactgggcgcgttgcgcatcgagatcctgaaaaccctacggcgggcgagccgcacccatgcccatcccatcgctcagccggaggcctcccatgtgcctggacgacccgacccattcccgacgtga

SEQ ID NO: 321154 - DNA, 561 bp, Pseudomonas aeruginosa
atgtcacgcgttcccgtgctcaccctggaaaacgcccccgaggcggcgcgtccgttcctccagaccgcgctgaacaactcgggttatatcccgaatctgctcggcgtgctggccaatgcgccggccgccctggaaacctacctcaccgtgtccgggctgaacgccaaggccagcctcggcctgcccgagcgggaagtggtgcaactggtggcggccaccacccatggctgcgacttctgcgttgccgggcacaccgcggtggcgcgcaacaaggcgcgcctgccggagccggtgatcgaggccctgcgcgcccgcggcgaactgcccgatgcccgctacgaagccctggccgacttcacccgcgcggtgattgccagccgcggtgcggtcaccgacgagcagttcgaagccttccgcgccgccggtttcgaccaggcccaggccctggaagtgatcctcggggtgagcctggcgacgctctgcaacttcgccaacgtgttcgcccgcacgccgctcaatgccgagctggagcaatatcgctggaccaacccgcaggcctga

SEQ ID NO: 321155 - DNA, 906 bp, Pseudomonas aeruginosa
atgaattcgtccaacccccttgtcgattggttattagacagcctcgaagtcgacaccagcctgttccatgtcggtcgctactgcggcggctggcatgcctccacccacggtctggcgcgtgccagcttccacctggtggtgcagggacactgctgggcgcacgtcgccggaagcgcccggggctggcgactggacagcggcgacgcgctgttcttcctgcgcgacgtcgagttccgcctgtccagcgaggccaccgccgaggccgcgcgctgccagccgcgtggcgaaatgcaggcgctggagtggaacgcggcggacggtgccggcctggtctgcgggttcttccacttccattcgggattgtccgggctgatcgtcgacgccctgcccgactggctgatcctgcgcgccggcgatccggcgctggacgcggcgcgacgcctgttcgccctgatcgtcgacgagtgccgccgccagccggcgccgtcgccggttctactggagcgcctcagccacctgctgttcctctacgtgttgcgccagcaggtgctcgacaacccgaccctcggcggcctggtggcactggcacgccagccgcagttcgccggcctgctggaagcgctgatcgaggcacccgaacagccctggagcctggaacagatggccgaacgcaccggactctcgcgctcggccttcttcaagcgcttcaacgaactcagcggtcagtcgccggggcaggtcctgctggccctgcgcatgcaccgcgcctgcgccctgctgcgcgccgacgccagcgtcgccgaggtcgcggcggcggtcggctaccagtccaccgccgccttcacccgtgccttccacaaggccaccgggcagcagccgggggcctatcgcaaggccagccgctga

SEQ ID NO: 321156 - DNA, 1617 bp, Pseudomonas aeruginosa
atgagccagcccaagccgatccgcaacgtcctctacatcatgtgcgaccaactgcgtcgcgattacctgtcctgctacggccatccctatctgcacacgccgaacatcgaccgcctggccgcggagggcgtgcgcttcgcccgtgcctatacccagggcaccatctgcgggccgtcgcggatgtcctcgtacaccgggcgctacgtcagcagccaccaggtggcctggaacgcggtgccgctgccgctggaggagctgaccctgggcgactacctgcgcgccgcgggagtccgcaccgcgctggtcggcaagacacacgccacggccaacctggaaggcatgcggcggttcggcatcgatccggccagcgcgcgcggcgcggccctcgccgaagccggcttcgagccctacgaccgcaatgacggggtctacccggatgacccggccttcgccgacaagcgcgaacgcgcgccctacacccactacctgcggcgcctcggcttcaccggcgacaacccctggcacgactgggccaacgccgccgccggcgccgacggggaaatcctcagcggctggcggatgcgccatgccggattgccgacacgcttgccggaggcgcacagcgagaccgcctataccacccgtcgcgccatggatttcatcgacgagcagggcgagcgtccctggtgcctgcacctgtcctacatcaagccgcactggccctacatcgcgccggcgccgtaccacgcgctgtaccgcgccgaccaggtgctcccggcgctacgcgcggcgcccggcgaagaaagcgaccacccggtgtaccgcgccttccgcgaacatcgcgagagcctcaatttctcccgcgaagacgtgcgccggcaggtgatacctacctacatggggctgatccgccaggtcgacgaccagctcggccggctcttccagcacatgcgcgccagcgggcgctgggacgataccctgatcgtcttcaccagtgaccatggcgatttcctcggcgaccacggcctgggcgagaaggagttcctcctcgagtcggcggtgggcgtgccgttgctgatccgcgatccgcgccccgaggcggacgccacccgcggccgggtggaggaggcgctggtgcagtccatcgacgtactgccgagcatcctcgaagccttcgccgtcgagcccgccagccatcgcatcgagggccgttcgctgctgcccttcgtccatggcgcgccgccggcggactggcgcccctacgccatcgccgagtacgactacgccttccaggcgccggcgcgggagcgcctgggccgacccatcgatgcctgccgcatgtacatggtgcgcagcgagcgctggaagtacatcgcctacgacggcttccgcgcccaactgttcgaccttgccagcgaccccggcgaattgcgcgacctcggcgccgacccggcgcatgcggcggtgcgcgaggcccatgccgggatgctgttcgactggctgcgcgggctgaagcggcggactaccatcagcaacgcggagatcgacctgcgcggccaggcgttccgctacggcgagccggaaggcgggcgcctggtaccgatcggtctctggtga

SEQ ID NO: 321157 - DNA, 912 bp, Pseudomonas aeruginosa
atgcatatcgatctccgccagctccgccacttcatcgcccttcacgagcaccgcagcttcgtcgccgcggcgctggcggttaacctttcgcaatcggccttcagccgcagcatccaggcgctcgaacacagcgctggctgccgcctggtggaccgcgcggccaaggacctgcgtccgaccaagcagggcctgatcgtcctcgaacatgcgcgccggctggtcagcggcgcgcacaacctggccaacgagatcgccctgttcaacggcctggaggccggcgaactgcgcttcggcgccgggccggctcccgccacctggctggtgccgcgtgcggtggggcgcttcaacgtgcgttatccgaaggcgcgggtgagtttccaggtcgaacactggcaggcgctgaaccgccgcctgcaggccgaggagttcgagttcttcgtcgccgacacccggcatttcgaggccgacccgcaataccggacctcgcgcctgcgtccccggcgctggcatttctgctgccgcgaggggcatccgctggccgctcgcgagagcgtttccgccgaggagctgttgagcttcccgctggcgaccaacatcagcccgccgaacatccgcaaggtgctggtggacctcagcgggcgtcccgacttccgcccggccatcgagtgcgagaacggccatagcctgctcggcgtggttctcgcctcggatgccatcggcatcagcagcggcctcggcgacctggcgccgccgggacagggaggcctgcgtccgctgcgggtgcgcgagctgcccgacgacctcgacgaactgcatacccgctacggcatcgtcagccgcgccggctacagcctgtcgccgctggcggaggcgatgatcgacgaactgaagcgggtcgacgacgccacctga

SEQ ID NO: 321158 - DNA, 2370 bp, Pseudomonas aeruginosa
atgaatcgccgacccgcgtaccgctccatcccgtcgtcccgcagcgcaccgttccgccgtcgcctgctgcccctgtcgatctgcctggcctgcgccggaggggcgcaactggccggcgccgacgacacccccgcgggcaccgaagaggcgcgccaggcgcagccggccaccaccctgcagaccgtcacggtgacctcgcggcgacgggtggaaaactcccaggatgtgcccaccgcgatgagcgtgctcggcggcgaaaccctggagagccagcgcatctaccgggtgcaggacctgcagcaactggtgccgagcaccaacgtcgcctacgtccacgcgcgccagtccagcgtgtcgatccgcggcctcggcaacaacccggccagcgacggcctggaaggcagcgtcgggctgtacctcgacaacgtctacctcggccgccccggcatggcctcgttcgaccttctcgacatcgagcagctggaggtcttgcgcggcccgcagggcaccctgttcggcaagaacaccacggccggggtgatcaacatcggcacccgtgcgccgagcttcactccggagcgcagcgttgagatatccggcggcgaggacggctacttccaggccaggggcacgatttccggaccgctcggcgagaccctcgccgggcgcctgtcggcctaccgcacccgcgacgacggctacgtgaagaacctccacgacggcaacaccctcaacggcggcgcacgccagggtttccgcgggcagttgctgttcaagccgaacgacgacttcagcctgcgctggatcggcgactacaacgaggaagactccgacaatggtgtccttaccctgttcagcagcggccccacggtgaacggcgtgaaccgctacgaacagcgcgccgccgcggccggcgcgacgctggtggacggccatcggcgcaaggtcaacttcgactcggaccagcaggtcacggtgttccagggcggaacctcggtggaagccaactggaagctggccaacgacttcaccctcacttccatcagcgcctaccgctggtgggatttcacgccgcgcaacgacgacggcctggacgtaccggcggcctataacgccggagtctcggtgcgcgacaagcagtggtcgcaggaaatccgcctggcttcgcccagcggcggcttcttcgactacgtgctcggcgcctactacttcggccaggacctcgacaacaagtccttcaccgactacgggcccagggcagacatctggaacggaacccccgccggcgccctgagcgacgtcagcacccgcggtcgcgggcacatcgacaccgacagctacgcgctgttcgcccagggcacctggcacctaaccgagcgcctggacctcaccgccggcgtgcgcggcacctacgaggaaaagtccgcctgggtcgaacgctacgccccgctcggcggcgccgcggtgagcggcgcggcggcggccgcgcgcaacggcagggtcggcgcctacgacagcggcgacatcggcctgcacagcgtcagtccgtccgctctgctcagcctcagctaccgcttcagcgaccaggttctgggctatgcctcgctgtcccacggcgagaaatccggcggcgtcaacctgaccgtggccagcgctcccagcgccggtgccgactcgctgctgattggcaccgagcgcgccaacgatgccgagctggggttgaagaccaccctcctcgacaaccgcctgatcctcaacggcaacctgttctggaccgtggtccacggctaccaggccaatgcctacgacgaggccaaccgcacccagtacctgaccaatgccggcgatgtgcgctcgcgcggcctggagttcgaagcgacggccctgccgatccgcggcctgaccctgaatttcaatgcgtcctacaacgacgttcgctacctgtcctacaagaacgccccgtgcgcccccgaggtggccttccagaccggcgccccggcgtcctgcgacctcagcgggcaccaggtggtcggtgcctcgaagtacatcgccaacctcaatggcgagtatcgctggaagctcgacgatggcctggagccctacctcaccgccagctacgcgttccgctccagggcggtgggcaccatcgacgattccgcatacggacagatccccagctacgccctggtcaacgcctccgccggcctgcgcggcgactacggggacggccagtgggacctgtccctgtggctgaagaacgctttcgacaagacctacttcaccagcctctggaattccgccaacggcggctacgccggcgtgctcggcacgccgcgcaccctgggcgtgaccgcccgctacgacttctga

SEQ ID NO: 321159 - DNA, 1341 bp, Pseudomonas aeruginosa
atgcccagattcccgatgctcctgctcagcgccgcgctgctcgccgccggcgcccatgccgcgcccagcgtctaccccaccggagtgacccgctacgacccgcagaaggccttcaaccagtacgtgatcttcagcggcgcagaccgcaagacccacctgatcgacatgaacggcaacgaggtgaagcgctgggactaccccggcttccccgccgccgtgatcgacccggccctgagcggcggcaagcgcggccatgtgctgctgcaactggccgacctggccgctccggacaagctggcctcgcccggcaacggcctggccaaccaggccctcggcgagctggactgggatggcaaggaggtctggcgctggggtgaccaggcgccgggcggcgccgcccatcagcaccacgaccagcgccggctggccaacggcaacaccctgctgctggcgaacaaggtccacgcggtgaagggcttcgccgtgccccgggtaatcgatgacgtgatctacgaggtcacgccgcagggcaagctggcctggagctggaccgcttcggagcatctcgacgaattcggattcaccgccgaccagttgaagcgggtacgggccagcgagaaccccgactacctgcacatcaacaacctcgccccgctcggcgagaaccgctggcacgctgccggcgaccggcgcttcgccccggacaacctgctgctcgactcacgcaacgccaacttcatagcgatcgtcgacaaggccagcggcaaggtggtctggcgcctcggcccgaaccttccgccgatcgacccgaagagcgcccgtaagctgccgcgcccggtggaccagatcagtggccagcacgacgcccacctcattcccgagggcctgccgggcgccggcaacctgctggtgttcgacaaccagggtgacgccggttacccctcggtacagcgcgggctggtctccggctcgcgggtactggaaatcgacccgctgaagaagcagatcgtctggcaatacactgccgaggactcgcagcagcccggctgggccttctacagcgccttcatcagcagcgcgcggcgcctgcccaacggcaatacgctgatcgacgaagggcagaacggacgcttcttccaggtaacgcccggcggcgagatcgtctgggagtacgtcagcccctacttcggcaaggcgccgcgcggcgacgcccggagcaactgggtctaccgcgcgctgccggtggcctacgactgggtgcccgaaggtacgccgcgcgaggagaaggcggtgaacctggcggttcccggcaccacgccgcaggtcacggcgcggcgttga

SEQ ID NO: 321160 - DNA, 906 bp, Pseudomonas aeruginosa
atgcccagagccagcaaagtcaccgatccgtcctacgagctgatggacgatcacgaaggccattcgctgatctaccgccagcacggcttccccagcccgctggtgcgctggcacttccacaaggaatacgagctgcacctgatcgtcgctagctccggcaaggtatttatcggcgactacatcggcaacttcgcccccgacaccctgttcctcaccggtcccaacctgccgcacaactggatcagccaggtggagcccgacgaggtggtggcccggcgcgacatgctggtgaacttcaccgacgaggtgctggaggacggcagcggcgtattctccgagctgaaccgcctggccccgctgctggcgcgggcgcgctacggcatcgagttccgcgacccggcgctgatcggcgaaagccggcgactgttgcaacgcatcgccgacagcggcggcatgacccgcctgggatacttttttatcctcatggaacagctcgccgaatgcgaggactaccagttgctctctaccgtcacttcctcgcaactggccgacgagcacaacgtcgaacggatcaaccgggcggtggactacatcttccagcactacgcccaggacctcacccaggagcaggtcgccgcccacctgggcatgacccccacctacttctcgcgcttcttcaagcaggccgccgggcgcggcttcgtcgagttcgtcaaccgcttgcgcatcagcaagtcctgcgagctgctggcccgcagcgagctgccggtgaccgaggtgtgcttcgagtcgggcttcagcaacctgtccaatttcaaccggcgcttccagcagctcaagggcatgacgcccaccggctaccggcgcctggtgacccagcggctgaccgagcagaacctgctctga

SEQ ID NO: 321161 - DNA, 1311 bp, Pseudomonas aeruginosa
atgaacgactcgatcaaggcctgcctggccgccgcctgcctcgccctgcccctgctggcccagggcgccgagaccctgaccatcgccacggtcaacaacaacgacatgatccgcatgcaacgcctgtccaaggtgttcgaggaaagccacccggacatctcgctgaaatgggtggtgctcgaagagaacgtcctgcgccagcgcctgaccaccgacatcgccacccagggcggacagttcgacctgctcaccatcggcatgtacgaagccgcgctgtggggcgccaagggctggctggagccgatgagcgggctgcccgccgactacgccctggacgacctgttgccctcggtgcgcgacggtctctccgtcaagggcacgctgtacgccctgccgttctacgccgaagcctcgatcacctactaccgcaaggacctgttccagcaggccgggctgcggatgcccgagcaaccgacctggacccagctcggcgaattcgccgccaggctcaaccgcccggaccagggccagtacggcatctgcctgcgcggcaaggccggctggggcgagaacatggcgttgatcggcaccctggccaacgccttcggcgcacgctggttcgacgagcgatggcagcccgaattcagcggcggcgaatggaagaaggctctcgacttctatgtctccaccctcaagcggtacggcccgcccggcgcctccagcaacggattcaacgagaacctggcgctgttcaacagcggcaagtgcgcgatctgggtggacgccagcgtcgccggttcgttcgtcaccgacaagagccagagcaaggtcgccgacgccaccggcttcgccttcgccccccgggaagtcaccgacaagggcgcctcctggctgtattcctgggccctggcgattcccgccagctcgcgcgccaaggacgtggcgaaggccttcgccacctgggccacctcgcaggcgtacggcaagctggtggcggacagggaaggcgtggccaacgtgccgcccggcacccgcgcctcgacctacagcgaggcctacctggccgccgcgccgttcgcgcgggtcaccctggaatcgctgaagcgcgtcgatcccaaccatccgacgctgaagccggtgccctatgtcggcatccagttggtcaccatccccgagttccaggccatcggcacccaggtcggcaagctgttctccgccgccctcaccgggcagatgagcagcgaccaggcgctcgccgccgcgcagcagagcaccgcccgcgagatgaagcgcgccggctatccgaagtag

SEQ ID NO: 321162 - DNA, 933 bp, Pseudomonas aeruginosa
atgaacacctcggccctcgataccccgctcccggcccgtcccgcccgccgccgtctccagcgccgccggcgcggccctggctggctcctggtcagcccctcggtggcgctgctgctgttgtggatgatcgtgcccctgggcatgaccctgtatttctcgctgatccgctacaacctgctgtatcccggcgagaatgccttcgtcggcctggagaacttcaccttcttcgtcaccgacgccggcttcctgcccggcgcgctgaacaccctgctgctggtgggcagcgtgctggcgatcagcgtggcgttcggcgtgctcatcgccgcgctgctggaggccggcgaattcttcggccgcggcgcggtgcgggtgttgctgatctcgccgttcttcatcatgccgacggtgagcgcgctgctctggaagaacctgatcttccacccggtctcgggcatcctcgccgccgtctggcgcctgttcggcgccgagccggtggattggctggcgcactatccgctgctgtcgatcatcctcatcgtctcctggcaatggctgcccttcgccatcctgatcctgatgaccgccatgcagtccctcgaccaggagcagaaggaggctgcccgcctcgacggcgccggtccgctggcgatcttctggcacctgaccctgccgcacctggcgcggcccatcgcggtggtgctgatgatcgagacgatcttcctgctctcggtgttcgccgagatcttcaccaccaccagcggcggccccggctacgaatcgaccaacctcgcctacctgatctacaaccaggcgctgctgcagttcgatgtcggcatggcctcggccgggggcctgatcgcggtgctgatcgccaatatcgccgccatcgtgctggtgcggatgatcggcaagaaccttaccgagcgcagctga

SEQ ID NO: 321163 - DNA, 834 bp, Pseudomonas aeruginosa
atgctgacactcaagcaatcccgccgcctgcgcaatgccctgctcggcctgctctgctggggcatcgccctgctgctgttcttcccgatcttctggatgctgctgaccagcttcaagagcgagatcgacgccttcgccacgccgccgcagttcatcttccagccgaccctggagaactacctgcacatcaacgagcgcagcgactacttcgcctacgcctggaactcgttgctgatctcctcctcggcgactctcctgtgcatgctcgtcgcggtgccggcggcctactccatggccttcttcgagacccgccacaccaagcgcacgctgctctggatgctgtcgaccaagatgcttccgccggtcggcgtactgatgccgatctacctgctggccaagcagttcggcctgctcgattcgcggctggcgctgatcatcgtctacaccctgatcaacctgccgatcgtggtctggatggtgtacacctacttcaaggacatccccgtggacatcctcgaagcagcgcgcctggacggcgccggcacctggcaggagatcgtccgcgtactgctgccgatcgcccgcggcgggctcgcctcgaccctgctgctgtcgctgatcctgtgttggaacgaggccttctggtcgctcaacctgacctcctcggccgccgccccgctgaccgccctggtcgcctcctattccagccccgaaggactgttctgggccaagctctcggccgtctccaccctcgcctgcgcgccgatcctggtcttcggctggatcagccagaagcagctggtacgcggcctttccttcggcgccgtgaaatga

SEQ ID NO: 321164 - DNA, 1113 bp, Pseudomonas aeruginosa
atggctgatctcaagatccgcaacctgcagaaaggcttcgacggccaggccatcatcaagggcatcgacctcgacgtccgcgaccgcgagttcgtggtcttcgtcggcccctccggctgcggcaagtcgaccctgctgcgcctgatcgccggcctcgaagaggccagcggcggcagcatcgccctcgacggcacggacatcaccgacaccccgccggcgaagcgcgacctggcgatggtcttccagacctacgcgctgtacccgcacatgacggtgcgcaggaacctctccttcgccctcgacctggccggcgtcgacaagcgcgaggtcgccgccaaggtcgacgccgccgcacgcatcctcgaactgcaagcgctgctggagcgcaagccgcgccagctctccggcggccagcggcagcgggtggcgatcggccgggcgatcgtgcgcaacccgaagatattcctcttcgacgaaccgctgtccaacctcgacgccgccctgcgcgtgcagatgcgcctggaactggcgcggctgcaccaggaactggcggcgaccatgatctacgtgacccacgaccaggtcgaggcgatgaccctggcggacaaggtcgtggtgctcaacggcggacgcgtcgagcaggtcggctcgccgctggagctttaccaccatccggccaacctgttcgtcgccggcttcctcggcacgccgaagatgggcttcctgcgcggccatctcagccgcaaccagggcgagcgctgcgaggtcgccctcgaatgcggcgcgcgcgtcggcctgccgctatgcgccggcgagctggccaccggcagcccggtgaccctcggcatccgcccggaacacctgaacatcgcccgcccgggccatgccttccagggcctgctgcgggtcgccgccgacgtcagcgagcgcctgggcagcgacagcttctgccatgtccgcgccgactcgggggaaatgctcaccctgcgcgtgcgcggcgatttcgcaccggactacggcgcccccctggagctgggcttcgatccggagcactgccacctgttcgacagcaacggccaggccctcgacaaacgactgcaacaggcggcctga

SEQ ID NO: 321165 - DNA, 1476 bp, Pseudomonas aeruginosa
atgaaactcaaccggcagcacctccccctgctggcgaccgctgtcgcccgcccgtcctacgaccccgcgcaactgcgccagggcatcgtccacatcggcgtcggcggcttccaccgcgcgcaccaggcggcctacaccgacgccctgatgaaccgcggcgaagccctcgactgggcgatctgcggcgccggcctgcgcagcgacgaccgcgccatgcacgacgccctggccgcccaggactacctctacaccctctacgagctgggcgaccaaccggacaccgaggtccgcgtgatcggcgccatcagcggcatgctgctcgccgaggacggcgccgaggcgctgctggaaaaacttgccgagccggccatccgcatcgtctcgctgaccatcaccgaaggcggctactgcatcgacgatggcagcggcgagttcctcgccgagttgccgctggtgcgccacgacctggccaacccgcggaccccgcgcggggtcttcggctttctctgcgaggctctgcggcggcgccgcgacacaggcgtgccggcgttcaccgtgatgtcctgcgacaacctcccgcataacggcgaggtggcgcgcaaggcgctgctggccttcgccgaacggctcgacccggggctggcgcgctggatcgcgacgcacgtcagctttcccaacgccatggtcgaccgcatcaccccgatgaccagccccgcccaccgccgccaactggcccaacggcacgacgtagaagacgcctggccggtggtctgcgaacccttcgtgcaatgggtgctggaagatcgtttcagcgctgggcgcccggcctgggaaaaggtcggcgtgcagttcaccgacgacgtcacgccctacgaggagatgaagatcggcctgctcaacggcagccacctggcgctcacctacctgggcttcctgcgcggctaccgcttcgtccacgagaccctcggcgacccgctgctgcgccgctacgtgcgggccttcatggaccgcgacgtggccccgctgctggcaccggtaccggggatcgacctggaacgctacaaggacagcctggtcgagcgcttcgccaaccgcgccatcgccgaccaactggaacgggtctgctcggacggctcgtcgaagtttcccaagttcatcgtccccaccgccaatcggctgatcgccgccggccggccgctggaacgggtggccctggtggtggcggcctgggcgctgtacctgggcggggtcgacgagcatggcgaacgctacccgattcccgatccgcgcgccgccgaatgccaggcgctggttgccgaacgccacggcctgggccggcgcctgctcggcgtggagaccgtgttcggcccggcgatcccggcctcggcggccttcgtcgaggccttcgagcggctctacgacagcctgcgccgacacggcgtcagcgaaaccctgcgccaggtactcggcgaatga

SEQ ID NO: 321166 - DNA, 1491 bp, Pseudomonas aeruginosa
atgcacggattgttcctcggcatcgattgcggcacccaaggcagcaaggcgctgctgctcgacgccggcagcggccgcacgctgggcctgggcagcgccgcgcagcgcccgccggaaggccgcgacggacgccgcgagcaggacccggcggactggctggaagccatggccagcgcggtacgcatggccctggaagaagccgcggtggacggccgcgaggtccgcgccctggcggtttccgcccagcagcatgggctgctcctgctcgacgccgagggccgggcgctgcgcccggccaagctctggtgcgacaccgagagcgcggcggagaaccgcgagctgctggaagccctcggcggcccggccggctcgctggaacgcctgggactggtgctcgcgccgggctacacgctgtccaagctgctctggagcaggcgccgctttcccgagctgttcgcccgcgtcgcgcacatcctcctgccccacgactacctcaaccactggctcaccggccgcgtctgcagcgaagcgggcgacgcctccggcagcggctacttcgacgtgcgccggcgcacctgggccagcgacgtgctggagctggtcgagccgggcggacgcctggcggcggcgctgccggagctgatcgagcccggcgcctgcatcggcaacctgcgccccgaagcggccgccgccctcggcctggctccccacacgcgggtcgcctgcggcggcggcgacaacatgctcgccgccatcggcaccggcaacatccgccacggcctgctcaccgccagcctgggcacctccggcaccctgagcgcctatgccgagcggccgctggtcagtccgcacggcgagctggcgaccttctgcgcctcgtccggcggttggctgccgctggcctgcacgatgaacctcaccggcgcctgcggcctggtacaggacctgctgcacctcgacctcgacgaattctcccggctggccgcccaggcgccggtcggcgccgagggtctgctgatgctgccgttcttcgacggcgagcgggttccggcgctaccgcacgccagcgccagcctgcatggcatgaccgcggccaacctgagccgcgccaatctttgccgggcggtgctcgaaggcaccgccttcggcctgcgctacggcctcgacctgctgcgcgccagcggcctgccgggcgaggaaatccgcctggtcggcggcgcggcgaagaacccgctgtggcggcggacgctcgccgacctgctcggcctgccgctggtctgtccgcggcagaccgaggccgccgcccttggcgcggcgctccaggcggcctggagcctgggccgcgaaagcggcgccggtgaaagcctggaagccctgtgccggcgctgcgtggcgctcgacgagtcgacccgcacccagccccaggcgcgacaacaggcggcatacgaacaggcctaccggcgttacctggagcacctgcctccgcgataa

SEQ ID NO: 321167 - DNA, 933 bp, Pseudomonas aeruginosa
atgtacctggtgtgtggcgaggcccttttcgatgtcttcagcctggaaagcgctgcgcgcagcaacgagctgggcttcaccgcgatcgccggcggctcgccgttcaacgtcgccgtcggcctgcgccggctgggcgtggaggcggcgctgttcggcgggctgtccagcgactacctgggcacgcggctgcgccgggtgctcgaagaagaaggcgtggactgcggcttcctggtgcccagcgacgccccgaccaccctggcgatggtcggcctcgacgccagcggctcggcgcaataccagttccgcggcgacggctgcgccgaccgccaggtgcgcctggaacacctgccgacgctggatgggcggatacgcggtttgcacgtcggctcctataccctggtggtgacaccggtggccgacaccctgctggcgctggtccggcgcgagagcggccggcgcctggtcagcctggatcccaacgtgcgcctcgacccgcagccggacaccgacctctggcggcgccgggtcgaggccttcgccagtcatgcgcacctgatcaaggccagcgaggaagacctggccctgctctaccccggccgcgaccccggcgaggtggcccgcggctggctgaacccgcgctgccggctggtcttcgtcacccacggcggggccggcgccagcgtgcactgcacccacggcagctggagtcgcccggcggataccgccctgccactgcgcgatacggtcggcgccggcgataccttccaggcggcgaccctcgcctacctccgccgcctcgacgccgacagcccggccgggctagccgcgctgtcgcgggaagcgatcgacgcgatgctcgccttcgccatccgcgcggcggcggtcacctgctcgcgggtggggccggacctgccgttcgcccacgagctttga

SEQ ID NO: 321168 - DNA, 1236 bp, Pseudomonas aeruginosa
atgcagagcgctaacgcttcagaactcaccaccgacatcgccgtgatcggcggcggcgcggccggcatcggcgtgatcgccagcctgctgaaacgttcgccggggttgcgtatcagcctgatcgagccggcggacacccactactaccaaccgggctggaccctggtcggtggcggcgcctacgcccagggcgacaccgcgcggccgatggccgggctggtcccggccggcgtggagtggctgcgcacccgtgtcgagcgggtcgaccccgaggcgcgccggctactgctggagagcggcggcagcttggaataccgcaacctgatcgtctgccccggcctgcgcctggcctgggagcgcatcgagggcctggaggagaccctcgggcgcaacggcgtcacctccaactaccgctacgacctggcgccctatacctgggagctggtgcgcggcctgcgcggcggcaaggcgctgttcacccagccggcgatgccgatcaagtgcgccggggcgccgcagaaggccatgtacctgtcctgcgaccactggctgcgggagggcgtgctgcaagacattgaggtcgagttcgacctggccggcgcggcgttgttcggtgtcgccgatttcgttccgccgctgatggagtacgtgcgcaaatattcggccgagctggtgttcaattccaacctggtgaaggtcgacggcgcggcgcgcaaggcctggttcgaggtgaaggacgccgacggcaacaccaatctggcggaaaaggacttcgacctgctgcacgtggtgccgccgcagctgccgccgaccttcgtcgccgccagcggcctgggcgacgcggccggctggtgcgaagtcgacccggcgaccctgcaacatgtccgccatggcgagatcttcgccctcggcgatgtctgcggcaccgccaacgcgaagaccgcggcggcggcgcgcaagcagatcgtggtggtggccgagaaccttctcggcctgcgcagcggccgtggcctgccgctgcgctacgacggctacggcggttgtccgctgaccgtcgagcgcggccgggtggtgctggcggagttcggctatgccggcaagctgctgccgaccttcccgctggagcccaccgcggccagccgcttcgcctggctgctcaagcgccacgtactgccctgggtgtactggaacgccatgctcaagggccgggagtggctggcgcggccggggcgctag

SEQ ID NO: 321169 - DNA, 1236 bp, Pseudomonas aeruginosa
atgaccgacgaaaccgcacccaaggatcttcgtgaccaggcgccccggctactcccggcacgcctcatcgagaacgacgcccaggcgttgcaggccgcccacgaggtagccggactggcccgtcgcgaagcggcgctacgcgaccgcgaacgacgcctgccctggcaggaactggaactcttcacccgcctcggcctgggcggcatcggcattccccgcgcccatggcggcgcgcaggtttcccatgtgaccctggccgaggtgttccgtgtcatctgtgccgccgacccggccctcggacagattccgcagaaccagttcggcctgctcagcgtgatcgacaacgtcgccagctcggcgcagaaacgcaagctgttccgtggcatcctcgacggccgccggctggccaacgccggcccggagcgcaatacccgccacaccctggagctgaaggcgcgggtccgtcgcgacggcgacggctaccgggtcagcggcgagaagttctactccaccggcgccttgttcgcccactgggtggcggtcaaggccatcgacgaggaagaacgcgcggtgatgctcttcgtcgagcgcggcgctcccggcctgcgcatcgtcgacgactggtccggcttcggccagcgcaccaccgccagcggcacggtactgctggacgaggttccggtagccggcgacatgctgatccacaacggcctgctggccgagatcccgagcctccagggcgccgtctcgcaactgatccaggccgccatcgatgccggcatcgcccaggcggcgctggacgacgcccaggctttcgtccgcgaacgcagccggccctggatcgacgcccaggtcgaacgcgccagcgatgagctctacagcatcgccgaggtcggccgcctgcaaatcgagctgcacgccgccaacgccctgctggagaaggctggccaggtcctcgacgaagtggccgcgcggccggtggacgccgagtcggcggcacgcgcctcgatcgccgtggccgaggccaaggtgctgagcaccgagatcagcctggccgccagcgagaagctcttcgagctggccggcagccgtgccacgctcgccgagttcaacctcgaccggcactggcgcaacgcccgcacccataccctgcacgacccggtgcgctggaaagtccacgcggtcggcgactactacctgaacggcgcccgtccggcgcgtcactcatggatctga

SEQ ID NO: 321170 - DNA, 1218 bp, Pseudomonas aeruginosa
atgagcctcgcacacgctacgcgcgacaatcccacggccgctgcccatcgcatcggcagcgacgacgaagccctggaaacggcccgcgagctggccgccctgttcgcccgcgaaagcatccagcgcgaccgcgagcggcgcctgccgctggaagaactggaactgttctcccgctccggcctgtggggcatcgcggtgccccgcgaatacggcggggccggcgtctcgcgggtgaccctggcgaaggtggtggcgatcgtcagcgccgccgacagttccctggggcagattccgcagaaccatttctacgccctcgaagtgctgcgggtgaacggctcgccggcgcagaaaggtcgcctgttcggcgccgccctggccggcgagcgtttcggcaacgccctggccgagatcggcacgcgtaccgccagcgagcgccgtacccgcctgcgcgccgacggcgacggctaccgcctggacgggcgcaagttctactgcaccggcgcactctacgcgcagcgggtgccgaccctggcggtggacgacgagggccgccagcaactggccttcgtcccgcgcgacagcgccgggctggaaatcgtcgacgactggtccggcttcggtcaacgcaccaccggcagcggttcggcgctgttcgaccgggtagcggtggccgccgaggacgtggtctcgttccaggacgccttcgagcgcccgaccaccgtcggcccgctggcacagatcctccacgcggcgatcgacgccgggatcgcccgcggcgccttcgaggacaccctgcgtttcatccgcgagcgcgcccggccctgggtcgactccggcgtcgacaaggccagcgccgacccactgaccatccacgagatcggccgcctggcgatccgcctgcacgccgccgaagcgctgctggagcgtgccgggcgggtgctcgaccgggccaccgccgagccggacgcggaaagcgtggcggccgcctcgatcgccgtcgccgaagcccgcgcgctgaccaccgaggtcgccctgctggccggcagcaagctgatcgagcttggcggcagccgcgcctgtctcgccgaactcggtctcgaccgccactggcgcaacgcccgcgtacacaccctgcacgacccggtgcgctggaagtaccacgcggtcggcgactactacctcaacggccgcctgccgccacgccgcggcacgctctga

SEQ ID NO: 321171 - DNA, 1389 bp, Pseudomonas aeruginosa
atgagcaagaagcagattctcctaaacgccttcagcatgaattgcgtcggccatatcaaccacggcctctggacccacccgcgcgaccgctccagcgactaccgcaaactgcgccactggaccgagctggcccggctgctggagcgcggcctgttcgacggcctgttcatcgccgatatcctcggcgtctacgacgtctaccagggcggcatcgaggtgaccgcccgcgaagccgtccagttgccggtgaacgacccgctgatgctggtctcggccatggccggggtcaccgagcacctgggtttcggcgtcaccgccaacctcacctacgaggcgccctacccgttcgcccggcggctctcgaccctcgaccacctgagcgacgggcggatcggctggaacatcgtcaccggctacctggaaagcgcggccaaggccatgggcaagtccgcgcagatcgagcacgaccgccgctacgaccgcgccgacgagtacctggaggtcctctacaagctctgggagggcagctgggaagacgacgcggtgctcgccgaccgccagcgacgggtctacgcgcggccggagaagatccacaagatccgccaccatggcgagttctaccaggtcgagggctaccacctcgccgagccctctccacagcgcaccccggtgctgttccaggccggctcctcggagcgtggcctggccttcgccgcgcgccacgccgaatgcgtgtttgtctccggacagacccgcgaggccacccgccagttggtgcagcgcatccgcgcggcggtggtcggcgccggccgtcgcgccgaggacatcaggatcttcatgggcatcaacgtgatcgtcgccgccaccgcggccgaggcccgcgacaagcatgccgagtaccgccgctacgccagccccgaggccggcctggcgcacttcgccagctccagcggcatcgacctgtcgcgctacgggctcgacgagccgatccgctacgagaagaacaacgccatcgagtcggtggtgaagaacctcaccgtggcgcgcaccgactccaccgtgcgcaagctcctcgaccagttggccctgggcggccgctacgtgaccctggtaggcgacccgcgccaggtcgccgacgatctcgaaggctggatcgccgataccggcctggacggcttcaacctgacccgcaccgtggagccggagagctacgccgacttcatcgacctggtggtgcccgagttgcaggcacgcggcagctacaagaccgcctacgcccccggcaccctgcgggagaagctcttcggcggcggccgcgcgcgcctgcaggcggaacacgccggcgccgccttccgccagcccccggccgcgcaccagcgccaggcctga

SEQ ID NO: 321172 - DNA, 795 bp, Pseudomonas aeruginosa
atgctgaacaccctgaaaaccctgagcctggccgtcctcctcggcagcggcccggtccaggccgccgacgccccgctgaagatcggcaccaccgccgccttcgccccgccgctggaagtcgccgtgagcgaagccggcaagcaggggttgaaggtcgaactggtcgagttcagcgactggaacgcccccaacatcaccctcgcccagggcgacatcgacgccaactacttccagcacgtgcccttcctggaaaacgccaaccgcgaaggcggcttccggctgaagccgttcgcgccggggatcatcaacaacgtcgggctctattcgaagcgctacgccagcctcgcagagttgccggaaggcgccagcgtggccatcgccaacgacccgatcaatggcggccgcggcctgcaactgctacagaaggccggcctgctgaagctcagggacggcgtcggctacaaggcgaccctcgacgatatcgtcgacaacccgaaggacatccgcatcaccgagctggaggcggtgcaactggcgcgcgccctcgacgatttcgacctggcccagggctacccgcactacctgcgcctggccgggaccatcgacccgacccgggcactgctgttcgacgggatcgacaaccgggaatacgtgatccagttcgtcacccgcggcgactatcaggaccgcgatggccgcctggcgcgcttcgtcgacatctaccagcattcaccggtggtccgcgccgcgctggacaaggcccatggcacgctgtaccagccgggctgggagtga

SEQ ID NO: 321173 - DNA, 1101 bp, Pseudomonas aeruginosa
atgaccgttcccccgagcctgctgcccctcgaaccgttcccgacggcgcccgacacgcgcgcctccacgccgcacatccgtctccacggcctgggcaagcgctaccccggtggagtccaggccctgcgggagatcgacctggaaatccgccgcggcgaagtgttcggcatcatcggccgcagcggcgccggaaagtcctcgctgatccgcaccctcaatcgcctggagcgtcccagcgaggggcaggtgctgatcgacgacgaagacatcggcggctacgacggccagcgcctggtcgccctgcgccgacgcatcggcatgatcttccagcacttcaacctgatgtcggccaagaccgtgtggcagaacatcgccctgccgctgcgggtggccggggtgccccgggcacggatcgaggagcgggtcgccgggctgctgcaactggtcggcctggaggaaaaacgcgacgcctatccggcgcagctctccggcgggcagaaacagcgcgtcggcatcgcccgcgcgctggtgcaccagccgcagatactgctctgcgacgaagccacctcggcgctggacccggagagcacccaggcgatcctcgcgctgctgcgcgacatcaaccgccggctgggcctgaccatcgtcctgatcacccacgagatggcggtcatccgcgagatctgcgaccgcgtggtggtcctcgaatgcggccgcatcgtcgaacagggcgaagtctgggaagtcttcggcgatccgcgccatgccgtcacccgaagcctgctcggcagcctgcgcgccgccctcccggccgacctccaggcgcgcctgcgccaggctcccggcgccggcgacccggtgctgctcgatctccagtacaccggcgccagccgacgggtgccggacctgctggccatcgccagggccatcggccagcgcgtcgacctgctccacggcggcatagagcgtatccagggccgcgccctggggcgcctgctgctacaggtcggcgcgccgcccggcgagcttcccggcgtgctggccaaggccgcgctggtggcggacaaggtggaggtgctcggccatgtcgcccatgcttga

SEQ ID NO: 321174 - DNA, 654 bp, Pseudomonas aeruginosa
atgtcgcccatgcttgaacggctctggcaaggtttcctcgatacgctgctgatgatcggcgcgtcctccgccatcgtcctgctggtgggtatcccgctggccctggtgctggtcaccaccgggccgggcgggatcttcgaggcgcgcctgctcaatcgcatcctgggcggtctggtcaacgtgctgcgctcggtacccttcctgatcctgatggtggcgctgattccctttacccggatgatcgtcggcaccagctatggagtctgggccgcggtggtgccgctgaccatcgccgccacgccgttcttcgcgcggatcgccgaggtcagcctgcgcgaagtcgaccacggcctggtggaggcggcccaggcgatgggctgcgaacgccgccacatcatctgcaacgtactgttgccggaggcgcgaccgggcatcgtcggcggcttcaccatcaccctggtgaccatgatcaattcctcggccatggccggtgcgatcggtgccggcggcctgggcgacctggcctaccgctacggctaccagcgcttcgacacccaggtgatgctcaccgtgatcatcgtccttgtgctgctggtcacgttgatccagttcggcggcgaccgcctggcccgcctgctgaacaaacgcctgtag

SEQ ID NO: 321175 - DNA, 1128 bp, Pseudomonas aeruginosa
atgcggcaaagattctggcaaggaacattcaagaccctgggcctcctcggcctgacggcggggctcgccgcccaggccgcggagccgtccggcaaggccctcagcgccgccgccggcgtgccctggccggcggtcatcgcccaccgcggcgcctcgtacgacgcccccgaggaaaccgccgcggcctacctgctggcccgcgacctcggcgccgactacctggaagccgacgtgcagcgcagccgcgacggcgtgctggtcgccctccacgacgacaccctggagcgcaccaccgacgtcgccgaggtcttcccggagcgcaccaaggacccggtgagcagcttcactctcgccgaactcaagcgcctggacgccggctcctggttcaatcgcgccttccccgagcgcgcccggcccggcttcgtcggcctgcgcatcctcaccctcgacgagatgctcgacatcgccgagggcggcgccaacaagccgggcctgtacctggagaccaaggtaccggcgcaattccccggcatcgaagacgacctgcgcaagctgctggaacgccgcggctggctgcaaccccgcgagcgcgccgccgccgggcatgtcgacgtggcccacggcaatggccgggtgatcctgcagaccttcgagaagagcagcctggaactgctgcaagaaagcatgccgcaagtgccgaagattctcctgctgtggctcggcgacggttacctggaagcccgttcgccagtgaccttcaaggaatccggggaaaccgacaaggcggccttctatgccaggcaggaagtgaagtccgaagccgagttcggcgcctggctggactgggccaaggcccacggcgcgctgggcaccgggccctcggcgaccctcagcgaacgcggcgaacagagctacgccgacctggtgaaaccctggatgaaccgcatgacccacgcgcgcgggttgttcatccatgcctactcggtggactcggcggaagacttcaaggccctaggcgcggccggcgtcgacggtttcttcaccaaccgcacctcggaactgctgaagttccagggccgcccggcggcgcaagacatggacgcgctgctgcgccggcacggctactga

SEQ ID NO: 321176 - DNA, 1155 bp, Pseudomonas aeruginosa
atgcccgatacctctcccgatctgccggccatgtcgccgctcgccgtctatcgccaggccgtggaacagcgcggtttcgctcccgacgaggcgcagcggcgcgccgccgaggcgctggagcgttgtttccaggccctgcatgaagctcaccgccacggcgcgatccagggcgtctacctgtggggaccggtaggacgcggcaagacctggctgatggatcacttctaccagtgcctgcgcgtgcccgcgcggcgccagcacttccaccacttcatgcaatgggtgcaccagcgccagttcgaactgaccggtacagccgacccgttgcgcgccctggcccgcgagttggcgcgggacgtgcgggtgctgtgcttcgacgagctgttcgtcagcgatatcggcgatgccatcctgctcggcagcctgctgcgcatcatgttcgaggagggcgtggtgctggtggccacttccaaccagccaccggagcagttgtacgccgacggtttcaaccgcgaacgcttcctcccggcgatcgaggcgatccagcggcacatggcggtggtcgcggtggatggcggccaggaccaccgcctgcatcccggccgggccgagcaacgctactgggtggtggaggcggggcaggcgagcggtttcgccgaactcttcgcgcgcctgagtgccggcgaagcggcatccacgcagcccatcgaactggggcaccgcccgctggcggtgcaccggcacagcgaatcggtgctctggtgcagctatgcgcagctctgcgaggcgccgctgtcggcgctggacttcatcggcctttgcgaccgctaccgggcgatcctgatggacgacctgccgtgcctgagcgccagccagcgcgaaggccgcatagcccgtggcaccgaggacggcgcgcaactggtggaggcgggggatcgcgaattgccgcagttgtcggtgcacgacgacggcgtgcggcgcttcatcgccctggtggacgaatgctacgaccgcaaggtgccgctctacctggaggccagggtgccgttggaggcactttataccgagggctacctggccttcgccttccgtcgcaccctcagccggctgcgcgagatgcagctggcacgcttcggcagcgacagcgccggctag

SEQ ID NO: 321177 - DNA, 1131 bp, Pseudomonas aeruginosa
atgaacgcttctacccgtactcccgaccggctgctgacgctgccacgttcgccgaacctggcgacctcgatccgcgccaccgcccaggtcttcgaggatccgaagtcccaggccctgctcgaacacctgcgccaggtggcgccgagcgaggccagcgtgctggtgatcggcgagaccggcaccggcaaggaactggtggcgcggcatatccacaacctcagcgcgcggcgcaacggcccgttcgtggcggtcaactgcggggccttctccgagtcactggtggaagccgagctgttcggccacgagaagggtgccttcaccggcgccctggcggccaaggccggctggttcgaggaggccaacggcggcaccctgttcctcgacgagatcggcgacctgccgatgccgatccaggtcaagttgctgcgcgtgttgcaggagcgcgaggtggtgcgcctggggtcgcgcaagagcatccccatcgacgtgcgcgtgctggcggcgaccaacgtgcaactggagcgggcgatcaatgccgggcacttctgcgaggacctgtactaccggctcaatgtcgtcagtctcgaactgtcgccgttgcgcgagcgacccggcgacatcctgccgctgacccgccacttcatcgccgaatacagccgtcgcctgggctacggccagagccagttgagcccggaggcggcgcagaagttgcgtgcctattcctggccggggaacatccgcgagctggagaacgtcatccaccataccttgctgatctgccgcgacgggctgatccgcgcggatgacctgcacctgtccaacctgcgcctggagcgtggcgaggagctggcgcgcgggggcccggcgagcggcgccgccgagcacttgttgcagcaggctttccagcgtctgttcgaagagcagggcgagaacctccatgggcgggtcgaagatgccctgctgcgcgcggcgtaccgtttctgccacggcaaccaggtgcataccgccaacctgctgggactcagccgcaacgtcacgcgcacgcggctgatcgccatcggcgaactggtggtgaacaagcgcggtggccagcggatcgatggcgagcgggcggtgcggttgtcgatctga

SEQ ID NO: 321178 - DNA, 363 bp, Pseudomonas aeruginosa
gtgctggcgcgctacggcgaattctgggtcggcctggaaagcacccgggcgctggtcgagcgcgccgcgcagcgcctcgacgccgcctggtccaagggcccggcgctggacgccagcgagcgcggccagttggccctggccatcgccgccgccaaggtcgccgcgacgcgcaacggcctcgacctgtgcaaccgcatgttcgaagtcaccggcgcccgctccactcacgccgccctgcgcctggaccgctactggcgcaacctgcgcacccagaccctgcacgacccgctggactacaagatccgcgagctgggcgactgggcgctgaaccagtcaccgccgcaaccgaccttctactcatga

SEQ ID NO: 321179 - DNA, 423 bp, Pseudomonas aeruginosa
atgatcgccaacgacgtgctgccggctccgggatcgagcagcaactcgctctcctccacccgcacccgctcgaagatcgcgctgccgctgtcggtctgccgctggcccatgttgtcccaatcctggcccaggctgataccgctgcgcgcggtggggatggcggcaatcagcagcgccccgccctcgccgtccagtgccgaggcgatgagcatctccgaatcgcgggcgccggagcagaagctcttcttcccggagaactcgcgccagccgtcgaagcgccgggccacggtacggttgtccagcgggttcagcgcgttgccccagaaccagcggttgcgcgcggtcagctcgaaccacggctgccattgctcgggccgcgagaacaggcgcacggtggccagcatcaggtgctggaagccatag

SEQ ID NO: 321180 - DNA, 1146 bp, Pseudomonas aeruginosa
atgaacgtgttctggttcctcccgacccacggcgatggccacttcctcggcaccagccagggcgcgcggccggtctcgctgccttacctgaagcaggtggcacaggcggccgacagccttggctatcacggcgtgctgatccccaccggacgctcctgcgaggactcctgggtggtggcctcggcgctggcgccgctgaccgagcgcctgcgcttcctggtggcgatccgtccgggaatcgtttcgccgaccgtctcggcgcggatggcggcgaccctcgaccgcctgtccggcgggcgcctgctgatcaacgtggtcaccggcggcgatcccgacgagaaccgcggcgacggcatccatctcggccacgccgagcgctacgaggtcaccgacgagttccttcgggtctggcggcgcgtcctgcagggcgaggcggtggacttccacggcaagcacatccacgtggagaacgccaaggcgctctatccgccgctgcaacggccgtatccgccgctgtacttcggcggttcctcggaggccgcccacgaactggccggcgaacaggtggacgtctacctgacctggggcgagccgttgccggcggtggcggcgaaaatcgccgacgtgcgccagcgagcggctcgccatgggcgtacggtgaagttcggcatccgcctgcatgtgatcgtccgcgaaaccgccgaagaagcctggcgcgccgcggacaggctgatcgaacacatctccgacgagaccatcgccgccgcgcagcagtccttcgcccgtttcgactccgaaggccagcgacgcatggccgcgctgcacggcggccgccgcgatcgcctggagatccagccgaacctctgggccggggtcggcctggtgcgcggcggcgccggcaccgcgctggtcggcgatccgcggcaggtggcggagcgcatcggggaatacgccgagctcggcatcgacagcttcatcttctccggctatccgcacctggaagaggcctaccgcttcgccgaactggtcttcccgctgctgcccgaaccctacgccagcctggccggccgtgggctgaccaacctgaccgggccgttcggcgaaatgatcgccaacgacgtgctgccggctcgcgccggcgcttga

SEQ ID NO: 321181 - DNA, 561 bp, Pseudomonas aeruginosa
atgaccagccccttcaaagtcgtcgccgtctccggcggcacctatcgcccgtcccgcaccctggtactcacccaggccctgatcgccgagcttggccagtcgttgccgatcgacagccgggtcatcgagctgaccgacatcgccgcgccgctgggcgctaccctggcgcgcaaccaggcgccggcggaactgcaggcggtgctcgacgagatcgaaagcgccgacctgctgctggtcgcctcgccggtctaccgtggctcctatccgggcctgctcaagcacctgttcgacctgatcgacctcaacgccttgatcgacaccccggtgctgctcgccgccactggcggcaccgagcgccacgcgctggtcctcgaccaccagttgcgcccgctgttcagcttcttccaggcgatcaccctgcccatcggggtctacgccagcgaggccgacttcgacaactaccggatcgtcagcgagccgctgaaggcgcgcatccgcctcgccgccgagcgcgccgcgccgctgttcggcggacgctccgaactgttgaagatcgcctga

SEQ ID NO: 321182 - DNA, 267 bp, Pseudomonas aeruginosa
atgccgtactgttcgccggaacaactcgccgacctaggcccgctgctggattgcctgcgccgctggccgcgcatccgcgagccgcggccgggggtgttctacctgggcgaccagccgttctgccagttccattcgcgcaatggccagcgctgggccgacgtcaagcgccgcaaggggcgcctgccgccgttcgttctgccgccgggcgaccagcattcggcgcgggcattccagatattcctgctccaggcctacaagctgaactga

SEQ ID NO: 321183 - DNA, 1086 bp, Pseudomonas aeruginosa
atgtccgtcatcacccatccccacgcccgcgagctgaccaaatcggtgcgcgccaccgtgctggtgttcaacgacccccgttcccgcgagctgctggagcgcatcgagcgcctggcgcccagcgaggccaacgcgctggtcatcggcgagaccggcaccggcaaggagctggtggcgcgccatatccacgccctcagcggacgcaacggcggcccgttcgtcgcggtcaactgcggtgctttcgccgagagcctggtggagagcgagctgttcggtcacgagaagggcgcctttaccggtgcgttgcagagcaaggccggctggttcgaggcagccaacggcggcaccctgttcctcgacgagatcggcgacctgccgccgagcatccaggtcaagctgctgcgcgtgctgcaggaacgcgaggtggtgcggctcggttcgcgccggccgatccccatcgacgtgcggctggtggcggcgaccaacgtcgacctggctgacgcggtggtcgccggacacttccgcgaggacctgttctaccgcctgcacgtggcgaccatccaactgccgccgttgcgcgagcgccgcggcgatatcctgccgctggccgagtacttcatcgtcgagcactgccggcgcctcggctacaccagcgcgagcctgagcccggaagccgagcgcaagctgctcgggcattcctgggcgggcaatatccgcgagctggagaacgccatccaccacgcgctgctggtctgccgcaaccgtctgatccagccggccgacctgcacctcatcgacatgcgtgcgcgccaggagccgaacggcttgcgccgcgctcccgaaagcgccgccggctcggcgttggaggcggcgctgcaggcgctgttcgaggaaaaccgcgaggatctctacgagcacatcgaggaaaccgtgttccgtgccgcctatcgcttctgccacggcaaccagttgcagaccggacgcttgctggggatcagccgcaacatcgtgcgcgcccgcctggagaagatcggcgagctggaaacctcgccacggcacaacgtggtctcgctggtgggcaagtga

SEQ ID NO: 321184 - DNA, 1101 bp, Pseudomonas aeruginosa
atgaccctgcctctttccggcaacgccctgtccctggaagtgctgctcgaaccgatcgaccccggacaggcgtgcggccccagcctgcgctacgacccggactacgaccgcctgcgcgagttgcgccgggaggacgacagcagcctgccgaccggcgtctggcaagcggaggccaagcgcgccgactgggccgcggtggagcagttggccagcgaactgttgcagcggcgcagcaaggacctgatgctcgccgcctggctcggcgaggcctggctgcaacgcggcgggctgggcggattgcagcgcgcgctggtgctgctggcggaactctgcgagcgctaccccgaggaggtgcatccgcaagcccaggacggcgaccagtcgtggcgggtgccgcccatcgactggctgttgcgccgctatgccgagctgctgcacacgcgcctgccgctgatggggcagggcgcgttcgccgagatcaccctctatgcctggcagaggttgcagcgccagcaggtcgccagcggcgacagcaagagcgccaaggcggcgctggaagcggcgcaacttcagcagaagaagctagacgaagcgttgcgcgcggagcccctggtgcaatggcagcgcaagcaggccagcctgctcgcctgccagcagcaactacagcgcctggaacagtggtgcgaccgctgcctgggcgaactcgcccccagttgccagccattgcgcgaggtcatcgcgcaatggctggccttgctcaaggagttcatcgccatgcacccgcaagcgccgctgtccgaagaacagcccccggtcgcggaggcggatgccagcgaaggcgacgcggacggcgaggaaagcgtcccggcgagcgcgccgagcgggccggctggcgcgccgaccagtcgcgaggacgcctaccggcaattgctgctgatcgctgactacctggcgcgcaccgagccgcacagcccggttccctacctgatcaagcgcgcggtggagtggggcaacaagccgctgagcgagttgctggcggagctgatcaatgcggactcggaggcgcgccgagtctggtcgctgcttggcgtactgccctaa

SEQ ID NO: 321185 - DNA, 3816 bp, Pseudomonas aeruginosa
atgagcggcgcgacgctgttcatgctggttctcctcctggtgctgctggcgctgctgctgggggcgctgggctggtggtggcggacccggggcggtacggagatccgcagcttctacgcggcggtccggcagatggagcgcgagcagggctggcagggccgctacgaagcgccctggctgctgatgctcggcaacgagaccgagggcgagcagttgtgcgccacctggcgcctgctgccggtggcgcgcccggcctggttcggccgctggtggtcggacggcgagggggcgatcctgctggtgcccgagtcggtgttcctgcccgacgagggcctgcgccggcaaagcggcgcctggctgcgcctgttgcgtctgttcctgcgcctgcgcggcaggcgcgcgctggacggggtggtctggaacattccgctggcgcggttgcaggatggcgagcaggcggccaacctcggcctcgccgcgcgccgtcgctacgtggaactgacccagcgccttggcctgagcctgccggtttacgtggtgatcactggcatggaagacctgcctggcttccaggaacttctcgcggcgctgcccgaggaggcgcgcgagcgcgccctcggctggtcctcgccgttcgccgccgaagcggcctggcagtcgcgctggtgcgagcaggcgctggaggaaatcaccgccaccctgaccgagtcgatcgtcgaactcggtaccttgcgcggccaggtggacaatgagctgtattgcctgccgccacgcctggaaagcctccgcggttcgttgcaggcgctgctcgaaccggtcttccagggcaacgccagaggcgaggcgccgcgctttcgcggtctctacctgagcggcagcgaggcggcgggcgcggcagccgacgaagtcctgccggcggtcgacgcgccgcgtcggcgcagcagcttcgccagccaactgtgggcacggcggatccttgccgaggaaggcctggcccaggcggtgccgcgcatcctccagctgcgtcagcgctggcagcgcgggatcggcctcgccgcgttgtgcctgtgcctgctctggggcggcctgatgacctgggtctggcgcgacgcgctgcgcgacgccggtgaactgtcgcaactgctgcatggcgccagtgagcgctaccagccgctcgacgacgacactcggcgcgccgcccaggtccggcagaacgtccaggcctggtggcaactggtgtcacaggcgccgcgctggcgcttcacttcgctggcgtttcccagttcctggttttcctccctggatgcacgtatcgacaacgcgtatcgccgcgtttccgagcgcctgctggtgcgaccgctgcgcagcctgctggaaggcgaggcgagcgacctgcgggcgatccgcagcgatggccaacccggcctgaaggagggcgacgaccccagccagtggaaggactacctggcggcgaaggacctggtcgcccgcgccactacgctggagcgccacaatcgcttgttcgcccaggccatcgacaaccgcaggacgccgctcgacgaccttctgcaactgagtaacgatgccttgggcagcagctacaacgccggcagcctggcgcgcctggcctattacaaccgcacgctgttcgccgagcgtccggccgatctcgccgccctcgacctgggccgggtcgccgccacggcggcggataacttccatgacctgatggcacgctggctgaacgcctacttcctcaccgacagcctggaacgcaccggcaatgccctgacccaggaactcgcgcagctcggccaggaacgagacgccacggcggcccagttgctggggatcggcgaattgatcaaccacctgcagcaacaggtcaaccgcatcaacctgatctggggcaatggcgtcggccaggatctcgtccctggctaccagaacctgctcaagagcgcccagcaaagcagcttgctgggaaaccgcgtggaggaactgcagaacctcaccgtgcagttgcagcagcagtttcgcagcgaatggatcgcgcctccggaggctgccggcgacggcctgctggtgaaacagggggcgacgctcaagctggccgatgacctgctcggtctgaaacgcgccatcgatgacctgaagaccaaggacttcgtctccgtggccctggcggacaagacactggcggaccactccttgctgagcatcgacgatatcggcgtgactcaggcgttgagcttcttcaacgacttcaccggctactacgagagcaccctgccatcgctcaacccgcgctatcgctattcggtcctgcacgccgccgccagcgcggcgaccgaggccatgtggcaaagcctcgggccgcgcagtcgtagcctggccagtcgcaatgcctcgcgtttcgacgtgcaggtcaagcaggtccaggtgttacaggcggcgctgctggagttgcaggacctgcaggccggcgcgcgcctgctgctcagcctcaacgcgctggccgtggccgatatcggccaggccctgcgcgacatcgacgagcaggcggtgctgcgcgagccggtcgatttcagccgctggtcgggcgcgccgaatttcggcctgcagatgttccgcgcccaggacagtgccgagctgaagcaaagcctgaacagccagttcaatgccatggcggccgtcgccgaacgccacgccccggcgctggagtggttgcaggcgcagcaatccagcctggccaccgccgactacaacgcgttcgtgcgcttcagcgcgctcaacgccgaactgcagaaattcaaggccgacaacccggcgagcaccgcggcgcagttggcgaagctggtgggtaacgatttcaaccagatggacatcggcagttgcgccgacattctcaacggcgtgctcctgccgtccagccgcagcgacctggcgacgcgcctggtggacctgcgccagggcgcgctcgggcgctgccagtcgttgcaacagcagcaggcggcgcaggcctggaaggacctcgccgactacttcaaccagtacctcgccggacgcttcccgttcgcctacagcctggaagcggccgatgccgagccggggcgggtgcggcacctgctgcaactgatggagacgcgcttgccgcaggtgcgcgaagggctggcccaggttcgctcgccggacctgccggccgccgaggacttcgtccgccgcctggagcaggcgcagcgctggctcggcccgctgttcgagcgcgacaagtcgggcctgctcggcgtcgccctggacatcgactggcgcagcgaccgcagcctggaacgcggcgccgaccaggtgatcgcctggagcctgtactcgggcgaccaggaaagccgtttccccggcgcgcaggacaagggcctgacctggaatgtcggcgatccgctgaaaatcatgctgcgctgggcgaagaacggctcgcagcgtccggcagacgacccgcgccaggccagcctggcggtggccgacctcgaggccggctggagctaccagggctcctgggcgctgttgcgcatgatgcgcgcgcacttctcccggcagcgcccgccgaacgtcgactacacggagtttccgctggtcctgcaactgccggtgtatgcgccctacagcccggaaaacgaggcgcggatgttcctccgcctgtcgttgatgagcctgggcggcaagaccccgctgtccatccagccgctgccggtgcgcgcgccgcaatcgccgttcgcgacgctgttgccggccaccgtcgccagcaccggaggtaccccatga

SEQ ID NO: 321186 - DNA, 759 bp, Pseudomonas aeruginosa
atgcccgaagggagtgcagggcctttttcccaggcgtaccaggagcagccgctcagcacggcattccgccaggcctggcaggaatggctggaggcctggggcgccctcgaccgggacgcccaggatgtgccacggatggtcgagcgcgccctcgaactgtccacccgcatcacccggcgtctgtggcgcagcgccttcgccagcgtcggcgacgcggcgggcgtgcaggtcaaggcgatggtctatgccttcgtcgccctggtcgacgagaccctggtcttcagcgcctggccggggcagggcgcctggcaggacaaaccgctggagtcgcatctctacggcagtcgccaggcgggcgaatacctgccgctggcgatcaagcgcctgctcgacgaacgcgccccggccagtcgcgacctggccaacgtctacctgcaatgcctgatcctcggcttccgcggtcgcctgcgcgggccgcgcggcgaggcgctgcacgagaagtggcggcaggcgttgttcgccttcgcctggcagcgcgaggcggacgccgccgacctcggccgtcgccttgagcagcccgccgctgcgccgccacggcgtctgccggtgcgcgcagcgctgccggacggcttccgcctgggcctggcggtgctcgggctggtgctgttgatgagcggtatcggacacctgttctggcgcgacatccagcacgaaatggcggcggtgacccacctggccgatgcggagcaggcgccatga

SEQ ID NO: 321187 - DNA, 1332 bp, Pseudomonas aeruginosa
atgagtgttctgcctgacgcggtgtgctggcacgaagggatgcaactgcttccccagcatttccagttgcagggattgcgtgccgaggcgctggcggcgcgcaccggacaggcctgcaacccttggttctggggagtgaccgccctggaactggacccctcggcgttgtgcgccggccaagtgcgggtcctgcacctcgaagcgatcctgcccgacggcctgccggtgagcgtgcaggctggtgtcgacgcgccgctggagttcgatctggagacagcgctggcggccgccgaagggccgctgctgaacgtccacctggcggtcagtccgctgtggcgggcgggtcagttgctgccgctgaagggccgtctgcaatcgcgggtcggcgcgccgctgccggacctggccagcggcgagcaccccgagccgatcaccgtctggcgagcgtcgctgcggctggtcggcgacgacggcaaggccgactccgtgtgcctgccgttgctgcgcgtggcgaaggagggcggcgcctacgtcagcctgccctacgtcccgccgacgccactgatcctgccggagtcgcccctgggcagacgcgtgcagtcgctttgcgcgcgggcccgggagaaggcgctgttcctcggcgggcgcctgcgcctggcgcagcaggcgggcaaccaggacgacgcggtggaaatccgtcgccagcttgccgcgctctggacccgcctgccggaggtcgaaggcctgctggcaagccgtgcggcctcgccgctggccctgcacggcagcctgctgggcctggccggtgcctgggcggcgctcgatccgctggccggcgtgccggccttcgaagcgctcgacttcctcgacctgcggcgtggctacgagccgctgctggactggttggagcgcgccatcgagtcgatccgcgcgggctaccgctgcctgccgttcgagcaggaggaacaggtattttccgtgcgcctgcccgatccggcgccgcgtcagcgcctggtggtcggcctgcggatgcccgccggcgccggcgaacaggcggcggctgactggctggagcgcgccatcgtcgcctccgacccgcacctgccgttgctcgcccggcaacgcatgagcggactggcgcggcagccgatgaatcgccaggaacaggtggcctacagcgttggcgacgacacccgtttgttcgtcgtgcagggtgccggcgactggttcgatgccggccagccgctgcgcatcgtcgcgccggtcagcggggtcgccagcagtccctggcagatcgtgctgttcgtcgccgacggcagcgacaacacctag

SEQ ID NO: 321188 - DNA, 477 bp, Pseudomonas aeruginosa
atgaagcacggatgtttcaccatatgtcggaaattctccctggcgctggcgatcctggcgctggccggctgctcgtatttcttcgcgccgcgggtcgagttgcagcggctgaccctggatgtcgccgcgcgcgccaacgacgactcgccgatcgccgtggatttcgtcgcggtgaaggatgcggagctgttcaaggaactggccggactgccggccagccagtggttcgccaatcgcgagcagtaccgccgcgactaccggcagcagttcgcggtatggagcctggagctggtcccggggcagttcatcgagtcggagtccttccccttgcgcggcgaccgcgcaactggacttttggtcttcgccggctataacacacccggcgcgcaccgcttgcgcctcgaccagcagcagcgcgtctggctgcgtctggatacccgggaaatgcgactggtcaacgatcccgccacgcgttag

SEQ ID NO: 321189 - DNA, 546 bp, Pseudomonas aeruginosa
atggccgagagtacgcagcacaagctggaccgggtgcgcccgccgcgcgtgcagatcacctacgacgtcgagatcggcaacgccatcgagaagaaggagctgcccctggtggtcggcatcctcgccgacctctccggcaagccggataccccgccggcgaagctggtcgaacggcgtttcgtcgacatcgaccgcgacaacttcaacgagatcctctcctccatctctccccgcgccaccctgcaggtcgacaacaccatcagcggcgacgacagcaagctgaacgtcgagctgcgcttcaaccacatcgaggacttcgacccggtcaacctggtgaagcaggtggtcccgttgcgtcgcctgttcgaagcgcgccagcgcctgcgcgacctgctgaccaagctcgacggcaacgacgacctcgaccagttgctgcaggacgtggtggccaacaccgaaggcctgcaggaaatcaaagcggcccgcccggaagccgaagcggccccggccggcgacagcgaacccccggccgaccagccggcctga

SEQ ID NO: 321190 - DNA, 1485 bp, Pseudomonas aeruginosa
atgcccaagtcatccgccgccgaacaatccggcgagagttcgacccagaccctgtccctgctcgacgagatcatcgccaagggccgcatggcccacgacgacagccagcaggactatgcccgcgacatgctcgcggaattcgccacccaggtcctcgacgagggcatggccgtcgacaaggacaccgtggcgatgatcaacgaccgcatcagccagatcgatgcgctgatcagcgaccagctcaaccagatcatccaccaccccgagttgcagaagctggaagcctcctggcgcggcctgcaccaactggtgagcaacaccgagaccagcgcgcggctcaagctgcgcctgctgaacgtcggcaagaacgaactgcagaacgacctggagaaggcggtcgaattcgaccagagcgcactgttcaagaagatctacgaagaggaatacggcaccttcggcggacaccccttcagcctgctgatcggcgacttcaccttcggtcgccatccgcaggacatcggcctgctggagaagctgtcgaacgtcgccgcggctgcccacgcgccgttcatcgccgccgccagcccacgcctgttcgacatgaacagcttcaccgaactggccgtgccacgcgacctgaccaagatcttcgagagcctggagctgatcaagtggcgcgccttccgcgagagcgaggactcgcgctacgtgtcgctggtgctgccgaacttcctcttgcgcctgccctacggcccggagacgcgaccggtggaaggcatgaactatgtcgaggatgtcaacggcaccgaccactccaagtacctctggggcaacgccgcctgggtcctggcgcagcgcatcaccgaggccttcgccaagtacggctggtgcgcggcgatccgcggcgcggaaggcggcggcgcggtcgagggcctaccggcgcacacgttccgcaccagctccggcgacctgtcgctgaagtgcccgaccgaggtggcgatcaccgaccgccgcgagaaggaactcaacgatctcggcttcatttccctgtgccacaagaagaacagcgacgtggcggtgttcttcggcggccagaccaccaacaaggccaggctctacaacaccaacgaggccaacgccaacgcgcgcctgtcggcgatgctgccgtacgtgctggcggcatcgcgcttcgcccactacctgaaggtgatcatgcgcgacaaggtcggcagcttcatgacccgcgacaacgtgcagacctacctgaacaactggatcgccgactacgtgctgatcaacgacaacgcaccgcaggaaatcaaggcgcagtacccgctgcgcgaggcgcgggtagatgtcagcgaggtggccggcaaaccgggggcctaccgcgccacggtgttcctccggccgcacttccagctcgaggaactcagcgcgtcgatccgcctggtcgccaacctgccgccgccggtagcggcgtga

SEQ ID NO: 321191 - DNA, 498 bp, Pseudomonas aeruginosa
atggatgcgatcattctcgatttcggcagcgacatcaaaggcgacagcctgctcgtcggctacgaaaacaagatcgaaatcatgtcctacagccacaacgtggcgatgcaggtcaccaacgacgtcagcaactcggagcgcacctccggcaaaccccacgtcggcgaattcaccctcaccaagttcatcgacacctcgaccccgaccctcaacgagtattgctgcgccggcaagccgatcgccgaggcgaccatcaccatcggccgcaacgccgccgagggcaacgggcagatcatgcccttcatcgtctacaccctgaacaacgtggtgctctccaacgtcagcgtcagcggcggcgccggcggcaagccggtggagaccctgtcgctgaacttcaccaagatcaagtgggagctaaccgcgcagaaggacgacggcaccaaggaaggcacggccgcctcgacctgggacctggccgccaaccagctggtcaagtga

SEQ ID NO: 321192 - DNA, 426 bp, Pseudomonas aeruginosa
atgtccggagccctgccgccgctgttcgagcgcctcagcgccgaggccgacgaacgtcccgcgttcgacgaccgggcgctggccgagtcggtccgcggcgagctgctgcgcctgctcaacacacggcgcccggcgaatgcgcgcagcggcatcctcgcctacgggctcgccgactggaccgccgtgcaacgcctgcgcgccgaggaccggcgccagctggcgcgcgaggtgcgggcggcggtcgagcatttcgagccgcgcctgcaactggccgaggtcgaggtcgaacctgacccgggcaatccgcagcgcctgcgtatccagctcggcggcagcctgcgcagcgggtcgcgcctgacgcctgcgctattcgtcatcgaacagggcagcgatggccttgaggtgcgccatgagcgattcgattga

SEQ ID NO: 321193 - DNA, 1794 bp, Pseudomonas aeruginosa
atgagcgattcgattgatgccgacctgctcgactactaccagcgcgagctgacctggctacggcacgccggcggcgccttcgccgagcgctatccgaaggtcgcccggcgcctgcaactggctcccggcgaatgccccgacccgcacgtcgagcgtctgctggaaggtttctcgctgctcaccgcgcgcctgcaacggcgcctcgacgacgactacgcagagttcagcgacgccctcctcgaacagctctaccccctggcgctgcgcccgctgccgtcctgcgcgatcgtccagttcgaaccggacccgacccagggcagcctcgccgagggctaccggctgccgcgcgacaccgcgctgttcgtcaccacccgtggcggcgacagcgtgcatttccgcagcagcgccgaggcgaccctgtggccgctggcgatcgacgaggcgaacctgctcggcggcgaggaggcgcaagccctgaccggagtcggcgccgcccgctcggcgttgcgcctgagcctgcgctgcctgggcgagtaccgctgggacgaactgtcgatcgagcgcctgcgcatccacctggcggcttcgccgatgggctgcgcgatcctctacgacctgctcgccgcgcataccgtgcaggtcatggcgggggcgcccggcacgccgccggcggcgctccgcggactgccggagatcgtcggcttcgccgccgacgaggcgctgctgccggaggaagacggcggacatccgggcctgcgcctgctcgccgagtacttcgccttccccgacaagttccacttcttcgacctgccactgtccggcgcgctcgccgacggacagacgctctacctgtacctggtcttcgatcgcgcaccgacggcacgcctgcatttgcaggcggaagacttccagctcggctgcgcgccggcgatcaacctctttccgcggacctcggagccgctgcgcccggacggcacccgcagcgagtaccgcctggtcgccgacagtcaccgcgagaacagcgtggaaatccatagcatccgcgccgtgcgctcggtggccgggagcaccgtgcagccagtcccggcctactatggctgccgccacgacagccacctcggcacgctctactggcacgcccggcgcatcgccgggctgaccccgaaccggctgggcagcgacctgctgctgagcctggtggataccggcttcgacccgttacgcgaagccccggccttcagcctgaccgccgagctgctatgcaccaatcgctatctggccgagcgcctgggtgccggcaccgcgctgggcttcgaacggcccgggccggtcgccgccgcacgcctgcgcaacgcgcccagcgcgcagagccagccgcgcctggacggccagtcgcgctggagactggtctcgcagctgaccctcaaccacctctcgctggtggaaggcccgcgcgccctcgaagccctgcgggaaatcctcgccctgcacaacctgcgcgacgatgccagcgcccgccggcagatagaagggctgaggcaactcgactgccagcgggtggtggcgcacgtcggcgaggatgcctggcgcggctggcgcaatggcctggaaatccgcctgcgactcgatccgcaacacttcgtcggcgccagcggcgtgctgttctccgccgtgctggcgcagttcttctcgctgtatgccaccgccaaccgcttcgtgcgcacggtcctggtggaagccgacaaggaggtgaagacatggcaaccccaggccggctcgccgctctccctctga

SEQ ID NO: 321194 - DNA, 1017 bp, Pseudomonas aeruginosa
atggcaaccccaggccggctcgccgctctccctctgagtcagcggctgcgccgcacgccgcagcgcttcgaactgttgcaggcgctgctgctgctcgaacgcgagcgtccccaggcgttgccgctgggcaccggcaacgcgccgcgggcggaggccctgcgcctgcgcgggccgctgttgccgctgttcgcctcgagcgaggtggaaagcctgctcgacgacccgcagcaaccggtgctgtccaccccggtgttcggcctcggcggccccgacggcccgttgccctatgcctaccaggaatggctgcaacaacgcgcccggcagaaggaccatgcccccgccgagttcctcgacctgttccagcaccgcctgctcagcctgctctaccgggtgctgcgcaagcatcgcgtggcgctcggtttcgcggtgccggcggcgaccccggtgcaggcgcagctacgtgccctcagcggcctgttgccaaaagccctgcatgaacgcctggcgctgccggacagcgcggtgctggcacgcaccgcgctgttcgccggcgggcgtcgctccctggccggcttcgccggcctggtgcgccagcacttcggcgtggaggcacggctggacgcctaccagggcgcctggaaggaaatccccacggccagccgcagccggctgcaacgcggcgggcgcaacctgcgcctgggtcgcgatgccatagccggcacgcgcacctgggacgaacacgccggcatcgccctcagcctcggtccgctggatgcccgcgaggccgcccgcttcttccccgacggcgacgcccatggccagttggccagcctcgccgcgctgtacttcggccccgacctggattgtcgcctgagcctgctggtgagcggcggcgcgccgctgcgcctggagcgcggtacaccgcccaggctgagctggaacaccggcctgcggcgcatcgaagacggccagcggcagcgcatcgatctcgacctgcggcagccggaggtagcctga

SEQ ID NO: 321195 - DNA, 2550 bp, Pseudomonas aeruginosa
atggaactcgccgccctgatcggccgcctcaacccggattgtcgccgcgccctggagctcgccgcgcaacgctgcctgcaacgcacccatcattacgtagagatcgagcacctgctgctggagctgctggacatcgacggcggcgacttcgcctgcctgctgccgcgcttcggcctggagcgcgacgccctggtcgccgagatcaacctgtcgctggagctgttcaaggccggcaatacccgcactccggcgctgtccgcgcacaccatcggcctgctcgaagacgccgtggtgcacgccagtgtgctcggccaggcgcagatccgttccggcctgctgctgctcgccttgctcgaccgcgaggagcgccgcgccctgttgctgaacagcgcgtcgtcgctgctgcggattccccacgaggccttgcaggccaacctgctggagtggatccaggcctcccgcgaacagccgcccgcgccgaaccgtccggcggcaggcggcgacaagccggaaagcgccccggacccgctgctcgaccagtacacccaggacctcaccgccgaggcccgcgccgggcgcatcgaccccatcgtcgggcgcgacggggaaatccgccagtgcgtcgacatcctcctgcgccggcggcagaacaacccgatcctggtcggcgcgccgggcgtcggcaagaccgcggtggtcgagggcctggccctgcgcatcgccgccggcgaagtgccgccgtcgttgcaggaggtgatcctgcgggtgctcgacctcggcctgttgcaggccggcgccagcatgaagggcgagttcgagcagcgcctcaagggggtgatcgacgccgtgcgcaacagcgcgcagccgatcatcctgttcatcgacgaggcgcacacgctgatcggcgccggcggcgcggaaggcggcagcgacgccgccaacctgctcaagccggccctggcgcgcggcgaactgcgcaccctggcggccaccacctggctggaatacaagaaatacttcgagaaggacccggcgctgacccggcgcttccagctggtccaggtcgaggagccggacgaggccaccgccgtggagatgctgcgcggggtcgccggcaagctggaacagcatcacagcgtgcagatcatggacgcggccatcgtcgacgcggtgaagctgtcgcaccgctacatctccggccgccagttgccggacaaggcgatcagcgtgctcgacaccgcctgcgcgcgggtcgccctcggccagcacgacgtgccgccgccgctggaaagcctgcgccaccgcgagcaggcgctggaagaggaattgcagcgcctgcgccgggaacaggccaccggcctcgaccacagcgcgcgtatcagcgccctggaaagcgagtcgggcgataaccgccggaccatccgcgaactggagacccgctgggacgaggaacgcgaagcggtgcgcgaactgctcgacacccgccgcgaattgctggccctcagcgaaagcgccgacgcggccaagcccgacgaggaactggacggtcgcatcgaccacctggccgccgaactggcgcgcctggcggccggcctcgaagccatccgccaggacgacccgctggttcccgagcaggtggactcgcgtaccgtggccgcggtgatcgccggctggaccggcatcccggtgggcaagatgctcgccgacgaagcccacgccatccgctccctggcccagcgcatgggccagcgggtgatgggccaggaggccgccctgggcgccatcgcccagcgcatccaggcctatcgcgccggactcagcgacccggccaagccggtcggcgtattcctcctccccggccccaccggcgttggcaagaccgagaccgcctacgccctggccgacgccctctacggcggcgaacgcaacctgatcagcatcaacctctccgagtaccaggaagcccacaccgtcagccagctcaagggcgccccgcccggctacgtcggctacggcagcggcggcgtgctcaccgaagcggtgcgccgcaagccctattcggtggtgctgctggacgagatcgagaaagcccatccggacgtgctggaagccttctacaacgtgttcgacaagggtgtgatggaagacggcaccggcctggtggtggacttcaggaacaccgtgatcctcgccaccagcaacgtcggcgccgaactgctgctggacagcccggccgaacaggtcgccaccccggccttcgacgagcgcctgcgcaaagtcctgctgcaaaccttccgcccggcgttcctcgcgcgcatgaccgtggtgccttaccggccgctggaggaagccaccctggaaggcatcgtcgtggccaagctggaaaaactgcgggaacgctacaaggccgctaccggcaaacagttcgacttcgacccggccatcgtcaaggccgtgctcgccaagtgcagcgcggcgggcgcgcgggatatcgagaacgtgctgatggcgcaggtgacggggaagttggcggagtgggtactcgaatga

SEQ ID NO: 321196 - DNA, 426 bp, Pseudomonas aeruginosa
atgcccaacggcgcgacgctgaccgccatgatgaacgctgccgacgccctacgtctgaccgaggccccgaggaccaggcgcggtggtgtgtccgacggtatttccttccacatcgcccaatacgtgcccggtggcgcgtctctgaccatcaccagccagttcgtcggtcagaaagccggctccgccgtgtgctacgagaacacactgttcaacgatgccctggtcggtcgcatcaacgccatcgttggcaacatcatcgtgcgccagagcgtcgcaccctgtacgcgctgccgcgccggctaccgccagctcgcccagaacggaccacatactatcgtcgtctccagcgatgacggctacgacggcgcccccgacaacaccatcttcctcttcgcacccaccgggctggtgttctaccgacgctga

SEQ ID NO: 321197 - DNA, 1068 bp, Pseudomonas aeruginosa
atgccccgaaccatcgaatactggcgccccacgaacggcctgtatcatgcgaccccgcccggaatcgccgtgctgacccaggacagcgattgggaggtgctcaacgaagccaccggcttctacgaggaaagcccgtatccctccgccttcaagggacaggtgtatcgcgcgctgaactacataaacgctacgccgacgggcgcatcgctgctctggaacctctacacgacgaacaatttcgtcgacatcaccccctcgtcgctgggcaacaatgtccagtccaccaatcagcccatggcgctcaatcaggtcgccagagaaatcatcgtaggaaccggtcccggcccccagacccagatcgcgctcaatcagacaggcatcgccccgcaggcgcagacccagtggctggcctatgtcatcaacagttcgccgcattgggccctggacggcgtgccgggcaacggtggtggcctttacggctatctagagcgcgcccgccagtatgccaaccgctggatgctgctgttcgaccaccgctacttccgctggagcgacagcaatgaaggctatttcaatgagcagagctacagcggacatttcggtatctccgcccacaacatcgccatcaccaaccacgaagtggcggcctggcttgccggacagccgctaccccaccgcctcagcgatgcccagcagaaccatgcgcggcttgcgaccatagttgcccttaaggacgtttcgccgccttcggctggctgttccgcccatgtgagatggaaccccacagcgaccaacccgctgaaccggatacgtcctccggcaatcggcctggctcatgagctgctgcatgcctactacagttgccgaggcgcacaacccggctacgacgacaaccactactccacggtactgttcgaataccgctgcgtcggcctcggcccctgggacgaagcaccattatcggaaaatgccctacgcaaagaatggtggagctatgcctgccagcaggtgcccggaagcgacccagagaacaggaaggccatcggcaaacgcatcagttacatgtag

SEQ ID NO: 321198 - DNA, 2007 bp, Pseudomonas aeruginosa
atgccccgtcccaccgatagcaataccagcctctccctgaccgcctcggcgctggcagccctgttcccggagcgtctggccggggaagaacgcctgaacgcactgcccggttgggaactgctgggctacagcgccagccccttagccctggacggcgcaatcgccacccatctcaccgccaccctgcacaacgacgccgaccagcgtccgctcgacggcctggtcgcggagatccgccaactccccggcgatgccagcgccgagcgctaccaggtgctgttgcgcccctggctctggtggctgacgctggccagcaacaaccgggtgttccagaacctcgccaccagcgacatcgtcacccaggtcttcgaccagcacggcttcagcgactaccagttgcagctcagcggcagctaccagccccgcgaatactgcgtgcagtacggcgagagcgacctcgccttcgtctcgcggctgctggaggaagacggcatcttctggttcttcacccatgccgccggcaagcacaccctggtgctggccgacagcaacgacgccttcccgccgattcccaacggcccgcaagtggcctacctgggccaaggaatcggcgtgcgcgagttgcagggcgtgcgttcggcgcagtacagcctccaggcggtatccgggacctacagcgccaccgactacgagttcaccaccccgagcacctcgctgtactcccaagccgaggcggtctccggcgccgccggcgtctaccagcaccccggcggctacaccgccaaggcccagggcgacagcctgaccaagcaacgcatcgacggcctgcgcagccaggagacgcgcctgatcggcgagagcgactgccgctggctggtgcccggccactggttcaccctcagcgggcatgacgacgattcgctgaatatcgactgggtgctgacctcggtcacccatgacgccagtcacgcgcactaccgcaaccgcttcgaggcgatccccaaggccaccgcctaccgccccgcgcgggtcacgcccaagccgcgcatgcacacccagaccgccctggtggtgggcaaggccggcgaggagatctggaccgaccagtacggccggatcaagatccagttcccctgggaccgcgacggcaagaacgacgagacctcctcctgctgggtgcgcgtggtgctgccctggagcggcaagggcttcggcatgcagttcgtgccgcgcatcggccaggaagtgatcgtcaccttcatcgacggcgacccggaccgcccgctggtcaccggctgcgtctacaacggcgacaacgccctgccctacgcgctgccggacaaccagacgcagtccgggatcaagaccaactcgtcgaagggcggcggcggtttcaacgagctgcgcttcgaggacaagaaggacgccgaggaagtcttcctccaggcgcagaaggacctcaacgtcaacgtgctcaacgacagcaccgccagcatcggccacgacgagaccctgacggtgcagaacgcccgcacccgcacggtgaaggaaggcgacgagaccgtcaccctggagaaaggcaagcgcacggtgaccatccagaccggcagcgacagtctggatgtgaaggacacgcgcacggtgacggtgggcgccgaccagacccacagcaccggcggcaactacagccacaaggtcagcggcaacttcgagctgacggtggacggcaacctgaccatcaaggtcagcggcaccctcgccctgcagagcggcggcagcctgaccctgaagagcgacgccgacctcgccgcccaggctggcacctcgctgaccagcaaggccgggacgtcgctgaccaaccaggccggcacctccctcaccaacaaggccggcaccagcctgaccaacgatgccggcgtcagcctgaccaacaaggccggcgccgaacagacggtggacggcggcggcatgctgaccctcaagggcggcctggtaaaggtcaactga

SEQ ID NO: 321199 - DNA, 537 bp, Pseudomonas aeruginosa
atggcggcatccggcaagctcgacctggttcgtggcgacagccatctcgccggcaacctgctcgacggcagcctggaaggcccgttgcgcatcgacgagcacgacaggccgcaggccagcctcggctaccggcagggccagttgcacggcgccagcaccctgttccatcccaacggcaaggtctccgcgcaactcgccttcgtcgacggcaagctgcacgggccggcgagtttccatgccgcggaaggctggttgcagcgcaaggcgcactaccgcaacgggctgctccacggcgaagcgttcaactatttcgccaacggccaggtggccgagcgcgagcattaccgcgacggcgtacgcgacggggtctaccaacgcttccatggcaatggccaactggccttcgacggacgctacctgaacggccagctactggacggcgcccagccgttcgccgacgacggccggccgctggacagcgagggcaagcccatggcgcgctggcgctggtggtggaccaggctggcggagccctag

SEQ ID NO: 321200 - DNA, 396 bp, Pseudomonas aeruginosa
atgggctgcccgcaggtctgcgccggcgccaccctgcaatgcagcttcggggcggcgccgacggtgctcaacgtgttgccgcagaaccgcaccctgaccagcgggatgccggcggcgaacatcatggaccacatcccgctgctgaacattcccaccttcggcctctgccagagcccggccaaccccgtggtggccgccgccaccgccgccgccctcggcgtactgacgccgatgccgtgcattcccgccaccgccagcccgtggatccccggcggcccgccgaccctgctgctgggcgggatgcccgcgctggacgccaatggcacgctgatctgcacctggggcggggtgatcaagatcagcgtgccgggacaggtgcagatgctgattccctga

SEQ ID NO: 321201 - DNA, 642 bp, Pseudomonas aeruginosa
atgcccagcacaagaagcctccccgcacgggtcatcgtcgccgatgactatcccctgttccgcgatggcctgagacgggtcgtccgccgctacctcccgcaagccgccgtaagcgaagcgggcagcttcgacgaggtgctgcgcctggcctcgagcgtctcgccggaacctcccgccctcttcgtcctcgacctgctgcttcccggcttcgccgcctcccagtccatcgagcgcttgcgtcgcgcctatcggcacagcgcaatcgtcatcgtctcgatgctcgacgacccgcgtctggtggacgaggtgctggccgccggcgccgacggctacctcggcaaatccctggaggccggggagatcggcacggcgttgcagacgctcggcagcggcgaaccggtggtgcgcctgcgcggcgggtcgagcgccggcagtcggcaacgcgccctcctggacgccctgaccccacggcagcaagcggtactgcggctgatcgccgatggcctgtcgaacaaggaaatcggccgcgcgctgtcgatctctccgttcaccgtgcgcgtgcacgtttcctcgctgctgcgcgccctggaagtgaacacgcggacggccgccgcggcgctggcggtgaaggccggtttctag

SEQ ID NO: 321202 - DNA, 1206 bp, Pseudomonas aeruginosa
atgatcgacagggtgaagccgctgatggcggcatgggttctggtcttcgcatcttcttcgttcgccagcgaaacggcgggaaaattgccacgaaagccagctctagggccggaaaccgcgggggcgaccctggtcattcccggcgagaccgacaggctcgcttcgctctacgcccgcgcacggggcgaaggcggcaaggtggtgctctgggccggcggcgacgcgccgaaccagatggactggttgaagacggccttcgagagccgctttcccggcgtgatcctggacgtcacggtggacctttccaagttccacgacctgcgcatcgaccaggaactcgccgccggcaccctgacgccggacgtggcgatgctgcaaaccaccttcgatttcgacaaatggaaggcccgcgacgtgctgctgcgctacaagccggtcggcttcgcccggcagaagaaaggctacgccgatcccgacggcgcctatgtcacggcctacaacaacgccttcgtgccgacctacgcttccgtccggctgccagcggagcgctatccgacgcgcttcgccgattacctgaagccggccttcaagggcaagctggtgctgacctatccccatgacgacgatgcggtgctgtacgtctacgacaagctggaacggcgctacggcagcggtttcctgcgcgccctggcggcgcagaagccgaacttcctgcgcggcacggcggcgccggcggcctcggtgggcaccgactccatcggttcgctgggcaacctgaccggctatgcgaccgacagcgatacgccggccggctacttcatcccgaccgacgagccgttcatcgtctggaaccagcgcgcggcgatcttcaaggccgcccgtcatccggccacggccaagctgctgctgtcctacctgggctcggccgagttccagtccagctacggcggctggcgcgcccgcgctgacgtcggcgaagcgcctgggctgccgccactggagtcgctgaagaacgtcgacgtgcacgatttcacccgctggatggccgatcgccaacgggtggccagcctgcgcaggcacatggcgcaaatcttcggcccggtacgcggcgagtcgccgttgcgcgacccggcgctgatgagcctgctggggctgacggcgaacgacatcgtcgccctgcccgaaccggacctgccgatctactga

SEQ ID NO: 321203 - DNA, 2316 bp, Pseudomonas aeruginosa
atgaagcgctcgtaccccgacgatctggtcatcggcaatctcagccgccgcggtttcctcaagggcgtcggcgccaccggcgtgctgctggtggctgccaactggggctggcgcgacgccctggccgccgagaagaaggccttcggcgccgacgccatgccccacggctgggtggacaacccgaagatctacgtgagcatcgaccgggacggcacggtcggcatcgtctgcaaccgctcggaaatgggccagggcgtgcgcaccagcctggcgatggtggtggccgacgagctggaggccgactggagccgggtcaaggtgatccaggcgcccggcgacgaagcgcgctacggcaaccaggacaccgatggctcgcgcagcatgcgccattggttcgaacccatgcgccgctgcggtgcggcggcgcgacagatgctcgaacaggccgcggccaaccagtggaaggtcccgctgggcgagtgccgcgccgaacagaacaaggtgctgcatgcgcccagcggccgttcgctgtccttcggcgaactggccgaggccgccgcgggtctcgaagtgccggcgcgcgacaagctgctgctgaagaagcccgagcagttccgctacatcggcaaggacgtggcgcgcgccatcgacggcgccgatatcgtcaatggccgcgccggcttcggcttcgacgcgcgcttcgacgacatgctctacgccgtggtcgcccggccgccggtctacggcggcaagctcaagcgctacgacgccgccgcggcgctgaaggtgccgggggtggtcaaggtgatcgagatcgagggccggccgatcccgtccgagttccagccgctgggcggggtcgccgtggtggcgcagaacacctgggcggcgatcaaggggcgcgaggcgctggtggtcgagtgggacgccggggtcaacggcggctacgactcggtggcctaccgcaagcaactggaagaggccgcgcgcaagccgggcaaggtggtgcgcgacggcggcgatgccgcggcgctgttcgccaagggtggggatatcgtcgaggccgagtactacctgccgcacctggcccaggcgccgatggaaccgccggtctccaccgcctggtacaaggacggcgcctgcgaggtctgggccccgacccaggcgccgcaagtgacccgcgagcgcatcgccgagcgcttgaagctgccgttcgacaaggtcacggtcaacgtgaccctgctcggcggcggtttcggccgcaagtccaagcccgacttcgtgctggaagcggcgatcctggccaaggcgttccccggtcgccacctgcgcgtgcagtggacccgcgaggacgacctgcatttctcctatttccacacggtctcggtggagcgcctgcaggccgtgctcggcgccgacgggctgccgcaggcttggctgcatcgctcggtggcgccgagcatcaccgcactgttcggcccgaacagcaagcaccagggcgccttcgaactgggcatgggcctgaccaacctgccgttcgccatccccaacgtgcgcctggagaaccccgaggccccggcgcacacccgggtcggctggttccgctcggtctccaacatcccccacgccttcgccatccagagcttcgtcggcgaactggcggcgaaggccggccaggacccgaaggactacctgctcaagctgctcggcccggcgcggcgaattgacaccgccgaactcggcgacagctggaactacggcgagtcgccggagcgctacccgctcgatgtcggccgcctgcgcggggtgatcgaggaggcggcgcgccagtccggctggggcggcgagctgcccaggggcagggcgcggggaatcgccgcgcactacagcttcgtcacctacgtggcggtggtgatcgaggtggaggtgaaggacgacggcgcgctgctggtgcacaaggccaccatcgccgccgactgcggtccgcagatcaaccccgagcgcatccgctcgcagctcgaaggcgcctgcgtgatgggcctgggcctggcggcgctgggcgagatcagcttcaaggatggcaaggtccagcaggacaacttccaccagtacgagctggcgcgcatgccgctggcgcccaaggcggtgtcggtgcatctgctcaagccggatggcgacctgccgttgggcggggtcggcgagcccggcgtgccgccgatagcgccggcgctgtgcaacgcgatcttcgccgccaccggcaagcgcatccgcgagttgccgatccgcaatcagttgcaggggtggcggaaggcctag

SEQ ID NO: 321204 - DNA, 471 bp, Pseudomonas aeruginosa
atgattaccctgaacctcaatggcaaggatcatcagctcgatgtcaccgaggatatgcccttgctctgggctatccgcgacgtcgtcggctataccgggaccaagttcggctgcggcatgggcctgtgcggctcctgcaccatccatatcgacggccaggccacccgttcctgcatcacgccggtgagcctggcgcagggcaggaaggtcaccaccatcgaccacctgcacaccgacaaggtcggcgaagtcgtccagcaggcctggctggacatcggcgtggcgcagtgcggctactgccagggcgggcagatcatgtcggccacggcgttgctgaagagcaaccccgcgcccagcgacgagcagatcgaggcggccatggccggcaacatctgccgctgcggcacctacaaccggatcaagacggcgatccacaacgcctccgccaggttgcaggaggccaaggcatga

SEQ ID NO: 321205 - DNA, 237 bp, Pseudomonas aeruginosa
atggcgttagaaccttccgatgttttgctcgaatcggtgttttgtcagctggatgccgacaccccgcgttccctccatgatctcaagggcgaccccagggccaacctgctggcgatccgcctgctgttccgccagggccgcatcaccggcgtgctgctggacgaccccagcggtgccgaggaccagcatgggccgttgatctaccacgccgagcgcctgcgcgtgcggcgcggctaa

SEQ ID NO: 321206 - DNA, 243 bp, Pseudomonas aeruginosa
atgaaccacactgcatcgatccccgccctgcccacggcctatgacctgctgaacacccgcatccagcgcatcatccacgccccggccgcgcaacaggcctgccaggcctgcatttcccgattgcccggcgaagacgagggcgactgggcccacctgctggaaagcttcgaccgttccaaccagtggctgctcgacccgcagcgcgacggcagcatcgtcctgcgctggagttccgccgcctga

SEQ ID NO: 321207 - DNA, 1152 bp, Pseudomonas aeruginosa
atgagcgtcatcaccgatatcgaagacctgcgccgcctggcgcgcaagcgcgtgccgcggatgttctacgactacgccgactccggttcctggagcgaaggcacctaccgcgccaaccaggacgacttcgccgcgatcaagctgcgccagcgggtcgcgcggaatatcgagaaccgctcgctgcgcactcgcatgctcggccaggagatggccatgccggtggccatcgcgcccaccgggctggccggcatgcagcatgccgacggcgagatcctcgccgcccgcgccgccgccgagttcggcgtgcgctacaccctgtcgaccatgagcatctgttccctggaggacatcgccacggaagtcggccagccgttctggttccagctctacgtgatgcgcgaccgcgatttcatcgaacgcctgatcgaccgtgccaaggccgccggctgcgacgcgctggtgctgaccctcgacctgcagatcatcggccagcgccacaaggacctgaagaacggtctctcggcgccgccgcggccgaccctggccaacctgctgaacatcgccaccaagccgcgctgggcgctgggcatgctcggcacccggcgtcgcggtttcggcaacatcgtcgggcacgtcaagggcgtcgacgacatgggctcactgtccgagtggaccgcccgccagttcgacccgcggctgaactggggcgacgtcgaatggatcaagcggcgctggggcggcaagctggtactcaagggcattctcgatgccgaggatgcgcggttggccgccgactccggcgccgatgcgctggtcgtcagcaaccatggcggacgccaactggacggcgcgccctcgaccatcagcgcgctgccggcgatcgtcgaggcggtgggcgagcgcatcgaggtctggctcgacagcggcatccgttccgggcaggacgtgctcaaggccatcgccctcggtgcgcgcgggaccatgatcggccgtccctatctctacgggctgggcgcgctggggcaggccggagtgacgcgggcgctggagatcatagcccgcgagctggacctgaccatggccttctgcggccataccgacatccgcgaggtcggccgggacatcctgttgccgggaagctatccgcgatag

SEQ ID NO: 321208 - DNA, 921 bp, Pseudomonas aeruginosa
atgctcaatcccgacgatttccgttttccttccatcgaagcgttgcaggcgttcgaagcggctgcccggctgggtaccttcgagcgcgccgccgaactcctgtcgatcaccggcagcgccgccagcaagcgggtttccggtctcgaggggatgctcggggtgagcctgttgcagcgcgacggccgctcgctggcgctgacctcccacggccgcgagtacctcgaacagatcgcgccgatcctcgcccagctcgcggcggttccgctgcatcgtcgccaggtccagcgccagcagcggctgaccctgcgcacgccgccgaccttcgcccggcagatcctgattccgcgcctggcgtccttcgccgaggcctgtccggaaatcgagctggagattctcctgtcgagtccttcggacggccaggacctgccgctggccgatgtcgaggtgcgcggcgacagccatggcgtggcggccggcgagcggctgctggaggagcgcgtgctaccgatggccgcgccggggctgctgctcggcctgccgcggccctggacgccagccatgctcgccggcctgccgttgctgcgctcgccgctggagccctggcagccgtggttccgcgtggccgggctggactggccggagccctgcgccgggccgcgcctgctcgatttgggcatgaccctggaagccgccgccaacggccagggcgtggccctcgcgcgaccctcgctggcgcgcgcctggcttgccgaggggcggctggtggtgctgttcccgctgcgttcggcgcccacccaccattaccacctgcgcagccaccaggcctcgccggccagccagcgtttcgccgcctggctggcggcgatctgccgcgaggcggtggcccagggcagggaattccttccggcggcggacgactga

SEQ ID NO: 321209 - DNA, 324 bp, Pseudomonas aeruginosa
atgacccattcgcccgtcaaacagatgttgaaggaggccggcctgaagatgagcctggcccggctgaaagtgatcgatgcgctctgggaagcctcgggggagcagggccgggtgccgatccgcaccctgcaccggcgtctctccgaaaccggtacgccgctgtccctggtgagcatccgccaggtcctcgggcgcctggtggaaagcggcctggtgaccctcgacgaacaggatgtctacagccccggcaaggcttcctggggcggtgccgccggttccgcggcgcccgagcgccgcgccgcggccaacgagcagcggctctga

SEQ ID NO: 321210 - DNA, 2289 bp, Pseudomonas aeruginosa
atggggatgcgtaccgtactgaccggcctggccggcatgctgttgggttcgatgatgccggtccaggccgatatgccgcggccgaccgggctggccgcggatatccgctggaccgcctatggcgtgccgcacatccgggccaaggatgagcgcggcctgggctacggcatcggctacgcctacgcgcgcgacaacgcctgcctgctggccgaggagatcgtcaccgcgcgcggcgagcgggcgcgctatttcggcagcgagggcaagtcgtcggccgagctggacaacctgccgtccgacatcttctacgcctggctcaaccaacccgaggcgctgcaagccttctggcaggcgcagacgcccgcggtacgccagttgctcgaaggctacgccgccggtttcaaccgcttcctccgcgaggccgacggcaagaccaccagttgccttggccagccctggctgcgggccatcgcgaccgatgacctgctgcgcctgacccggcgcctgctggtcgaaggcggggtcggccaattcgccgacgcgctggtggccgccgcgccgcccggagcggagaagatcgccttgagcggcgagcaggcgttccaggtcgccgagcagcggcgccagcgcttccgcctggagcgcggcagcaacgccattgccgttggcagcgaacgttcggcggacggcaagggcatgctcctggccaacccgcacttcccctggaacggcgcgatgcgtttctaccagatgcacctgaccattcccggccggctcgacgtgatgggggcctcgctgcccggtctgccggtggtcaacatcggcttcagccgccacctggcctggacccacacggtggatacctccagccacttcaccctgtatcgcctggcgctggacccgaaggacccgcggcgctacctggtcgacggtcgttcgctgccgctggaggagaagtccgtcgcgatcgaggtgcgcggcgccgacggcaagctgtcgcgcgtcgagcacaaggtctaccagtcgatctacggcccgctggtggtctggcccggcaagctggactggaaccgcagcgaggcctatgcgctgcgtgacgccaacctggagaacacccgggtactgcagcagtggtactcgatcaaccaggccagcgacgtcgccgacctgcgccggcgcgtcgaggcgctacaggggatcccctgggtcaacaccctggccgcggacgaacagggcaacgccctgtacatgaaccagtcggtggtgccctacctgaagccggaactgattcccgcctgcgccattccgcaactggtcgccgaaggcctgccggccctccaggggcaggacagccgctgtgcctggagtcgcgacccggccgcggcccaggctggcatcaccccggcggcgcaactgccggtgctgttgcgcagggacttcgtgcagaactccaacgacagcgcctggctgaccaacccggcgagcccgctgcagggcttctcgcccctggtcagccaggagaagcccatcggtccgcgggcgcgctacgccctgagccggctacagggcaagcagccgctggaggcgaagacgctcgaggagatggtcaccgccaaccatgtcttcagcgccgaccaggtgctgccggacctgctccgcctgtgccgcgacaaccagggcgagaattcccttgcccgtgcctgcgcggccctggcgcagtgggaccgtggcgccaacctcgacagcggcagcggcttcgtctacttccagcgcttcatgcaacgcttcgccgaactcgacggcgcgtggaaggaaccgttcgatgcgcaacgtcccctggatacgccgcaaggcatcgccctcgaccggccgcaggtggcgacccaggtgcgccaggcgctggcggacgcggcggcggaggtggagaagagtgggattcccgacggcgcgcgctggggcgacctgcaagtgagcacccgtggccaggaacgcatcgcgattcccggcggcgatggccatttcggggtctacaacgcgatccagagcgtccgcaagggcgaccacctggaggtggtcggcggcaccagctacatccagctggtgaccttccccgaggaagggcccaaggctcgcgggttgctggctttctcccagtccagcgatccgcgctcgccgcactaccgcgaccagaccgagctgttttcccgccagcaatggcagaccttgccgttcagcgacaggcagatcgacgccgacccgcaactgcaacggctaagcattcgcgaatga

SEQ ID NO: 321211 - DNA, 1332 bp, Pseudomonas aeruginosa
atgactcaggcaactgcaaccgccgtggttcacgatctcatcggtgtcggcttcggcccttccaatatcgccctggcgattgccctccaggaacgggcccaggcgcagggcgccctggaagtgctgttcctggacaagcagggcgactaccgctggcacggcaacaccctggtgtcgcagagcgagttgcagatctccttcctcaaggacctggtgtccctgcgcaaccccaccagcccgtattccttcgtcaactacctgcacaagcacgatcgcctggtcgacttcatcaacctgggcaccttctatccctgccggatggagttcaacgactacctgcgctgggtcgccagccacttccaggagcagagccgctacggcgaagaggtcctgcgcatcgagccgatgctgagcgccggccaggtcgaggcgctgcgggtgatctcgcgcaacgccgacggcgaggaactggtgcgcaccacccgcgccctggtggtcagtcccggcggcaccccgcgtatcccgcaggtgttccgtgcgctcaagggcgacggccgggtgttccaccacagccagtacctggagcacatggccaagcagccctgcagcagcggcaagccgatgaagatcgccatcatcggcggcgggcagagcgcggcggaggccttcatcgacctcaacgacagctacccgtcggtgcaggccgacatgatcctgcgtgcctcggcgctcaagccggcggacgatagcccgttcgtcaacgaagtgttcgcgccgaagttcaccgatctcatctacagccgcgagcatgccgaacgcgagcgtttgctgcgcgaataccacaacaccaactattcggtggtggataccgacctgatcgagcgcatctacggcgtcttctaccgccagaaagtctccggcatcccgcgccacgccttccgttgcatgactactgtggagcgcgcgaccgccaccgcccagggcatcgagctggcgttgcgcgacgccggtagcggcgagctaagcgtagagatctacgacgcagtgatcctggccaccggctatgagcgccagttgcaccgccaactgctcgaaccgctggcggagtacctcggcgaccatgagatcggccgcgactaccgcctgcagaccgacgagcgctgcaaggtggcgatctacgcgcagggcttcagccaggccagccacggcctcagcgacaccctgctgtcggtgctgccggtacgtgccgaggaaatctccggctccctgtaccagcacctgaagcccggtactgcggcccgcgccctgcacgagcacgccctggccagctga

SEQ ID NO: 321212 - DNA, 480 bp, Pseudomonas aeruginosa
ttggaaaaccattatcgggagctgctgcgattcctcagtgccaggctcggggatcgacacgcagcggcggatgtcgcccacgacgcgtatttgcgcgttctggagcgctccagtcaagcgcagatcgagcatccgaaggcttttctgtaccggacggcgctcaacctggcggtggacgagcaccgtcgcagccgggtgcgccgggcggaacccctggaggtcctggacgacgaggagggcctggccagtccctcgccgcagacggtggtcgaccagaggcagcgcctggacaacctgcagcgcgcgctggccgagttgccggccatctgccgcagttccttcctgttgcgcaagctggacggcctgtcccattcgcagatcgccgaacatctcaatatttcccgcagcctggtggaaaagcacatcgtcaacgcgatgaagcactgtcgggtgcgcatgcgcgaatgggaagccgactga

SEQ ID NO: 321213 - DNA, 996 bp, Pseudomonas aeruginosa
atgaagacaccctctcccgccgacagcgacacccttgtgcaggacgccgcgcattggtgcatgcgcctgcacgccgaggacctctccgaggaagagcgtggcgagttccagcgctggctggcagccgatccccggcacgccgccgaatacgcagaaatggaggagatctgggcgctcagcgaactgctgccgcgaacgccggcgcccgagcttcgcaaccacgccgcaacccgcccgttcggccgtcgccgcaggggctggaagagccaggcacgcgccgccgccctcgccctgcttatgttaccgacggccggctacctcggctggctgcaaggctggattccctccaactaccagcgctacgaggccgagggcaacgtcaggcatgccgttcttcccgacggcagcgaggtcgaactggacctcaatacgcagctgagcttcgccaatttcaaggacatccgccgggtttccctggacaggggtgaggcctacttccatgtcacccacgacagcgcgcaccccttcgtggtcaaggccggcaacggctcgatcaccgtcaccggcacccgcttcaacgtctggaagtaccaggacaacgtggtagtcaccgtcaccgagggctcggtgaaggtccgcagcgaaggctcgggcaacgacagcagcctgactcccggcatgcaggccagctactatccgggcctgctgcaaccgttggtcgaggccgtggatacccgccagacgctagcctggcgcgagggccgcctggtactcgacgacctgcccctgtccaaggccctgccgctgatcaaccgctacctcgacgctccgctggtcctgggcgacaggagcgctgcgaaactgcgcattggcgggatctacagcacccgcgacatccgcagcctggtcgacgccctgccgaaagtcctgcccgtggacctggaacatcgcgacgacggcagcatccgcatcagcagccgttacgcccagctctga

SEQ ID NO: 321214 - DNA, 927 bp, Pseudomonas aeruginosa
atgagacgaacccgtagtactcgtcgcgcactgctcgtcgcagtctgcctcagccccctgatcgccctggccgcctggcaggcctatccgttccgcagcaacagcttcgataccgtgagcgtcagccgcggcagcatcgagagcagcgtctcggcgctcggcaccctgcaaccgcggcgctacgtcgacgtcggcgcccaggcctccgggcagatccgcaagttgcacgtcgaggccggggacgatgtgacggaaggccagttgctggtcgagatcgacccctccacccagcaggccaaggtcgatgccggccgctattcgatcgagatgctcaaggcccagctggccgagcaacgtgcccagtacaccctcgcccgccagcagtaccagcgccagcagcggctggccgccggcggcgcgacgcgtaccgaggacgtgcagagcgcccaggcgcagatgctcgccacccaggcacggatcgagatgtaccaggcgcagatccgccaggcccaggcctcgttgcgcagcgacgaagccgaactcggctatacccgcatctacgcgccgatgtccggcacggtggtggcggtcgatgcgcgcgaaggccagaccctcaatgcccagcagcagaccccgttgatcctgcggatcgccaaattgtcgccgatgaccgtctgggcccaggtttcagaagccgacatcggccgggtcaagcccggcatgccggcctacttcacgaccctcagcggcgaaggccggcgctggaccggcaaggtccggcagatcctcccggtgccgcccaagccgctggaccagagcaaccagggcggcggcagccccaccagcggcagcggcgggcagagcggcagcggccgggtgggctgtataccgtgctggtcgacgtggacaacggcgaccaccaactga

SEQ ID NO: 321215 - DNA, 285 bp, Pseudomonas aeruginosa
gtgctggtcgacgtggacaacggcgaccaccaactgatggcggaaatgaccgcccaggtgttcttcgtcgccgccaccgcggaaaacatcctcaccgcgccggtcgccgccatccacgacgacggcaagggcggccaggtcgcctgggtggtcggcagcaacggcaagccgcagagccgccagatcaggaccggcatcagcgaccgcctgcgggtacaggtgcttgccggcctggaggaaggcgaccgcctgctgatggccgctcccgacggcagcgacagctga

SEQ ID NO: 321216 - DNA, 1992 bp, Pseudomonas aeruginosa
atggaaaacgccacgcaccccgtccccctgatcgaactgcgcgacatccgcaagcgctacggcggcaatggcaccccggaagtcgaggtactcaagggcgtatcgctgtcgatccacgccggcgagttcgtcgccatcgtcggcgcctccggctccggcaagtcgaccctgatgaacatcctcggctgcctcgaccggcccagctccggcagctaccacttcgccggccacgacgtcgccgaactggacagcgacgagcaggcctggctgcgccgcgaggcattcggcttcgtgttccagggctatcacctgatcccctccgcctcggcccaggaaaacgtcgagatgccggcgatctacgccggcaccccggcgagcgagcggcacacccgcgcgcgggccctgctcgagcgcctgggcctggcagagcgcactgccaaccgtccgcaccagttgtccggcggccagcagcagcgggtatcgatcgcccgcgcgctgatgaacggcggccatatcatcctcgccgacgaacccaccggcgccctcgacagccacagcggcgcggaagtcatggcgctgctcgacgagctggccagccagggccacgtggtgatcctgatcacccacgaccgcgacgtcgccgcccgcgccaagcgcatcatcgaggtgcgtgacggcgagatcgtcagcgacagcgccaacgacgagcgcccggcgcacccgagcgccggcgtcgagcgccacctgcaggccgacgatctcagccagcgcctcgccgagggcagcagcgaaccctcgggggcctggcgcgccgaactgctggaggcggtgcgcgccgcctggcgggtgatgtggatcaatcggttccgcaccgcgctgaccctgctcgggatcatcatcggcgtcgcctcggtggtggtcatgctcgccgtcggcgagggcagcaagcgccaggtgatggcgcagatgggcgcgttcggctcgaacatcatctatctcagcggctactcgccgaacccgcgcgcgccgatgggcatcgtcagcagcgacgacgtcgccgccatcgccaccctgccccaggtgaagaaggtcatgccggtgaacggcggcgagctggtggtgcgctacgggaacatcgactaccacgcctacgtcggcggcaacaacaccgacttcccggaaatcctcaactggccggtggccgagggcagctacttcaccgagcgcgacgaagacgccgccaccacggtcgcggtgatcggctacaaggtgcgcaagaagctgttcggcagcgccaacccgatcggccgctacatcctcatcgagaacgtgccgttccaggtcatcggcgtgctcgccgagaaaggctccagctccggcgacaaggatgccgacaaccgcatcgccatcccctactccgctgccagcatccgcctgttcggcacgcgcaaccccgagtacgtgatcatcgccgccgccgacgcccagcgcgtgcaccaggccgaacgcgccatcgaccagttgatgctgcgcctgcaccgcggccagcgcgactacgagctgaccaacaacgcggcgatgatccaggccgaggcgaagacccagaacaccctgtcgctgatgctcggctcgatcgccgcgatctccctgctggtaggcgggatcggcgtgatgaacatcatgctcatgaccgtgcgcgaacgcacccgcgagatcggcatccgcatggccactggcgcccgccagggcgatatcctccgccagttcctcaccgaggcggcgatgctctcggtggtcggcggcctggccgggatcgccctggccctgtgcatcggcggcgtgctgctgctcggccaggtcgcggtggccttttccctgtcggccatcgtcggcgccttcagttgcgcgctggtcaccggcctggtgttcggcttcatgccggcgcgcaaggccgcccagctggacccggtggccgccctggccagccaatga

SEQ ID NO: 321217 - DNA, 1419 bp, Pseudomonas aeruginosa
atgaagaatctctccctgatttccgcctgcctgctgctcggcgcctgcggcagcacgccggcgcccctcgacagcggcctggccgcgcccagccagtggcgctacctggcggccgggcgcagcgatgccagcgacatccgccagtggtggaaggccttcggcgcgccggaactggacagcctgctgcaacgcgcgctgctgaacagccaggacctcggcgcggcggtggcccgcgtacgccaggcccaggcctcggcggtgatcgccggcgcgccgttgctgccggagctgaatgcgacgctcggcgccagccggcagaaactcctgcgcgactcgggctacagcggtaccgacgcgacctccgacaacgatgccgtcgactccttctccgccggcctcagcgccagctacgaagtggacttctggggcggtcgccgggctgcctaccgcagtgccctggaaagcctcaaggccagcgagtacgaccgcgcaacggtagagctgaccctgctctccggcgtcgccaacagctacctgcaggtattggcgctgcgcgaacagcagcgcatcgccaggctcaacctggacaacgccgagcacgtcctgcgcctggtggagacccgccatgccgcgggctcggccaccgccctggaggtcgcccagcagagcagcctggtcgccagccagcgcaagcagctgccgctgctcgagcagcaggcccatgaggcgctgattaccctggccaccctgatcggcgagccggtgcaggcgctacaggtggccgagcggcctttcgacagcctgcgctggccggagaccggagcgggcctgccgagcgaactgctcagccgccgtcccgatatcgccaacgccgaagcgcaactggccgcggcccaggccgacgtgcaggtggcgcgcgcggcgctgttccccaagctgaccctgagcgcctcgctgtcgtccggcgccaaccgcgccgccgacactttccgcaacccctattacaacctgggcgccaacctgctcgccccgatcttcaaccacggccgcctgcgcgccgagcgcgaccgcagcctggcgcgccaggaagaactgctggaaacctaccgcaagacgatcctcaccgcctttgccgacaccgaacgctcgctgaacagcatcgacggcctcgaccgccagctgcactggcagcagcaggagctggagcaggcgcagcgcgccttcgatctctccgacagccgctaccaggccggcgcggaaaccctgctgacggtcctcgaaacgcaacgcacgctgtacgcggcgcaggatgccgccgtgcaactgcgactggcccgcctgcaggcctcggtcggcctgtacaaggccctcggcggcggctggcagagcgaccgccagggtctcgcgcggaaagactga

SEQ ID NO: 321218 - DNA, 1635 bp, Pseudomonas aeruginosa
atgacggtttctcgacgcggattcatggcgggcctggcccttaccggggcggcggcgctgccggtggcttactacacacatcgtcatctgacccgcgaagaggagccgcagacgcctgacgaggcttcgctcgacctggcggctaccgatggcatacgactgggcgaccgcctgcgcggtctatgggatctgcgcctggtaggcggtgatgccgaactgcccgggcttcctcgggagggcttgcaactggtgctggacgtggcacccaagggacgcggcctgattggctacctggatactcctgaacgtctcctcgcggcggagccgccgcgctttcgtgtgcttggcgacttgctcggagccagttctgcaagcatccgctggcgtttggtggaccaggcgagcggttccgtggcaccgactcacgattgctcggcggtgttcgacgaggtctgggcagactatgcgaacgcgggcgacggaactctgagcggacgcatacagcgcctggagcgttcgccgctgtcgccgaacgaggattttcgcttcgttgcggtaaagcgtcacttccccctggcccatgagcgcatcgtgctcaacgagaaacttctcggttggctggtgtcgccgcagcaccgactgttccaccagctatggcacgcttcgcgggacaaatggcatcggctttcggaaaaacaacgcaatgcgttgcgcggagtcggttggcagcccggcccgctggaccgcgaacgcgatgcgcgagggccgcgcaaggatcgcaatgcctcgggtatcgacttctttttcatgcaccggcacatgctgcacaccgcgcgttccatgcaggacctgccgtcctgggagcgtctgccgcgacctgtggtgccgctggagtacgatcgtcccggcttcatccgttacttcgacaatccggacgggttttccgtgcctccggcctgggtggcagtggatgacgacgagtacagcgagtggctgcatggcctgaaaagcgccgaggcctaccatgccaatttcctggtctgggaatcgcagtaccaggacccggcgtacctggcgaagctgaccctcggccagttcggttcggagctggaactgggcatgcatgactggctgcacatgcgctgggcctcggtgacgagggacccctccaacggcgccccggtcatgaccgaccgttttccggccgatttcgccccgcgctggttccgcccggagaacgacttcctcggcgacccgttttcctcccatgtgaatccggtgttctggtcgttccacggctggatcgacgaccgcatcgaggactggtatcgctcccacgagcgtttccatcctggcgaagtgcagcgtcgcgaagtggagggcatccaatggttcgcgcctggtcgatgggtcgaggtcggcgatccctggctgggcccggcgacccatggatgcgggctttcggatgtccaggcgagcagcaactcggtggagctggacgtggaaaccatgaagctggctttgcgcatcatcttcagcgaagaagaccagttgagcggctggctcaagcgtgcgccgcggcggccctggtacgcgcgcaacctgaagctggcgcgcgaccagctcaggcgctga

SEQ ID NO: 321219 - DNA, 1347 bp, Pseudomonas aeruginosa
atgactagaacacgcacacgcaaggccctctacctcggcttgccgatcttcctcatcctcgtcggcggcggcctgctggcctggaagaccttcggcccgagcgaagcgggctacccgcgcaaggtcatgaagcacgccgaggagttgcatgagcgcatcctctccttcgatagccggatcaccatcccgccggacttcggcaccgaaggcaacgagttcgacaaggacggaccgaaccagctcgacctggtcaaggcgggccgcgggcgcctgtccggcgctgccctggcgatcttcggctggccggagatgtggaacggcccgaacgcgccacacaagccgaccccgggattcgtcgacgaggctcgtcaccagcaggaaattcgttacaagattctcaccggcatggtccgcgacttccccaaccaggtcggcatcgcctactcccccgaggacttccgccgcctggccatggaaggcaagttcgccatcgtcatgagcatgctcaacgcctacccgctgggcgacgacctgtcccagctggacaaatgggccgcccgcggcgtgcgcatgttcggcttcaattatgtcggcaacaacgactggtccgactcttcccgtcccttgccgttcttcaacgacacggcggatgccctgggcggcctctccccgctaggcaagcaggcggtcgaacggctcaacgatctcggggtgatcatcgacgtctcgcagatgtcgaccaaggccctggaacaggtcgccgccctcagccgcgcgcccatcgtcgcctcgcactccgcgccgcgcgccctggtggacatcaagcgcaacctcagcgaccacgagatgcaactgatcaaggacagcggcggcgtgatccaggtggtcggcttccccgcctacctgcgtccgctgagcaaaccgaccctggacaagctcgacgccctgcgcgcgcgcttcgacctgccgcccctggaaggcctggactatgcgctgatgccgggcgatccgatcatcaccatctggccggaacaacgcttcggtgaatacgccagcgccctctacggcatcctggaggaggagcccaaggccggcctcaaggaactggtggacgccatcgactacacggtgaagaaggtcggcatcgaccacgtgggcatcagctcggacttcaacgacggtggcggcgtggacggctggaaggatgtcagcgaaatccgcaacgtcactgccgaactgatcacccgcggttattccgatgccgacatcgccaagctctggggaggcaacttcctgcgcgcctggggcgaagtgcaaaaacgcgccaagccgacagccaccccctga

SEQ ID NO: 321220 - DNA, 1284 bp, Pseudomonas aeruginosa
atgaacgaccgtcgtacctttctcaagcaggccggcattctcgccgccggcctgccgctgctttccgctgcccagtcgctccgcgccgaaggcgcaccgagcgacgccggcaataagtggaaagcgctgcgccagcaattcgatctcgacccgcagtatctgcacttcgccaacttcctcctcacctcccaccctcggccggtgcgggaggccatcgagcgcctgcgggtccgcttcgaccgcaacccgggcgaagcggtggactggcatcgcgaggaaatctggaaatacgaggacgaggctcgcgcctgggcaggtcgctacttcgccgtgcaacctggccaggtggcgctcaccggcagcaccaccgacggcctggcggcgatctacggcggcctgctggtgcagccgggcaaggagatcctgacctcctcccacgagcactactccacctacaccaccctggaataccggcacaagcgcatgggtacccaggtccgcgagttcccgctgttcaaggacccgcaccgggtttccgccgacgagatcctgtccagcatcgccgctcagatccgcccgcagacccgggtgctgggcatgacctgggtgcagtcgggcagcggcgtgaagctgccgatccgcgagatcggcaagctggtgcgcgaactcaaccagaagcgcgacgaacaggaccggatcatctacgtggtcgacggcgtgcatggtttcggcgtggaagacgtcagcttcgccgacttcgactgcgactacttcatcgccggcacccacaagtggctgttcggcccgcgtggcaccggggtcatcatcgcccgctcggaacagctccaggagcacctggtgccgagcatcccgaccttctcccgcgccgacaacttcggcaccctgatgacccctggcggctaccacgccttcgaacatcgcctggccctgggcacggccttcgagctgcacctgcagttgggcaaggccgaggtccaggcgcgtatccaccagctcaacgcctacctcaagcagcgcctgggcgagcatcccaaggtccgcctggtcacgccgaccagccccgagctgtcttcgggcttcaccttcttccgcgtcgaaggccgcgattgcgaggcggtcgccaaacacctgatggcgcaccgggtaatcagcgacgccgtggatcgcgatgtcggcccggtggtgcgcctggcgccgagcctgctgaacgacgaggcggagatcgaccgggtgctggaaatcctcgccccgcaactcgcctga

SEQ ID NO: 321221 - DNA, 855 bp, Pseudomonas aeruginosa
atgcacgcattatcgcccctggccctggccgcactgatcgtcgccaccgcccccgccttcgccgacgaagcgaagaaacccggcacggtgttcaaggattgcaaggactgcccggagatggtcgtactgcccgccggcagcttcaccatgggcaccccggacgacgaggtcggccgccagcccgacgagggcccgctgcacgacgtgaccttcgccaagccgttcgccatcagccgctaccaggtcaccgccggcgaactggacgcctacctgaaagccaccggcgtcaagctggccgacggcgatacccgccccggccgcgaatgcatcgccggcaagccgcgctaccagcaaggccctcgccagccggcggtgtgcgtcgactacaacgacgtgaagaactacgccgcctggctgtcgaagaagaccggcaagcactaccgcatgctcagcgaggccgagcgcgagtacggcgcccgcgccggcagcgccggccccttccccttccccttcgacgaaggcaaggaatacagcatcgccaagcacgccaacacctacggcgccagcgatggctacaacttcacctcgccggtgggcagcttcccgcccaacgccttcggcgtctacgacatgcacggcaacgtctacgagtgggtcgccgactgctggcacgaccactacaacggcgcgccgagcgacggcagcgcgtggatggaggacaagtgcgagctggtgcagatccgcggcaacgactggggcgagccgccgatcttctcgcgctcgggcaaccgcaacaatgcggcccccagcgaccgcggcgactggatcggcttccgcgtggcgcgcgaactctga

SEQ ID NO: 321222 - DNA, 828 bp, Pseudomonas aeruginosa
atgacgaaaaggaaactggcctatatctggtccctgagaaacgccgcggccgacaaggccggccagtacgtgccgtacaagggcgaacagcggtacatgaagtcggtactggagtccttggtggaggcgctgaaccagactgcgctgggcgatgcctacgagctcgtgggcgtgatctacgacgacgacgcggagctgcctcgcgaccagggaaaaatcaaggactacggtttcgcctatcgtcccgggcagcaatggttctatccggcagacctgcaggtgcaaggcaagaccctgaacgacctcttgctcagcgtgccgtccacctaccgtcggtacccgcggggtacccccgagcatgtggccggcaagagcgatttcgagcgacgcctgcatgacaccctggtggagctgggcgccgatgtagtggtattggacgggctcctggtcatcctcgatgagctggtacgcccgggtgctccgttcgcacggcggatcatgaatatccatcctggcgtgacgcgcgaggactcgccttacgagcgtcgtggcgcctatgcgaccctggacgcgttgtatggagcgcggggcgagaaggtggtggattgggcgaccatggagaaggtcgcggtcgagccgctgtactggaccggagcatcgttccactatgtggacaatggcatcgattccggcgaagtgttccatgatgtgctgaaaacggagatttcacccgacgacaccatcctcgagctgcgctggaacaacttcaacaacagcctgttcccggccttgcacgaagggttggcgctgctcgccgagaagctctga

SEQ ID NO: 321223 - DNA, 1650 bp, Pseudomonas aeruginosa
atgaccaatcccaagcgcggcgccattcgcgaactgctcgccctgctcaggccctttcgagcgatcgtggccgtctccatagcactgggcatggccggcggccttgccatcaccctgctgctggccagcatcaacaacgccttgcactcggaaaacggcctcggccaaggcgtactgctgtcgttcggcggactctgcctgctggcattggtcagttcgatcgtctccgacatcggtaccagctacgtcggccaacacatcatcgcgaagctgcgcaaggaactcggcgagaaagtcctctcggcgcccatcgagcagatcgagcgctaccggacccaccgtctcattccggtactgacacacgacattgataccatcagcgacttctccttttccttcaccccactggccatcgccctgaccatcactttcggctgcctgggttacctcgcctacctatcggtcccgatgttcctgctgacagtcgtcgccatcgtcatcggcacggcagcccagtacctggcgcgctcccgcggtttcaaagggttctatgccgcccgcgatctcgaagacgaattgcagaagcactacaccgccatcgcttcgggcgcgaaggaactgcgcatccaccgcccccgtcgctatcgcatgcacaccggccgcatcagcgaaaccgcgaacaacatccgcgacctccacatcagctccatcaatatattcatcctggccaagaccttcggctcgatgctgttcttcgtggtgatcggtctggcgcttacgctccaggcctactggccttcgtccaatccggccgccatcactggcttcgtgatggtcctgctgtacatgaagggaccactcgaacaggtggtgaccatccttcccatcgtcagtcgcgcccaggtcgccttccagcgggtcgccgaactttccgagcgtttttcctctcccgaaccccatcttctgctcagcgaacaggaggccccggacaagaccgtcgacagcctggaactgcgcgacgttcgctacagcccccccgccgtcgaaggcagcgaaccgttccatctgggccctatcaatctgcgtatcgcccaaggtgacatcgtcttcatcgtcggcgagaacggctgcggcaagacgaccctgatcaagctgctgctcggcctctatcgcccgcagtccggcgagatccttctcaacggagaaccggtcagcgcggagacccgcgacgattaccgccagctcttcagcaccatcttcgccgactactacctattcgacgacctggtccagggcaagcaggcttcgttgcagaacgcgacccaatatctgcaacgcctggaaatcgcccacaaggtcagcgtcatggacggcaacttcagcaccaccgatctctccaccgggcagcgcaagcgccttgcgctgatcaatgcctggctcgaagagcgaccggtcctggtcttcgacgaatgggccgcagaccaggacccggctttccgcagggtcttctacaccgaactgttgccggacctgaaacgccagggcaagaccatcatcgtgatcagccacgatgatcgctatttcgaaatggcggaccagttgataaggctctcggcaggcaaggtcgtcaaggaaaccgagacggcgtga

SEQ ID NO: 321224 - DNA, 2403 bp, Pseudomonas aeruginosa
atgcgccgtgccttccaacgcaggattcttccccactcgctcgccatggccctgagcctgccgctggcgggatatgtccaggcgcaggaagtcgagttcgacatccctccccaggcgctgggcagcgcactccaggagttcggccgccaggcggatatccaggtgctgtatcgcccggaagaggtccggaacaagcgtagcagtgcgatcaagggcaagctggagccgaaccaggcgattaccgagctgcttcgtggcaccggcgcatcggtggacttccagggcaatgcgataaccatcagcgtcgccgaggcggcggacagcagcgtcgatctcggcgccaccatgatcacctccaaccagttgggcaccatcaccgaggacagcggctcctatacgccaggcactatcgccacggcgacccgcctggtcctgactccgcgcgagacgccccagtcgatcaccgtggtcacccgccagaacatggacgacttcggcctcaacaacatcgacgacgtcatgcgccatacgccgggcatcaccgtctcggcctacgacactgaccgcaacaactactatgcccgcggcttctcgatcaacaacttccagtacgacgggattccctcgacggcccgcaacgtcggctactccgcgggcaatacgctcagtgacatggccatctacgaccgggtggaagtactcaagggggcgaccggcctgctcaccggtgcggggtccctcggcgccacgatcaacctgatccgcaagaaacctacccatgaattcaagggccatgtcgaactgggcgcgggcagttgggacaattaccgctccgaactggacgtcagcggcccgctgaccgagtccggcaacgtccgcggccgggcggtagccgcctaccaggacaagcactcgttcatggatcactacgagcgcaaaaccagcgtctattacggcatcctcgagttcgatctgaatcccgacaccatgcttaccgtcggcgccgactatcaggacaacgatcccaagggatcgggctggtcgggcagcttcccgctcttcgacagccagggcaaccgcaacgacgtctcccgctccttcaacaacggagccaagtggagcagttgggagcagtacacccgcaccgtcttcgccaacctcgagcacaatttcgccaacggctgggtcggcaaggtgcaactcgatcacaagatcaacggctaccacgcgcccctcggcgcgatcatgggcgactggccggcaccggacaacagcgccaagatcgttgcgcagaagtacaccggcgaaaccaagagcaactcgctggatatctatctcaccggccccttccagttcctcggtcgcgagcacgagctggtggtcggcacctcggcttccttctcccactgggagggcaagagctactggaacctgcgcaactacgacaacaccaccgacgacttcatcaactgggacggcgatataggcaagcccgactggggtaccccctcccagtacatcgatgacaagacccgccagttgggcagctacatgaccgcccgcttcaatgtgaccgatgacctgaacctgttcctaggtggacgcgtggtcgactaccgggtaaccggcctgaatccgaccattcgcgagtccggacgcttcattccctacgtcggcgcggtctacgacctgaacgatacctactccgtctacgccagctataccgacatcttcatgccgcaggacagttggtatcgcgacagcagcaacaaactgctcgaacccgacgaaggccagaactacgagatcggcatcaagggcgaatatctcgacggacgactcaataccagtctcgcctacttcgagattcatgaggaaaaccgcgcggaggaagacgccctctacaacagcaaaccgaccaaccccgccatcacctacgcctacaagggcatcaaggccaagaccaagggctacgaggcggaaatctcgggtgaactggcgccaggctggcaggttcaggctggctatacccacaagatcattcgcgacgacagtggcaagaaggtttccacctgggagcctcaggaccagttgagcctctacaccagctacaagttcaagggcgccctggacaagctcacggtcggcggcggcgcccgctggcagggcaagagctggcagatggtctacaacaatccccgcagccgctgggaaaagttctcccaggaagactactggctggtggacctgatggcccgctaccagatcaccgacaagctgtcggccagcgtcaacgtcaacaacgtcttcgacaagacctactacaccaacatcggtttctacacctcggcatcctatggcgatccacggaacctgatgttcagcactcgctgggacttctga

SEQ ID NO: 321225 - DNA, 1053 bp, Pseudomonas aeruginosa
gtggaacgggtcggcctggacgacaacttcttcgaactgggcggtcactcattgttgctgctgatgctcaaggagcggatcggcgatacctgccaggctacgctgagcatcagccaactgatgacccatgccagcgtcgcggaacaggcggcatgcatcgaggggcaggcgcgtgagtcgttgctggtgccgctcaacggcaggcgcgaaggttcgccgctgttcatgttccatccgagtttcggctctgtgcactgttacaagaccctcgccatggcgctgcgggatcgtcatccggtcaagggtgttgtctgccgtgccctgctgggcgctggtcgcgaggtgccggagtgggacgatatggttgcggaatacgccgagcaattgctgcaggagcaccccgaaggggttttcaacctggcgggatggtcgctcggcggcaacctggcgatggatgtcgcggcccggctggagcagcgtgggcggcaggtggctttcgtcggctggatcgatgcaccggcaccggtcagggtcgaagcgttctggaacgagatcgggccgacgccggaggcagtcccgaacctatccgtgggcgagatgcgggtggaactgctcggtgtcatgtttccggagcgggccgagcatatcgaacgggcctggtcatcgatctgctccgccacgacggacgatgagcagcgctggacgaggatgagcgactgggcggaagcggagatcggcgccgagttcgcgacactgcgcagcgaaatcgcacagagcaacgaactggaagtgtcctgggagttgaaacagatcctcgacgagcgcctgaaagcgatggattacccgcgtctgacggcgaaggtcagcctctggtgggccgcgcgcagcaccaatgccatccagcggagcgcggtggagcgctcgatggccgaggcgatcggggctgagcgtgtcgaaccggtgcgggtgctggatacccggcacgacaagatcatcgaccaccctgagtttgtgcagagcttccgggccgccctggagcgtgccgggcgctga

SEQ ID NO: 321226 - DNA, 951 bp, Pseudomonas aeruginosa
atgaacgccgcggacgaaggccggattccctcgccgatcctcgacgaggccgccgagtggctggtgcgcctgcaggacagcggctgcaccgacgacacgcgccaggcctgcgtccagtggcggcagcgcagcccgcagcacgcccatgcctgggagcgcgccgagcgcctgctgcaatgcctcggccgactgccgccggcgctggccctgccgaccctcggccgcgagcgcgggctggaccggcggcgcgcgatcaagcacctcgccctggtcctcggcggcgcctcgctggggctcgccacctggcaggccgaaccgttgcgcgactggctggccgaccagcgcaccggcgtcggcgaacagcgccgcctgaccctgcccgacggcagcctgctgaccctgaacaccgacagcgccgtggacctggccttcgacgccagccagcggctggtacgcctgctgcgcggcgagatcttcgtcgatagccgcgccgacccgcgtccgttccgcgtcgccaccgccgaagcgcggctgcatgccggtgccgcccgcttcaacgtacgccaggagatggccgcgacccgggtcgcggtactcgccgggcgggtcgaactgagcccgctccacggacgcgggcgctggctggaaagcggcgagtcggtgcgcctgggcgccgacggcgaagcgcgccggctggccttcgacggcctgccggacgcctggacccgcggcatgctgatggccgaccggatgccgctggccgaggtgctcgccgaactcgcccgctaccgtcgcggcgtactgcgctgcgacccgcaactggccaggctggcggtgtcgggcgcctatccgctgctggacctgcggcgcacgctgggcatgctgcaggccacctatccgctgaaggtgcgcggggtgaccgactactggatcagcctggtgccggcgtga

SEQ ID NO: 321227 - DNA, 507 bp, Pseudomonas aeruginosa
atgccgccggccgacgcctccctgcacgacgctgtgagccatctctaccaggaccaccatggctggctgcaaggctggttgcggcgacgcctgggctgcgcggaaaacgccgccgacctggcccaggacaccttcgcccgcctgctcgcctcgcgccgggtactggatgcgcgcgaaccgcgcgcctacctgaccaccgtcgccaaggggctgatgatcaactggttccagcgccagtcgctggagcgcgcctacctcgatgccctggccaacctcccggaagacctcgcgccgccgccggaacagcggttgatggtgctggaaaccctgcatgaagtagacgccctgctcggcagcctgccggacagggtccgccaggcgtttctcctggcgcagatcgaaggcctgaagtacgaagccatcgccgagcgcctgggcgtgtccctgggttcggtcaagcgctacatgcagcaggccttccgccagtgcctggagctgatggaatga

SEQ ID NO: 321228 - DNA, 681 bp, Pseudomonas aeruginosa
atggctttcgatgccgcccgctatgtccaccgctactacgccagcctggcgcccgccccgggcaacgaatacccgcgcctgagggcctgggagtacctctgggagtatgtctgggaccccagtcgcagctgggacgacctgaccgcccccgaacagctcgacaccaccgccctgcacctgggtttctacctggccaactggggcatgttccgtggctcctcgggactgctgcagaacagcaacctggacctgatgaaagcgctggcccggcagctcttcagcggtgccggaccggaactcttcgagctgtccctggtggatttcgccggcaacggcgcgcgcctggcgcacaaccgcaagctgctggaaacggtactcgggtcgatggacgccctcagcagccgggtgagctggaccgacaccctgaagagcaagatcctgctcggcgtctggggcgagtttcccgccctcgaccgccactacgtggccgcctgtcgcgcgctgtatccacgccggggcctgacgagcgtcaacggcgggaccctcaccgcgctgcaccgcctgatcggcgaagaaaggctgtcgttcccgcgcctggagaccgcccgcaaggggctcctctaccccaccgggcgcctggccgacatggctttcttccagtacggcctggaaaacgcctga

SEQ ID NO: 321229 - DNA, 1227 bp, Pseudomonas aeruginosa
atgaacggaagcagatccacctttctctaccttctcgccgccgccggcctggcgctgacacccgcggcccaggccgaccggggcaacgacgtggtcgcccggctcaaccagttgtacaacgacacccgccaggattgcggcggaccgtcgaagccggcattcctctgttccggcgtgctgttccgcgccacctggccttcgaccgactacatgttctacagcatcagtccgaagagccagaaaagcggcggcgtctccgcctcctacctgcgcaaggacgccaagtaccgcaagctcgcctatggcctgaagagtggcttcatcttcgacaccatcttcggtaatccgaaggaccaccaggactatgcggtgctctgttccttccccatcgacgccgccaccgacgaccgcgcccagcagggttgcaccgattcgcggcgcacgccgaacagcgtcgagaagtcctgccaggacatcaacgtcagcaccgccgagcagtgggcggcgaactaccggcagaaccgcggcgaccattcgcggcagtgctccttcgacgtccgcgacgagcgcaataccgccgccggcccggccttctaccagagcatccgggcgatggcgcagatcgccgacgaatccttcaccacccagaacgaactgcgcctggccaagtgggaggaaaacccgccgaagtcgccgtcgatcctcgccgcgttctacaccgaggacgccggcctggagggcgctcggctcaaccagatccagtggtatcagtcggtccaggcattcctcccgatcatcaacatgcgactgccgcagacccgccagcaggacgcgcagttcgcctacgacgggcgtaagcaggcgatctacccgaccagcgagaagaatgcctgcgagcgctatgtggaaagcgccacctgggtggagcgcgacgatccgggcttcaggaagaagatcatgaccctggaagtggtaccgaccgattgcgggcgcaagatccaggacaaccagaccaacaatttcttcaacgagctggtggtcgaccactacctggacagcgaatggaaggacaacccggacaaccgcgacagcaatatcggcagcatgcgccgacaactggtctgccacttcaacgtcgcccgcaacaagcccgagtggaacctggaaccctcgcggccgtacacctccaacgaggactccatcgccaagggctgcaataacacctga

SEQ ID NO: 321230 - DNA, 1548 bp, Pseudomonas aeruginosa
atgccgcagagcatccgccacctgatcgccctccccgaactccgttcgcgcctgctgagcggagccggcggcctcgaccgcccggttcgctgggcgcatgtctgcgaactcgacgaccccaccgaatggctcggcgagggtgacctgctgatgaccaccgggctgggcataccgagcgacgccgagcggcaacggcgttacgtccgaagactggccgaggccggcctggcaggcatgatgatcggcgagaacatggaagccccgagcgacctcgatgccctacgcgagacggccgaggccctgggcttcccgttgattctcacccactacggcgtccctttcgccgccgtgacccgggccatcgtcgatgcgggacagaaagacgaatacgagcgccgcaacgccctggcccggatatacgaaagcgcccggttgagcatgcagggactgggcctgccggcgctgctgcaacgcctcggcaaggacgtgcgaagcagcctctacctcatcgttcccgacaccctggcggcctggcagccaggcctgccagggctgcccgtggagttggccgacgcgctgcgcaaccgccgtcgcgagcaggcggagccgcagccaatggtccttcgccatccgctcgcggaaggcgaagcgctcagcatcggcattccttccgaccggaactgcctgctgatagccctgggcgagcggctgccggactacagtctcctgcaccacctgacggcagtgctcggcatagagatcgaacggctgcgcgtcgaaagcgaacgccacctgcgcctgggttcggaattgctcgacgacctgctgcaacgacggctataccgggaacaagccgaggagcggctggaggaactgctgcccgggctcgatctcgacgatgcagtcgtttccgtggcaagttccgaggggctcgcgaccgaccctatcggtcttttccggggccacgactcacgcctgctggttcgcgcgcaaggccaggaaatcattctgctgcaccaggccggcctcgcctcgacactgcaggaagccctggacagctcgctgggcgtgagcgccccgctccgtcgtgccgaacgttgcgccgaggccttgcgcgaagcgcgtctggccctggcccacagccattcccggcgaccgttgtgtcgctacgcggaactggacgacgaggcgccctggctacccagaagcctcgccgaggccgagcgggcgttccgtctggtcctcggcgccctccacgactatgacgcggccaatggctccgcactgctacacacgctgcaggtctttctcgaggaaaacaggtcctggttgaacgccgcgcagcggctacacatacacaagcagagcctggtctaccggatacgccgcatcgaggaaatcagcggtcgctcgctggacagcaccgccgatgtggcgaccctctggttcgccttgcaggcaacccggctgtcgccggaagcgaggggcaggacggcgaagggcagcctcctggagcagtccgcgcaccatggcggcgacatggactga

SEQ ID NO: 321231 - DNA, 1233 bp, Pseudomonas aeruginosa
atgggtatgcgagaagcgaacgacaacgcatcgggcctcaaggcccatcccctgggctcgctcgagacgatcgcgatcatcatcggcaccaacatcggcgccggcgtgctgagcatggcctacgccgcccgcaaggtcggctacgtgccgttgctggtatgcctggccctgacctgcctcttctgcatcgtcaccatgctctacgtgaccgaagcctgcctgagaacccgcggcaacaaccagctcagcggcctctcccggcgttacctgggcccgctcggcggctggctgatcttcatcgcggtggcggccaacagctacggggccctggtcgcctacatgaccggcagcggcaacatcatgctcgagttcttcggccagtacggcctcacgcgcgaggtcggcagcctgatcttcttcgtcccctcggcgctggtgctctacctgggcctgaaggcgctcggcgtgggcgagaagctgatcagcgccggcatggtggccatcgtctgcatcctcatcggcgctaccctgatgcacgacgacgcccgtctcgcccacctttggcagagccagtggcaatacgtggttccagtgttcaacctggcggtcttcgtgttcggcgcgcagttcctagttccggagctggtgcgcggcaacctggcaacccccgggcgcgtgccgcgcctgatcgtggtcggcatgctgctgaccttcctgctggtggcggccattcctgcctcggtcatcgccctggtcggccccgacaacctcagcgaggtggcgaccttgagctggggacgctccctcggccaatgggcctactacgtggcgaacaccttcgccttgctggcgatgctgacctcctactggggactcggcgggtgcctgttcaccaatatcttcgaccacttccgcctgggcagcgaaaccaaccggcgcaaacgcctggcggtgctcgccgcggtctcggtcccgccgttcctgctggcctatgcggggctcggcggcttcgtgaacgcgctgtacttcgccggtaccttcggcggcgtactgatgggcatcatccccatcctcctgctcaacgcggcgcggcgccacggcgaccaactgccggcattcagctgcggctggtatgcccatccgctgatacaggggctgatcgtcctggtgttcgcctccagcggggtctacgcgatcgcctcggcactggggatgctgcccgccagttggtga

SEQ ID NO: 321232 - DNA, 348 bp, Pseudomonas aeruginosa
atgaacccttcgctcatccgtctcgacgacgaaagtcctttcacctcgcccacgcccgtcggccagccgctgggcgaaccggtagccctgacccgtaccgcggcccaccgcccgctcgccgacggcaacggcgtggccggcatctgggaatgcaccccggggcgcttccgccgacaggtcgagcaggccgagtacagctacatcgtcagcggtgaaggtcgcttcacccccgacgaaggccaggccgtggagtttcgcgccggcgacgcgctctatttcgccgctgccacccagggcacctgggacatccgccagaccgtgcgcaagacctacctgatcttcgactga

SEQ ID NO: 321233 - DNA, 1401 bp, Pseudomonas aeruginosa
atgaaactcacgctcacccctcccctgacccccagccactggatgcgctcgaccgacctggccgacgccgccagcgcccccctcgtcggcacccactcggcggacgtggcgatagtcggcggcggtttcgtcgggctctggaccgccatcaccctcaagcaactggagccggacgcacgggtcctgctgctggagcaggacgtctgcggcggcggcgcttccggcaggaacggtggtttcgtgatgtcctggtggccgaagatcggcaccttgctgggcttctgcagcgaggcgcaggcgcgcttccttggcgaaagcgcggagcgggcgatccaggaactcggggagttctgcgcgcggcatgacatcgatgcgcacttccagcagaagggctggctgtggaccgccaccacggcgcaccacctcgacgcctggaacgataccctcgccgcctgcgaacggctcggcgtcagtccgttcgaacgcctcgacgccagcgaagtggcacgccggaccggttcgccggtgcatctcgccggggtcttcgagcgcagcaatgccaccgtgcaaccagccttgctggtgcaaggcatgcgccgcgtggcgctggccctcggcgtggaaatccacgagcgttgtggcgtcagccagatcgttcccggccagccggcacagctgctgagcgccggggcccgggtccaggccaaggcggtggttctcgcgaccaacgcctggtcggccgccctgcccaggctctccaggctgatcgtgccggtgaacagttccatcgcggttaccgaggcgataccgcaacggctggagcgaatcggctggaccggcggggaagccatcaccgattcccaactgatggtggactactaccgcaccacccgcgacgggcgcatcgccttcggcaagggcaccggcgccatcagctacggttcgcgcatcgaccgggtattcgacgtcgaccgggagagcctggccctgaccgaggccgacttccgccgcacctatccctcgctaggcgacatcccgctggtcgacggctggtccggccccatcgaccgtacctacgacagcctgccggtcttcggccacctgcacgagaacatccactacggcatcggctggagcggcaacggcgtgggaccgagccgcctgggcgggcggatcctcgccagcctcgccctcggccgcgacgacccgtggagccgttgtccgctggtagaacgccgctgccggagcttcccccccgagccgctgcgctacctgggtggctccctggtgcgcaacgccgtcctgcgcaaggaacgcgcggaactcgccggtaccgcgccctcggccaccgaccgctttctcgcgcgcttcgcccccgccggccttgaagacaaatcctga

SEQ ID NO: 321234 - DNA, 699 bp, Pseudomonas aeruginosa
atgagcgccacgctcagggtcgggggcctggtgcccctgaccaccctcgactaccccggcctgctcgcctgcgtgctgttctgccagggctgcgcctggcgctgccgctactgccacaacccggaactgatcgcgccgcgcggcgcggaggaaatcccctggccacgcctgctcgaattcctccgccgacgccaaggcctgttgcaggcggtggtcttcagcggcggcgaggcgaccctgcaggcggccctcggcgacgccatgcgcacggtccgcgaactgggcttccgcgtcggcctgcacagcgccggcatcaacccccgcgccttcgcccgggtgctggcgcagagcgactgggtgggcttcgacgtcaaggcgccggccgaggacgtcgccgccattaccggcgtggacggcagcggcgcggccaactggcgcagcctggaatgcctgctggacagcggcgtggcctacgaatgccggaccacggtgcactggcgcttgttcgatagcgaacgcctctggcgcctggcgacgcgcctgcgcgagatgggcgtggagcgcttcgccgtacaactggcgcgcccggcccgccagctcgatccgcagcttctcgcgaagcccgcgccgcagggcgctgcgcagctatggcgagaactggaagagctgtttcccgccttcgaactgcgcgacgcctga

SEQ ID NO: 321235 - DNA, 147 bp, Pseudomonas aeruginosa
atgaaccccaaccagttgcccgaaggccagcgccagcgctgcgaagtctggacccgcgtgatgggctaccaccgtcccgtggcagcgttcaatgccggcaagcagtccgagcatcgcgaacgccgccatttccgcgagacgcgatga

SEQ ID NO: 321236 - DNA, 2028 bp, Pseudomonas aeruginosa
atgacccagccccggaaggctacctggccggccaccctgctcaagcgcaacggacgtgaagtccctttcgatcccggcaagatcgaacgcgccatcgccgccgccggccaagccaccggcgagttcgacccgcagcaggcgcaggcgctcgccgaacgcgtggtggaacgcctgccggaacgcgcctgcctggatatcgaacgggtccaggacctggtcgaacgggtgctgatggaggccggccactaccctacggcgcgcgcctacgtggtctaccgcgaacgccacggccggctgcgccgcgagcgcaagaccctggtggacgtcgccgcgtcgatgaacgaatacctgtcccgcgaggattggcgggtgcgcgccaacgccaaccagggctattccctcggcgggctgatcctcaacgtatccggcaaggtcaccgcgaactactggctggatgaggtctacgatgccgacatcgccgccgcccaccgcgacgccgacctgcatatccacgacctcgacatgctcgccggctattgcgccggctggtcgctgcgcaccttgctgaacgaaggcctgaacggcgtgccggggcgggtcgaggccggtccgccgaagcacctgggcagcgccctggggcagatggtcaacttcctcggtaccctgcagaacgagtgggccggggcccaggccttcagctccttcgatacctacctggcgccctacgtgcgcaaggaccgcctcgactacgccagcgtgcgccaggccctccaggagttcatctacaacctcaacgtgccgtcgcgctggggcacccagacgcccttcaccaacctgaccttcgactgggtctgcccggacgacctgcgcgaccaggtgccgcgcatcggcggcgaggagatgcccttcgcctacggcgagctgcaggccgagatggacctgatcaaccgcgcctacatcgaggtgatgcaggccggcgatgcccacggccgggtattcaccttcccgatcccgacctacaacatcacccacgacttcccctgggacagcgacaacgccacgcgcctgttcgagatgaccgcgcgctacggcctgccctacttccagaacttcctcaactcggacatgcagcccaaccaggtgcgctcgatgtgctgccgcctgcaactggacgtgcgcgaactgctcaagcgtggcaacggcctgttcggctcggcggagcagaccggctcgctgggcgtggtgacgatcaactgcgcgcgcctgggctatcgccaccgtggcgacgccgccggcctctaccgccagctcgaccacctgctcgaactcgccttcgccagcctggagctgaagcgcaaggtgatccagcagcacatggatgccggcctctatccctacacccgacgctacctgggtaccctgcgcaaccatttctccaccatcggcgtgaacggcctgcacgagatggtgcgcaacttcagcgacgaccgcgagggactgcacagcgaagccgggcgcgagatggccctggccctgctcgatcacgtgcgcgcgcggctggtggctttccaggaggacagcgggcacctctacaacctggaagccacgcccgccgagggcaccacctatcgcttcgcccgcgaggaccgcaagcgctatccgcgcatcctccaggccggcacgccggaggcgccctactacaccaactcctcgcaactgccggtgggcttcaccgacgacccgttcgaggcgctggagctgcaggacgccctgcaatgcaagtacaccggcggcaccgtgctgcatctctacatggccgagcggatttcctccgccgaagcctgcaagaccctggtgcgcaccgccctcggtcgcttccgcctgccgtacctgaccgtcacccccaccttctcgatctgcccgcggcacggctacctggccggcgagcacgagttctgcccgaagtgcgacgaggagctgctgcaacgctccacgcccaagagctgttgcggcggctgcggcggttga

SEQ ID NO: 321237 - DNA, 810 bp, Pseudomonas aeruginosa
atgaccgcaaccgagcagatcatggcgctcctcgaacgctgggaccgccagcaggagggctacatccgccagcgcgaggagcgctacgaggcgatgttccagttgctcgaagacctcttcggccgcgacgggcgcttcaccgccatcgacgccgcctgcggcccgggctccctcggccggcgcctgctcgaacgcttcccggcggcgcgggtggtggcgctggacgccgacgtcatgctgctggagatcgcgcgtacggcgctggccggtttcgccgaacgggtccgcgtggtggagtgcgacctcaccgatccaggctggaccgaacgggtcgccgaagcgcgcgagtccctcgccggcgaacggcccgcggcgctgctctcttccaccgcgttgcactggctgtcgcccgccgaactcgccgggttctacgcccaggccggcgagctgctcgcccccggcggcgtgctgctgaacgccgaccacatgcgctacgaccgacgctggccgggactcgcggaattgtcccggaagcaccgcgagcgggtcctccaggcttccgtggccagcggcgcggacagttgggaagactggtggcaacgcgccgcgcagatcccccggctggccccgctgaaggcgcagcgcgacgcccatttcgcgcggcgcccgctcaggcgcgccagcgaagacgaagactgctcgctcgatttccatctcgccgccctgcgccaggcgggtttcgccgaggccgccacggtctggcagcagttggacaactacgtcgtcttcgcccgcctcgcccaggcctga

SEQ ID NO: 321238 - DNA, 1962 bp, Pseudomonas aeruginosa
atgaccccccattcctccccgcaccgtcttcctccgctgcggctggcccgcgccgtgccgttcctctacctgcttccctgcctggcgctggccgcgccggtcgacctggagccgaccgtggtcagcgccaccactaccgagcgcaagctgcgcgacgccccggccagcgtttcgctgatcgccgccgaggacctgcggcggcgcccggtgcgcgacctgcaggaagccctgcgcggttcggaaagcctgcagttcaacggcgtcggcatgtcccggcggggcatcagcgttcgcggcatgtccagcgagcacaccctggtgctggtggacggccagcggatctccacctcgtccggggccatcgcccattccgacttcgacctcggctgggtgccggtggagagcatcgagcgcatcgaggtggtacgcgggccgatgtcctcgctctacggttcggaagccctcggcggggtggtgaacgtgatcacccggcgcgccaccgatacctggatgggcagcggtctgctcgatggcggcgtgcgcgaggacggcctcggtgggcagagccaccagctcggcgcctatctcgccgggccgctggtgcccggcaagctgggcctcgccctgaacggcgagagccgccgccagcaggaaaccccggacgccgatgagcgccgactctccgagctggaaggcggcaacgccgacagcggtgggctgaacctcagctggaccccggacgacgcccagcgcatcgacctcggccaccagcgcgggcgcgaacgacgctggcgcaacagcgagaccggagggccgcgctcgcgctactacgagtcgcgcgacgtgatcgaacgcgagcgctggtcgctcgcccacaatggccagtgggactggggcagcagccagctgcgcacctaccgcaaccgcctggagcggcacaacgcgcgttccgacggacaaccgccgagcaacccgcagcgccttaccgacagcgtggtcgacggccacctcagcgtgccggccttcgagcgacatctcttcaccctcggcggcgaatggcgcaaggaagaactggaggatcgctcggtgaataccgccggcgacgccagcgcgcgacacaaggcgctgttcctgcaggacgagatcgccttcggcccggactggtcgctgaccctcggcagccgcttcgacaagcacgaggcgttcggctgggaaagcagtccgcgcctgtacctgctgcaccacctttccgatgcgctgaccctgcgcgccggcgtcggccgcggctacaaggcgccgagcctgaagcagctatcgccggagtatgcggcggtcggtggcggcgggcgcttcaccatctacggcaatcccgacctgaagccggagaccaatacgtcctacgaactgggcgccgactaccagggcgatggctggtcgctgaagggcacggtgttcgagaacgatgtccgcgacctgatccagaccgtctgcgtagcgcgctgcggggtgcgcggcggcgagatacgcaactacgagaacgtcgacagggcacggatccgcggcctcgagctgggcggcggcgtggacctgccggcggacctgcgctgggaactcaactacacctacctcgacgcgcgcaaccgcaccgccggccagcgcctcggcgaccgctcccggcacctcgccaacagccaattgcgctggagccccaatgcccgcttcagcgcccagttgcgcaccgaatacgtcggcagccaggtggcctacagcagcaacgtcggctacgccttgccggcctacagcctgtggcacctggagctgagccagaaactcagcgagaacctgacgctgcgcggcggcatcgagaaccttggcgaccagcgcctggccgacgacgacacgcacttcacctatgccgaacctgggcggaccttccatctcggcctggtggcgagcttctga

SEQ ID NO: 321239 - DNA, 477 bp, Pseudomonas aeruginosa
atgaatggtctggaaaccagcctctacgaactcacccgcctgttcctgctgccggtgctgctgttgatcctcgccgcgctggcctacgccttcgtcgccctcggcggcttcgccatggaagcctggcagcgccgtcgcgggcgctaccgctcgcgcctggcggcctggcaggcgctgcatggcggcaacagcgacgacctcgaactgtggatcatgcagcgcctggaatggctgcgggtcacctcgcgcagcgcgccgatgctcggcctggtggcgaccatgatccccatggggccggcgctgctggcgctgacccgcaacgacgcccaggggatcggcgagaacctggtggtggcgttttccgcggtgatcctggccctggtcgccgccagcatcaccttcttcatcctcaccgtgcgtcgccgctggctgctccaggaactgcgcgccgtcgaacgtgcgcgggaggccggctga

SEQ ID NO: 321240 - DNA, 327 bp, Pseudomonas aeruginosa
atgcgcttcctcgaacacgacgaggcggacgacccgatcctctcgatggtcaacctgatcgacctgttcctggtggtgatcggcatcctcctgatcgtcatcgtgcagaacccgctcaacccattcagccaggacaaggtggtggtggtcgagaaccccggcgaggcggacatgcgcatgctggtcaaggacggcaaggagctgaagcgctaccaggccagcggcgagatcggcgaagggcagggcagccgcgccggagtgacctaccgcttggccgacggacggatgatctacgtgccggagagcggcggggaggccggcaagtag

SEQ ID NO: 321241 - DNA, 2280 bp, Pseudomonas aeruginosa
gtgctcgccgtggaagtaaaggtcaattttctcgataaccttcgactggaagccaggttcgatgatttcacggtgatcgccgaccagccgatccgctacaagggcgacggctccgcgccggggccgttcgactacttcctggcgtcgtcggcgctgtgtgccgcctacttcgtcaagctgtactgccagacgcgcaacatccccaccgacaacatacgcctgtcgcagaacaacatcgtcgacccggagaaccgctaccggcagatcttcaagatccaggtggaactgccggccgacatctcggagaaggaccgccagggcatcctccgctccatcgaccgctgcacggtgaagaaggtggtgcagaccgggcccgagttcgtcatcgaggaggtcgacaacctcgatgccgacgcccaggcgctgctgatgcccggcaccgatgccgcctgctgcacgcgcatcccgggcaaggacctgccgctggagcagaccatcgccaacctgtcggccatcctcgccggcctcggcatgaagatcgagatcgcctcctggcgcaacatcgtgcccaacgtctggtcgctgcacatccgcgatgcgcagtcgccgatgtgcttcaccaacggcaagggcgcgagcaaggaaagcgcgctggcctcggcgctgggcgaattcatcgagcggctgaactgcaacttcttctacaacgaccagtactggggagaagagatcgccaatgcggcgttcgtccattacccggacgaacgctggttcaagcccggccgcgacgatgcgctgccgctgggactgctcgacggccattgcctggcgatctacgaccccgacggcgagctgcgcggctcgcacctgtacgacaccaactcgggcaacgtgcagcgcggtatctgcgccttgcccttcgtgcgccagtccgacggccaggtggtgtatttcccctccaacctgatcgagaacctctacctcagcaacggcatgagcgccggcaataccctggccgaggcgcaggtgcagtgcctgtcggagatcttcgagcgcgcggtcaagcggcaaatcctcgaaggcgaactggcgctgccggacgtgccgccggaggtgctggccaagtacccgggcatcctcgccgggatccgcggcctggaagagcagggcttcccggtactggtcaaggacgcctcgctgggcggcgaattcccggtgatgtgcgtgaccctgatgaatccgcgcaccggcggcgtgttcgcttccttcggcgcccacccgagcttcgaggtggccctggagcgcagcctgaccgaactgctccaggggcgcagcttcgaaggcctgaacgacctgccccagccgaccttcgaaagccatgcgctgaccgagccgaacaacttcgtcgagcatttcatcgattccagcggcgtggtgtcctggcgcttcttcagcgccaaggccgatttcccgttcgtcgagtgggacttcacccggcagggcgaggctgccaacgccgaggaagccgcgaccctgttcggcatcctcgaagccatgggcaagcaggtctacatggcggtgtacgagcacctcggcgctacggcctgccggatcctggtgccgggctactcggaaatctatccggtggaagacctgatctgggacaacaccaacaaggccctggcgttccgcgaggacatcctcaacctgcaccgcctcgacgatgctgcgctcggggcgttgctggagcgcctggaagactgcgaggtggacgactacaccgacatcaccacgctgatcggcgtcgagttcgacgacaacacggtctggggccaactgaccatcctcgagctgaaagtgctcatcggcctcgccctgaagcgcttcgaagacgccaaggaaggcgtggaggcgttcctccagtacaacgacaacagcgtcgagcgcggcctgttctaccaggcgctgaacgtggtgctggaggtcgtcctcgacgacgagctggagatcgccgactacgaggccaatttccgccgcatgttcggcgacgcgcggatggatgccgcgctgggctcggtggacggcagcgtgcgcttcttcggcctgacgccgaccagcatgaagctggaagggctcgaccggcacctgcggctgatcgacagctacaagaagctgcacgcggcgcgagccaggatgcagcccgtggtcgacggcgaggccggtgctgccgcggctggcggtctcaagcctcggcgcatggcgatccgcaagcgcaagtga

SEQ ID NO: 321242 - DNA, 2301 bp, Pseudomonas aeruginosa
atggccctggcccacactctcggcttcccacgcatcggacgcgatcgcgaactgaaaaaagcccaggaagcgttctggaagggcgagctggacgaggccggcctgcgggccgtcggtcggcagctgcgcgctgcccactggcaggtacagaaggatgccggcatccagttgctgccggtcggcgatttcgcctggtatgaccaggtgctgacccattcgctgaccttcggcgtgatccccgagcgcttccgggcgcacggcgaggccgggccgaccctgcataccctgttcggcatggcccgtggcgtcagcgacgacagttgttgcggcggtgcccatgcccaggaaatgaccaagtggttcgacaccaactatcactacctggtccccgagttcagcgccgatcagcagttccagctgagctgggaacaactgttcgaggaggtcgacgaggccagggccctcggccaccaggtgaagccggtgctgatcggtccgctgacctacctgtggctgggcaagggcaagggcgccgagttcgacaggctcgacctgctggaccgcctgctgccgctctacggccagatcttgcgccgcctcgccggccagggcgtggagtgggtgcagatcgacgagccgatcctggtcctcgacctgccgcaggcatggaagaacgccttcgagcgcgcctacaacctgctacagagcgaaccgctgaagaagctggtcgccacctacttcggcggcctggaagacaacctgggcctggccgccaacctcccggtggacggcctgcacatcgacctggtgcgagcgccggaacagtatccgagcatcctcgaccgcctgccggcctacaaggtcgtctcgctgggcctggtcaacggacgcaacgtctggcgctgcgacctggagaaagccctggaagtggtacgccatgcccgggagcgcctgggcgagcggctgtgggtcgcgccgtcctgctcgctgctgcacagcccggtggacctggagcgcgaagacgggctggacgccgagctgaagagctggctggccttcgccgtgcagaagtgccgcgaagtcgcggtgctggcccgtgccgccactgagccggaggccgccgaggtgcttgccgccctggaagagagccgtgcggtccaggccagccgcgcttcttcgccgcgaatccacaagccggccgtgcaggcgcgcctggccgcgatcaaggccagcgacgcccagcgccgctcgccgttcgccgaacgcatcgccaggcagcgcgccggactcgacctgccggcgttcccgaccaccaccatcggctccttcccgcagacctcgtcgatccgcctggcccgccagtcgttcaagcagggcaagctgagcgaggccgagtacatcgaggcgatgcacagcgagatccgccatgcggtgcagatccaggagcaactggggctggacgtgctggtgcacggcgaggccgagcgcaacgacatggtcgagtacttcgccgagcaactggacggctacgtcttcacccgcttcggctgggtgcagagctacggctcgcgctgcgtgaagccggcggtgatctatggcgacctgagccgtccgcgggccatgaccgtggagtggatcaggtacgcccagagccttaccgacaaggtgatgaagggcatgctgaccggcccggtgaccatgctgatgtggtccttcccgcgcgaggacgtgtctcgcgaggtgcaggcgcgccagttggccctggcgatccgcgacgaagtggtcgacctggaggccgccggcatcaggatcgtgcagatcgacgaggcggctttccgcgaaggcctgccgctgcgccgcaacgcctggccgcactatctggagtgggccaccgaggccttccgcctgtgcgcctccggagtccgcgacgaaacccagatccatacgcacatgtgctacagcgagttcaacgatgtgatcgagtccatcgccgccatggacgccgacgtgatcaccatcgagacctcgcgttcggacatggagctgctggaggccttcgagcagttcgactacccgaacgagatcggtccgggcgtctacgacatccactcgccacgcgtgccgagccgggaagagatcgtcgcgttgctgcgcaaggcatcccggcggatacccgccgagcggctctgggtcaacccggactgcggcctgaagacccgcgcctggccggaaaccgaggcagcgctggtgaacatggtcgccgccgcccgcgaactgcgtggcgacctcgcccgcggctga

SEQ ID NO: 321243 - DNA, 624 bp, Pseudomonas aeruginosa
atgaatgacttcaagtctgccctggcgcccttcccgcccggctacccgagggtcttgccgggcaaccggcggcaggtgccgatactgcatcgcgacgcggacttcctcctgcgcgcgctgcaacccgacgatttcgtccggaccagccgctacgagaacgccaaccgcgagcacctggcgccatgggagccgctgcgcgacccggggtatttttccgtggacaacgcccgcgcccgcaccctgctacaagtggcgagcatggacgaaggcgaggcgcttctcctgctgttgctcgatcccgacgacggcgaggtgctggggcgctgcagctacaccaacatcgtccgcggggtattccaggcctgccacctgggcttttccctggccgctgcggcgcagggccgcggcctgatggcacgtgccctgcgggtagccaaccggtattgcttcgagcagctcggcctgcaccggatcatggccagccacctgccgcgcaacgcacgcagcgagcgcctgctggaaagcctcggcttcgagagggagggctacgcccgcgcctacctgaagatcgccggggtctgggaagaccatgtgctacgggcgctggtggacgctccgcgctga

SEQ ID NO: 321244 - DNA, 297 bp, Pseudomonas aeruginosa
atggcaatcgatctctacgcgctggccgaacaggtcgaggacgaagcgggtttcctgcccttcctcgccgcgctggcggcggactgggaggaagaccgccgcctcgccgccgccaacccgccgaaaccgttcggccccagcccgctgggttgggagaacggcagcatcggtggcttcctcgatgccgccgcgacctggggcgaggactcccgcgacggcctgccgggctattccaggccggagaatgcctggcggcgcgcggcgcagctgatgctggcgggcaagttctatgaatga

SEQ ID NO: 321245 - DNA, 1296 bp, Pseudomonas aeruginosa
atgctcttcggcagaaaaagcagggcggtggaaagcgccgccaaggatgaagacctggcgtggcgactcgatgccatcgggcagaacgtcgccaccatccgtttcactcccgatggccagatactgtccgccaacccgctgttcctcgcggtggtcggctactcggcggacgagctggtcggcaagcaccatcggatcttctgcgaagaggacttccaggcctccgccgcctacgtgcgcttctggaaggagctggccagcggcacgccccagcgcggcgtgttcaagcgcctgcggcgcgatggtacgccggtctggctggaggccacctatttcccggtgaagaatgccgaaggggcggtcgtcgaggtgctgaagatcgccgccgacgtgacccgcaaccattccgaactgctcctgctcaacgcgatcaacgacgccatacgccagtccatggcggtcatcgagttcaccccggacggcgagatactcgatgccaacgagaacttcctgcgtctcttcggctacagcctcaagtcgctcaagggccagcaccaccgcatgctctgcttcgacgagttctatcgggagaacccggatttctgggctcggctgcggcacggcgaattctcccgcgggcatttcgagcgccgcagcgccgccggcgagcgggtacatatcgaagccacctacaacccggtcaaggacagttcggggcggataatcaaggtcatcaagttcgccatcgacgttaccgagcaggtcaatcgcaacgaggaggtacggcgcgccgccgagctgtcgttctccaccgcggaagagaccgcgcagatttccacccgcggcatcgactccctcgaccagtccgtcgccctgtcggccaagaccctgtcgatggtcaacaccgctgtcggcctgatttcccagctcacccaccagaccaaggacatcgagaacatcgtcaccaccatccagagcgtcgccgaacagaccaacctgctggccctcaacgccgccatcgaggcggctcgcgccggcgacatggggcgcggcttcgcggtggtcgccgacgaggtgcggcaactggcggcgcgcaccagcggcgccacggtggagatcaagaacgtggtcaccgagaacgtcaagctgacccagcagatcaaccacaacatgcagaccatcgagtccagcgcccaggagaacaacaaccagatcaccaccgtggccggcatcatgcaggagatcagcaagggcgccgagcacgtggcgcgggtggtgtcgagcctgttcaagtga

SEQ ID NO: 321246 - DNA, 513 bp, Pseudomonas aeruginosa
atgaccaatccggagccggcggacctgccgatcagcctgctgatcaatggccagcgccgagagttgagagtacccccgtggctgacgctgctcgacctgctgcgcgagcggctcgacctggtgggcagcaagaagggctgcgaccacggccaatgcggcgcttgcacggtgttgcgcaacggtcgccggatcaacgcctgcctgacgctggcggtgatgtgcgacggcgatgcactgactaccatcgaaggtctggccgagggtgatcgcctgcatcccctgcaacaggcgttcatccgccatgatgccttccagtgcggctactgcacgcccggacagatctgttcggcccttggcctggcgagcgaggggcgggcgcgctcgcgggcggagatccgcgagggcatgagcggcaacctgtgccgctgcggcgcctacggcaatatcctcgacgccgtggaagacgccttgccgctgctcgatcgcgacggacagggagggcagcgcgcatga

SEQ ID NO: 321247 - DNA, 2208 bp, Pseudomonas aeruginosa
atgagcagcctgccacacagcaccgggcaagccctggatcgcgtcgacgggccagccaaggtcaccggccaggctcgctacgccgccgaatatcctgccgccgacctgctccacggcagcgtggtcagcagcgacgtcgcccgcggccgggtgcgcggcatcgactgtgcggcggccctggcggtacccggggtggtcgcggtactgcatcacctgaaccggccgccgatggcgggcgacgacgagccctacaaggacgccgatgccgccgaaggcgaacccttccgcccgctgttcgacgaccgcgtcctgtacagcggccagccccttgccctggtcctggcacggagcctggaactggcccgctacgcgggctcgctgctgcgcatcgatatcgagcccgagccgcaccagaccgacctgctggccgccctcgaccaggcccatgaggctcccgccgaactgcccgccgagcgcggcgacttctacaccgcctaccgcgccgcgccgattcgggtcgaggccagctacagcacgccgatcgagcaccacaatcccatggaaccgcacgcgtccacggtcatcgtccagcccgacggcagcctgctggtgcacgacaagacccaggggacgcagaacagccaggcctacctgcaaaaggtcttcggcctgcccgccgacaaggtaagggtctgtgccgcctacgtcggcggagccttcggctccggcctgcgtccgcaataccagttggccctggcggtgatggcggcgctgcaactgcggcggtcggtgcgcgtagtgctgacccgccagcagatgttcaccttcggctaccggccgcgcaccctgcagcgcctgcaactgggcgccgatgccgaggggcgcctgcttgcgctgggccaccaggcgacagcgcagacctcgcgcttcgaagacttcaccgagcacgtggtggagtggagcggcatgctctatcgctgcgagaacctttccctggcctaccgtctggtgccgctggacgtctataccccgctggacatgcgcgcccccggcgcggcgctggggctgatcgggctggaatgcgcgatggacgaactggcggtgcggctcggcatggaccccatcgcgctgcgccggttcaacttcgccgagcgcaacggcaacgaggacaagccgtactccagcaaggcgctgctggcctgctacgaggagggcgcccggcgcttcggttggcaggcccgcgacccacggccacggagcatgagcgaagggcgccagttgctcggctggggcatggccggcggcgtctgggaggccatgcagagcaaggccagcgcgagggcgcggctggaggcggacggcctgctgcgggtggccagcgcgaccacggatatcggcaccggcacctacacggtgatgacccagatcgccgccgacgccgctggcatggcgccggaagaggtgcgcttccagcttggcgacagtgcgttgcccaaggctccattgcagggcggctcgttcaccgtctcgtcggtcggttccgccgtccgcctggcctgcctgcgcctgcgccaggccctggtcgcccatgccagggcccgccatccggagctggccggcaccgccgaagaacgcttccgcatatgccgtggccatctggaagcgggcgatacgcgatacgccctggccgacctgctgcaagggctgccggaagacgcgttgcaggtggaggtggaagctgaaccctcggcgcggcgcaaaggctacgccaccgcgacccattcggcggtattcgtcgaggtgcggatcgacgaagccctcggtaccctgcgtgtgagccgggtggtcagcgcggtcgcggcggggcgggtgatcaacccgaagaccgctcgcagccagatactcggcggggtggtctggggcctgggcatggccttgcaggaggaaacccaggtcgaccatgcgctgggccgctgcatgaaccacaacctcgccgagtaccacatcccggttaacgccgatattggcgatatcgaggtgatcttcgttgacgaacccgacgatatcgttaacgaactgggctccaagggcgtcggcgaaataggcatcgtcggcgtcgccgccgcagtggcgaatgccgtgtaccacgccaccggccgccgcctgcgcgacttcccgctgaccgtcgacaagttgttgctcggctga

SEQ ID NO: 321248 - DNA, 381 bp, Pseudomonas aeruginosa
atgaagaacgcaatggccctgaccctggccggcctgctggccgctccttccctcggcttcgccgccgcgccggacgcagtgatggtcttcgcccgccagggcgacaagggcagcgtatccgtcggcgacaagcacttccgcacccaggccttcaaggtccgcctggtgaatgcggcgaagagcgagatcagcctgaagaacagctgcctggtggcgcagtccgccgccggccagtccttcaggctggataccgtggacgaggaactcaccgccgagaccctcaagccgggggccaccgtcgaaggcgaggcgatcttcgcctccgaggacgacgcggtgtacggcgcatcgctggtcaggctgagcgaccggtgcaagtag

SEQ ID NO: 321249 - DNA, 3960 bp, Pseudomonas aeruginosa
atgagtgcatgcgcaaatttgatggtgcacgagatcatcgaacgaacactttggtacgaagcccaaaacggccgagccgaactgcctcagggcgatctgctcaaacggaccgaaccgctagtcattctcggcgaagccggcatgggaaagtcgcatctgcttgaatggcttgcaaccgctccaggctatacacgctgcaccgctcgccaactgattaatcgtcatgacccgagaacactcctgggcgatgcccagactctggtgattgatgcacttgatgaggtgagcacccaaaaagagggcgatgcggtggaccttgtgctgcgccagctcggtaaactcggctgtcctcatttcattctatcgtgccgtgtcgcggattggcgtagcgccactgggctagaggctattcgcgagcagtatccagaggaacctcttgagctgcatcttgagccctttaatgatgatgacgcggcaaccttcctaagcacctcgcttggggctgagaccgccaaggcggtggtcgagcatttcaacgcacgcgggcttaacggactacttggcaatccgcagactctcgagctcatcgcccgggttgccggatcgggaaacctacctgagacacgtagcgagctcttcaagcgagcaattgaggttttgcgggtcgagcatcgtgatgccaaggccaacggtcagctcgcgcgggagacagggcttgacgccgcaggcgctgcgtttgctggcttgatccttactggcagcgaagccatcgtccggacgtccgcagcgaacgccgctgaaggcgagttgcagcttgccgatatttcccgcctccctgggggcgattccataggggccatgcttggcacacggctgtttaaagccgatggtgctgatcgcttcggctatctgcatcgtcgtgtcggcgaatatctgggggctcgatggcttgcgaagcaggctgatacccagcctaaacgcaggcgcctcctctcaatgtttcacagccatggactcgtgccggcaagtctacgtggcattcatgcgtggcttgctcgtgattcggctcttgcccaagcggtgatcgccgctgacccaatgggcatgatcgaatatggtgatgctgacgatctaacggtcgaacaagctcgctcgcttattgcggcgctggagctactggcagcgaacagtcctcgctttcgcgattgggggccttattcagtacgtggaatcacacagcccgagctcatcgaagacatacgccgactgatcactacacctaaaacaccgttccgcctacacctccttgtgctcgaagcgatcaagggacagaagattgctacagagttagcaggtgatttaaggaggatcgttctcgacccacaagcgattttcgcgagtcggagggcagcaggtgaggcgcttgccgaacaaaatggcgaggttgattggtcgaccatcctccgtacactgcacagttatgacgatcagctctcgactcgactggccatcgagttggctgaggacattggctacgaaggggtcggcgacgatctgatcgtcgacctcgtggttgctcatgcactaaatgacggccgtacgattggcgtgttgaggggcctggaaaggcatcttcctgcctctaggatcgaaggtgtacttgatcgcttagccgtagtggtaaagacgcttggcaaaccgtacgaacgccccgggaatgacgtcctaacggattttgcatttcacctgatcgtacgtggcgtggcagccggtggcgttactgctgaaaagctttggtcttggatagaaccatttgataccagcgccgggtatcagcgcgaatctcgtcagcagctagatgccctcatccgtaacgacgatagctttcgccaggccatacagcgccacgtactgctcgaactgcccagtgatcacagtccctggcaactagcatggcggttgagccagcggtcatctggtttttctccgacagccgccgacgtcgtcgcgttacttgaaacgcttgatcctctcgatcacagcgatgaacgctggcgcgatttggttcaactcactccacatgacgaagaaataggggtagaggttcgtgcggccgccaagaccttcgcagcacacagccctgacctattggagtggatcgacaagcttgccacaccggttttacccgaatggaagatcaagcaggctgaaagcgaacgcattcgccgagcaaagcaagctgcagcgcacgcagagcaccgaaagtactatgcgacttgtatcgataaaatgcgcttgggcgaatacagcacaatcatcaaccccgctaaagcctatctcaacctctttgatgatatcgaagagggcctgcctgcccataagcgcgtctctcaatggcttggagacgatatcggcgacatcgcgcatgtggggtttgaagcttttctggtgctcgacccacctacgcccactgcgcaggacattgcagaaagccttgcacaaggcaagtactacgaagctggctacgttatcgttgccgcactcgcggagcgtctccggaagggtgtagggttcgacgatattactggtgagcgcctgatggcgggattctttgaactgcgccgtaccagcatcgacggacatgctggaattgtcggcctcagagaggcgatcgagaccgctatccagggtcgcggcagctggggggaggcgatgcggctctaccatgaacctcaacttcaggctcggcgtgaatcagtagacggcctctatgcacttgtacgagacgaagctcatgctgagctggctgccgatcttgctgccgaatggttagagcgctttccagatattccggttgggccggaaacagaattgatcgatcggcttgtccgctcaggacgattcgaggcgttacgccgcgccgccgctggtcacgtagggctgaccgacgatgagcgacggcgcaattgggatgcgattggccttatcgtcgattttgagcagactgtggcgcggcttgaggcttccctgatcgaacccgagctgctctggcatttgcggcatcgcacaggtggacgtttcgacgacggcgccaatattgcccttagtcccgcgcagcttgaatggatcatcacgaccttccgcccccgctggccaatggtggatcgcccaagtggcactaccgggggcgataccaacccttgggatgcaagtaaccatatcgtccatctcatccgtcgtctgggcaacgacttcagcgaagacgcgattgctgcgttgatgcgattgaggaccgcgccggccgacgattattccgaatcggtcaaaattgttatcgccgagcaagcgcgcatccgtgtcgaagcggcttatgctcctcctactctcgaaacaatcgatgcaattacacgtaatctccttcccgtgtccgccgccgatctgcaggcgttggtgctcgaagaactcgcgatcgcccaagcaaagatcaagagcgacgatgccgaatcctggcgcggcttctatgacgacaatggtgtgcccttcgcggaggagcgttgccgtgatcatctgctagggctgcttcgtcaggggtcgaaagggatcacgtttgatcctgagacgcatgtcgctgcagacaaggaagtcgatatcacctgctcagcgggtacacttcggatgccgatcgaagtgaaggggcagtggcactcggaactctggcggggtgcagatatgcagctagatgcactctacacgcgagattggcgggcagaggatcgcggcatctatctcgtcctctggtttggcgatcagcaacaaccgaacaagcgccttaaaaaaccaaggcggggtacgaaactacctcaaacagcggatgaattgcgggagatgctcattcccggaagcaaatcagtacgagaaggacgtgtcgtcattttcgtgcttgatctggtgcgctcttag

SEQ ID NO: 321250 - DNA, 2637 bp, Pseudomonas aeruginosa
ttggcgatacacatccacccaaggtgggatacgtctgaacacatgaacgaagacgagtacgaagaagcgatccaaacaggccttcgcaacaatgaagttcttaagcttgtgcacaactactgctcccacgctcgtgtcgtcaaccgcggcggggtaggtttgattgcgcaggcaaccgggcttccgctcggaatgcttggcgtgcactgtgaccacgcgccagcatctggaatggcaggttggtatctcgaacccaatgctgttgatttctatgaccggaattgcgctcattgcgataagcgcatggctgttcgaatgcccaatttgctggcgctagttgatgagcgagatagggctctagaaaggcaaagggaggcccaaaggaaagcccaagcccaagctgaagcagcccatcaaggaaggatcgtgcagagggaagctctccgagtagggcagaccgctgcctgctgctctcttctcgacgacctcgacacacttgatgcctgctcatcggatgaggtgaagacccgcatcgtcgagacagctaagctcgctccggaagtcttcaccgctccgattgttgagtacttcttcgagcttgccaccaccgacaaaatgaatcttaaggagcaagcactttcggttctacgtctagtcagtgcagacaagcctcgcctttccgaagcggcgttcgactgccttgcaaagcacgatgctatcgaggttgccgcggatatcgtccttgcatacccagggatggtggcaccagccaaggtggagagcgctgtaccggcgctgatagctcttgcccggcgtcctcgagcacagcttgatatagatgagccgatctctcagccagaaccgctcaaagcaatctacaaattttggccggaggtagtccgcaacgctatccagcgcctcctcgactcgaagcagtcatacccagttcgtctgggtgtagccgctctgcacgtcctgtgcagagatgatgcaggactacttccaagctttgctaggacaacgatttcaaaactcgcccgtgctcacttgttatttgagaaggatccatctgatcgagagcttggaatggtgtgcggcgacctaaggcgtatcgtcgtagcagccctccttgctgcgcctgaaaataccgacgcattaatctctgagtttttcgatagcgcatcctctgaaggcgaggagcgcttaacccagatatatgaagagctttcgcggcactcaatacgactcggcggggatcgtagaagcgaaatggcacccgctgacgttgctgcgtatgtggtggtcctgaggcgtcttctcaacctcgcaagtacgtctaaaaatcagaaggttctccgcctcgttgttcaggcgttcagaaacgagccagacgaaatcgtcgcagctggaaagcagaatattgatgctttactcggcacagcagctgttttagatgctcgcattgaagcctttgaagcggaacgaaacgccacgccagcagccaacttcaacgagtaccttgaggcccagaattcagcaaccaccctctaccaactgcgcgactcatgtgcgctgatagctgctaaagccgcgaaaggaagtgaaaggctagttctgtctcatattgagtttctcaatagcattgatgaacagcgcgatgggctgagctccacaattatcaaagccactccattcctaattgatagcccccccacactaaatgttgttctacctgctctctattcatcactggtcggatcctcagttcgtaaacgtgcggcggcaggtgaagcactaggagacctaggtagagctcgcatctccgatctccctgagcttgtactagaagcatttgtactactgttgctggatcagtatgtgatggtgcacaaggcggccgtaagcgctctttccagcatcgatctgccagaacatctagagcgacgtgctggtgcggctctgttgcagctcatcccctactacagtggtaaaagggatgagcaccactttctgatacggtgcattcgcttgcacgtagctcggttcgcatcctctgaacagcttcagtccggtcttggcaatatcttcatcaaattcttgatgacagcacctgccaatcttcacacacgtgatctctcacgaatggggaaagggctcgctgctgcctcaaactttgctgacttagtgattcacacattcgatgatccagaactgagtgagcacggtgaagaggatgccagcagcctcgtgcatctaattccagaagcggtagcccgccaacgggccgacgacttagtcaaattggttaagcgacaatctggacgctttatgctggtgggggcagtggtggagctgctgtctcgcgtcggtgcttggccccaagctgttgaggcgatgcaagcctcttgggaggctgttccagatacggcgccggaaagacgcctcaagtggtatcggagacttcatgtgattgccgtgcagtttgaggctgcagtcgctgcgaaagatatcccccgccaggaggctctgcaaatggaatgggttcaactggaagcaaccctcaaggaggatgaaaaacaatatgcaagcagacgtagttctctcccaagctttctacagtcggattcgggcagttga

SEQ ID NO: 321251 - DNA, 1449 bp, Pseudomonas aeruginosa
atgcaagcagacgtagttctctcccaagctttctacagtcggattcgggcagttgaagcactgaggacgttgggggctggaaactctgtcgagccagaggttctcagagctatcagtgcagagctggacgaagcttcacttcggtatggacgggccacaaccgcaactacctacagcgccttggccgacctactaaggcttgtcgccagtcttgctgaatggagggcaggtgtgctcgctgccggtgacggagtggagcgttttttacgaagcgccttcgagcgatatcgcatgtggcagaaagaatatggcgagcagactgccgcgcaatcgctcgtcaaagctgctgagtctctcccacgcgtagggtcactttccgatttcgaagacctttgtatggcaatcgctgcggtacctttgcctgtgggcgttttctccgaaggggctcggagcatgccccaattcgttgacgagcaaacatctcctccgctccccgccgagcttacggtggctttcctaaaattccaaattgatgggcaggccgctggaagcattcaccacctgacaccattagtgcttcatgaccttgaaatcgaagtacgtgtatcacgctggcccgaatctgcaacaacgctgaggctgtcccctatttcaacggagctgcgtaccagctacgacctctcagagttcgtcttcgacaagcctgcgggcgaaccaccgtacacacttctccagcgggggcgcgctgccctgcagcttgcgcaaggtatgagtgcacgtccctacgagttcaagtattcagctgcattcgagccagtcagttcagaacagccagtagctatcgtagggcatcgaacgcttctcatcgaaggccttgatgtcaggtcaaatcccatcactggctatccaatggttgacgagaaaattctgagcattcgggactttctgcgtcgaaatggcctcgtaaacagcaccgagctcagtgatgtgcttgaggtagttaaggttttaggaggggtggcggggcgcgctatccaagacgctgaattcgatggtgtctggtcagaggcgcagttccagggcgcgattcgcaaggagcttcggcgcaaccctcaaattggctctgatcttgacgaacatcccaaggcttcaggcggcattacagacctcagctatcgcggtatcgttatcgagctcaagtctttaccagctggagtcaaggcggtagaggactgccaagcctatgtcgagcaaactgcaagttatgcagtagccaaggaaaagcgtgttgctgtgctctgcgtgctggactgcagaacaaaaactgcagcgccttggccggccggagaaggcatcgcgattctaaagtcccagccacccgccaacgtgtcggtgatcactattgttgtgcagggaaatatcactcggccaagcaaattgtcgaaatag

SEQ ID NO: 321252 - DNA, 1140 bp, Pseudomonas aeruginosa
atgcgcgcactcctcacccacgcctggctgttcctcggcaaatggctcggccgcctgctcctcctcctgctggccgtcggcctcggcggctgggccatcggcagcctctactacgcctggaaattctccggcccggtgtccgcggaagagcagatcgccccggacgaagcccgcatcacccaggcgatcatccaggacgccatccgcgtggtcgaacagcaccgcgacaacacccgcgtcctgcgcgatgcccacgccaaggcccacggctgcgtgaaggccgaattcaaggtacgcgccgacctcgacccaaccctgcgtcgcggcgtgttcgccgaagcgggcaagagctggaacgcctgggtgcgcttctccaacggcaacgcctacccgcagttcgacagcaagaacgacgcgcgcggcatggccatcaagctgctcgacgtgcccggcgaaaaactcctgcccggccgcagccatgacggcgagcaggacttcgtcatgttcaaccagccggtgttcttcatccgcgacatcgccgaataccggcagaacttcgccgcccaggccgacggcaagaaagccctggccttcttccccaactggaaccccgccagctgggaactgcgccacctgctgatcgccctgcgcaccctcgcccccgccccggacaccccgctgcacgccggctacaacggcatctcgccgtacaagctgggcgaacacaacatcaagttccgcgtcgtccccgccccggagaagtgcccggcctaccagctaccgaagcagaaccaggacctgcccaacttcctccgcgccgccctgtaccagcaactctccatcgaccgcacccccgcctgctacgccttccaggtgcagcgccaggacccggccaagtacatgcccatcgaagacaccagcgtcgaatggaaggagtcggacgcgcccttcgctaccatagccgacatcattgtgccagctcaggattttgatagccgggaacagaacctgttctgtgacaacctctcgttcaacccctggcacgcgctgccggagcatcggccgatcggcggaatcaaccggttgcggaaggcggtttacgaggcggtcagtgggtataggttggggaggaatgggtga

SEQ ID NO: 321253 - DNA, 1896 bp, Pseudomonas aeruginosa
atgcgcaccgtgaaaaaggctctgctggttgtcggcgtgatcgtgctggcggtcgtcggggtggtggtctactacgtcgccaatcccaacctgccccactaccaggcgccgagcgaggtacgctacctgccgcaatggaaggacgaggcccgccagcgcttctactacacgccccagggcaccctggtgaaaggcctgcactacgactggttcaccgccctcgaactgcccttctccgaagaacccttcgccgcccccgaatacctcgcccgcttcggcttcctcgtcgatccgcagcagaaggccagcgacctcaaccccggcaacctgccggtgggcttcagccagcaccgcgacgagaagaccggcacccgctacctggacatcacctgcgctgcctgccacaccggcgaactgcactaccagggcaagtcgctacgcatcgacggcggtgccgccatgcattccatcgccgccaccgtgccgaccctgcgcggcggcgccttcggccaggcgctcggcgcgagcatggccgccacctactacaacccgttcaagttcaaccgcttcgccaggaaagtcctcggcgaacgctacgaacaggacaagtcgcaactgcgcgccgacttcaaggccgtgctcgacaccctcctgcgcaccgcctggaacgacacccgccgccacctctaccccaccgaggaaggccccggccgcaccgacgccttcgggcgcatcgccaacagcgtcttcggcgatgccatcgacccgggcaactaccgcgtcgccaacgccccggtgagctatccgcaggtctgggacatctggaaattcgactgggtgcaatggaacggctcggccatgcagccgatggcgcgcaatatcggcgaggccctcggcgtcggcgcgcgcctgcagatcttcgacgagcacggccagccgctgcagggcgagcagcgctacgcctccagcgtacgcctgcacgacctgcacgccctggaagaaaccctgcaacaactgaaaccgccgacctggccggaagacctcttcggccgcatcgacctgcaacgcgcctcccagggccgcgccctgttcgaagccaactgcgccttctgccatgcacccaaggtgcaaccggcggaatacgccgcccccggacgcaatcccgagtggcgcatgcacatggtgccgaccgaggtgatcggcaccgatccgaccaccgccgacaacatcgccgaccaccgctacgacctgcgcaagctcggctggagcgtcaacgaactggcgcggatgaacgtccagctgatcggcgccgatccgcagcaactcgacctctcgcaactgtcctcggccaagggcctggcctacatcaccgccttcgtcgagcagcgcgcctaccgggacgccggcatcccgccggaacagcagaagaccatgaacggcttcgacctgccgatcggcgtacaggaactgcgcgcctacaaggcccgcccgctggacggcgtctgggcgaccccgccgttcctgcacaacggctcggtgcccaacctgttccagctgctctccccggccgccgaacgctcgccgcagttctacgtcggcaccttcgaattcgatccgaaattcgttggattccgcaccgagaaattccccggcggcttcctcctcgacacccgtctcaccggcaaccgcaacagcggccacgaattccgcgacggctgccggcagaacggcgtgatcggccgcgccctcagcccggaagaacgctgggcgctggtggaatacctgaaggtgctcggcaaccccgaattcgagcgccgcctggtcccggcccagaccccaccctggacgcccggcccgaaatgcccggcgccggagcaacggaccgcgcaacgctga

SEQ ID NO: 321254 - DNA, 135 bp, Pseudomonas aeruginosa
atgagctactccgccaaatccttctcggccctgatcaatgccatgcgcgccgacggcatcacccgcctggaacaactggcccgccagcccttccgcaacgcccagggcttctggagcgcggaggcgaagaaatga

SEQ ID NO: 321255 - DNA, 1098 bp, Pseudomonas aeruginosa
atgaacctgaccctccgcccggccggtgtggacgacctgtccgccctggtcgagctggaaaaccgctgcttcgactacgatcgcctgtcccgccgcaacttccagtggatgctcacccgcgcccacgccagcctgacggtagccgagggcgacggcggcgtgctcggctacgccctggtgctgttccacgaaggcacctcgctggcccgcctctactccatcgccatcgacccgcgcgcccgcggcatcggcctcggccagaagctgctggaagccgccgagcaggccgcgcgggacaacgaccgcgcctacatgcgcctggaagtgcgcccggacaaccgtggcgccatcgccctctacgagcgcaacggctaccgtcccttcgccaccgtgcgcgactactacgaggaccacagcgaagcgctgcgcttcgagaaacgcatccgcaaccccggccacgaccagcgccgccacgtgcccttctaccggcagaccaccgatttcacctgcggcccggcctgcctgctgatggccatgggcgcgctgcaaccggagcgccagttgacccgccgcgaggaactgcgcctgtggcgcgaggcgaccaccatctacatgaccgccgggcacggcggctgtagcccccagggcctggcgctggccgcctggcggcgcggcttccgggtcaagctggtgctgtccgccggcggcccgctgttcctcgacggcgtacgcaacgaagacaagaaggcggtgatgcgcctggtccacgaggacttctgcgaggaactggacgcctcgggcgtcgagcagaaacgctcggccaggctcgacatcccgcgccagctggccaggggcggtcagccgctggtgctgatcagcagctaccgcctgacccgctccaaggccccgcactgggtgctggtcacccactacgacgaggacttcgtctacctccacgatcccgacgtcgaccacagccagcaccgccagccgctggattgccaacacatcccggtaagccacgccgagttcgacaagatgagccgcttcggccgcagcaagctgcgcgcggcggtgatcctgttcaacccggaatga

SEQ ID NO: 321256 - DNA, 1488 bp, Pseudomonas aeruginosa
gtgagcaagctgttcatcatcgtggaacgcaaggaagactggacgtcctattaccccagcgaggatgtggtcaccgcccaggaatacctggaactgcccatcgacgacgacactggcaagcgggtccaggtgatcaacctgtgccggcactacaagtacctgcgccatggctactactgctcgctgctcgccgaggcgcgcgggcacaaggtgatcccctcggtgcggaccatcagcgagctggccaggaagtcgctgtacagcctggtcctggaagatctggatcgcaccctggacaaggccctggccgcgcacccctacggcagcaccgatggtttcaccctgaccctgtatttcggccgtaccgacatcgagccgctgcaggaccttgcgcgacaactgttcgaggcgtttccctgcccgttgctgctggtggagttcaagcgcaaccgcacctggcacatcgagggcatcaagcccggcgccatccacaagctgcgcgaggaccaggaagacctcttcgccaacgccctggacagcttcagccggcagatctggcgcaagccgcgttcgcgcaagccgttccgctacgacctggcgatcctccacgaccccggcgaggcgttcccgccctccgacgccaaggcgctgaagaacttcgtgcgggtcggccgcagcctcggcatcgacgtcgacctgatcgagcgcaaggactattcgcggatcgccgagtacgacgcgctgttcatccgcgagaccaccaatgtcgccgatcacacctaccgtttcgccaagaaggccgagagcgaagggttggtggtgatggacgacccggtgtcgatcctgcgctgcaccaacaaggtgtacctggccgacctgctgcgcagccacaagctgggcatgccggccaccgagattctctacaaggagaacccgcaggaactggagaaggtcggcgagcgcctgggcttcccgctggtgctgaagattcccgacggcagcttctcgcgcggggtgatcaaggtggaggaccaggagcagttgctggcggccagcgccgagctgttcgagcgctcggtgctgatccttgcccaggagttcttctataccgagtacgactggcgtatcggcgtgctcaaccgcaagccgatcttcgcctgccagtactttatgtccaagggccactggcagatctacgaccacagcccggacgccgaggaggtcagcggcgatttccgcaccatgcccgtgcacgaggcgccgcgcaaggtggtggagctggcggtgaagaccgccaacctgatcggcgacggcctctacggggtggacctgaagcaggccggcgacaaggtggtggtgatcgaggtgaacgacaacccgaacatcgactgcggggtggaggatgtctacctcggcgacgacctctacaagctggtcctggaggagttcgtccggcgcctggaagtcaagcgtcgcggctacgactga

SEQ ID NO: 321257 - DNA, 1329 bp, Pseudomonas aeruginosa
atgttagatgcatcgaacctccgccgtctgctggtggtggacccgtgcgacgattgccggcgcctgttgccgggccttcgcgaggcgggttgggcagtggacagctgcgcgctggaaacggcgcgcgaacgcgcttgcgacgtcggcctgctgcgcctgcggccgttccacctggagcggccggaaacggtgaaggacctgatcagccgcagcggcaccgagtggatcgccgtgctcagcccggacaccttgccgctgaatggtgtcggcgatttcgtctgcgaatggttcttcgacttccataccttgccgttcgacatggcgcgggtgcaggtgaccctcggccgcgcctttggcatggcccgcctgcgcgggcgcggcacggtgcccggcgatgccgagggcgagcacgaactgctcggcgagagcctggccgtacgcgacctgcgccggctgctggcgaagctggcgccgaccgactcgccggtactgatccgtggcgagagcggcaccggcaaggaactggtcgcgcgtaccctgcaccggcagtcgcggcgcgcggacaagccgttcgtcgcgatcaactgcggggcgattcccgagcacctgatccagtccgagctgttcggccacgagaagggcgccttcaccggcgcgcaccagcgcaaggtcggacggatcgaggcggccgacggcggcaccctgttcctcgacgagatcggcgacctgccgctggagttgcaggccaacctgttgcgctttctccaggaacagcagatcgagcgggtcggcggtaaccggccggtcgaggtggacgtgcgggtgctggcggcgacccatgtcgacctggaggcggcgatcgacgccgggaccttccgcgaggacctctactaccggctcaacgtcctgcaggtcggcaccgcgccgttgcgcgaacggagcgaggacctgccgctgctggccaatcatttctcccggctctacagcctggagaccggccgccgcccgcgccgcttcagcgaggacgcgctggcggcgatggcgatgcacgcctggccgggcaacgtccgcgaactggccaaccgggtgcgtcgcgggttggtcctggcggaggggcggcagatcgaggcccaggacctcggcctggaatgcgcgcgcggcgacggcccgccgttgtccagcctggaggtctacaagctctgcgccgagcgccaggcgatgtgcgacgcgctggcccgctacggcgacaacctcagcgtggccgcgcggatgctcggggtgtcgcggccgaccttctaccgcctgttgcacaagcaccggttgcgctga

SEQ ID NO: 321258 - DNA, 960 bp, Pseudomonas aeruginosa
atgaagcgggtcgcttcccggcgcctgttggctgccgtcgtgctgactgcctgttcctcgttcctgcccctgtccgccgtccacgcggaaactcccgagaagcccagaatcgcgctggtgatgaagtcgctggcgaacgagttcttcctgaccatggaggacggcgccaaggcctaccagaaggagcatgccgaccggttcgaactggtttccaacggcatcaaggacgagaccgatacctccagccagatccgcatcgtcgagcagatgatcgtgtccggggtcgacgcactagtgatcgcgccggccgattccaaggcgctggtgccggtggtgaagaaagcgctggacgccggcatcgtggtggtcaacatcgacaaccgcttcgacccgcaggtgctgcaggcgaagaagatcggcgtgcccttcgtcgggcccgacaaccgcaagggtgcgcggctggtcggcgagtacctggcgaagcgactgaaggccggcgacgaggtcggcatcatcgaaggggtctccacgaccaccaatgcccagcagcgcaccgccggcttcagggatgcgatggacgcggcggggatgaagatcgtctccttgcagtcgggcaactgggaaatcgagaagggcaacgcggtggcttcggcgatgctcaacgagcatccggacctcaaggcgctgctcgctggcaacgacagcatggccctcggcgcggtatcggcggtgcgcgcggcgggccgcgccgggcaggtgaaggtggtcggctacgacaatatccaggcgatcaagccgatgctcaaggatggccgggtgctggccactgccgaccagttcgccgcgaagcaggcggtgttcggtatccagaccgcgctcaagctgctcgccgggcaaaccccggaacatgagaaggacggcgtggtcgagacgcctgtcgagttggtgaccgcgccctga

SEQ ID NO: 321259 - DNA, 1533 bp, Pseudomonas aeruginosa
atgtctagcgacgcattgccgctgctgagcatccgcggggtcggcaagacctacgcgcagccggtgctggcggagatcgacctgcaattgttcggcggcgaggtgctggccctgaccggcgagaacggtgccggcaagagcaccttgtcgaagatcgtcggcggcctggaacgtcccggcgccggcagcctggagctcctcggccggccttacgcccccgctagccgccgcgaggccgaggcgctgggcgtgcgcatggtgatgcaggaactgaacctgctgccgaccctgtcggtggcggagaacctgttcctccacgacctgccccggcgcgccggctggatcgaccgtcggcgcctgcgcgcggcggcccgcgaggcgatggcccaggtcggcctggaggcgatcgatcccgacacgctggtcggcgacctcggtatcggccaccagcagatggtcgagatcgcccgcaacctgatcggcgactgccgcttgctgatcctcgacgaacccacggcgatgcttaccgcgcgcgaagtggacatgctcttcgagcaggtcgagcggctgcgcgaacgtggcgtggcgatcgtctacatctcccatcgactggaggaactggcgcggatttcgcagcgcatcgcggtgttgcgcgatggccgcctggtctgcgtcgagccgatcgagcgctacgacgccgaccaactggtgaccctgatggtcggccgcgaactgggcgagcgcttcgacctgggcccacggcagaccggtgcgccgctgctgcgggtggagcggctgagccggcgcggcaaggtgcatgaggtgtcgttcgaggtgcgcgcgggggagatcttcggcatctccggactgatcggctccgggcgcaccgaattgttgcgcctgatctacggcgccgaccgcgccgacggtgggcaggtcctgctcggcgatccgccgcagcgcctgagcctgcgttcgccggccgactcggtgcgccagggggtggcgctgatcaccgaggaccgcaagggcgagggcctgctgctggaccagtcgatcagcgccaacctggccctgggcaacctgccggcgctggcgcgccacggggtgatcgaccggcgccgcgaggaagccctggcgcggcgccaggtggaggcgctgcgggtgcgctgcgcggacaccgcgcaggcggtgggcgaactgtccggcggcaaccagcagaaggtggtgatcggccgctggctggagcgcgactgccaggtgctgctgttcgacgagccgacccgtggcatcgatgtcggcgcgaagttcgatatctatgccttgctcgccgagttgacccgccggggcaaggcgctggtggtggtgtccagcgacctgcgcgagctgatgctgatctgcgatcgcatcggcgtgctctcggcgggacgtatggtggacaccttcgagcgcgacgcctggacccaggacgcgctgctggcggcggccttcgccggttacaagaaacgcgacgcgctgctggcgacgtcgtga

SEQ ID NO: 321260 - DNA, 999 bp, Pseudomonas aeruginosa
atgagcgacccgacgtcttccgctaccgccgccgcagcgccaaccctgcgacgcggcaactatttcggcctgggcacctacctcggcctggccggcgcgctgctggcgatgatcgtgctgttctcggcgctgagcagccacttcctcagctatggcaccttcctcgccatcgccaaccagatccccgacctggtggtgctggcggtgggcatgaccttcatcctgatcgtcggcggcatcgatctctcggtaggttcggtgctggccctggcggcctcggcggtaagcctggcgacgctcggctggggctggggcgtgctgccggcggcgatgctcgggatggcctgcgcgaccctggccggctgcgtcaccggttcgatcacggtggcctggcggattccctcgttcatcgtgtccctcggggtgctggagatggcccgtgggctggcctaccagatgaccgactcgcgcacggcctatatcggcgacgcctatgcctggctgtccaatccgctggcgttcggcatctcgccggccttcgtgatcgccctgctggtgatgttcgccgcccaggcggtgctcacccgcacggtgttcggccgctacctgatcggcatcggcaccaacgaagaagcggtgcgattggccggtgtgaacccgaaaccctataagattgcagtattcgccctgatggggctgctcgccgggttggccgcgctgttccagatctcgcgtctggaagcggccgatcccaacgccggggtcggcctggaactccaggtcatcgccgcggtggtgatcggcggcaccagcctgatgggcgggcgaggttcggtggtcagcaccttcttcggcgtgctgatcatttccgtattggcggcggggctggcgcagatcggtgcgtcggagccgaccaaacgaatcattaccggggcggtgatcgtggtagcggtggtgctggatacctatcgcagccatcgcgcccgcagacagggctga

SEQ ID NO: 321261 - DNA, 1014 bp, Pseudomonas aeruginosa
atggcgacaatgaaggacgtggcggcgatggcgggggtttccttcaccaccgtatcgcatgtggtgaacaggacgcggccggtcagcgacgcggtgcgcaagaaggtcgaggacgccatcgcgcagctgcactacgtgcccagcgcggtggcgcgctcgctgaaggtgcgcaccacctcgatcatcggcctgctggtgccgaacagcaccaacccgtatttcgccgagctgtcgcgcggcatcgaggattgctgcgagcgcaacggctactgcgtgatcctctgcaactccgacgacaacccgcagaagcaggccaactacctgcgcgtgctccaggaaaaacgcatcgacggcctggtcctggcgtccgccggcggcgacggcgcgctggccaagggactggcgaacatgcgcacgccgaccgtgatcgtcgaccgcgaggtggaaggcgtggaagccgaccgggtgcagatcgaccatgagatgggcgcctacctggcgacccgccacctgctcgaactgggccatcgcgacatcgcctgcatcggcgggccgctgtcgaccaaggtttcgacgctgcgggtcgagggctaccggcgggcgatggccaaggccggcctggaggtgcgcccgcagtggctgctggaaagcgagttcagcagtcccggcggctaccacgcggcgctcggcctgctgggcggcgagggcgagcgaccgacggcgatcgtcgccggcaacgacatgatcggcatcggcgtgctgcgcgccgcggccgagctgaatatcagggtgccgcacgaactgtcggtgatcggcttcgacgatatcgagctgagccgcttcgtgtttcccgccttgaccaccgtgggccagtcgatccgcctgcttggcgagatcgctgcgcaattgctgctgcaacgcatcgccgagcgcgaggagccgatgcagcggcgggtggtggcgccggcgctggtcctgcgcgaatccaccgcgccgccgctggtgcgggtctga

SEQ ID NO: 321262 - DNA, 927 bp, Pseudomonas aeruginosa
atgcatgcgaaagtactggtggtgggcagcctgaacatggacctggtagtgcgcgcgccgcgcctgccacggggcggcgagaccctcgccgggcagtccttcaccaccattcccggcggcaagggagccaaccaggcggtcgccgcggcgcgtctcggcgctggggtggcgatgatcggctgccttggcgacgatgcctacggcgaccagctgtaccgcgcgctgcaggccgagggcatcgactgccagggcgtcgagcgggtggccggggagtccagcggggtggcgctgatcgtggtcgacgacagcagccagaacgccatcgtcatcgtcgccggcggcaacggccacctgtcgccggccgtgctggcgcgccacgaacacttgctggagcaggcgcaggtggtggtctgccagctggaaagcccgctggagacggttggccatgtgctgcgccgggcccatgcgctgggcaagacggtgatcctcaacccggcgccggccacccgcgacgtgccggcggactggctgccgctggtggactacctggtccccaacgagaccgaaagcgaactgctctgccgcctgccggtggactccctggagagcgccgggcgtgccgccgagcgcctgcgcgaaatgggcgccggcagggtgatcatcaccctcggcgcccagggcgccctgctggtgggcgaggggcgggtcgagcatttcccggtggcgcgggtcaaggcgctggataccacggcggccggcgacaccttcgtcggtggcttcgccgcggcccttgcgcgcggcctcgacgaggcggcggcgatccgtttcggccaggccgccgcggcgatctcggtgacccgcctcggcgcgcagacctcgatcccctcgcgcgaggaagtcgagcgggcgctcgctggcgaggcttga

SEQ ID NO: 321263 - DNA, 1266 bp, Pseudomonas aeruginosa
atgacccagacactctcgctgcgagctgtcctctgcgccaccaccctggtttccccgttcctggcgcaggccgcgacggagtccgaggtcgaggcgctgaagaaggaactcctggagctgcgccaacgctacgaggcccagcagaacgccctgatggtcctcgaacagcgcgtgcgccaggtcgaggcgcaaccccaggcgccgcagccgcaacgcctggtcaagtcgatccagccgccggcgcaggcgcgcaacgacgccaacgcggtcgccggcacctacggcgccagcctcaaggacgatggcgcgcccgcgcccagcgtggaaaacatctaccaggacgccagcggcttcttcggcggcggcaccttcagcctggagaccggcctcacctacagccactacgacacccgccagttgttcctcaacggcttcctggcgctggactcgatcttcctcggcaacatcggcgtggaccagatcgatgccgacatctggaccctcgacctgaccggccgctacaactggaaccagcgctggcaggtggatatcaacgccccggtggtctatcgcgaatcgacctaccagtccgccggcgccggcggctcgacctcgcagatcaccgagaaatcggtgaccggcgacccacgcctgggcgacgtcagcttcggcgtcgcctacaagttcctcgacgaaagcgagagcaccccggacgcggtggtcagcctgcgggtcaaggcgcccaccggcaaggatccctacggcatcaagctgaagcaggtaccgggcaacaacaacctcaacgtgcccgacgacctgcccaccggcaacggcgtctggtcgatcaccccgggcatctcgctggtgaagacggtggacccggcggtgctgttcggcagcctgtcgtatacctacaacttcgaagagtcgttcgacgacatcaacccgcagcaaggcgtgaagaccggcggcaaggtcaagctcggcaactggttccaactcggcgtcggcgtggccttcgcgctgaacgagaagatgagcatgtcgttctccttctcagagctgatcagccagaagagcaaggtcaagcaggacggccagagctggcagaccgtcagcggcagcgacgccaacgccggctacttcggcctgggcatgacctatgcggtgagcaacaggttcagcatcgtgcccagcctgtccatcggcatcactccggacgcgccggactttaccttcggcgtgaaattcccctactacttctga

SEQ ID NO: 321264 - DNA, 753 bp, Pseudomonas aeruginosa
atgctccgggagcacgccatgtacacgcaccactgcttcgtcctcgcctgctgcctgggcgctgcgctgcccgcccccgccagcgacctcttcgcccccgccgaactgagcgaccaggagctttcccagttgcgcgggcgctacgtgctgccggggcggatcgtcagcttcggggtgaccatgagcagcacctggcagaacgccagcggccaggtcctcggcgcacgcgtcgacctgcaggtgcggcagaacctggcgcgcccggtcctcaacgtcaccctggtcgatcggccaggcgacgccccgccacccgtcgccggcaacggccaggtcctcggcggcgccggactggcgcagacccagggggtcagccagagcatccgcaccgccggcgaccacaacagcgccagcaatggcgtcagcatcgaggtccgccacggcgaggcgccgccgccactgccgggcggcacgccgctggaaggtgcgctggccctcagcggcgaggccggcacggtcaaggtcacgccgaacggcggcgccctgcaactggcgatccaggccagcggccagggcgccagcctgcaaagcctcggcgccggcggcctggtgcagagcgtggcgctcagcggaaaccgcaacctggtgcagaacctggcggcgctcgaggtgatgctcaaggaccggccgggcgccgatccggcactgaattgcgcctgggagcaattgcgcgcgctgcgccccagcggctactga

SEQ ID NO: 321265 - DNA, 681 bp, Pseudomonas aeruginosa
atgcgcacgctcatcctttccctgctgctgctcgtcgacctcaccgcccaggcggcgaccctcggctttcccgccctgcccggcggcggcctggtctacaagcaggtgcagagcatccgcgagcggcgcttcgccgacctggtcgagcagaagaccgatttcagctgcggcgccgcggccctcgcgaccatcctggagaaggcctacggcgccccgctcgacgagcaggcggtgatccagggcatgctcgcccacgccgacccggagatcgtccgcacccagggcttctccatgctcgacatgaagcgctacgtcgaatccatgggcatgcgcgcgcgcggctaccgcatcgaggcggcgcaactggaacaactgaagatacccgccatcgtgctgatggaaatccgcggctacaagcacttcgtcgtcctgcaacgcacccagggcgagtacgtgtacgtgggtgacccggcgctggggcacaaacgctacgcgctgacagagttcgccaagggctggaacggcatcgtcttcgccgtgatcggccagggatacgaccgcggcaatccgctgctgacgccgcccgagccgctgaccgcgcgcaatcgcctggaccgcttcaaaccggtcagggacgccgaactgatggaattcggcttcatccagagcgatttcttctga

SEQ ID NO: 321266 - DNA, 1023 bp, Pseudomonas aeruginosa
atgaaagcgactatggtcctgaccccgctggccctggcaatggctgcagtgctgtcggtatcggcctacgccggaaacgaaggtggctggcacccgccgaaacccaacccgcagtcgaacaacaagggcggagccacggccctggtggtggatacgcagcagaactacaacaacaaggtcagcaacttcggcacgctgaacaatgcctcggtgagcggctcgatcaaggatgcctcgggcaacgtcggggtcaacgtcgccgccggcgacaacaaccagcaggccaacgccgccgcgctggccagcgccgacgccagcttcgtgttcggcaccgcgaccgccagcaccagcgtgctgcagagcggctacggcaatacgctgaacaactactccaaccccaacaccgcatcgctgagcaactcggccaacaacgtctcgggcaacctgggcgtgaacgtcgccgccggcaacttcaaccagcagaagaacgacctggccgccgccgtctccaacggccagtacagcactgccggtagcgccgcgtcgcagacctccaccggcaacaccaccgtcaacagcgccaactacgcctatggcggcacctacgtgtcgctgaagctgaacgccgacggcagctacaagggcacctccgaccagatcggcgacgtctacctcgacacctgggaaggccagacccatccgggcggcagcaataccggccacatcgacgtggacagccaggcccagggcgccaaggacctgaaccacgacggcggcgcgttcgccttcaaggaaaagggcgacgtcgacctgaaaggcacggtgtccggcttcatcccggcgatcgtcggcttcaagaccccggtcaccaacaacgccagcctgagcaactcgttgcagaacgtctcgggcaacgtcggggtgaacatcgccgccggtggcggcaaccagcagagcaactccctgtccatcgccgccggttgcagcagctgcccggccggtggcgagagccttggcttctga

SEQ ID NO: 321267 - DNA, 570 bp, Pseudomonas aeruginosa
atgaagcgcctgtccgccctcctcctcgccttcgcctgtatcgcgtcgctccaggccgacccgctggcctcacgcaatcgcgccagcatcgatgacagcggcacctaccgcggcaacttcgccctcaaccaggccgccggcgacgcccagcaacagagcaacgttcgtgtcgtcgcggtaggctccgcggccctcgtcggcagcgaccagcgccagcatctgcaactcgacgccagccagccgatcgcagccagcgccagcatctcgggggcggcgctgcgcggcagcggcatcctcggcgtcaaccagggcgccggcctcggcaaccaacagatcaacgccttccggctgagtctcagcaacggcccggaaagcctggatgacagcgttctcgcgcaaagcgtggcgctgaccaaagtctccggttcggccactccggtcccggggggacgcagcgtctcgacggacgatcgcgccttcgccgggagcagcggcgtggtgcaggtgaaccagagcgctggggtgggcaatcagtcgatgaacaccctcagcgtcagggtcatggaatga

SEQ ID NO: 321268 - DNA, 489 bp, Pseudomonas aeruginosa
atgtcggggagttcgctacgcatcgtcgttccagcgctgctggtcatcgtcggctccgtgccggtgagcctccccgcgcatgcggcggacggtacgatcgtcgtccagcgccaggtccagccacgggtcgcctaccgtccgagcatggtgcccgacccacatcccaccgtcgtcgacaccaacgtctccgccgcggtcaacgccctcgccaacggggcggccagcggcaataccgtgagccgcgaactgggcgatgccgacttcgccatcgtgaccagcggttccgggattcgcagcatgattctcaccggaagcgccctgccgggtttcgccagccagccggcgaacccggcgacggtccaggccgtcggcaacctcggcaccacccacggcgcgggaggcggcgccggcgcaggcctcgccgggcagatcaacggcagcctcaagcagggcctggcaccgctgcagatgctcgggggtggtcaatga

SEQ ID NO: 321269 - DNA, 528 bp, Pseudomonas aeruginosa
atgaaggtgctggtactcaccgggcccgaatccagcggcaagagctggcttgcggagcagctccaggcccgcttcggcggccgggtggtcggcgagtacgtccgccacttcatcgacgaacagcgccgcgacacctgctacgccgacatccccgccatcgcccgcgggcaactggcctgggaggacgccgctcgcgcagaacggccggcgctgctgatcctcgatacccacctgctgagcaacatcctctggagccggattctcttcggcgactgtccggactggctcgaacccgccctgctgcggcggcgctacgacctgcacctgctgctctcgccggaaggcgtagcctggagcgccgacggccagcgctgccagccggaactggcgcagcgccaggccttccaccgcgaatgccaagcctggctggagcgccatcggcagccctaccgcgccatcgccggcgactgggccgagcgccggcgccaggctttcgccgcagtgcaagggctgctccgggacggctga

SEQ ID NO: 321270 - DNA, 576 bp, Pseudomonas aeruginosa
gtgtcaccccttgaactcttcgccgcttcgctcggcgccatcgccgtctacctgaccgtccgccagaatccctggtgctggcctatcggcctggtgatggtggcgctctacgcctggatattcttcgaggtgaagctttattcggacatgctcctgcaaatggtctacgcggcgctacagctctatggctggtggcagtggacccgcggcgggcaggaccacgacggccgctcggtgagccgcctgaacgccgcgcagcgcctctacgggctcggtgcgggcctggtcggcagcgtcgcgctcggttacctgatggccaaccacaccgatgccgccagtccctggtgggacgccggattgaccgccttcagcctggtggcgcaatgctggatggcgcagaagcgcctggaatgctgggccctgtggatcgccgtggacgtgctgttcgtggcgctcttcgccagcaaggcgctgtacctgaccgccgccctctacgccctcttcaccctgctggcgatccacggctggcggacctggcgccgcgacccggcattgcgcgagggcgtcgccgcatga

SEQ ID NO: 321271 - DNA, 834 bp, Pseudomonas aeruginosa
atggagtggtggactgctttccaggcgttcatcctgggcgtcgtggaggggctgaccgagttcctgccgatttccagcaccgggcaccagatcatcgtcgccgacctcatcggcttcggcggcgaacgcgccaaggcgttcaacatcatcatccagctggcggcgatcctcgctgtcgtctgggaatttcggggaaagatctttcaagtcgtccgtgacctgccgagccagcgccaggcccagcgtttcaccgccaacctgctgatcgcgttcttcccggcggtagtcctcggcgtcctgttcgccgacctgatccacgagtggctgttcaatccgatcaccgtcgccctggcgctggtggtgggtggggtggtcatgctctgggccgagcgccggaagcatgtgatccgcgccgaacacgtcgacgacatgacctggaaggacgccctgaagatcggctgtgcccagtgcctggcgatgatccccggcacctcgcggtccggcgcgaccatcatcggcggcctgctgttcggcctttcgcgcaaggcggccaccgagttctcgttcttcctggcgatgccgaccatggtcggcgcggcggtctattccggatacgtgtaccgcgacctgttccgccccgaggacctgccggtgttcgccgtcggcttcgtcacctcgttcgtcttcgccatgctggcggtgcgtgccttgctgaagttcatcggcaaccacagctacgcggctttcgcctggtatcggatcgccttcggcctgctgatcctggcgacctggcaattccacctgatcgactggagcaccgccggcgaggtgtga

SEQ ID NO: 321272 - DNA, 684 bp, Pseudomonas aeruginosa
atggaaaagccgggcatgatcagccgctggtatgacgacaagggcttcggcttcatcctgccgaagaccggcggggaagaagtcttcctgcatatctccgcgttccgcggcgaccgccgtccccgccagggcgaccaggtgtggtttctcgccagccaggatgcccagggccgcctgcgcgccgagagggcgcggctggacgcgctgaccatcgatccgccgactgtccgccgtggcgcccaggcgccggtgacgcgggcccaggcgcggccggcgccgactccgccgagcgcgttgcagcgcccgttggcgaagctgctggtcctgctgatcctctgcgtgctgccggccgctggcgcctggcggatgtacctggacggacaggccctctggccgctgctggcctatccgctggccagcctgctcgcattcgccctctactggcgggacaagcgcagcgccgcacgcggcgactggcgtaccccggaggtccgcctgcacctgttcgagctgctcggcggctggcctggcgcgctggtcgcgcagcaggtattccgccacaagacccgcaagctctcgttccaactggtgttctggggcatcgtcctgctgcaccagtcgttctggctcgacagcctgctcggcgggcgcctgtccgccgcgctgttgcaggggatcggctga

SEQ ID NO: 321273 - DNA, 936 bp, Pseudomonas aeruginosa
atgccccacgacctcaacgacctctactacttcgccaaggtggtggaatgcggcggcttcgccgcggccggacgcgagacggggattcccaagtcgcgcctgtcgcggcgcatcgccgagctggaggagcgccttcaggtgcgcctgctgcaccgcacgacacgcaagctggcgctcacggaggtcggcgaacgctacctgcagcactgccgcaacctgctgctggaagcggagatggccgaacaggtgatcgccgagctgagcgtcgagccgcgtggccggctgcgcctttccgcaccggtggccatggcttcgagcaacctggccgacctgttgccgcggtttctcgaacgacacccgcaggtccagctggaaatcctcctgaccaaccgccgggtcgacctgctcaacgagggggtggacgtggcactgcgcgtgcgcgaactcggcgacgaggaccctgcgctggtctgccggcgcctggctccggcgaccacgcagatcctcgccgccccatcgctgatcgccgggcgtcgcctggaacatccggaagacctcgaagacctgcccttcctcggcgctattcataacgaccgcaaggtccacgcgaccctgatcgggccggatggcagccgctaccagttggaacgcgaaccgcgcctgggcgtcgacgacttcgtcctgcgcaagaaagccgccgtggccggcctcggcgtcaccctgctgcccgaaggctactgcgacagggaactggccgatggcagcctggtgcgcatcctgccgcagtggaccttgccgaaaagcaccatgcaggccgcctacctgccgcgcagcagccagattccggcgatccgtgccttgatcgactttctcgtggaagccttgcaacgcccctcgggcgagaccggcccggcctaccgccgcgcccgcgagtga

SEQ ID NO: 321274 - DNA, 609 bp, Pseudomonas aeruginosa
atgaaacttttgcatatcgattccagcatcctcggcgacgcctccgcttcccgccaactgagcgccgagctggtccaggcctggcggcagaacgaagacgggcttgacgtcacctaccgcgacctggctgccgacgcggtggcgcatttctccgccctgaccctggccgccggcagcaccccggcggagctgcgcgatgccgcgctgaagcatgaagtcgcggtgggtgaagaagtgctggaagagttcctcgccgccgacgtcgtggtaatcggcgcgccgatgtacaacttcaccatctccagccagctcaaggcctggatcgatcgcatcgcggtcgccggcaagaccttccgctacaccgagaacggcccggttggcctggccggcgacaagaaagtggtgatcgtctccaccgccggtggcgtgcatgccggccagccgaccggcgcggcccacgaaggctacctgcgcaccgtgctgggtttcttcggcatcaccgatatcgaagtggttcgcgccgaaggcctggcctatggcgaggagccccgcgcccaggccatcgccgccgcccgccggcagatagccgggcagttcgccgcggcctga

SEQ ID NO: 321275 - DNA, 267 bp, Pseudomonas aeruginosa
gtgagcgcgtgttactgccgcaactgcggcgcccgagcgacccgtctcgtcgagagcggcatctgcgaagcctgcaagcggcgctcggacatcaatccgaagaacgtcctgatcgccgccgccctgatcgtctacatcggggtgaacgtggctgcctacatcaaggaccacccgccccgcgagctgaccgccgaacagcgcgagaagatcgccgagggccagcgcctggcgacccgcgcggcgatgatggccggctacgtcgactga

SEQ ID NO: 321276 - DNA, 1566 bp, Pseudomonas aeruginosa
atgcagttcggcgccaagccgctgttcgagaacgtttccgtcaagttcggcaacggcaaccgctacggcctgatcggcgccaacggttgcggcaagtcgaccttcatgaagatcctcggcaacgacctggagccgagcgccggccaggtcatgctggaacccaacgtgcgcctgggcaagctgcgccaggaccagttcgcctacgaggacttcagcgtcatcgatacggtgatcatgggccacgaggaactctgggcggtgaaggccgaacgcgaccgcatctactccctgccggaaatgagcgaggcagatggcatggcggtggccgagctggaagtccagttcgccgagttcgacggctacaccgccgagtcccgcgccggcgagctgctgctcggcctgggcatcccgctggagcagcacttcggcccgatgagcgccgtcgctcccggctggaagctgcgcgtactgctggcccaggcgctgttctcggacccggacgtgctgctgctcgacgaaccgaccaaccacctggacatcaacaccatccgctggctggaaggcgtgctcaccgcgcgcaacagcaccatgatcatcatttcccacgatcgccacttcctgaacagcgtctgcacccacatggccgacctggactacggcgagctgcgcctgttcccgggcaactacgacgagtacatgaccgccgccgaacaggcccgcgagcgcctgctgtcggacaacgccaagaagaaggcgcagatcgccgagctgcaatccttcgtcagccgcttctcggccaacgcttccaaggccaagcaggccaccagccgcgcccggcagatcgacaagatccagctggaggaggtcaagccgtccagccgggtcagcccgttcatccgcttcgagcaatacaagaagctgcaccgccaggcggtgaccgtggaaaacatcagcaagggctatgacggcaagccgctgttcaagggcctgagcctgcaggtcgaggccggcgagcgcgtcgccatcatcggccccaacggcatcggcaagaccaccctgttgcgctgcctggtcggcgacctgccggtggatggcggcgaggtgaaatggaccgacagcgccgacgtcggctatttcgcccaggaccatgccgacgacttcgccgacgacatgagcctgttcgactggatggcccagtggacccagggcggcgaacaactggtgcgcggcaccctcggccgcatgctgttctccaacgacgagatcaagaagtcggtgaaagtgatctccggcggcgagcagggccgcatgctgttcggccggctgatcctcaagcgccccaacgtgctggtgatggacgagccgaccaaccacctggacatggagtccatcgaggcgctgaacctggcgctggacaactatccgggcacgctgatcttcgtcagccacgaccgcgaattcgtttcctcgctggctacccgcatcatcgagctgggcgagaacggcgtgaccgacttcagcggcagctatgacgactacctgcgcagccagggcgtgatcgtctga

SEQ ID NO: 321277 - DNA, 336 bp, Pseudomonas aeruginosa
atgaagcccgctgttctccccgcgttgttggttctgtcgctgctgggtggttgcggggattcgtcgtcggaccggaaggcggcttccgggccgctggcgttgcactgcggagacttcggcaaactcgaggtgatcgacggtttcgccagtctcaagctgcccgacggcagcagcgtccagtcgctgggcggtgatgtccgcagcctcgccgatggccaggcgctgagcgcgatttcctatagcgacggttcggtcctgtaccgccaggcgggcgacacgcccggctacctgtacacgccggccaagggccagcggcaggcctgcgagacgcgctga

SEQ ID NO: 321278 - DNA, 372 bp, Pseudomonas aeruginosa
atgccgcatctcgttatcgaagccactgccaacctccgcctcgaaacgtcccccggcgaactgctggagcaggccaatgccgcgctgttcgcttccgggcaattcggcgaggcggacatcaagtcgcgcttcgtcaccctggaggcctaccggcagggaaccgcggcggtcgagcgcgcctacctgcatgcctgcctgtcgatcctcgacgggcgcgacgcggcgacccgccaggcgctgggcgagtcgctctgcgaggtgctcgccggagcggtggcgggcggcggcgaggagggcgtgcaggtcagcgtcgaagtgcgcgagatggagcgcgccagctacgccaagcgcgtcgtcgcccggcagcgctga

SEQ ID NO: 321279 - DNA, 501 bp, Pseudomonas aeruginosa
atgaacagcataggtcccgccagcctttccggctggtctgcgcgttacctgaacaaccagcggcaagccaacaccgagatcggcaacggcgatctgctgaaaccgcgccccgcccttggcacgccattgcgcaacgaggccgtcgatcccgccgcggagtccgcccgccaggccatggacgagggttttgcgaagctgaacctgacgctgaagcagaaccaggcgaatgcccctgccggcgccagcgaaggcaagtcggcctatgacgagttcaaggagtacatgcagaaatcgcctgccgagcggatgcgcgagcaggtcctgaagagcctcggcctgaccgaggaggaactggacgcgatgccgccggagaaacgcgaacaggtggagaaaggcatcggcgaacgcatgcgcgagatgatcgccatgcagaacggccaggcgccgggacggcaagaggacccgacgcaggccggcgcgacgctgaacgcctggatctga

SEQ ID NO: 321280 - DNA, 234 bp, Pseudomonas aeruginosa
atgaccgacactcccgacgatcgaaccggagatgcctccggtctgtcgaagcgccaggcattccatcggcagcaccggcaacgggcggaggaagaggcgcggcgcctgctcgacgcccgcgccgaacagggtggccgctggctggactgggtcgcgggccagctctacctcctgcgtccgccggaatacgcggccatggtgcgtcgcgaactgcagcgcctgagcggtgactga

SEQ ID NO: 321281 - DNA, 348 bp, Pseudomonas aeruginosa
atgcctttgaagcagttttccagtgcactcgttctcgcggccctgctcgccggttgcagcagcaacggcgacagcccgtccaccgaaggcgccagcgtagccaccggcagcgccagcgcgcccgcggccaccccggcagcggacggccgttgcgatgccaatgcggtgcaggcctatgtcggcaagcaggcttccgcggccatcgtcgaggaggcccgccgcgccgccggagcggaagtcgcccgggcgctgcgcccgcacgatgcggtgaccatggactacaacccgcgccggctgaacatcgatgtcgacgacacgctggtgatcaagcgcctgtcctgcggctga

SEQ ID NO: 321282 - DNA, 240 bp, Pseudomonas aeruginosa
atggccaaggcactcatcagcgtactgttgttctccctcgccctcgccggctgcgccagcgactacaacccctctcgcccgtacagcagcgacgaggtcaggcaactggcgctggaagacctggcccggcgcagcctgtcgttcgaggaataccaggccaagcgtcaggcaattctcgaggaaaaaccgcaaaccgccgtcagccagtccaacgccgccctacgcagtaccgccatctga

SEQ ID NO: 321283 - DNA, 1314 bp, Pseudomonas aeruginosa
atgaacgctttgaaaggccgggacatcctggcgcttggttttatgacctttgccctgttcgtcggggccggcaacatcatcttcccgcccatcgtcggcttgcagtccggcccccatgtgtggctggcggcgctgggcttcctgatcaccgcggtggggctgccggtgatcaccgtgatcgccctggccaaggtcggcggttcggtcgacgccctcagccatccgatcggcaggtatgccggcggcctgctggcggcggtctgctacctggcggtcggcccgctgttcgccattccgcgcaccgccacggtgtccttcgaggtcggcgtggtgccgctgctcggcgagagcggcacggcgctgttcgtctacagcctggcgtacttccttctggccctggccatctccctctaccccggtcgcctgctggacaccgtcggacgcttcctcgccccgctgaagatcctcgccctggcgattctcggcgtcgccgccttcctctggcccgccggcccgatcggcacggcccagccggagtacacccaggccgcgttctcccagggtttcgtcaacggctacctgaccatggacaccctcgccgcgctggtcttcggcatcgtcatcgtcaacgccatccgttcccgcggcgtgcagtcgccgcgtctgatcacccgctatgccatcgtcgccgggctgatcgccggtgtcggcctggtgctggtctacgtcagcctgttccggctcggcgccggcagccatgccatcgccgccgacgccagcaacggcgcggcggtcctgcatgcctacgtgcaacataccttcggcagcctcggcagctcgttcctggcgggacttatcgcgctggcctgcctggtcaccgcggtcggcctgacctgcgcctgcgccgagtacttctgccagcgcctgccgctgtcctaccgcagcctggtgatcatcctggcagggttctccttcatcgtttccaacctcggcctgaccaagctgatccaggtctcgatcccggtgctcaccgcgatctatccgccgtgcatcgtgctggtggcgctgagcttctgcatcggcctctggcattcggcgacgcgcatcctcgccccggtgatgctggtttccctggcgttcggcgtgctcgatgccctgaaggcggcgggcctgggccaggacttcccgcaatggctgctgcacctgccgctggccgaacagggcctggcctggttgatcccctcggtcgccactctcgccgcctgcagcctggtcgaccgcctgctgggcaagcctgcgcaagtcgccgcctga

SEQ ID NO: 321284 - DNA, 1704 bp, Pseudomonas aeruginosa
atgtcgaaagcccgcgccgtccgtcccgaactgctgaccctgctggtcagcctcgccttcctgctgttctacaacctgccgctgtggcaacgcctgctggcgatcaccccggcgggctggcagggcctcggcatgatgctggcggtcggcctgatgatcgccgcgatcttcaacctggcgctgaccctgctggcgttccgctggctgctcaagccggcgctgaccctgctgatcctggcggccgccggtaccacctacttcatgacccagtacggcgtgctgatggacgtcggcatgctgcgcaacgtcatgcagaccaacccggccgaggtcgccgacctgctttcgccgaagctcgccgtctacctggcgttgcttggcgcgctgccggtctggctgctgtggcgcacgccggtgcgctaccggccgtggccacgcgagctgctgagcaagctgctggtggcgctcgcctgcctggccctgcttgccggggtggcgctggccaattaccaggggctgtcctcgctgttccgcaacaacaaggaactgcgcctgcaggtcaccccgagcaacctggtcggcgccgccatcggctacgccaagggccaggcccaggccgccagccagccactccggccgatcgccgtcgatgcccggcgcgccgccctgtggcagggccatgcgcgcaagtcgctgaccgtgctggtggtgggcgagagcgcgcgggcacagaacttcggcctcaacggctacgctcgcgagaccaacccgcggctgaaggccgaggagggcctgatcaacttctccaacgtgcactcctgcggtaccgagaccgcggtgtcggtgccctgcatgttctccaacctgggccgcgcggactacagcgacgctcgcgcgcgcacccaggaaggccttctcgatgtgttgcagcgcgcaggcctgcgggtcctgtggcgggacaaccagtccggctgcaagggcacctgcgaccgcgtcgccttccaggacctgagcgagagcaaggatccggccctgtgcgacggcggcgagtgccatgacgagatcctcctgcgcgacttgcaggccttcatcgacgggctgcaacaggacaccgtgctggtcctgcaccagatgggcagccacggcccggcctacttcaagcgctatcccagggagtacgagaagttcaccccggtctgcgccagcaacgacttcagcgcctgctcgcgggacagcatcatcaacggctacgacaacaccctgctgtacaccgaccacgtgctggccagcctgatcgacctgctgcgcaagaacgaagagcgcatcgataccggcatgctctacctctccgaccatggcgagtcgctcggcgagtacaacctctacctgcatggcacgccttacctgctggcgccggaccagcagaagcacgtcggcatgctggcctggttctcgcccggctaccagagcgccttcggcctcgacagtagctgcctgcgccagcgcagcaacgaggagctgtcccaggacaacctgttccactcgatgctcggcctgctggaagtgcgcaccggcgcctacgatcccggcctcgacctgttcgccccgtgccgtgcgccggaggtcctgcaggcgctcaaggccgacggcggacgggcgctgtactccgaggaagcgtctggccaggagccgccggcttcctga

SEQ ID NO: 321285 - DNA, 2286 bp, Pseudomonas aeruginosa
gtgctgcccaacggcctgcgcctgcacctggcgcatgatctggcggcatcgcgcgccgctgcctggctgcgggtggcggcgggcagccacgacgagccgagcgcgcatcccggcctggcccacttcctcgagcacctgtcgtttctcggtggcgcggcgtttcccggcgacgagcgcctgatgccgtggttgcaggtgcgcggcggccaggtcaacgccagcacccggggcaggaccaccgactatttcttcgaggtgacggcggagcaccttggcgccggtctggcacggctgatcgacatgctcgcccgccccttgctggacatcgatgcgcaacggcgcgagcgcgaagtactcgaggccgaatacctggcgcgctcggccgacgagcagaccctgatcgacgcagcgctggccctcggcctgcccgccggacaccccctgcggcgtttcgctgccgggcgccgcgacagcctggccctggagaacgatgcgttccagcgggccctgcgcgaattccatgccgcccactatcacgccggcaattgccagctatggctgcaagggccgcaggcactggacgagctggagaggctggcgcagcgtgcctgcgccgacctgccggggcgcgcgccaggcgcgagtccgccgccgccgccgttgctgcccttcgccggcgaagcgctggcgctgcgcctgccgggaccgccgcggctggtgctgggctttgccctcgacgctttgcgggaggccgacgaacagaccctgcaggcgttcgccgaattgctcggcgatcgctcgccgggcgggttgctggcggcactcggcgaacagggcctgggcgaatcggcggcgctgcgggtggttcaccgggatgcgcggcaggcgctcctggcgttgaccttcgaactgtttgacggcagcgcggcggcggcgctggaggcggcctttttcgactggctgggcgccctgcgcgacgatgccgccagcctgctggcggcgcgccggccgttgctggcggagcccactgcaccgctggagcgactacgccagcgcgttcttggcctgccagcggagattcgcccggcctgcctggacgcgctgcgcgccgaccgttgcctgcggctgcacctggacagcgaactcgacggcgccgaagcgcgctggtcggcgggcttccgcctgagtgtggcgccggttgccgcagcgccgccgctgaccgcgcagcggcatgcctggcgcttcgaactgccgtcgccgccgagcgccgccgccgagggcgcgctgttcctgcgctggcgctttcccggcgtgcccgtacggtcacgctttctggcgctgcgccaggcgttgcgtccgctgtgcggccaggcacgcctggggggtgtggagatgggcctggaggcgctcggcgaggactggtcgctgagtctgctcggtccgcgcgatcgcctcgaggccgccgtgcgcccggccctggcccggctcctcgcggcgccgcccgactggcgcgcgagcggcgagcgtctgtcctccgccgagcggcgccgcagcgccactggcctgccgatccggcaattgctggacgccttgcccggcgtattcggcgagccgctggcggaggtcgacgactggcggcggacgcgctgggacgccttggtcatgcaggccgcgatgccagatccccgatggatgcccggccaggctgccggcgagcgcctggagcctctgccgccgaggcccggacggcatcgccgcgaactggccgtggacggcgagtcggcgttgctgctgttctgtccgctgcccacgcaggaggtgccgatggaggcggcctggcgcttgctggcgcgcctgcacgaaccggccttccagcggcgcctgcgcgacgagctgcaactgggctacgcgttgttctgcggcttccgcgaggtcggcgcccggcgcggcctgctgttcgccgcgcaatctccgcgtgcctgcccggaacgcctgctggagcatatggagaccttcctccagcgctccgccgaggcgctcgcgcaactgccggcgcgacgcctggccggcctgcgcgaagccctcgccgacgacctgcgccgagcaccgggtagcttcgccgagcgagcacggcgcgcctgggcggagcaccttggcggtggcgccggtcgctcccggctgctcgccgaggccgccctcggcctgagcggcgacgacctgctcgcggcccaggcccggttgctggaggcgcgcggcggctggtgggtgctttccagccggcgctga

SEQ ID NO: 321286 - DNA, 1200 bp, Pseudomonas aeruginosa
atgaacaagaacaacaccgccgttcgccgaatcctgccgctgaccctggcctcgctgggtgccctgggcggcctgcaaccggccgccgccgatatcctgctgtacgacaaggacgagaccaccttttccaccgacggctacttcaacgccttctacgtcaacagcgacgtcgaccgccagggcgagacctacgatcgccgccagtcgcgggtgaagatgggattcttgccgaactacatcggcttcaacttcggcaggaaggtcgacgagctgagcctcggtggtcgcgcttccttctgggtgaccatcaacgacagcgagaccgacggcaccgataccgccatcgacgtccgtcagttctacggcacggtcgccggcgactggggcgaggtgctgatcggcaaggacttcggcctgttctcgcgctcgaacatcttcctcgacgaactgctggccggtttcggcaaccccagcgacaccctcggcctggtggacggcaagggcgtctccttcggcaacatcggcaccggctatccgtatccgttccccacctcgcagatcacctaccgcaacaacaacctgctgcccggcctgcgcatcgccgtgggcatcctcgacccgatcgactccaaccagatcgacaaagatgccagcgacggcctcgacgacaaggcctaccaggacaacccgcgctacgagagcgaggtcagctaccagttcgacctggccggggcgcaggtctacagctggatcaacggcggctaccagacttcgaagaacaccagcgacagcgtcgacagcgtgacttccaagggggtcggctatggcttgcaggtgaagatgggcggcttctccgtgaccggttcggggttcaccgccaagggcatcaatcccttcttcaccaacaacgccggcgaagccgcgctgcgcgaggtggacagccgcggcgcattgctgcagggctcgtattcatggggcaagaaccgcctggcgctgtcctacggcaagaccgtcgacgacggcaacggcctgggttccgcggccgactacgagagtcgcggcatcgcctatttccgcacgatcaacgacaacctcaagctggtcgccgagctgaaccgctaccggatcgacgggcgcgacggtgccgcgctcgacgaggacaccgacaccgtggccctcggcgccgtactgaactggtga

SEQ ID NO: 321287 - DNA, 1164 bp, Pseudomonas aeruginosa
atgtacgaagggcagggggaaggggtctgcaggggcatgtccagcgcgcgcgacgtcgaagtggtggcccaggacctggcgcgccagcttatccatccgcacctgggcttcgtgctgttcttctgttccgcggaatacgacctgccggcccttgccgagatgctcgaacgctacttcggcggcatcgacctggtcggctgcaccacagccggcgagatcactccggcgggctacgggcgcggctgcgtcagcgcggtgggcttcgacgtgcgcagcttcgccatcagcagcgcgctgatcgacgaaatggagcgcttcagcctgctggacgcgcagcagatggtcgagaccctggtggccggctgtcgccgcggcggcctggcgccgatcaaggaccacagcttcgccctgaccttgctcgacggcctgtccagccgcgaagaggtggtgctcgccgcgcttggcgcggcgctcggcgcgatcccgcacttcggtggctcggccggcgacgaccggcacctgacccacacccatgtctaccaccagggccagttccataccggggcggcagtggtggtgctggtcaacacctggctggacttcgaggtcttcaccacccatcacgtggtgccgcgcgccgaaaagttggtggtgacccgcgccgacagcggcagccggcgggtccacgaactcaacgccgagccggcggcgctggaatacgcccggctggtcggggtggcaccgcaggcgctggatttcgccctgttctccgcgcatccgctggcggtgcgggtcgacgaacgctattacgtgcgctcgatccagcaggccaacgaggacctgagcctgacgttctactgtgcggtggagaacggcatcgttctcaccgcgatgagcaccggcccgctgttgcccaacctggaggcgcagttccgccgcctccacgagcgcctcggaccgccgttgctgaccatcggttgcgactgcttcctgcggcgcctggagctggaggtcggcggtgacacgcaagctaccgccgcgtttctccgcagccagcaggtgatcggcttcaacacctacggagagcaattcaatggcatgcatatcaaccagaccttcaccggggtcgccattggccgaccccgcggaggtgtccgtcgctga

SEQ ID NO: 321288 - DNA, 2607 bp, Pseudomonas aeruginosa
ttggccgaccccgcggaggtgtccgtcgctgagctgcaggcgcgggtcgtcgccctcgaagaagagcggcacaagttgcagcggatcaaccaggcgctgatcggacgcatcgagtcgagcgccgcgcagagcgacgaggcctacggcgccttccagtattccgtggtgctggccgagcaggtccgcgagcgcaccgacgcgctgagccagacgatgctcgaactgaaggccagcaaccagttgctcagcgacgctcgcctgcgtgccgagaccgcccaccagcatctgctcgacgccatcgaaagcatctccgacgccttcgtcctgttcgatccgcagcaacgcatcgtgttgttcaacgagcgcttccgcgcgctgtggatcgacagccgggcgcggatcggccctggcatgcgccgcgccgaactgcaccggctggcgcgcagcggcgggctgatcgtcgaggaacagcgcggcggcgaccagcagaccctgtaccgcctgcgcgacgagcgctggctgcggatgagcgagcgaccgacccgcgacggcgggctggcggtgctctacagcgacgtcaccgagatcaagctcagcgagaccgcgcgccgcgagcaggcgctggcgcagaagtcgcacctgttgcagcgggcggtggacaatctctcccagggcgtggcgatggtcggtgccgacggcgtgctggagttgtggaaccggcgcttcctggagctctgcgggctggcgccgatcgccgggcaccgggccttcgccgaagtcatggcggagagcgaattgccgttgctcacgccgcgcagccaggactcccaggggagtccgctgagcgcccgcgagcagcgcctgttcgatggccgggtgctggagatccgtacccatgcgctgcccaccggcggcttcgtcaacaccttcaccgacatcaccgaacgctatcgccacgccgaggcgttgcgcgccagcgagcgctggatccgcctgatcaccgaccaggtgccggcgctgatcgcctatctcagcgacgaactggtctacgaattcaccaacaaggtctacgaggagtggtaccgctggcccagcggctcaatgctcggccgctgtctgcgcgacgtgcatggcgccgagcactgccggcgcctggagccgtacttcgagcgggccctggccggcgaaagcgtgaccttcgagatcgccgagaccgcgttgtccggcgaggagcgctacatgcagcgctcctacgtgccgaaccgccaggccgacggccgggtcgccgggctgttcgtgctgattcgggatatcaccgagcgccggcggaccgccgaggcgctgcaccaggcctaccagaacctcgaacagcgggtgcgcgagcggaccgccgagctgaccaccctcaacgaccagttcaagcgcgagatccacgagcgcagccaggtcgaggcgcgcctgcgcgaggccaagcgcgaggcggaacaggccaacctgtcgaagaccaagttcctcgcggcggtcagccacgacctgctgcaaccgctgaacgccgcgcggctgttcaccagcgccttgcaggagcgcggcagcgcggcgcgggacaacgaggcgctggtgaacaacatcagccattcgctggaggacgtggagaacctgctcggcaccctggtggacatttccaagctggacgccggcgtgatcaccccggacatcgccccgttcgagcttggcgaactgctcggcaacctggccgcggagtaccgccaggtagccgccagcgaagggctacgcctggacttcgtggcctgcggggcgctggtccgcagcgaccagcaactgctcgcgcgaatcctccgcaacctgctttccaacgccatccgctataccccgcgagggcgcgtgctgctgggttgccgccggcatcggcagcgcctgtcgatcgaggtctgggacaccggggtgggcatcgccgccgacaagctcggcgagattttccaggaattcaagcgcggcgagtcacagcgttgtcaccaagaccgcgggctcggcctgggattggcgatcgtcgacaagatcgcccgcatgctcggccaccgggtccgggtcggctcgctgccgggcaagggctcatgcttcgccatcgaggtaccgctggcccgccatgccccgcgcagtcgcgccgagccgctggccagcgcggacgacctgcgcgagcgcctgcgtggttcgcgggtgtgggtgctggacaacgatgcggcgatctgcgcaggcatgcgcacgttgctcgaagcctggggctgccgggtagtgacggcgctgtcggaggaagacctggcgcgacaggtcgacaactaccatgccgaggccgacctgctgatcgtcgactatcacctcgacgaccagcgcaacggcgtcgacgcggtcgccgcgatcaacgcccggcgcggctcgccgctgccggcgctgatgatcaccgccaactacagcaacgagctcaagcagcaggtccgcgagcttggccataccctgatgcacaagccggtgcggccgatgaagctgaagaccgcgctctgccacttgctggagcgcgaagcctcggtctga

SEQ ID NO: 321289 - DNA, 864 bp, Pseudomonas aeruginosa
atgcccgaccgccgtaccctgctgctcactgtcctggcgatgctggccttcgccggcaattcgctgctctgccgcgcggcgctgaaggacaccgccatcgacgcggtcagtttcaccgccctgcgtctcttctccggcgccctcatgctcgccatcctgctgcatctgcgccggcgcccggccacgcccgcgcgcggcggctggcgcggggcggcggcgctgttcgtctacgcggccgcgttctcctacgcctacgtgcagctggacgccggcaccggcgcgctgctgctattcggcgcggtacaggtcaccctgctgctggccggcctgctgcgcggcgaacggctgggcggacaggcgctgctcggtttcctgctggccctgggcggcctgctgttcctgttgctccccggagccagcgcgccgccgctgggcggtgccctgctgatgctcctgtccggcctcgcctggggcctctataccctgctcggccgcggcggcggcgagccgctggcggtcagcgcgggcaacttcctgcgtgcccttgccttcgccgccctgctgctcctggcattccacgggcagttgcggctggacggcgccgggctggcctatgccctgctttccggcgccctcgcctccggcctcggctacgccgtctggtacagcgcactgccggggctgacggcgatccagggcgcctcggtgcagctcagcgtgccggtgctcgccgccctctgcggcgccctgctgctcggcgagccgctcgccccgcgattgccgccggcgaccctggcggtgctcggcgggatcgccctgatcctcgccccgcgcctgggccgcgcggcgcgcgaaggcgcctga

SEQ ID NO: 321290 - DNA, 666 bp, Pseudomonas aeruginosa
atgtacaagatcctgatcgccgacgaccacccgctgttccgcgaggccatccacaatgtcatcgccgacggattccccggcagcgaagtgatggaaaccgccgacctcgacagcgccctgggcctgacccaggaacacgacgacctcgacctgatcctgctcgacctgaacatgcccggcatgcacggcctcaacggcctgatgaacctgcgcaacgaggccccgaccattcccgtggttatcgtctccgccgagcaggacaagcaggtggtgctacaggccatcacctacggcgcggtgggcttcatcaccaagtcctcgccacgcgcgcagatgaccgaagccatcgagcagatcctcaacggcaacgtctacctgccctcggacgtgatccgcacccagaagagttcgccgcgacgcagcggccacgaagaacacggcatctccccggaactgctccaggccctgacccgcaagcagctgctggtgctggagcggatgaccaagggcgagtcgaacaagcagatcgcctacaacctggacatcgccgagaccacggtgaaggcgcacgtctcggcgatcctgcgcaagctcaaggtacacaaccgggtccaggcgatcctcagcgccggcgacatcgacttcgccgcctacctgcgccgctga

SEQ ID NO: 321291 - DNA, 141 bp, Pseudomonas aeruginosa
atgcgcatcgccgtcaccctggtgttgcccatcctgctgatcctcagcctgctcgggttcgatttcctctattcccgccacctcggccaggaaagacctgccgcctgcgccgtcggacaggcctgtcggatcgccccctga

SEQ ID NO: 321292 - DNA, 651 bp, Pseudomonas aeruginosa
atggatgacctgcgacccgccggcccggcggagtaccgctggctgctcgccgtgcaggagcgcgagcggcgcttgctggcccaggcggtgcatgacgatatcggccagtacctgacgggcatccgcacccaactgttgttgctgcgctgcacggcaggcgacgggcagccggcgctggcacgcctggagcgctactgccaggggctggacgatagcttccgcgcgctgctgcgcggtctaccgccgccggccctgcaacgccagtcgctggacgaggcgctgcgcgcctgcgtggcggactggcaggaaggtcagggcatcgcctgcgagctgcgcctgggcggtccgctgccgcccctggatgcggcggccgggacccatctctaccgcctgttgcaggaggcgctgaacaacgtcgcccggcatgccggcgccagccgcgtgcggatccgcctgcaatgccgtggcggctttctctacctgagcgtacgcgacgacggtcgcggctgcgcggcggacccggcacccggcttcggcctggactcgatgcgccagcgcgcgcgctgcctgggcgctgaactgagcctgcgcagccgtcccggacagggcctggcgttgcgcctgcggatgccgctggaacgcgacgactga

SEQ ID NO: 321293 - DNA, 678 bp, Pseudomonas aeruginosa
atgaagatcctgctggtggacgatcatttcgtggtccgcgaagggctggccgcgctgttgcgcgggctgctccccgacgtggaggtgaacgaggccggcgacggcgaagaagccttgcaggcggtgcagcgggaaattccttcgctggtcatcgtcgatctcggcctgccgggcatcagcggcctggaactgactcgccggctgcgccagcgcctgccgcagttgcgtgtgctgttcttcagcctccacgacgaactggccctggtgcgccaggcgctggatgccggtgcccgcggctacgtgaccaagcgcgcggcgccgacggtgctgctggaggcgatacggcgagtgctcgccggccagctctatctggagcagcccctggccacgcgcctggcctgccagtcgtgggaagagcagggcggggcagcgttgcgcgggctgacccgtcgcgagttcgagatcttccgcctgctcgcgcgtggcctggccctgcgcgaggtggccgagcacctgggggtaagcgccaagaccgtgtccaaccatgtcagcctgctcaagcagaagttgcaggtgagtacccaggcggaactggtgcaccgggccatcgacagcggcgtgctgcggctgggcctgccgctgccgctcgccgaggaggctcgcggcagcctcggctag

SEQ ID NO: 321294 - DNA, 648 bp, Pseudomonas aeruginosa
atgaagaccttcctcctctgcgccgccctgctcggcgccggcctggcccaggccgccgacgacatcgacgacgtccgcgtcatcgccggctgccgcctggagcccggcgcgcgctgcgccaaggccgacctgcgcggcgccgacctgcgcaacctcgacctcggccgcatcgacctggccggcgccgatctctccggcgccgacctgcgtcacgccaggctcgacctgggcaacctggaaaaagccaacctgcgtggtgccgacctcacccgcgccagcctgcagcaagccaacctgcgcggcgccgacctctccggcgccagggcggtggcgatccaggcctggggcctgttcgcccagggcgcccagtggcaaggcgccgacctcaccgccgcctacctggagttcgcccgtctcagcggcggccgcctgcaccaggccacgctgcgcgccgccgacctggagatgacctggctgtcccgcgccgatctcaagggcgccgacctgcgcgacgccaacctgcaggaagtcaagctggccgaggccaacctggaagatgccgacctgcgcggcagcaaggtgcgcttcggcaacttccagggcagcaacatgcagggttgcaaggattgccccgcgggctggcagtga

SEQ ID NO: 321295 - DNA, 1872 bp, Pseudomonas aeruginosa
atgacaacaagaacctcacccgcccctgccggcctcctgcgcccgagcctgcactgcctcgccttcgccgtcgccctgggcagcgctggcgccgcgctggccaaggatgtgacctgggaggacatcgccaacgacgacaagaccaccggcgacgtgctgcagtacggcatgggcacccacgcccagcgctggagcccgctcaagcaggtcaacgccgacaacgtgttcaagctgaccccggcctggtcgtactccttcggcgacgagaaacagcgcggccaggagtcccaggccatcgtcagcgacggcgtgatctacgtgaccgcatcctactcgcggctgttcgccctcgacgcgaagaccggcaagcgcctgtggacctacaaccaccgcctgcccgacgacatccgcccgtgctgcgacgtggtcaaccgcggcgccgcgatctatggcgacaaggtgttcttcggcaccctcgacgcctcggtggtggcgctgaacaagaacaccggcaaggtggtgtggaagaagaagttcgccgatcacggcgccggctacaccatgactggcgcgccgaccatcgtgaaggacggcaagaccggcaaggtcctgctgatccacggcagttcgggcgacgagttcggcgtggtcggccgcctgttcgcccgcgatccggataccggcgaggaaatctggatgcgtcccttcgtcgaaggccacatgggccgcctgaacggcaaggacagcacggtgaccggcgacgtcaaggcgccctcctggccggacgatcgcaactcgccgaccggcaaggtcgagtcgtggagccacggcggcggcgctccctggcagagcaccagcttcgacgccgagaccaacaccatcatcgtcggcgccggcaaccccggcccgtggaacacctgggcgcgcaccgccaagggcggcaacccgcacgactacgacagcctctacacctccggccaggtcggggtggacccgagcagcggcgaggtgaagtggttctaccagcacacccccaacgacgcctgggacttctccggcaacaacgaactggtgctgttcgactacaaggccaaggacggcaagatcgtcaaggccaccgcccacgccgaccgcaacggcttcttctatgtggtcgaccgcagcaacggcaagttgcagaacgccttccccttcgtcgacaacatcacctgggccagccacatcgacctgaagaccggccgcccggtggagcgcgagggccagcgcccgccgctgccggaaccggggcagaagcatggcaaggcggtggaagtatcgccgccgttcctcggcggcaagaactggaacccgatggcctacagccaggacaccggcctgttctacgtgccggccaaccactggaaggaagactactggaccgaggaggtcagctatacgaagggcagcgcctaccttggcatgggcttccggatcaagcgcatgtacgacgaccacgtcggcagcctgcgcgccatggacccggtcagcggcaaggtggtctgggaacacaaggaacacctgccgctctgggccggggtgctggccaccgccggcaacctggtgttcaccggcaccggcgacggctacttcaaggccttcgacgcgaagagcggcaaggagctgtggaaattccagaccggcagcggcatcgtctcgccaccgatcacctgggaacaggacggcgagcagtacctcggcgtgaccgtcggctacggcggcgccgtgccgctgtggggcggcgacatggccgacctgacccggccggtggcccagggcggttccttctgggtattcaagctgcccagctgggacaaccgcaccgccagccgctga

SEQ ID NO: 321296 - DNA, 438 bp, Pseudomonas aeruginosa
atgaacaagaacaacgccttgcgcggcctgctggtgctggccggtctcagcctctcgagcctggcgctggcccacggcgatgtgaccccccaggcagtggacaccaagggactcgagccgctgggcaaggaatggcgcgacaccaacccctaccgcaagccctacgccaagcacgacctcgccgtcgagatcggcgcctccgcctacaaccagaactgcgcgcgctgccacggcctggaagccaagtccggcggcatcgccccggacctgcgcctgctggagaccggcgccgagggcgacgaatggttcaaggagcgggtcatcaacggcgcggtgcgcgatggcgcggtgtacatgccgaagatggccgacttcatcagccaggaaggcctctgggcgatccgcagctatctggaaagcgtgcacgtcgacgagtga

SEQ ID NO: 321297 - DNA, 888 bp, Pseudomonas aeruginosa
atgctcgccgccggtgatgaagatcttggtcccgctgatcttgtaggagccgtcggcctgcggctcggccctggtgcggatgatgcccaggtcggtgccggcatgcggctcggtcaggcacatggaaccggcccagataccggcgtacatgttcggcaggtacttgtccttcagttcgtcgctggcatgggcattgagcgccaggcaggcgccggcggtcagcatcggatacaggccgaacgacaggttggccgagttgaccagttcctcgacctgcgccgagatcaccttgggcatacccatgccgccgtaggtcggatcaccgccgacgccgacccagccgccttcggcgtaggtccggtaggcctcggggaagccggccggggtgctcaccgcgccagcgttccactggcagccttcctcgtcgcccggacggttcagcggggcgatggtaccggcggtgaccttgccggcctcttcgaggatcgccgcggcggtctcggcgtcgaccacttcggccagcgccggcagttgcgcccagagccgggagacctcgaacacctcattgaggacgaagcgcatgtcgcgcagcggagctttgtaatcagccatgtggggaatcctcgatcgtaccgatcgccggccgggggccagcggcaacaaaatggaggcacgaaaggcgtgccgcggccgagtctacaccaccaacatttcggacttgtagcgtcacgtcgtgacctgaaagtctatatcggtcttctatgcgacaggcatgagaaagcccgcttttcgcgggctcgagcgagttcgccgggagtccgacgggcccggcgggtgcgggagaaaccgggggaagaagcgccgcgcccctgccccggcagccgctag

SEQ ID NO: 321298 - DNA, 1797 bp, Pseudomonas aeruginosa
atgccggaatacaaggctccgctgcgcgacatgcgcttcctgatcgatgaggtattcgacttccatgggcgctaccaggcgctcggcgccagcgacgcgaccccggacatggtggcggcgatccttgatgaagggtcgaaattctgcgaacaggttctggcgccgctgaaccgctccggcgacgaagagggctgccacttcgacaacggcgtggtgaccacgcccaagggtttcaaggaagcctatgcacagtacgtcgagggtggctggaacggtgtcgccagcgatcccgcgtacggcggccagggcctgccgcactcgctgggtctgctgctcagcgagatgatcggcgccagcaatgtctcctggggcatgtacccgggcctgacccgcggcgccatgtcggcgatccacgcccacggcagccaggcgcagaaggacctctacctggcgcggatgaccgccggcacctggaccggcaccatgtgcctgaccgagccgcactgcggcaccgacctgggcatcatcaagacccgcgcggtgccgaacgccgacggcagccatgcgatcagcgggacgaagatcttcatctccgccggcgagcacgacctgagcgagaacatcgtccacctggtgctggccaagcttcccgatgcgccggccgggaccaagggtatctcgctgttcatcgtgccgaagttcctacccgacgccgaaggtaacgtgggcgcgcgcaatgcggtctcctgtggctccatcgagcacaagatggggatcaaggcctcggccacctgtgtgatgaacttcgacggcgccaccggctacctgatcggcgagccgaacaagggcctgcactgcatgttcaccatgatgaaccacgcccgcctgggcaccggcatgcagggcctgtgccttggcgagaccagttaccagggcgccgtgcgctacgcccgggagcgcttgcagatgcgctcgctgaccgggccgaaggcgccggacaagccggccgacccgatcatcgtgcaccccgacgtgcggcgcatgctgctgaccatgaaggcgttcaacgaaggcaaccgcgcgctggcctacttcaccgcccagttgctcgacaccgagcacctgtcgcaggacgccgccgagcgcgagcgggccgccgacctgctggccttcctgacaccgatctgcaaggccttcatgaccgagaccgggcaggaggtgaccaacctcggcatgcaggtctacggcggccacggctacatccgcgagtggggcatggagcagttggtccgcgattgccgcatcgcacagatctacgaaggcaccaacggcatccaggccctcgacctgctcggccgcaaggtactgggcagccagggcaagctgttgcgcggtttcaccaaactggtccaccagttgtgccaggcccaggccgagcatccgcaactgaagggacaggtcgcgcaactggcggcgctgaacgcgcagtggggcgaactgacccagcaggtgggcctggcggcgatgaagaatgccgacgaagtgggcgccgcctcggtggactacctgatgttctccggctacgtgaccctggcctatttctggttgcgcatcgccctggtggcgcgcgagaagctggatgccggcagcggcgaggccgcgttctacgaagccaagctggccaccgccgacttctacttcagtcgcctgctgccgcgcactgcggcgcacgccgcggcgatccaggccggcgcggcgggcctgatgagcctgtcggcggagcagttttcgctctag

SEQ ID NO: 321299 - DNA, 1806 bp, Pseudomonas aeruginosa
atgcctgattacaaggcccccttgcgtgatatccgtttcgttcgcgacgagctgctgggctacgaagcgcactaccagagcctgccgggcgccgaagacgcgactcccgacatggtcaacgccatcctcgaggaaggtgcgaagttctgcgaacaggtgatcgctccgctgaaccgcgtcggcgacctggaaggctgcacctggagcgccgacggcgtgaagaccccgaccggcttcaaggaggcctaccagcagttcgtcgaaggcggttggccgagcctggcccatgacgtcgagcacggcggccagggtctgccggaatccctcggcctggccatcagcgagatggtcggccaggccaactggtcctggggcatgtacccgggcctgtcccacggcgccatgaacaccctgcatgcccacggcaccgccgagcagcaggcaacctacctgaccaagctggtctccggcgagtggaccggcaccatgtgcctgaccgagccgcactgcggcaccgacctgggcatgctgcgcaccaaggccgagccgcaggccgacggtagctacaaggtcaccggcaccaagatcttcatctccgccggcgagcacgacatggccgacaacatcgtccatatcgtcctggcccgcctgcccgacgccccgcagggcaccaagggcatctcgctgttcatcgtgccgaagttcctgcccaacgccgaaggcaacgccggcgagcgcaacgcggtttcctgcggttccatcgagcacaagatgggcatccacggcaacgccacctgcgtgatgaacttcgacgccgccaccggcttcctgatcggcccgccgaacaagggcctgaactgcatgttcaccttcatgaacaccgctcgcctgggtaccgcgctgcaaggcctggcccatgccgaagtcggtttccagggcggcatcgcctatgctcgcgagcgtctgcagatgcgctcgctgaccggtccgaaggcgcccgagaagcccgccgacccgatcatcgtgcatcctgacgtgcgccgcatgctgctgaccatgaaggccttcgccgaaggcaaccgcgcgatgctgtacttcgccgccaagcaggtcgacatcgtccagcgcagccaggacgaagagcagaagaaagccgccgactcgatgctggccttcctcacgccgatcgccaaggcgttcatgaccgaagtcggcttcgagtccgccaaccacggcgtgcagatcttcggcggccacggtttcatcgccgagcacggcatggagcagaacgtccgcgacagccgcatctcgatgctgtacgaaggcactaccggcgttcaggccctcgacctgctgggtcgcaaggtgctgatgacccagggcgaggcgctgaagggcttcaccaagatcgtgcacaagttctgccaggccaacgaagccaacgaagccgtcaaggaattcgtcgctccgctggcacagctgaacaaggagtggggcgacctgaccatgaaggtcggcatggccgccatgaaggatcgcgaggaagtcggcgccgcttcggtggactacctgatgtactccggctacgcctgcctggcctacttctgggccgacatggcgcgcctggccgccgagaagctggccgccggcaccggcgaggaagccttctacaaggccaagctgcagaccgcgcgcttctacttccagcgcatcctgccgcgtacccgcgcccacgtcgccgccatgctgtccggcgccaacaacctgatggagatggccgaggaagatttcgccctcggttactga

SEQ ID NO: 321300 - DNA, 231 bp, Pseudomonas aeruginosa
gtggaaatttccggcaacgctttcgtcagtggcctcaacgcggtgcagtcgggcagcgcccgcgtcgcccaggccggcagcgagatcgcccgcaataccgtggaggcccgttcgccccaggccgagcagatggtcgaactgacccgcggcaagctcgaggcgcagagcggcgcccgggtcatcgaggtagccgacgagaccctcggtaccctgatcgatacccacgcctga

SEQ ID NO: 321301 - DNA, 687 bp, Pseudomonas aeruginosa
atgccggcgttcttcgtcaccggtaccgacaccgagatcggcaagaccaccatcgccgccggcctgctccacgcggcccggagtgccggcctgagcaccgccgcggcgaagccggtggcctccggctgcgagcccacggcgcaaggcctgcgcaatggcgacgcgttggtgttgctcggccagtgctcgctggcgctggcctacgagcaggtcaacccgctggccttcgcaccggccatcgccccgcacctggcggcgcgcgaggctggcgtcgaactgagcgccgcacgcttgcacgaggcggtgcgcgaggtgctggcgctacaggccgacttcaccctggtggagggcgccggcggatggcgcgtgccgttgctgggccgcgagaacctgtccgacctggcgcgcctgctggcgctgccggtggtgctggtggtcggcgtgcgcctgggctgtatcaaccatgcgctgctcagcgccgaggcgatcctgggcgacggcctggcgctggccggctgggtggccaacgtcgtcgacccggctacctcgcgcctggaagagaacctggcgaccctcgccgaacgcctgccggcgccctgcctgggtcgggtaccgcgcctggaggaagccactcccgcggccgtggccgcgcacctcgacctgcggcccctgggtatcgggctataa

SEQ ID NO: 321302 - DNA, 825 bp, Pseudomonas aeruginosa
atgcctgacgattcctcgccgctgctggcgccccatggcgttgccgcgctgcccgacaagcgccaggtcgccgcgtcgttttcccgcgcggcggccagctacgacgcggtggccgaactccagcgcggcgtcggtgagagcctgctgtcggcattgccggaaggcttctcgccgcgccgctgggtcgatctcggctgcggcaccggttatttcagccgggccctggaacgacgcttcggtgcggccgagggcctagccgtggatatcgccgaaggcatgctgcggcatgcccgcgcgcgcggcggcgccagccatttcatcggcggcgacgccgagaggctgccgttgcgcgacggcagttgcgacctgctgttctccagcctggcgatccagtggtgcgccgacctcccggcggtcctggccgaggcgcggcgggtcctgcggccgggcggcgtgctggcgttcagcagcctgtgcgtcggtaccctgggcgagttgcgcgacagttggcgggtggtggacggcttcgtccacgtcaatcgcttccgcgccttcgccgactacctgcaacacgcggccggcagcggcctgctgccgctgaccctgcgccacgaggaccggctcctgcatttccccgacctgcgcagcctgacccacgaactcaaggccctgggcgcgcacaacctcaaccccgggcggcccgacggcctgaccgggcgccagcgcatccgcgcgctggtcgccgcctacgagcgtttccgccagcccgaggggctgcccgctacctaccgcgtcgtcttcggcgtgctgcgcaaggattcctga

SEQ ID NO: 321303 - DNA, 723 bp, Pseudomonas aeruginosa
atgcgtgaccacctgatcctgttgccgggctggggcctgggcagcgcaccgctggaaccgctgcgcgacgcgctgcacgagcgcgagccgcacctgaacgtgttgatcgagccgctgccgtcgctggacgccgccgccgactggctcgacgaactcgacgataacctgccgcgcgatagctggctggccggctggtcgctgggaggcatgctcgccggcgaactggcggcgcgccgcggcgacgattgccggggactgctgaccctggccagcaatccgtgcttccgcgtgcgcgaggactggccgaacgcgatgccggcggaaaccttcgaggacttcttcgaggctttcctgctcgaaccgcacctgacccgcaagcgtttcaccctgctggtcagccagggtgcgcgcgaccctcggaccctggcgcggcaactgcaggtggcgctgccgcaactggagcgcgaggcgctggtcgccggcctgcagttgctcggccaactggatacccgggccgccctggaaaacttccgcgggccgcaattgcacctgttcgccgaagccgatgcgctggtgccgctggccgccgccgaggccctgctcgagtggctgccggacgtcgaggtctcgaccctggcggccagtcacggcctgccgctggaatgcccggacgaggtggccggcgcaatcctgagattccttcgcgagggtgacgatgcctga

SEQ ID NO: 321304 - DNA, 1206 bp, Pseudomonas aeruginosa
atgtccttcgatctcgcttcccgcctcgccagccggcgcgcggaagacctctaccgccagcggccgctgctggagtcggcccagggcccggacgtcgtggtcgacggccagccgcttctggccttctgttccaacgactacctcggcctggccaaccatcccgaggtgatcgccgcgctgcgcgccggcgccgagcgctggggcgtgggcggtggcgcctcgcacctggtggtcggccacagcggcccgcaccacgaactggagctggccctcgccgaattcaccgggcggccccgtgcgctgctgttctccaccggctacatggccaatctcggcgcggtgaccgcgctggtcggcaagggcgacacggtgctggaggaccgcctcaaccacgcttcgctgctggatgccggattgctctccggcgcgcgtttctcgcgctacctgcacaacgacccggcaagcctcgccgcgcgcctggacaaggccgagggcaataccctggtggtcaccgacggggtcttcagcatggacggcaatctcgccgacctgccggccctggccgccgtcgcgcaggcccgcggcgcctggctgatggtcgacgacgcgcatggcttcggcccgctgggcgccagcggcggcgggatcgtcgaacatttcggcctcggccaggagcaggtgccggtgctgatcggcaccctcggcaagggtttcggtaccgccggcgccttcgtagcgggcagcgaggaactgatcgagaccctgattcagtacgcccggccctacatctacaccaccagccagccgccagcggtggcctgcgccaccctgaagagcctggagctgctgcgccgcgaaagctggcggcggcaacacctggcggcgctgatcgcccgtttccgccatggcgccgaggcgcttggcctgaccctgatggacagcttcacgccgatccagccgatcctggtcggcggcagccgccaggccgtggccctggccggcatgcttcgagcccgtggcatcatggtcggcgcgatccgcccgccaaccgtgccggccaacagcgcgcggctgcgcgtcacgctgtccgccgcgcacagcgaagcgcaggtcgaccgcttgctcgaagccctcggcgaaagctggcgacagctgtcgtctagccttctggcagagatcgaagccgaggagggagacgatgcgtga

SEQ ID NO: 321305 - DNA, 1059 bp, Pseudomonas aeruginosa
atgagtgcaaccgcttccgtcgccacccgtcacgactggtccctcgccgaagtccgtgccctgttcgagcaaccgttcaacgacctgctgttccaggcgcagacggtgcatcgcgcgcacttcgacccgaaccgcgtgcaggtctcgacgctgctgtcgatcaagaccggcgcctgccccgaggactgcaagtactgcccgcagtccggccactacaacaccggcctggacaaggagaagctgatggaggtgcagaaggtcctcgaggcggcggccgaggccaaggccatcggttcgacccgcttctgcatgggcgctgcctggaagcacccgtcggccaaggacatgccctacgtcctggagatggtcaagggcgtgaagaagctcggcctggagacctgcatgaccctcggtcgcctgacccaggaacagacccaggcgctggcggacgccggcctcgactactacaaccacaacctggatacctcgccggagttctacggcaacatcatcaccacccgcacctacagcgagcgcctgcagaccctggcctacgtgcgcgaggcggggatgaagatctgctccggcggcatcctcggcatgggcgagtcggtggacgaccgcgccggcctgctgatccaactggcgaacctgccggagcacccggagtcggtgccgatcaacatgctggtgaaggtcaagggcacgcccctggcggaagagaaggacgtcgatcccttcgacttcatccgcaccctggcggtggcccggatcatgatgccgaagtcccacgtgcgcctgtccgccggccgcgagcagatgaacgagcagatgcaggcgctggccttcatggccggggccaactcgatcttctacggcgaaaagctgctgaccacgaagaacccgcaggccgaaaaggacatgcagttgttcgcccgtctcggcatcaagccggaagagcgcgaagagcacgccgacgaagtgcaccaggccgccatcgagcaggcgttggtggaacaacgcgaatcgaagctgttctataacgccgcttccgcctga

SEQ ID NO: 321306 - DNA, 669 bp, Pseudomonas aeruginosa
atgtccgcccatgccgatctctcgttcgacggccagaaccgtttcgtgatgaaaggcaagcgcctgccgatcacgctggtcaacgagggcaaggagccggccctggcggaaatctccctggattggggtaccgacggcaaggggcaggcgctgcccttcgccgtgtccaggccgctgctccgcctgggcgccggccagcgggccaaggtggaggtgctctaccagggccagggcctgcccaccgaccgcgagacctacctgctgttgagcgtgctggacgtgccgcacgcgcccagtactcccgagaccctgcagatcgccctacgccatcgcttcaagctgttctatcggccgcccctggaagccaccgtcgagcaggcgaacgagggcgtgacgtggacgctcggcaccagcggcaatccgaaggcacacaatccttcgccctaccacatcaccttcagccagttggagttcctcgacgcatcggagcggagctgcggcgaagccatcgaacacctgatgctggcgcccttctccaatcaccagttcgacatcgccgcctgccatcccgacaaagtgcgttacgcgatcgtcagcgacggagggaacctacacccttatcacggcgcattgaaatcaggcgtagagaccaacgccaaacacccatga

SEQ ID NO: 321307 - DNA, 1008 bp, Pseudomonas aeruginosa
atgaatgcaattacccgaacactacttgtgggaatgctggttgcgttggcgcagaaaggttatgcgctgacctgcgaaagagcggacaacaaggcaacgatcgactatgtcaacatcgacacgagcatcgccgtgccttcggctctgcccaaggacaccgtgctctggcgctctccaacctacgatttctccgtcaggtgttaccaggagcgcgaaaacaccggacctgaggacgtctatttctatctcagtccggacggccagggcgcattgggctcggacctggaggtgggcatcaacctgaacggcgaggacctccgttgttcctcgctccccggctgccggcagaagataggcatgcatttcgatggttgctggacaggaggacgggggggatgcgaaggcatggctcagaccaagcaggtccgtttccagatcttcctctccaaactcgccgcccccactcccggcaaggaaggtcccatcacgggcgtaaactcctacgcactgttccagttcgatggagtgggaggcatcaacaacctggggggccggaacctacgtatgtatgcccttggcatgaacaacctccgctacgtcgcctgcacctccacgctaagcatttctccaaagaccctcaacttccagatactgcaatcgcaatttgccgcacagaatctggtcatcaaagaacttcccttcagcatcaccgccaataagagctgcaacagcgcctatggcctgaacgctatgttcattcccgccagcaataccaccctgtcgagcacggatacgttgctggccaaggacaatccaacagtgggcatcaggctcctcaatgaggatcgcagcgtcatcagtatcggtaaggagttcgagttcattccctacgccccaacccagacgacggtgacgaagaactttctcgcccaactgaggtggatgacgagcagacccattctaggcccgttcaacgccaccgccgcgatagaggtctattacaagtga

SEQ ID NO: 321308 - DNA, 1083 bp, Pseudomonas aeruginosa
gtgaccgctaggccgcacctgcaacaggcgcggcatgctctgcaaaaacaagaatcgattaacaacctgcagaagaaccccatgaatgccttcatccgttacatgcttgtcgcaatgctgctcgtcctgtcgcagaaaagcttcgccttgatgtgctggaaatcggacaacaagcaaaccgaagattatgtctacatcgatacgagcatcgctgttccatcggtcctccccaaggacaccgtactctggcggtctccgaactactccatatcgatcacttgcttccaggatcgcgactgggggccagagcaggtctatttctacctgagtccaaccggtcagggcgcgctgggttcggacctggaggtgggcatcaacctgaacggcgaagacctgcgctgctcgacactcgacaagtgccgaaaggagatcggcatgcacttcgatggttgctggacgggacgaggttgcgaaggcagggcgaagaagatgaccgtcaacttcaacttctttctctccaagcgggcaggtcccagtaccggtaaggaaggtcctatcacaggggtaaacgcctacccgattttccagttcgatggcgagagcgctatcaataacataggggggtacaacttccgcatgaccctccacggcttgaataaccttcgctacgtcgcctgcgcgtccacaatcagcctttctccgaaaaccgtcgacttccaaagcctgcaggcctatttcgccagccgggaccagatcctcaaggaacttccgttcagcgtcaccgccaataagaactgcagcagcgcctatggcctgaacgcgatgttcctcccctccggcaacacctccctgtggggttcggacactcttttggataacaacaacaagtccgtgggaatccgacttctcaagcaggaagaccgcagcatcatcgatatcggcaaggagttcgtactggtgcccaatagccagaaccaattggtggtcataagaaacttcctcgcccaggtgaggtggatgacgggcactccaacgccaggccccttcaacgccaccgccgcgatagaggtctactacaagtga

SEQ ID NO: 321309 - DNA, 978 bp, Pseudomonas aeruginosa
atgtcgattaaggtgctcaagcccggcctcgctacctcggtgcaggacgccggccgcgaaggccactatcacctgggcatcccgccgtccggcgcgctcgaccagtatgccctgcgcgctgccaacctgctggtgggcaacgcaccgaccgccgccgtgctggagtgcgcgctgctgggtccgcagctggagttccagcgcgacgccctggtggccgtgtgcggggcgcgcatgacgcctcgcctggagggcgcggagatgccgttggatacttccttccgggttcgcgccggccaggtcctggggttcgatttcatccgtgccggcgcccgtggctatctcgccatcgacggcggcatcgcggtacccgaggtgctgggcagccgttcgacctacggtctgggggcgatcggtggcttgcagggacgacggctggcggagggcgacctgctgcccctggggcctgcctcgccctctgccgtggagggcttggcgctgccgcgttcgctacaggtggaggtcggcggcgaggtgagcttgcgggtggttcccggactctacgtccatcgcctgactcccgacgcggtcgagcgtttcttcgccgagacctggtccgtcggctcggaggcggaccgcaccggctaccgcttcaagggcggcacggcgctccggttcgagccgcgcgaacagccattcggcgcaggctcggacccgtccaacatcgtcgacgcctgctatcccatcggctcgatccaggtaccgggcgggctcgaacccatcgtcctgcatcgtgatgcggtgtccggtgggggatatgccacgctgggcacggtgatcagccccgacctgaaccggctggcgcagatgcaaccgaaccagaaggggcgtttcgtcgccgtcagcctggaggaaggtctcgaggcgcgtcgccgttacaactggcaagtgcaacgactccagcacttcttcctgcgctga

SEQ ID NO: 321310 - DNA, 879 bp, Pseudomonas aeruginosa
atgcatgccaacatccgctacagcttcggcggcgacgagcacctgttcgccgaggtcgccgagtccatgtcgctggaagccttcttccgcggcatggcgatcacccgcgccatcgagaccctgcaattgcccggggtgctcgacgtatgcctggccaacgcctcgttccaggtccgcttcgaccccgaccggctggccccgcaggcgctgctggagaccgtacgcggcctggaggtcgaggcggtcgccgcgcgcagcatcgagacgcgtatcgtcgaagtgccggtgttgtacaacgatccctggacccacgagaccctgatgcgcttccgcgaccgtcaccaggacccggactccaccgacctcgagtacgctgcgcggatcaacggctacgccgacgtgcaggcgttcatccaggcgcacagcggcacgccgtggttcgtctcgatggtcggtttcgtcgccggcctgccgttcatgtaccagatggtcgagcgcgagcggcagttgcaggtgcccaagtacctgcgtccgcgcatcgacacgccgaagctgaccctcggccacggcggttgcttcggctgcatctattcggtgcgcggtgccggcggctatcagatgttcggcgtgactccggcgccgatcttcgatccccgccagggcctgccctatctcgaggaatctatggtgttcttccgcgctggcgacatcgtccagttccgccccatcgagcggaccgaatacgagcgcatggcggccgaagtcgaagcgggcacattcgacctgcgcatccgcccggtgagtttcgatctcgacgcgttcctcgccgatccgcgaggctgcacgcaacatctgcaggaggtgctgtatgtcgattaa

SEQ ID NO: 321311 - DNA, 1377 bp, Pseudomonas aeruginosa
atgcacaagcgactgaacaagctgctggtggccaatcgcggcgagatcgccgtgcgcatcatccgcgccgcgcaggcactgggcattcccacggtagcggtgtgcagcgaggcggatcgcgattcgctggccgcgcggctggccgatgaggtacgcctgatcggccctgcgcgggccgaccggagctacctggatatcgaggcgattctcatggcggcgcgggaaaccggtgccgactcgatccatcccggctacggtttcctctccgagaaccccgccttcgccgaagcggtgcaggcggccggcctggtcttcgtcggtccggaggcgcagaccatccgccgcatgggcgacaaggccgaggcgcggcgtaccgcgatggccgccggggtgccggtggtgccgggctcgcccggcgaactgggcgacctcgacgcggcgctggcttgcgccgaagaggtcggctatccgctgctggtcaaggcctccgccggcggcggcgggcgtggcatccgtatcgcccacgacgccgacgaactgcgtcgggaattccccatcgcccagcgcgaggcgcaggccgccttcggttcgccggcggtgtacctggagcgcttcatccgccaggcgcggcacatcgaagtgcagatcctcggcgatggcgagcgcgcggtgcatctgttcgaacgcgaatgctcgctgcagcggcggcgccagaaggtcttcgaggaggcaccttcggcggcgctggacggcgcgcagcgccaggccctctgcgagagcgcggtgcgcctggcgcagagtctcggctatcgtggcgcgggcaccctggaatacctgttcgacgcgcacagcggcgagttcttcttcatcgagatgaacacccgtatccaggtcgagcatccggtcagcgagatggtcaccggcatcgacctggtccaggccatgctgcgcatcgccgccggcgaggcgctgccctggcgccaggaggacattcgcctgaacggcgcggcgctggagatgcggatcaacgccgaagacccggcgcgcaatttcttccccagccccggcaccgtggagcgcctggaatggccgcagggcgagggcgtgcgagtggacagccacctgtatcccggctaccgggtgccgccgtactacgattcgttgctggccaagctgatcgtccatggtcgcgaccgcgacgaagcgttcgcccgcgcgcgccaggcgctggagcgcaccgtgctggccggcatggccactaccctgccgctgcaccgctggctgctcgccgatgcgcgggtacaggccgcgcagttcgataccgctaccctggaaacctggctcgccgagcggaccgccgccgcgcaggaggtttga

SEQ ID NO: 321312 - DNA, 249 bp, Pseudomonas aeruginosa
atggccgaacataacgtgcagtcccccttgcccggcaccttctatcgcaaggccagccccgacgcgccgccctacgcggaggtcgggcaggcggtcgaggccggcagcgtgatcgggctgatagaggtgatgaagcagttttccgaagtgcaggccgggcaggccggcatactccaggcgttccacgtggaagatggcgaggccatcgagccgggccaggtgctggcggtgatcgccagcgctacctga

SEQ ID NO: 321313 - DNA, 759 bp, Pseudomonas aeruginosa
atgactgaagtcgacctcaattccgacatgggcgaaggcttcggcccatggaccatcggcgatggcgtggacgcggcgatcatgccgctgatcagcagcgccaacatcgccaccggtttccatgccggcgacccgagcagcatgcgccgcaccgtggagatggccgccgagcatggcgtggccatcggcgcccatccgggcttccgcgacctggtcggcttcgggcgtcggcacatcgccgcgccggccatcgagctggtcaacgacatgctctaccagcttggcgcactgcgcgaattcgcccggctgcagggcctgtcgctgcaacacgtcaagccccacggcgcgctctacatgcacctggcgcgggacgaggtcgccgcgcgcctgttcgtcgagaccctgcaacgcctggaaccggaactgctgctctattgcatgcccggttcggccacctggcgcatcggccgggaactgggccagccgctggtgcgcgagttctacgccgaccgcgactacgaccgcagcggctccatcgtcttcacccggcgggtcgccgccctcgatccgcagcaggtcgccgacaaggtcctgcgcgcctgccgcgagggcaaggtgcgcaccgtcgagggcgaggacctcgacatcgccttcgactcggtgtgcatccacagcgatacccccggtgccctggagctggtcgccagcacccgtgcgcgcctggagggcgccggcatccgcatcaaggcgccgcgttga

SEQ ID NO: 321314 - DNA, 918 bp, Pseudomonas aeruginosa
atggccctgaccctccgccaggttcgctacttcatcgccaccgccgagttcggccagatatcccaggccgccatccacctgaacatctcgcagtcggcggtgaccagcgcgatccaggaactggagggcatgctcggcgtcgccctgttcacccgcacggcccagggcatgaacctgaccgacagcggccggcacttcctcaaccacgcctattcgatccagcgcagcgtcgacgacgcgctcaacagcccgcaaccggacacccgggtcgaaggcaccctgaaggtcgccgccagctataccgtgatgggctatttcctcccccaccacctgcaacgcctggcgcagtggtacccggaactggagctgcaactgttcgaggacgagcgcgccagcatcgagcgcggcctcctcgacggtcgctacgacatcgccgtgctgctcaccggcaatctcaccgagcccgggatcgccgccgaaaccctgttcaactccgagcgacggttgtggctgcccagccgccatccgctgggcgagaaggccgacctgggccttgccgacgtggccggcgagccctacatcatgctcaccgtcgacgaggccgggcagagcgcgctgcgctactggcaacagagcggccaccggccgcaggtgatcctccataccagttcggtggaagcggtgcgcagcatggtcgccaacggctccggcgtggccatcctctccgacctggtgtaccggccctggtcgctggaaggcaaacgcatcgagacgctatcgctggtcgacccggtgccgtcgatgagcgtcggcctggcctggcgccgcgacaccgaagcgagcgccgggatgcgcgcgttccgcgaatacttccgccagtcgttcctcgctccgcagcaaagcagcagccggcgctga

SEQ ID NO: 321315 - DNA, 294 bp, Pseudomonas aeruginosa
atgggtacagaaggctttttcgacggactgggcgagatgctgggcagggcgatccgcttcgtggtggacctgctctccggcctgctgggcggcatctggggcgccatggacgacttcctccacggcctggccagggccatcggcatggacgcatcgctgttcagcttcgtcttcctggtgctcggcctgttgctgctctacagcggtatacgcgccttcatgcgccgctcgatagtcggcggggtgatctggacggtgctcggcctgatcgtcatgagctggctcatccactga

SEQ ID NO: 321316 - DNA, 726 bp, Pseudomonas aeruginosa
atgtcgttcccgcttcgtcctctcactcgctggcttttgccgccgccggcctgcctgctctgcgccgcccgcagcgaccagccgccccgcccactgtgccgcgcctgtgccgccgacctgccctggtcgcgccagcagtgccggcgctgcgccctgcccctgccgctggacggcgaggtgtgcggcgagtgcctgcgccgcccgccggcctatgaacaggcgatcgcgccctggcgctacgcctttccgctcgacagcctgatcaaccgcttcaagcaccaggcggcctggccgctggggcggctgctcggcgagttgctggcggaacacctgcggcaactctacgccgaaggcctgccgcgcccggcacgcctgctgccggtcccgctggcgccacggcgcgaacgtcgtcgcggcttcaaccaggcgcaacagctcgccgagcgactggctggcgagctggacctgcgctgcgatccgcacagcctgcggcgagtgctggatactccggcccagcagggactggacgcgacggtgcggcggcgcaacctgcgccacgccttcgccctggcgcccgccagcgatgttcgcgggctgcacctggcactggtggacgacgtgctcaccaccggggccaccgccgagcgcctttcccgcctgttgcgccgggcgggcgccgcgcgggtcgacgtctactgcctggcgcgcacgccgaagcccggctga

SEQ ID NO: 321317 - DNA, 321 bp, Pseudomonas aeruginosa
atgcgcgcactgctggtcgcggcctgcctgttgctcggcggttgcagccatttcgccgaagacgactggctgggcgaagacaaagccctgcatttcgccagttccgcggcccttgccgcggcgggcatgcagatggcccacgaccgcggcctgcgcggcgctcgccaggcacgcttcggcctgagcgtctcgctcgccttcggcgtcggcaaggagttctacgacagccgttccgccggcagcggctggagctggaaggacctcgcctgggacctggccggcgccgccgccggctacggtctctaccaggccgccgagtga

SEQ ID NO: 321318 - DNA, 759 bp, Pseudomonas aeruginosa
atgtccgcactctccactctcgcccagcacgtcacccgtcgcccgcaacgcatcgccctgctcgcgcagatcgccgaactgggctccatcacccgtgcggcgaaggccgtgggcatcagctacaagggcgcctgggacgccatcgacgaactgaacaacctggccgagcgtccgctggtcgagcgtagcgtcggcggcaagggcggcggcggcgcccggctgaccgccgagggcgaacgcctgctggctctctaccggcgcctggaagccttgcaagcgcaggtgttgcaggccgcggaagacgccgaggacctcaacctgatcggccgcctgatgctccgcaccagcgcacgcaaccaattgcacgggcgggtcctgtcgatccatggcgaaggcttccacgaccgcatcgccatcgagctgccaggccagcaacgcatcgaggcgctgatcacccgcgccagcaccgagcaactcgaactcggtcgcggccgcccggtactggcgctgatcaaggccggctggctggacgtcgggctggaaccgcgcgaggaccagccgaaccagttgcacggcaccctggaggaaatcctcgcggccaaggccggtcccagcgaggtgcgcatcgccctgggcagcggtcttaccctctgcgcgctgctgtccggcgaacgcctggccagcctggggctgaagaagggccagaaggtgatcgcctccttcgatccagcccaggtcctgctcggcacgccgctgtga

SEQ ID NO: 321319 - DNA, 975 bp, Pseudomonas aeruginosa
atgtcccatcccttcgaccaactgacccccgacctcgtcctggatgccgtggaaagcctcggctatctcagcgacgcacgggtgctggcgctcaacagctacgaaaaccgcgtgtaccaggtcggcatcgaggacggcgagccgctgatcgccaagttctaccgaccggaccgctggagcgacgcggcgatccgcgaggagcacgccttctccgccgagctggcggaatgcgaggtgccggtggtggcgccgctgtcgcgcgacggcgaaagcctgttcgcattctccggcttccgcttcgccctgttcccgcggcgcggcgggcgcgcgcccgagccgggcaatctcgaccagctctaccgcctcggccagttgctcggccgcctgcacgcggtcggcgccacgcggccgttcgagcaccgcgaggcgctcgctgtggataacttcggccacgcctcgctggccaccctgctggaaggcaatttcatccccaggagcctgctgccggcctacgagtcggtcgcccgcgacctgctgaaacgcctcgacgccctgttcgccgaggtgccctaccagccgatccgcctgcacggcgactgccatccgggcaacctgctgtgccgcgacgaggtctaccacatggtcgatctcgacgactgccgcatgggcccggctctccaggacctgtggatgatgctcgccggcgagcgccacgaacgcctggcgcagattgccgaactggtcgacggctacaacgagttccacgacttcgacccgcgccagctaccgctgctcgaaggcctgcgcagcctccgcctgatgcactacagcgcctggctcgcgcggcgctgggacgacccggcgttcccgccgagcttcccctggttcggcagcgaacgttactggggcgagcaggtgctggtgctgcgcgagcaactggcggcgctggacgaggaaccgctgcgactgttctga

SEQ ID NO: 321320 - DNA, 897 bp, Pseudomonas aeruginosa
atggcgaccgccaacctccgtcggggctatgtcctcggcctgacggcttatgtgatctggggactgttcccgctctacttcaaactgctcgaacgcattcccgcggtggaaatcatcgtccagcgcgcggtctggtcggccctgttcggcgccgtcctgctgctgttctggaagcacccgggctggtggcgcgagctgcgccagaatccgcagcgcttcgtcgtgctggccgccagcggactgctgatcgccagcaactggatgacctatgtctgggcggtgaacaacggccacatgctggaagccagcctgggctactacatcaatccgctgatcaacgtgatgctcggcatgttgctgctcaaggaacgcctgcgtcccctgcaatggctggcggtggccctggcttcgctgggcgtggcgcagcaggtctggcaactcggcagcctgccctgggtgtcgctggtgctggccctgaccttcggcttctacggcctgatccgcaaaaaggcgccggtcgccgcgctgcccggactggtggtggaaacctggctgctgctgccgctggcgctggtctggttgctgtttttcgccgacgggccgaccagcgaaacggctttctggagcaccccggaagccctgtgggtggtcgccgcgggcccggtgacgctggttccgctggtctgcttcaacgctgcggcaaggcacctgccctacgccaccctgggcttcctgcaatacctggcgccgacgctggtcctgctacaggcgatcctgctgttcggcgagcatctggactccagccgcctgaccgccttcgctttcatctggctcgccctggccgtctacagcttcgacgcctggcgcagcctgcgccgccttccccagccgggctga

SEQ ID NO: 321321 - DNA, 516 bp, Pseudomonas aeruginosa
atggatcacctggtcctgaccgtgatcgccaccgaccatcccggcctggtcgagcgcatcgcccaatgcatcgcctcccacggcggcaactggctggaaagccgcatgtcgcggatggccgggcagttcgccgggatactgcgggtggccgtgccggcggaaggctacgacgaactggtggaagggctacagggcctgtccagccacggtatccgcgtgctcctggcggaaagcgggatcgagccggtatgcaactggaagcctatccacctcgacctggtgggcaacgaccgccccggtatcgtgcgtgacatcacccggctgctggccgagcacggggtgaacctggagagcctgtccaccgaagtgcgcccggcgccgatgagcagcgaaccgctgttccatgccgatgcgctgctggcggtgccgctgaccctgtcgctggacaccctgcgcgagcgactggaagacctggccgacgacctgatggtggaattggtgctggacgcgtcctga

SEQ ID NO: 321322 - DNA, 444 bp, Pseudomonas aeruginosa
atgcccgtccatgccgcatccctcgccgatctcgccgacctggttccgctgttttccgcctacctcgacttctacgaagtgccggcgccggaagagcaggttcgcgcattcctcgccgagcgcctgcgccagggcgattcgaccctgttcctggccagggatgccgaggcgcgggcgctgggcttcgtccaactctatccgctgttcgcctccctggcgctacgaccttcgtggctgctcagcgatctctacgtccgcccggaggcgcgtcgccggggtgtcggcgaggccctgatgaaccaggcccggggtttcgccgaaagcatgggcgcctgcggcctgcaactggagacggcgaagaccaaccacgccgggcagtcgctctacgagcgcctcggctatgtccgtgacgaacagttctacacttactggctgcagctctga

SEQ ID NO: 321323 - DNA, 2178 bp, Pseudomonas aeruginosa
atgactgaacgcgttcaagtcggtggcctgcaggtcgccaaagtcctgttcgacttcgtgaacaacgaagccatccccggaaccggcgtctctgccgacacgttctggaccggtgcggaggccgtgatcaacgacctggcgccgaagaataaagccctgctcgccaagcgcgacgaactccaggccaagatcgacggctggcaccaggctcgcgccggccaggcccacgacgcagctgcctacaaggccttcctcgaggaaatcggctacctgctgcccgaggcggaagacttccaggccggcacccagaacgtcgacgacgagatcgcccgcatggccggcccgcagctggtggtgccggtgatgaatgcgcgcttcgccctcaacgcctccaacgcccgctggggctcgctgtacgacgcactctacggcaccgacgtgatcagcgaagaaggcggcgccgagaaaggcaagggctacaacaaggttcgcggcgacaaggtcatcgccttcgctcgcgccttcctcgacgaggccgcgccgctggagtccggctcccatgtcgacgccacttcctacagcgtgaagaacggcgcgctggtcgtcgcgctgaagaacggcagcgaaaccggcctgaagaatgctggccagttccttgccttccagggcgacgccgccaagccgcaagcggtactgctcaagcacaacggcctgcacttcgaaatccagatcgacccgagcagcccggtcggccagaccgatgccgcaggcgtgaaggacgtgctgatggaagccgccctcaccaccatcatggactgcgaggactcggtcgccgcggtcgacgccgacgacaaggtagtgatctaccgcaactggctgggcctgatgaaaggcgacctggccgaggaagtcagcaagggcggcagcaccttcacccgcaccatgaacccggaccgcgtctacaccagggccgacggttccgaactgaccctgcacggccgctcgctgctgttcgtgcgcaacgtcggccacctgatgaccaacgatgcgatcctcgacaaggacggcaacgaagtgccggaaggcatccaggacggtctgttcaccagcctgatcgccattcatgacctgaacggcaacaccagccgcaagaacagccgcaccggcagcgtgtatatcgtcaagccgaagatgcacggtccggaagaagccgccttcaccaacgagctgttcggccgcgtcgaggacgtcctcggcctgccgcgcaacaccctgaaggtcggcatcatggacgaggagcgccgcaccaccgtgaacctgaaggcctgcatcaaggcggccaaggatcgcgtggtgttcatcaacaccggcttcctcgaccgcaccggcgacgagatccacacctccatggaagccggcgccgtggtgcgcaagggcgccatgaagtcggagaagtggatcggcgcctacgagaacaacaacgtcgacgtcggcctggccaccggcctgcaaggcaaggcgcagatcggcaagggcatgtgggccatgcccgacctgatggccgccatgctcgagcagaagatcggccatccgctggccggcgccaacaccgcctgggtcccgtcgccgaccgccgcgaccctgcacgccctgcattaccacaaggtcgacgtgttcgcccgccaggccgagctggccaagcgcaccccggcctcggtggacgacatcctgaccattccgctggcgccgaacaccaactggaccgcggaagagatcaagaacgaggtggacaacaacgcccagggcatcctcggctatgtcgtccgctggatcgaccagggcgtcggctgctccaaggtgccggacatcaacgacgtcggtctgatggaagaccgcgccaccctgcgcatctccagccaactgctggccaactggctgcgtcacggcgtgatcagccaggagcaggtggtcgagagcctcaagcgcatggccgtggtggtcgaccggcagaacgccagcgacccgtcctaccggccgatggcgccgaacttcgacgacaacgtcgcgttccaggccgccctggagctggtggtggaaggcacccggcagccgaacggctataccgagccggtcctgcatcgccgccgccgtgagttcaaggcgaagaacgggctgtag

SEQ ID NO: 321324 - DNA, 444 bp, Pseudomonas aeruginosa
atgaacgagccgggcagtttcatctggacgtggtacgggcaggatgagcatcgatgggtcatgctcagcgcagaggcgttcctggcgctcgatttcctggcccttgacggtgccatgcagagagagaccatcggcagttgcccgggctgctctacctggtcggagaaggtcgtgccgttgcacgagtggctcgaaggctgtccgggtcaccaggccgggagttttcgcgatgccttgaggcgtgtctgggcgctgtgcaacgagctgcccgaggaagcgctgggctgcttcgacttcgacatctatgcccaccccggatggcaggcggtacgtcgagaggcccgggaggcgctgcggcagaacggttgggacagcatccgtagccacgccgaggagctgcgcgacgactgttgggagcgtgtgcatggctacccgaagaaatga

SEQ ID NO: 321325 - DNA, 798 bp, Pseudomonas aeruginosa
atgggcaacctgtcttttctcgctaccagcgatggcgccagcctcgcctatcgcctggacggtgcggcggagaaaccgctgctggcgctctccaactccatcggtaccaccctgcacatgtgggatgcacaactcccggcactgacccggcacttccgcgtcctgcgctacgacgcccgtggccatggcgcctccagcgtgccgccggggccctataccctggcccggctgggcgaggacgtactggagctgttcgacgcgctggaggtacggcgcgcgcatttcctcggcctgtccctgggcgggatcgtcggccagtggctggcgctgcatgcgccgcagcggatcgagcggctggtgctggccaacacctcggcctggctcggcccggcggcgcagtgggacgagcgcatcgccgcggtgctgcaggccgaggacatgagcgagaccgccgcgggcttcctcggcaactggtttccgccggcgctgctggagcgcgccgagcccgtcgtcgagcgcttccgggcgatgctcatggccaccaaccggcacggcctggccggctccttcgcggcggtgcgcgataccgacctgcgcgcgcaactggcgcggatcgagcggccgaccctggtgatcgcaggggcgtacgacacggtcaccgccgccagccacggcgagctgatcgccacgtcgattgccggggccaggctggttacgctgtcggcggtgcatctgtcgaacgtcgagttcccgcaggcgttcgaaggcgcggtgctgagctttctcggcgcagcctga

SEQ ID NO: 321326 - DNA, 951 bp, Pseudomonas aeruginosa
atgcacgatttcaccctccacgacctccaatgcttcgacgcagtggtcgacgccggcggcttccaggccgccgcacagcgcctgcaccgctcccatccggcggtgttcgccgccgttgccaggctggagcgccagctcggcctggtgctgctggaacggggcggctaccgggtcggcctgaccgccgccggtcgctccttccaccagcgtgcccaggccctgctctacgaactggaagggctgcgtggccacgccgcgcacctggcccagggcgaggaaagcgagctgcgcgtggtactgggcgacctctgcccgccgcgcccggccctggcgctgctcgcagggttcttcggcagccagccgcagacccgcctgcaattgctgttcgaaaccgtcagcggcccgctggagcgcctgctggacggcgaggccgacctgatcctgcatcgcgtggacaagtccgacccacgcctggaatggctcgacctgtgcagggtcgggctggtcccggtcatcgcgccgggcctgctcggcgatcctccgccgcgaccggtgcgcccggaacaactgcgccccttcgcccagtgcgtgatgcgcgacagcgcccgccattctccgccgacggactatttcatgctcgccggcgcgcgacagtgcagcgtgccggaccagcgaacgaagaaagaggtgatcctccagggcctcggctgggggcacctgccggacttcctggtcgacgaggaactggccgacggccgcctgctcgctctggccgggccgcatctgccaggacgcagcgaagaggtggtggcggcgcgccggcgcgatcgcgcgcagggcccggtagcggaacgcctgtgggcgttcctgcgggacaacgctacagcgctacgggagagcggcatggataccggtggcgatgactcggcaggcgccaggcgtcctcggtga

SEQ ID NO: 321327 - DNA, 477 bp, Pseudomonas aeruginosa
atgactctcgaaatccgtcccgccgtaccggccgacgccgaacagatccttgccttcatcatcgaactggccgactacgagcgcgcccgccacgaggtggtcaccgatgtcgaaggcatccgccgcagcctgttcgccgaaggttcgccgacccgcgcgctgatgtgcctgagcgagggccggccgatcggctatgcggtgtatttctacagctactcgacctggctggggcgcaacggcatctacctcgaagacctctacgtcaccccggaataccgtggcgtcggcgccggtcgccggctgctccgcgagttggcccgcgaggccgtggccaacgactgcggacgcctggagtggagcgtgctggactggaaccagccggccatcgacttctaccgctccatcggcgcgctgccgcaggacgagtgggtgcgctatcgcctggatggcgaggcgttgcgcaagatggcggagtag

SEQ ID NO: 321328 - DNA, 966 bp, Pseudomonas aeruginosa
atgcatgaagtgcattcttatcatcggcaactgaataacatgcatcccctgctgcgccgcctcgatctcaacctcctgcttgtcttcgacgccctgtatcgccaccgcaacgtcggcaccgcagccagcgaactggcgatcagcgcctcggccttcagccatgcgctggggcgcctgcgccaggggctggacgatgagctgttcctgcgccagggcaaccgcatgcagccgacccagcgtgccgagcacctggccgctgcggtggccgccgccctgcgcgccctcggcgaggggctggaagagtggcggccgttcgtaccgggacagagccggcgcaccttcgtcttcgccgccaccgactacaccgccttcgccctgcttccgccgctgatgaaccgcctgcagcacagcgcgcccggagtgcgcctgcgcctggtcaatgcggaacgcaagctgtcggtggaggccctggccagcgggcggatcgatttcgccctcggctacgacgaggaacacgagcgcctgcccgaaggcatccaggcccatgactggttcgccgaccgctacgtggtggtagcgcggcgcgaccacccacgcctcgccggggcgccgacgctggagggctacctggccgaacggcatgcggtggtgacgccgtggaacgaggacagcggggtgatcgaccggctgctggcccgctccggcctgcgtcgcgaagtggcggtgcaactgccgacggtgctggcggcgctgttcctggcaggctccaccgatttcctgctcaccgctccgcgacatgccgcacgggccctggcggaagccgccggcctcgccctgtatcccgcgccgttcgacattccgccctacgtgctgcggctctacagccacgtccagcatgtcgggcgtgacgcccatacgtggatgatcgggcagttgaagggcctggatatttcccggacgggctga

SEQ ID NO: 321329 - DNA, 1728 bp, Pseudomonas aeruginosa
atgtccagcaccccgaagccgcccgcctcgccccgcgagttttctccctcgctgctcgacctcggcaccctggaaagcctcgacagcctgccgcgcgccggtcagcggagcgccgagttctccgcctcactgctcgacctgggcactccggccagtctcgactgcctgccacgcgccgggctgcgcgcagcggagttctcggcggcgcgcctggacctgggcactcccgccagtctcgattgcctgccccgcgccagccatcacgccggccccgaactgccgccgctgagcccgcgcctgtacagcgccgatctcgccccgaccaaggccgaagggcgccgctggggacgctacagcctgttcgcgctgtggaccaacgacgtgcacaatatcgccaactactccttcgccatcggcctcttcgccctcggcatgagcggcgcgcagatcctcgccgcgctggccctgggcgcgctgatggtctacgggctgatgaacctgtccggctacatgggccagaagaccgggctgccctacccggtgatgtgccgcatcgccttcggcatccacggcgcgcaactccccgcgctgatccgcgcggtgatcgccatcgcctggttcggcatccagacctatctcgcctccatcgtcctgcgcgtgctgctgacggcgatctggccggggctcgcagcctacgaccaggacgccatcctcggcctgtcgagcctgggctgggcgaccttcgtcgccatctggtgcgtgcaactgctgatcttcgcctacggcatggagatggtgcgtcgctacgaatccttcgccggaccggtgatcctgctcaccgtcgccgccctcgccgcctggatgtacctgcgcgccggcgcctccatcgcctggtccagcggcgaacccatgagcggttcgcagatgtggttgaagatcttcggcggcgcggcgttctgggtgaccctgtacggcaccatgatcctgaacttctgcgacttcgcccgcggctgcccggaccgccgcaccatcagcgtcggcaacttctgggggctgccggtgaacatcctgctgttcggcctgttcgcggtggtcctcgccggcgcccagttcaggatcgacggccagctcatccagagccccaccgacatcgtcgccgcgatccccgacaccctcttcctggtgctggccagcctggcgctgctgatcgtcaccgtggcggtgaacatcatggccaacttcgtcgccccggcctacgtactcaccaacctggcgccgaacctgctgaacttccgccgcgccgggctgatcagcgcgaccatcgcggtgctgatcctgccctggcacctgtacaacagccccggggtgatcctctacttcctcggcggcctcggcgcgctgctcggcccgctgtacgggatcatcatggtcgactactacctggtgcggaaaggccgggtgaacctgccggagctgtacaccgaaagccgcgccggcgcctatcactacgcgcgaggggtgaacccgcgggccatcgccgcgttcgtcccggcggcgatcatctccaccctgctggcattgttgccggcattcgccgagctatcgccgttctcctggttcttcggcgccggcctggccggcctgatccactacgccctggccaagcgccgcacggcctaccgcgaagtttccggcgaagcgatcgcggtggacagcgtgcagcactga

SEQ ID NO: 321330 - DNA, 570 bp, Pseudomonas aeruginosa
ttgccgaagaagtccaatgccgccgaacggatcgtccatgccaccgcctcgctgctggccagccgcgggtatttcggcaccgggctgagcgacatcatcgctcgcgccgaggcgccgaaaggctcgctctatcactatttccccgagggcaagccgcagatcgccagcgccgcgatcggcttcgtcgccgacgaggtggcgtccttcctcgaccgcgccgggacccaggccccccatgcgcgcaacgtcctccgccagttcaccgcgaccctgcgtggctggctggagcattcgcgtttcgaagaggcctgcccggtgctttccaccagcctgagcatcgacgccgagctggccccggtgcacgctgaatgccgccgggcgctccgcgcctggcacgccagcatcgagcgtgcgttgcgcgccgacggactggcggaaaagctcgccgcctcgcgcgcctggctgatcctcgcggcgctggagggggcggtcgcggtggcccgcgtcgagcggtcgttccaggcgctggatgcgatcgaggaagaattgcaggcgctactgccggcctag

SEQ ID NO: 321331 - DNA, 402 bp, Pseudomonas aeruginosa
atgaacgtccccgaagggttccagccgctgttccgcagcagtccgttgctcgacctgctcggtcctttcttctgccggcaggacgcccagcgccagttggtggtggcgctgcgcatcgacgaaaagcactgcaaccacggtggcaccgcccacggcggcctgctctcgaccctggccgacgttggcctcggctacgccatggcgttctcccgcgaaccgccgcagccgatggtcaccgtcggcctgcgcctggacttctgcggggtcgcgcgggtcggcgactggctggaggtgcatacccgggtcgacaagctcggccagcgcatggccttcgcctcggcccggctgcacagcggcgagcgcctggtggccagcgccagcggcgtgtttcatctgccctga

SEQ ID NO: 321332 - DNA, 750 bp, Pseudomonas aeruginosa
gtggccgaacctttgctgatcatcggttcctatctgtccccctatgtgcgcaaggtgctggtgctgctggaactgaaaggcatcgcctaccgcatcgaccccatcgtgccgttcttcggcgacgaggccttcgagcgcctcagtccgttgcgccagattccggtgctggtggacggtgacttcgtcctcaacgattccagcgtgatctgccagtacttggaggagcgctacccgcagccgagcctgtatcccgtcgacatcggccagcgcgcccaggcccgctggctggaggagtacgccgattcgcggctgggccaggtgatcatctggcagttgttccaccagttggtgatcaaccgtggcatctggcagcgcgaacccgaccaggcgatcctgcaacgcacctacgacgaagacctgccatcgatctgcaactacctggaagggcgggtcccgccgagcggctggctgtgcggcgagctgtccatcgccgatgtcgccgtcgcctgcctgttccgcaatgcccagttggcgcgctaccaggtcgacggcgagcgctggccgcgcctggcgcgcctgttggctgacgctttcgccctgccggccttccagcatctggcgcgtttcgagaaggccaccgcgcagaccccggtcgccgaacagcgccaggcgctgcgcgaggccggcgcgccgctcagcgcgaccagccacgcccgcgagcggccggtgcgcggtccgatgagccgctga

SEQ ID NO: 321333 - DNA, 519 bp, Pseudomonas aeruginosa
gtgtcggcgggtgacgtcagcaacagcgaattcgtgggtagcctgtaccgggaccaccgcggctggctgcttgcctggctgaaccgcaacctcggctgccgccagcgcgccgaagacctcagccaggacaccttcgttcgcctcctcggccgcccggagctgcccggcctgcgcgaaccgcgcgcgttcctggcgaaggtggcgcgcggtctgatgatcgaccacttccgccgcgccgcccttgagcaggcctatctcgccgaactggcgctggttccggaagcggagcagccttcggccgaagagcagtacctgattctcgaggacctccgcgagatcgatcgcctgcttggcacgctgtcgctgaaggcgcgtagcgcgtttctctatagccgcctggacggcatgccccacgcggagatcgccgagcgtctcggagtctcggtgccacgcgtgcgccaatacctggcccagggtctgcgccagtgctacatcgccctctacggagagccccggtga

SEQ ID NO: 321334 - DNA, 972 bp, Pseudomonas aeruginosa
gtgagcgccgacgatcgtcattcgccggtacgcgcgcgggtgctcgacgaagccatcgcctggcaattgctgctcgactccggcgaagcccatcccgacgatcaccgcgccttccaccgctggtacgcggcgcatcccgaacacgaacgcgcctgggaacagctcggcggcctcgaccggcacctggcgagagccgccaacgggccggcgcgcaacgccctgctgtccggcaacgcacgcttcaagcgccgcctgcgccggctcggcggcagcgccctggggctagtgctggcgctaggcgtcgggctcggcgtggccaaccgctacgtcccggtccgctacctgctggccgatgtctacagcgccaccggcgagcagcgcgagctgaccctcccggatgccactcatgtgcgcctgaacagccgcagcgccatcgacgtccgcttcgacggcgaacgccgccaggtcgtgctactggccggcgagatcctggtggaaaccgcccatggcgacccgcgccccttcgtggtcagcagcgccgatggcgacatgcgcgccctcggcacgcgcttcctggtgcgccgcgaggaacccggcacgcgcctcaccgtgttgcagtcggcggtggccgcgcgcgcggaaacgctcagcgaagagcgtgtgatcaaggaaggccagcaggtgctgatcctgccgcaaggcctgcaggccagcgaagcggccccggccctggccggcgcctgggcacaaggcatgctggtggtagagaacgcccggctggccgacctggtggcggaactggggcgctattcgccggcgctgctgcgggtcgacccgagcatcgccgacctgcgcgtcaccggcagtttcccgctgaaggacacccgcctcgcccttcaggctttggagccgagcctgccggtgcgcagcgtgaggcacaacgcctggtggttcgaagtggtgccacgctga

SEQ ID NO: 321335 - DNA, 2415 bp, Pseudomonas aeruginosa
atgcctcgcccgacgttccgtcccggcctgctcgccctagccatcgccctcgccgttcccgcaccgttcctccacgccgccccggccgaacaggccagcgtgcgcgactaccgcatcgccgccgggccgctggcaggcaccctgaaccgcatcgcggcccaggccggcctggtcctcaccctggatccggcgctcgccgaaggacgcagcgcccacgccgtgcaaggtcgcttcgacgcgcctggcgcattgcgcgaagcgctcaagggcagcggcctggaactggtggaaaatgccggcggcacctacagcctgcgcaaggtgccggaagacaccctgtcgctgcaggcgatgacggtcagcggcgccgaggaagacccactggggccgaccagcggctacgtggccaagcgcagcatgaccggcaccaagaccgatacgccgatcctcgagatcccgcgctcgatctcggtggcgacccgccagcagatgaccgaccgcgccgtgcacaacctcgacgacgcggtgcgctacatgcccggcgtcgtcgccagcagtttcggcagcgactcccgttccgactggttgaaggtgcgcggcttcaagccgacccagttcctcgatggattgccgatggcgacaggctcatacaacaacccgaagctggagacctggaatctggagcgcctcgccctgctccgcggcccggcctcctcggtctacggccagaccccgcccggcggcatgctcgacatggtcagcctgcgcccgcagggcatcgccagccatgaactgaaggccgagatcggcaactacaaccacaagcaggtcagcttcgacagcaccggcccgatcgacgacgaggggcgctttctctatcgcctctccggcgtggtgcgcgacagcaacactcaggtcgaccatatcgacgacaagcgctacaacatcgccccgagcctgacctggaacatcgacgacgatacccggctgaccttcctcagccaattcaaccgcgacgatacagccgccaccagccaattcttgccgttacgcgggaccaaatacgatgctccgttcggaaagatttcccatcacaaaaacctcggcgatccggactgggacttctacgaccgcacctactattggttgggctactccttcgaacggcgcatcaacgatgtctggcagttccgccagaacctgcgctacctgcgcaacgacctgtcgttccagacgcttacgccaaccagcagtatcgatgcggccagcgccgacggcaccttacagcgcatgacgacctcggtggacgaggacatcagtcagttcgtggtagataacaatttccaggctgacttcgagaccggtgcgctgcgccatactctcctgctgggtatcgatcacaaccgcacccgcaccgactacacctcgatctacaacttcaccggtgtgccgccgaccaacgtcaacaacccgatctatggtcagccaattcccaagccatcgcgctctagtgcgttctatgactaccgacagaagacttatcagaccgggctctacgtccaggatcagatcgccctcgacaactggcgcctgaccctcggcggccgcgaggactgggtacatgccggcgccacgttctacaatcagaacgatgccaccaacaccagccgcgacaagaaattcagcggtaacgcagctctgagctacatcttcgacaacggcctggcgccctacctttcctatgcggagtcattccagccaagcaccggcgccgacgatataggctccaacaagatgttcaaacccaccgaaggcaaacaatgggaactgggcgtcaagtatcaacccgtaggctccgattcgctgttcaccgcagccgtctacgacctacgccaggagaacgtgagggtcaccgacaacgtcaatgggacacccactacctcgcaggctggcgaggttaaggtcaccggcttggagctggaagccaccagcaacgtcacagacaatctgaaagtgatcggctcctatagctacgccgacaccgaagtgaaaaaaggccagtacgcaggcaaccgcctgcaacaggcgccgcgcaaccaggcctcgctatgggccgactacacctggcacgagggtacgctgaacggtttcagcgtgggtgccggcgcccgctacgtaggctcgacctacggcgaccaggccaacacctacgacggctacgccggctcgtacaccctgtacgatgccgccgtgcgctacgacctgggccaattgaacggcagcctgaaaggcgtcagcgtggcggtcaatgccaacaatctgttcaacaaggactacctggcgtcctgcgacggctactactgctactacggcgaccagcgcagcgtggtgggcagcgtcagctacaagtggtga

SEQ ID NO: 321336 - DNA, 858 bp, Pseudomonas aeruginosa
atggccacagtggaaatactcggggcggaatgccgcgcggggggcgcggtgaacgacgatgcgctgggctgcacggcgcaggccgcctgggtgatcgacggtgccaccagcatcggtcgcagcgtgctgggcgtggaaagcgacgcgcgctggctggcccaggcggtggaccggcacctgcggttgctgctggaagtcgagcccgagcaatccagcgagaccctgctgcggcgcctgctcaacgatatccagggcgacttccgcgcccagagcggccgcgactggcacgacctcgaagacatgccggcggcctgcctgagcctgctgcggattcgcggcggagaaatcgaactgctcaacatcggcgacagccggatcctcgtcgaaggcgccgacggccaggtacgcagcttcggcgattcggccctacacgaactggatcggcaatccctggcgcatttctgccggatgcgcgaggaacatccgcagtgggatcacgccgaactgttcaaggccagccgcccgcgcgtgcggcagaaccgcctgctgatgaacaagcccgagggctactgggcgctggacatcagcgaccgctggctcggccaggtgcagcgcgagaccttgccgctcgccgcgttgcgttccttcgtgctgatgaccgacggcttcgaccggctggtcgagcctttccgccgctataccgacgaacagttgctgcggcgcctcgaggacgtcggagtgagcgccatgctcgacgagttgcgcgagatcgaacagggcgacgaccaggccctggctttcccgcgtttcaagatccacgacgacgccagcgcgctgtggggtcggatcgcggggtga

SEQ ID NO: 321337 - DNA, 951 bp, Pseudomonas aeruginosa
atgcgtcacctgccctacccgctgctgggcctgttcctggccctgtcgtcgaccggcgccgccctggccggcgaacagtactacccgctggacaagggctccgcgccctacgcggtcgcgcccagtgcacagggtgcggtctggtacggcgcggacggcgggcattcgctggggcgcctcgacccgaccagtggcgagagcgtgcaggtgccgctcggcgaaggcgcgcggccgcgagccatcgtcagtgacgagagcggcaacgcctgggtgctcgacagcggcctcaacgccatccttcgcatcggcggcgagcgcctgggcagcgaacgtttcccgctaccggccaaggccgcgccggccgggctcgagtccgcggtattcgacgacgacgggcgcctctggttcaccggcagccgcggcttccacggtcgcctcgacccagccaggcgcctggtggaggtctggccctcgccccagggcaaggcggcgaacggcatctgcgtcaccccggacggcgaggtctggtacgcgcaggacgacgcgctggtgcatgtcgatccgctcggcggcagcgccgagcggttgcccgcgcctgaaggcacgaaggccttgcgcgggatcggcgccgactccatcggcaggctctgggccagcgacagcggtggcgcccggctgtaccgctacgatcccagcgatgcctcgtggcagagctggccgctgccggacagccaggcccgcccggacagcctgcgggtcgacgccatggaccgtgtctggctgcacgacgccgccagcggggcgctcttgcgtttcgacagtgagcaggcgacattccgcgtcctgcccagcgaccggccggcgcccggcaacgccctgctcggcggtcgccccggagaaacctggagcgccgagcctgccgccgatcgtctgcgcgtcgtccgcgactga

SEQ ID NO: 321338 - DNA, 621 bp, Pseudomonas aeruginosa
atgagcgctacccatacgctgttctacgccgccgcctcgcccttcgtgcgcaaggtcctggtcctgctccacgaaaccggccaacgcgagcgcgtggcgctcgaggaagtcacgccgacgccggtcgcgcccatccggcagctcaacgccagcaacccggccggcaagattcccgccctgcgcctgccggacggccaggtgctgcacgacagccgggtgatctgcgactacttcgaccagcagcacgtcggcgaaccgctgatcccccgcgaaggcagcgcccgctggcgacgcctgaccatcgcctcgctggcggacgccgtcctcgacgccgcggtgctgtcccgctacgagaccttcgtccgccccgaggagaagcgctgggacgcctggctcgaagcacagcgggaaaagatcgcgcggtccctggcgtggctggagggcgactgcatcaccgaactgcaggcgcgcttcgacatcgccgccatcggcgtcgcctgcgccctgggctatctcgacctgcgccagccggagtgggactggcgcggccgctacccgcgactcgccgcctggttcgccgaagtcagccagcgcccgtcgatgcaggccacccgcgcctga

SEQ ID NO: 321339 - DNA, 186 bp, Pseudomonas aeruginosa
atgaacggctatgtcggcctgcgcgacgaccgtcgcgacggcgagcgcctggcggcgcggatcggcctgctgttccccggcccctcggcggcctggctgcaacgcgccgagcgcctgcggcggcagcaggcgtcggcgggcctcggggtcaggcgcgggtggcctgcatcgacgggcgctggctga

SEQ ID NO: 321340 - DNA, 303 bp, Pseudomonas aeruginosa
atgcgcctgttcttcgagttcaccctctgtgccgccctcggcctgctggtcagcggcgtgatcctgatttttctgctgttcttcggcaagttcggcctgatcgagtactggatcgccagcggcaagcccctggcccacgccatgctggtgctgatgccggacggattctgggaaggcctcagcggcatcgagggcgccgccggcaatccgcacgtgcgctccttcctggagctttgcatggggctcggacagagcgcgctgttgctgggcctgctgctgttccgcctggtgtgctggaaatga

SEQ ID NO: 321341 - DNA, 1359 bp, Pseudomonas aeruginosa
atgaaccgcacgctggcctacaagctcggtgccatcgccctactcatcctgctattgctgattcccctgttgatgatcgacggcctgatccgcgatcgccaggaggttcgtgacggcgtgctgcaggatatcgcccgcagctccagctacagccagcgcctcaccggcccgctgctggtggtgccgtaccgcaggacggtgcgcgagtgggtcaccgaggagaagaccgagaagcgcgtgttgcaggagcgcgagcagcgcggcgagctgtacttcctgcccgaccgcttcgccctcgacgggcagatgcgcaccgagctgcgctaccgtggcatctaccaggcgcgcctgtaccacgtcgacaacaaggttgccggctacttccaggtgcctgcgcactatggcatcgaagaagacctggaggactaccagttcgaaacgccgttcctggcgatgggcatcagcgacatccgcggcatcgagaatgccctgcgcctgtccctcaacggtgccagcgtcgacttcgagccgggtagccgggtcggcctgctcggcagcggtgtgcacgcaccgctacaaggcgtcgacgggcgccaggcgcagcgcctggagtacgccttcgacctgtcgttgctcggcagcgagcggctggacatcgtgccggtgggccgcgacagccaggtcatcctgaaggccgactggccgcacccgagcttcggcggcgagttcctgcccagcgagcgggagatcaccgcccagggcttcaccgcgcgctggcagaccagcttcttcgccaccaacatggaagaggcgctgcgcagttgcgtggaggagcagcgttgcgacggcttccaggcgcgcgccttcggcgtcggcctggtcgatccggtggaccactacctgaaggccgaccgcgcgatcaagtacgcgctgctgttcatcaccctgaccttcgccggcttcttcctcttcgaggtgctcaagcgcctggcggtacacccggtccagtacgcgctggtcggcctggcgctggcgttcttctacctgctgctgctgtcgctggccgagcacgtcggcttcgagctggcctacctggtctccgccggagcctgcgtcggcctgatcggcttctacctgtgcttcgtcctgcgcagcgtggcccgagggctgggcttcagcgtcggcctggcagggctgtacggcctgctctacggcttgctgagcgcggaggactacgccttgctgatgggctcgctgctgctgttcgcggtgcttgccgcggtgatggtgctgacccgccgcctggactggtacggggtcggccgcaaggacttcccggcggtacccgccagggcctga

SEQ ID NO: 321342 - DNA, 1425 bp, Pseudomonas aeruginosa
atgccgctcggcgttcggatcttcctggtctacttcctgttcgtcggtctcaccggctacttcgtgctgagcacggtgatggacgaagtgcgccccggcgtgcgccagtccaccgaggaaaccctggtggacaccgccaacctgctcgccgagatcctccgccaggacgtgaagaacggcaccctggcacagagcaacctgccggagatgctcgaggactacggcaagcgcgtgccgcaggcggatatctggggcttgcgcaaggaggcggtgaaccaccgcatctacgtcaccgacgccagcggcaaggtgctgctggactccgccggggtggccgtcggccaggactattcgcgctggaacgacgtctacctgactctccggggccagtacggcgcgcgctccagccgcgaagacccggacgacccggattcctcggtgatgtacgtggcggcgccgatcaaggatggcgggaagatcatcggggtggtttcggtggccaagccgaacagcagcctgcaaccctacatcgaccgctcgcagcggcgcctggcctggctcggtgccgggctgatcgccctcgggctgctggtcggcggcctgctctcctggtggctcagcggcgcgctgcggcgcctcacccagtacgcacaggcggtcagcgaggggcgccgcgccgagctgccgcgctatcgcggcggcgagatggcgcaactggccgacgcggtggaacgcatgcgcacgcaactggaaggcaaggactacgtcgagcgctacgtgcataccctgacccacgaactgaagagcccattggcggcgatccgtggcgccgccgagttgctcgacggcgagatgccggccgagcagcgggcgcgcttcgtcggcaacatcgccggcgagagcgagcgcctgcaacaactgatcgagcgcctgctgagcctggcccaggtggagcagcggcaaggcctggaggaggtcggcaaggtcgacttgcgggagatcgccgcgtccctgctggaaggccaggcggcgcgtatccagcgccagcgattgcgggtggagaaccgcctggaaggtccctgcgaggttcgcggcgagcagttcctgctgcgccaggcgctggccaacctgctcgacaacgccctcgacttcaccccgcccggcggcatccttcgcctgctcgccgaggtcgacggcgagggtatcgccttgcgcctgttcaaccaggggccggcgattcccgactacgccctggcgcgcctcaccgaacgcttctactcgctgccgcgcccggccagcgggcgcaagagcaccgggctgggactgaacttcgtcgccgaggtggcgcaactgcatggcggccggttgcaggtcggcaaccgcgacgacggcgtcgaggcgctgctctggctgccgcgcggctga

SEQ ID NO: 321343 - DNA, 690 bp, Pseudomonas aeruginosa
atgccgcatatcctgatcgtcgaagatgaagccgcgattgccgacaccctgctctacgccctgcaggccgaaggcttcgccaccacctgggtgaccctcgccggcgaggcgctggcgttacaggagcgccagccggcggatctgctgatcctcgacgtcggtctgccggacatcagcggtttcgaggcctgcaagcgcctgcggcggttctccgaggtgccggtgatcttcctcaccgcgcgcgatgccgagatcgaccgcgtggtcggcctggagatcggcgccgacgactacgtggtcaagccgttcagcccgcgcgaggtggcggctcgggtcaaggccatcctcaagcgcatggcgccgcgcccggcggcgctggaaggggccgcgccgagcgggccgttccaggtcgacgaggagcgcgtgcggatccactaccgcgacaccccgctcaacctcacccgccacgagttccgcctgttgcagacgctgctcgggcagcccgagcgggtattcagccgcgagcagttgctcgacgccctcggcgtcgccagcgaggccggctacgagcgcaacatcgacagccacatcaagagcctgcgcgccaagctgcgccaggtgaacgaacgcggcgaagcgatccagacccatcgcggcctgggctacagctacagcccggaccacgcctga

SEQ ID NO: 321344 - DNA, 510 bp, Pseudomonas aeruginosa
gtgaagcgtgcccttgccttgctctcgctgttcgccctgccggtcctcgccgccgaacccaacctctacggccgctacgaatgggtctccctgccggagctggaccgcaccctgcaggcgaagatggacaccggcgcctacacctcctcgctgtcggccaaggacatcgagttgttccagcgcgacggcgaggagtgggtgcgcttccggctggccaccaaggaggccgacggctcggtgttcgagcacaagctggcgcgcatcggcaagatcaagaaccgcgccgacaaccgcaacggcgaggacgaggatgaggaccgcctgagcgaacgcccggtgatcgacctgcaggtctgcctgggcggagcgatgaagaccatcgaggtcaacctcaccgaccgcagcgccttcaactatccgttcctgatgggcaccaagggcttgcgcaaattccacgtcgcggtcgatccctccgagcgcttcgtcgccgacaagcccacctgcaagtaa

SEQ ID NO: 321345 - DNA, 888 bp, Pseudomonas aeruginosa
atgcgggaactgttgaccggcctgaccagcagccttctgctgcttctcaacacgctgatcctgatcggcccgatgatgctgatcgcactgctcaagctggtgctccccggccagcgcctgaaggacctctgctccaggggcgtgatgtggatcgccgagacctgggcggagatcgacaagtggatcttcgccacctgcacgccgacggtctgggacgtgcgcggcgccggcgacctgcgccaggacacctcgtacctggtggtgagcaaccaccagtcctgggtcgacatccccgcgttgatccaggtgttcaaccggcgcaccccttacttcaagttcttcctcaagaaggagctgatctgggtgcccttcctcggcctggcctggtgggcgctggagtatccgttcatgaagcgctattccaaggccttcctggagaagcacccggaactcaagggcaaggacctggagatcaccaaggccgcctgcgagaagttcaagcgcatcccggtgaccgtggtgaactacctggaaggcacgcgtttcagcgagcagaagaaggcccggcaacagtcgccctatcgccacctgctcaagcccaaggccggcggtgtggccttcgtcctcgccgcgctgggcgagcaactggacgccctgctcgacgtcaccgtggtctacccgagcgacaaggtgccgggattctgggacctgctctgcggacgggtgccgaaggtgatcgtcgacatccagacccggccgatcgatcccgccctgtggcagggcgactacgagaacgacccggtgttccgccagtacgtgcaggaatgggtctcgcgcatgtgggaagaaaaggacgaacgcatcgcccgcttgcggcaactgcgctga

SEQ ID NO: 321346 - DNA, 579 bp, Pseudomonas aeruginosa
atgcgcgtcaccacccacgctaccctggccgcggccctgctgctcagcgccgcctccgcgttcgccttcaatctcggggatgccgccaaggcggtcgccggggcgtcccagggcgactccgcccaggtagccactaccccgcagaccagcggtctgctcggcgcactcaccggccagctcggggtcagccaggagcaggcggtcggcggtaccggcgccctgctcggcctggccaagaaccagttggccggcaacgattattcgcaactggtgaagaccatccccggcctcgacaagctggccggcaacaacgccctggccggtctcggcgggctcggcaacgtgctcggcaagagcggcggcgacagcaagggcctcggttcgctgctcggcaatgcggacagcatgggcgacgtgaacaaggccttcggcaccctgggcatggatagcgggatgaccgagaagttcgcccaggtgctggtcgactacttcggcaagcagggtgccaacagcgagctgctgggcagcctgagcaatctctggggagtgagcaaggcgggcggctcgtcgctgctctga

SEQ ID NO: 321347 - DNA, 2799 bp, Pseudomonas aeruginosa
atggcccaggaactttgcgctatctgccacgaacgtcccgccgtcgcccgcgtcagcctggtacagaacggccagcgccgcgaactcgccctctgcgaactgcactaccgccagttgatgcgccagcagcgcatgcgctcgccgctggagtcgctgttcggcggcggcagcccgttcgacgagatcttctccggcttcggcgagcagagcccggtcaccccggtgcgcgcccgcgagccggaggcggtggacatcgccgagtacttcagcaagcagaccaccgagtacctgcaacgcgccgcgcaggtcgccgccgaattcggcaagcgcgaagtggataccgagcacctgctctacgccctggccgacgccgacgtggtgcaggcggtgctcaagcagttcggcctgtcgccggccgacctcaagcagtacatcgaggccaacgccgtgcgcggcgccagcaagggcgaggcgagcgaggacatgaccatctcgccgcgggtgaagagcgccttgcagcatgccttcgccctgtcccgcgaactcggccacagctatgtcggccccgagcacctgttgctcggcctggcggcggtgccggacagcttcgccgggacgctcctgaagaagtacggcctgaccgagcaggcgctacggcagaaagcggtcaaggtggtcggcaagggcgccgaggacggccgcgtggacggcccgagcaacactccgcaactggacaagttcagccgcgacctgacccggctggcccgcgaaggcaagctcgatccggtgatcggccgctcgaaggaagtcgagaccaccatcgaggttctcgcccggcgcaagaagaacaacccggtgctgatcggcgagcccggcgtcggcaagaccgccatcgtcgaaggcctggcccagcgcatggtccagggcgaggtgccggaggtgctgcgcgacaagcgcctggtcgaactgaacatcaacgccatggtcgccggcgccaagtaccgcggcgagttcgaggaacgcctcaagcaggtgatggacgaactgcaggcggcgcagagcgagatcatcctgttcatcgacgaggtgcacaccatcgttggtgccggccagggcggcggcgaaggcgggctggacgtggccaacgtgctgaagccggcgatggcgcgcggcgagatgaacctgatcggcgccaccaccctcaacgagtaccagaagtacatcgagaaggacgccgcgctggagcggcgcttccagccggtgttcgtccccgagccgacggtggagcagaccatctccatcctccgtggcctgcgcgacaagctcgaaggccaccacaaggtgaccatccgcgacgaggccttcgtcgccgccgccgagctgtccgatcgctacatcggcaaccgcttcctgccggacaaggccatcgacctgatcgaccaggccgccgcccgcgtgcgcatcgccagcacctcgcggccggccgagatccaggaactggaggccgagctggcgcagctcaagcgcgagcaggactacgccgccagccgcaagtggtacgacgaggcgaaggtcttcgagaaacgcatccaggaacgcaaggaacacctcgagcagatcaccgagcgctggcagcagacccaggggtcgaagaccgaggaggtgcgggtcgaggacatcgccgagatcatctccaggctcaccggcatcccggtcaccgaactgaccgccgaggagcgcgagaagctcctgcagatggaagagcgcctgcaccagcgggtgatcggccagcaggaagcgatcaccgcggtcagcgacgccgtgcgcctggcccgcgccgggctgcgccagggcagccggccgatcgccaccttcctgttcctcggcccgaccggggtgggcaagaccgagctggccaaggccctggccgaggtggtgttcggcgacgaagacgcgatgatccgcatcgacatgagcgaatacatggagcgccacgcggtgtcccggctgatcggtgcgccgccgggctacgtcggctacgacgagggcggccagctcaccgagcgggtgcgccggcggccgtacagcgtgatcctgctcgatgagatcgagaaggcccacgccgacgtcaacaacatcctcctgcaggtgttcgacgacggccgcctgaccgacggcaaggggcgcgtggtggacttcaccaataccatcatcatcgccaccagcaacctaggctccgagctgatcatgaagaacgcccaggccggcgagttcgcccagccgccggagaagctcaagcgcgaactgatgactaccctgcgcggacatttccgcccggaattcctcaaccgcctcgacgaggtgatcgtcttcgagtcgctgagcaaggcgcagatcgaggacatcgtgcgcctgcaactggagcgggtgaagcgcgccgcgcacgctcaggacatctacctgcacatcgacgacagcctggtcggccacctcgccgaagaggcctaccagccggagttcggcgcccgcgagctgaagcggcagatccgccagcaactggagacgcgcctggccacggcgatgctcaagggcgaggtgaaggagggcgagacggtcaccttcttctacgacgccaaggacggcgtcggctaccgcaagggcgccgcgccgaagccggcggcacgcaagaagtccggcgccggcgagacgcccaggggccgcgcgacggcggcgaggaagccggcggcgaagaaaggcgccgccgccaagggcaaggccgacaagccgaagaccaagtga

SEQ ID NO: 321348 - DNA, 1434 bp, Pseudomonas aeruginosa
atgagcgagccgttccagctcaccccccgcatcgcccgccaactgccctggctggttgccgtcgccttcttcatgcaagccctcgacggcaccatcctcaacaccgcgctgccgagcatggccagttcgctgaacgaaaacccgctgcgcatgcaggcggtggtgatcgcctacctgctcacggtggccctgctgataccggcctcggggtggatcgccgaccgtttcggcacgcgccgggtgttcctcggcgcggtactgctgttcagcctcggctcgttgctttgcgcgctgtcgccgagcctcgaactgctggtcggggcgcgcatcgtacagggcgtcggcggcgcgctgatgatgccggtgggacggctggtgatcctgcgcgtctacccgcgccaggacctggtgcgggtgctcagcttcgtcaccattcccggcctgctcggcccgctggcgggaccgacgctgggcggctggctggtggagtacgcctcctggcactggatcttcctgatcaacctgccggtcggcctgctcggctgcctggtggcgatgaagctgatgccggacctgcgcagcccggtgccgagccgtttcgacagcatcggcttcctgctcttcggcggctccatggtgctgatctccatcgccctggaaggactcggcgagctgcacctgtcgcacctgcgcgtggtcctgctgctgatcggcggactggtcctgctcaccgcctactggctgcgcgcgctacgcatcgacaaaccgctgttcccaccgagcctgttcaaggcgcggaccttcgccgtcggcatcctcggcaacctgttcgcccgcctgggcagcggcgccctgcccttcctcaccccgctgttgctgcaggtgggactgggctacccgccctccaccgcgggcatgaccatgatcccgctggcgctgttcgcgatggtcgccaagccgatggccaagccactgctggacttcttcggctatcgcaagctgctggtcggcaacaccctgatcctcggctgcctgatcgccggcttcggcctggtcgaccaggacaccccctacgtctggctgctgctgcacctgagcctgctcggcgcggtgaactccctgcaattcacggcgatgaacaccctcaccctgatcgacctgcaggacagcaacgccagcagcggcaacagcctgatgtcggtggtcgtgcagttgtcgatcagcctcggcgtggcttgcgcggcggcgttgctgggcggtttccagaccgacctggatacggggcaggacaccgtactcggcgccttccacgccacctatgtcagcgtcggcctgatgtcgatgctggccgcggcgatcttcttccagctcggcagcgaggacggtcgcaccagcccgcgccgggtcgatccggaaaaggacccggacctctag

SEQ ID NO: 321349 - DNA, 375 bp, Pseudomonas aeruginosa
atggcctggatcgctacgctcaagcgctgggctcgcgagctgaagaccgaggtcatcgccctctggctgtgcagccgccatcagcacatgccctggctggcccgactggtggctctgctggtggtggcctatgcgctgagtccgatcgacctgatcccggacttcataccgctgctcggctacctcgacgacctgttgctggtgccgctggggatctggctggcgatccgcctcaccccacccacgctgctcgccgagtgccgcgcgcgggctcgcgaggtcgagacgcacccgcgcaacctgtggatggctgcgctgatcgtgctgttctgggtggcgctgggcgctggactgctgcgctggttcttctactga

SEQ ID NO: 321350 - DNA, 525 bp, Pseudomonas aeruginosa
atgaagcctgtgcaatcccgtcgtctggccttcgccgcgctgttgtcgctgtcgttctcttccgcgtcctgccatgccgccaccgagcactggggctggatcgagcagtcctggctgatgcccgagcgcatgcaggccaaggccaagctggataccggcgcgctgacctcgtcgctggacgcgaggaatatccatcgctacaggaaggacggcgagcgctgggtgcgcttcgatgtcgtgctgcccaccgccgacagcaaggcgccggtcagcgtgaccttcgagcgcaaggtgctgcggctgatcaaggtacgcggcgccggcggcagcgacagccgtccggtggtggcgatggacatctgcctgggcgccaagctgctgcgcgagcagttctccctgcgcgaccgcggcaacatgaactatccggtgctgctcggtcgccgcacgctcgaacacctcggcgcggtcgacgtgtcccgaacctttacccgcaaacctacctgcagcgcgctcgccgctcagtag

SEQ ID NO: 321351 - DNA, 210 bp, Pseudomonas aeruginosa
atgtcccgtcagaacggcaccgttaagtggttcaacgaaaccaaaggctacggcttcattaccccggaaagcggcccggacgttttcgttcacttccgtgccatcgaaggtaacggcttcaagaccctggccgaaggccagaaggtcagcttcgaagtcgtacaaggccagaaaggcatgcaggccgagcgcgttcaggtgatcaactaa

SEQ ID NO: 321352 - DNA, 1377 bp, Pseudomonas aeruginosa
gtgacctccaccgctttctcctcgctgccgctttccgcggacctcctggccaatctcgactccctcggttaccgggagatgacgccgatccaggcgcagagcctgccgctgatcctccagggccacgacctgatcgcccaggccaagaccggcagcggcaagaccgcggccttcggcctcgccctgctcagcccgctgaacccgcgctacttcggctgccaggcgctggtgctgtgcccgacccgcgaactggccgaccaggtcgccaaggagatccgccggctggcccgcgccgccgacaacatcaaggtcctgaccctctgcggcggcgtcccctacggcccgcaggtggcttcgctggagcacggcgcgcacgtggtggtcggcaccccggggcgcatccaggagcacctgcgcaagggcaccctggtcctcgacgggctcaataccctggtcctcgacgaagccgaccggatgctcgacatgggcttctacgacagcatcgccgagatcatcggccagctccccgagcgccggcagaccctgctgttctccgccacctacccggacggcatcgagaagctggcgaagaccttcatgcgcgatccgcgacaggtgagggtcgagtcgctgcacgccgacagccagatcgagcagcgcttcttcgagatcgatccgaaacagcgcatggacgccgtggtacgcctgctccagcatttccggccacagtcctgcgtggccttctgccagacccgccagcagtgccaggagctggccgacgcactgaaggcgcagcggatttccgccctggccctgcacggcgacctggagcagcgcgagcgcgaccaggtcctgacggtgttcgccaaccgcagttgcaacgtactggtggccaccgacgtggccgcccgcgggctggacatcgccgccctggaaacggtgatcaacgtcgagctggcgcgtgacccggaggtccacatccatcgcatcggacgcagcggtcgcgccggcgagaaaggcctggccctgtcgctggtggcgccggccgaggccagccgcgcgcaggccatcgaggacctgcagaagcagccgctggcctggtacgccctcggccagttgaaggccagcccggagccattgctgccgccgatgagcaccctgtgcatcgccggcggacgcaaggacaaggtgcgccccggcgacctgctcggtgccctcaccggcgacgccgggctgcccggcagcgcggtgggcaagatcgccatcttcgacttccaggccttcgtcgccatcgagcgcggcctcgcccaccaggccctcaagcgcctgagcgaaggcaagatcaagggtcgctcgttcaaggtccgcctgctttag

SEQ ID NO: 321353 - DNA, 2202 bp, Pseudomonas aeruginosa
atgccgccctcttcgttgacacacacgctccgccgcctctgggccctcgacaagttcgcctatagcctgcgggtattcatcgccctggccggcgccctgctgctgtgctggtggcaggaccgcatcgagctgctgatcccgctgttcctcgggatcatcgccagcgccctggcggagaccgacgacaactggctcggccgcctgcaagcgctgctggtgaccctgctgtgcttcagcgtcgccgccttcgccgtcgagttgctgttcccctatccctggctgttcgtttccgggatggcgctgtcggcgttcggcatgatcctcctcggcgccctcggcgagcgctatgcggcgatcgcctcggcgaccctgatcctctcgatctacaccatgatcggcgtggaccagcgcggcggcgaggtcgccgatgtctggcacgaaccgctgctgctggtggccggggcggcctggtacgggctgctctcggtactgtggaacgcgctgttctccaaccagccggtgcagcagagtctttcccgcctgtatttcgagctgggcgaatacctgaggatcaagtcgagcctgttcgaaccgttgcgccagctcgacgtggagggccagcgcctcgccctggcacggcagaacggcaaggtggtggtggcgctgaaccaggccaaggagaccattctcaaccgtctcggccatggccggccgggccccaaggtgagccgctacctgaagctctatttcatcgcccaggacgtccacgagcgcgccagttcctcgcactacccgtacaaccggctggccgaggcgttcttccacagcgacgtgctgttccgctgccagcgcctgctcaaccagcagggcaaggcctgccaggccctggcgcgggctatccgcctgcgccagccgttcgactacgccgaccgcgagctggccctggaagacctccaggcctcgctcgaacacctgcgccagcagagcaacccggcctggaagggcctgctgcgctcgctcggcgccctggccgccaacctcaccacgctggaccgcaagctggccggggcgagcaacccggacgccatcgccgacgaacaggacagcgccctgctcgaccgctcgccgcgcagcctgaaggacgccttcgagcgcctgcgccagcagctcaccccgacctcgctgctgttccgccacggcctgcgcatggccctggcgctgaccgccggctacggcgtgctgcactggatccatccgacccagggctactggatactgctcaccacggtgttcgtctgccagcccaactatggcgcgacccgcctgcgcctggtgcagcggatcctaggtacggtggtcggcctggtggtcggctgggcgctgatcgacctgttccccagcccgctggtgcagtcgctgttcgcggtcgccgccggggtcgccttcttcgccacccgcagcagtcgctataccctggcgacggcggcgatcaccctgctggtgctgttctgcttcaaccaggtcggcgatggctacgggctgatcctgccccgcctgttcgataccttgctaggcagcctgatcgccggcctcgcggtgttcctggtgctgcccgactggcagggccgccggctcaaccgcatgctcgccaacaccctcgcctgcaacagccgctacctgcggcagatcatgcagcagtacgccaccggcaagcgcgacgacctcgactaccgcaccgcccggcgcaacgcgcacaacgccgacgcggcgctctcgaccaccctgtcgaacatgctcctggagcccggccacttcaggaaggacgccgagatcggcttccgcttcctggtcctctcgcacaccctgctcagctatctatccggcctcggcgcgcaccgcgaaagcctgcccgaggacgccagcgacggcctcctggagcgcgccgccgagcggctctccgccagcctcgaggaaatcgccgcgagcctggaacagaaacgcccggtcgccatctacagcgaagaggaggaagcgctggccaaggaactggagcagatgcccgaggacatggacgacagccatcgcctggtacagacccaactggcgcacatctgtcgccagctcgccccgctgcgcaccctggccgcgcacttgctgaagaaggaactggccggcgcgcagccgctgccaggccagccctag

SEQ ID NO: 321354 - DNA, 732 bp, Pseudomonas aeruginosa
atgctgcgatgcgcactcctgctgctgacattgctcctcccttgcgcgctgcctgccgccaacctgcgcctggtcggcgactcctggccgcctttcgtcgattcgcgcctgcctggcaacggcctggcggtggaactggtgaccaccgcgctcaagcgcgccggcttcgactcgagtttccagcaggtaccctggtcgcgtgccctgtacggcgtgcgcagcggcgactacgacatcgccctgagcgcctggtacgagcccgcccgcagcctctacgggcagttttcccgcgcctacctgagcaaccgcattcgcctgctgcaacgcaaggggcggggtatcgagttttcccgcctgagcgacctgcgtccctaccgcatcgcggtcgtgcgcgactatgcctacgcgcccgaattcgaccgtgacagccgtttgcagaaggtcaacgtgaccagcttcgccaacgccgcgcggatgctcgaggcggggcgggtcgacctggcggtggaggacgagctggcgctgggggtcgccttcaagggcgagctggccgatttgcgcgacaagctggaggtactgcccaccccgcttggcgagaacggcctgcacctgctggtgagcctgaggaatccccggcatgacgagatcgtcgacggcttcgacctggccatccgcggcatgcgcgacgacggcagctaccagcgcctgctggagcgctacggcgcgcgctag

SEQ ID NO: 321355 - DNA, 792 bp, Pseudomonas aeruginosa
atgggtatttcctatggtttggcgatgttgctggtgttcctcgcgctgctgctgttcagcgcgctgcgcatcctccgcgagtacgagcgtggcgtggtgttccagctcgggcggttctggaaggtcaaggggccggggctggtgctggtgatcccggcgatccagcagatggtgcgcatcgacctgcgcaccatcgttctcgacgtgccgccgcaggatgtgatttcccgcgacaacgtttcggtgaaggtcaacgcggtggtgtacttccgcgtgctcgatccgcagaaggcgatcatccaggtggagaactacctggccgccaccagccagttggcgcagaccaccctgcgcgcggtgctgggcaagcacgaactggacgagatgctcgccgagcgcgagcgcctgaacctggatatccagcaagtgctcgatgcgcagaccgacgcctggggcatcaaggtggcgaatgtggaaatcaagcacgtcgatctcaacgaatcgatggtccgcgccatcgcccggcaggccgaggcggagcgtgagcgcagggccaaggtgatccatgccgagggcgagctgcaagcctcggagaaactcatgcaggcggcgcagatgctcggccggcagagtggcgccatgcagttgcgctacatgcagaccctcggcgcgatcgccggcgacaagagttcgaccatcgtcttcccgatgccgatcgaactcttcggcggcaagtacgcaggtgccgcgccgcggaacgaaaaggccgccggagaggatgaggagaggtga

SEQ ID NO: 321356 - DNA, 1194 bp, Pseudomonas aeruginosa
atgcggatgccgtgccggctcgcgctggcgctgttgttgtgcttcgccggcccggcctgtctcgcggcctccggcccggttcgggtgctctcggtggatggtgcgatcggcccggccagcgccgattacctggtgcgcggcatcgagcgtgccgccgaggacggcgcgcaactggtggtgctggaactggacacgcccggcggcctggacgcatcgatgcggcgcatcgtcaaggcgatcctcgccagccaggtgccggtcgccggtttcgtcgcgcccagcggggcgcgggcggcgagcgccggcacctacatcctgtatgcctgccatatcgcagcgatggcgccggggaccaacctcggcgccgccaccccggtgcgcctggggacgccggacaagcccgcagagaagcccccggcgcgggacgccgaacccatggcgcgcaagcaggtcaacgacgccgccgcctatatccgtggcctcgcgcagttgcgcgggcgcaacgtcgaatgggccgagcgcgcggtgcgcgaggcggtcagcctggcggcgcacgaggccgcggcgcagaaggtgatcgacctgcaggcccgcgacctgcccgacctgctgcgccagctcgacggccgcagcctgcgcgtcggcgagcgcgcgctgaccctggctaccgccggcgccacggtcgagcgccaggcaccggactggcgcgcgcggttgctggcggtgctcaccgatcccagcgtggcgctgatcctgatgatgatcggcatctacggtctgatcttcgaactggccaatcccggcatggcgctgcccggcgtactcggcggcatctgcctgctgctcggcctgtacgccctgcagatgctgccggtcaactacgccgggctggcgctgatcgcgctgggcctggcgttcatggtgggcgaggcgttcgtcgccagcttcggcgtgctcggcatcggcggaatcgtctcgttcgtggtcggcgcgctgatcctgatcgataccgaggtgcccggctacggcattccgcccggcctggtggtggccctggcgttgctcagcgccgcgctgatcgtcggtctgctgggcatggcggcgggtgctcgccgcgcggccgctggcggtgggccagccggtctgggtgctggcgcgcaagggcctgctcctggaagtcgcgctggccgatga

SEQ ID NO: 321357 - DNA, 1623 bp, Pseudomonas aeruginosa
atgacctccgatgtccttcccgccgacgccgtcgccagtgccgccggcaacgcgcacaagccccatctcgagcagcgtcccggccgcctcaccgccctcgtattcttcgccgtgctcgccaccggactgctgttcagcgcctacagcctgatgcaggacgtcgatgacgtcggttccacgatcaccacctggacgcccttcctgctgctcggcgtggccctgctgatcgccctcggcttcgagttcgtcaacggcttccacgacaccgccaacgcggtggccacggtgatctacacccactcgctgccgccgcacttcgcggtggtctggtcgggttgcttcaactttctcggcgtattgctctccagcggcgcggtggccttcggcatcatcgccctgctgccggtggaactgatcctgcaggtcggttcctcggccggcttcgccatggtcttcgccctgctgatcgccgccatcctgtggaacctcgggacctggtggctgggcctgccggcgtcgtcctcgcacaccctgatcggctcgatcatcggcgtcggcgtggccaacgcgctgatgcatgggcgcgatggcaccagcggggtggactggggccaggcgaccaaggtcggctactccctgctgctctcgccgctgatcggcttcgcctgcgccgccctgttgctcctggcgctgcgcctgctggtgaagaaccgcgcgctgtacaaggcgccgaagggcaaggcgccgccgccctggtggatccgcggcctgctgatcctgacctgtaccggggtgtccttcgcccacggctccaacgacggacagaaaggcatgggcctgatcatgctgatcctggtcggcaccctgccgatggcctacgccctgaaccgcaccatgccggcggaccaggcggtgcagttcgccgccgtcgccgaggtcacccagcaagcgctggtgaagagcgcgccgcaaccggcgccggccgatccgcgccaggtactctccgactacgtgcgcagcaagcaggcatcgcctgagctgatcccggcgctggccgccctgaccggctcgatcggccaggaagtgaaaggctatggcgcgttctcgcgggtaccggcgcaagccatgggcaacgtgcgcaacgacatgtacctgacctccgaggcgatccgcctgatggacaaggacggcgtcggccgcttcgacgccgacacccacggcaagttgcaggcgttcaagcggaagatcgacgatgccaccaagttcatcccgctatgggtgaagatcgccgtggccatcgccctcggcctgggcaccatggtcggctggaaacgcatcgtggtgacggtcggcgagaagatcggcaagacccacctgacctacgcccagggcgcctcggcggaaaccgtggcgatgctgaccattggcgcggcggacctgtatggcttgccggtatccaccacccatgtactgtcttccggggtggccgggaccatggcggcgaacggttcgggactacagtggaagaccatccgcaacctgctgatggcctgggtgctgacgctgccggcggcgatcctgctctcggcctcgctctactggctgctcacccggctgttctga

SEQ ID NO: 321358 - DNA, 405 bp, Pseudomonas aeruginosa
atgaatttccacacccgcaagtgggtcaagccagaagatctcaaccccaacggcaccctgttcggcggcagcctgctgcgctggatcgacgaagaagcggcgatctacgcgatcatccagctgggcaaccagcgcgtggtcaccaagtacatttccgagatcaacttcgtcagctcggcgcgccagggcgacatcatcgagctgggcatcaccgccaccgacttcggtcgtacctcgctgaccatgacctgccacgtgcgcaacaagatcacccgcaagagcatcctcaccatcgacaagatggtcttcgtcaacctcggcccggacggcctgccggcgccccacggcaagaccgagatcacctacatcaaggaccagttcaaggaagacgaagtcctgccctga

SEQ ID NO: 321359 - DNA, 909 bp, Pseudomonas aeruginosa
atgcgacgcaagatcccttccaccgccgcgctggtcagcttcgaatccgccgcgcgccacgagagcttcaccaaggcggcggaggagttgtccctgacccagagcgcgatctgccggcagatcgccacgctcgaggagttcctcggtgtcgagctgttccgtcgctcgcggcgcggggtcaagctcaccgaggccgggctgtcctatagccggcgggtggcggtacgcctcgacgcggtggagcgcgacaccctggcggtgatggggcaccagggcggcggcgcgatcgaactggcggtggtgccgaccttcggcacccaatggctgttgccgcggctcaagcgtttccagcggctgcacccggaggtcacggtcaacctgaccaaccgcacccgcccgttcctcttcgccgacaccgagttcgacgccgcgctgtacttcggcgacgccgactggtcgggtaccgtctcgcatttcctgatgcgcgagaatccggtgccggtgtgcagcccggagctgctgggcgggcgtcgaacgctgagcgccgagcaggtcgccgggctgccgctgatgcagcagagcacccggccctacgcttggcgccagtggtttcactcccagggactgaacgtcgcccacgacatgagcgggccgcgctacgagctgttctccatgcttgcccaggcggccatgcacggcatgggcgtggccctcataccgcccttcctgatccaggacgagctggccgacggaaggcttatcgtgcccatgcaacatgcctatttgagcgagaatgcgtattacctgatcattcccgagcgcagggtcgaatcggcgatgctcaatgccttccgcgactggctggtggaagaggccaggcagtaccgcgaggccaacgggctgggctga

SEQ ID NO: 321360 - DNA, 1182 bp, Pseudomonas aeruginosa
atggccaccaaagctagcttcaactgggaagatcccctgctgctggaccagcagctcaccgaagaagagcgcatggttcgcgacagcgcccagcagttcgcccaggacaagctggccccgcgcgtgctcgaagccttccgccacgaacagaccgacccgaagatcttccgcgagatgggcgagaccggcctgctcggcgcgaccattcccgaagcctacggcggcagcggcctcaactacgtctgctatggcctgatcgctcgcgaagtcgagcgcgtcgactccggctatcgctcgatgatgagcgtgcagtcctcgctggtgatggtgccgatccatgaattcggcaacgaagccacccggcagaagtacctgcccaagctggccagcggcgaatacatcggctgcttcggcctgaccgagccgaaccacggttccgacccgggctcgatggtcacccgggcgaagaaggtcgacggcggctatcgcctgagcggcagcaagatgtggatcaccaacagcccgatcgccgacgtcttcgtggtctgggccaaggatgacgaagggcagatccgcggcttcgtcctcgagaagggctgggaaggcctgagcgccccggcgatccatggcaaggtcggcctgcgtgcctcgatcaccggcgagatcgtgatggacaacgtgttcgttccggaagagaacgccttccccgaagtgcgcggcctgcgcggtccgttcacctgcctgaactcggcgcgctacgggatctcctggggcgccctgggcgccgccgaattctgctggcacaccgcccgccagtacgtgctcgaccgccagcagttcggccgcccgctggccgccaaccaactgatccagaagaagctggccgacatgcagaccgagatcaccctggccctgcaaggctgcctgcgcctggggcggatgaaggacgaaggcaccgcggcggtggaaatcacctcgatcatgaagcgcaacagctgcggcaaggccctcgacatcgcccgcctggcccgcgacatgctgggcggcaacggcatctccgacgaattcggcatcgcccgccacctggtcaacctggaagtggtgaacacctacgagggcacccacgatgtccacgcgctgatcctcggccgcgcgcagaccggcatccaggcattcttctga

SEQ ID NO: 321361 - DNA, 1224 bp, Pseudomonas aeruginosa
atgcccggcgccctttcccatatccgcgtactcgacctgtcccgtgtcctggccggcccctgggccgggcagatcctcgccgacctcggcgccgaggtgatcaagatcgagcgccccggcagcggcgacgacacccgcgcctggggcccgccgttcctcaaggatgccgaaggcaacgacacctgcgaggcggcctactacctgtcggccaaccgcaacaagaagtcggtgacggtggacttcacccagccggaaggccagcgcatcgttcgcgaactggcggccaaggccgacatcctgctggagaacttcaaggtcggcgggctcaaggcctatggcctcgactatgaatcgctgaagcaggtcaacccgaagctgatctactgttcgatcaccggcttcggccagtccggcccctatgccaagcgcgccggctatgacttcatgatccagggcctgggcggcctgatgagcctcaccgggcgcgccgacaacgaggaaggcgccggtccggtgaaggtcggcgtggcgctgaccgatatcctcaccgggctgtactcctccaccgcggtgctcgccgccctcgcccaccgcgacgtcagcggcatcggccagcacatcgacatggccctgctcgacgtgcaggtcgcctgcctggccaaccagaccctcaactacctgaccaccggcgtgccgccgcggcgcctgggcaacgcacacccgaacatcgtgccgtaccaggacttccccaccgccgacggcgacatgatcctcacggtcggcaacgacagccagttccgcaagttcgccgagctggcagaccacccggaatgggccgacgacccgcgcttcgccaccaacaaggcgcgggtggccaaccgcgaggtgctgatcccgctgatccgccaggccacggtgctgcacaccaccgccgagtggattctttccctggagcgcgccggcgtgccctgcgggccgatcaacgacctggcgcaggtgttcgccgacccgcaggtgcaggcccgcggcctgcgcgtggagctaccgcacccgctggccgggacggtgccgcaggtagccagcccgatccgcctgtccgagacgccggtggaataccgcaacccgccgcccaccctcggccagcacaccgacgaggtcctcgagacgctcctcggcctggacgcggccgcgctggaaaggctgcgcgacggcaaggtgatctga

SEQ ID NO: 321362 - DNA, 1284 bp, Pseudomonas aeruginosa
atgagcactgcccggaacgtcctgcaatccacccagcgacacatcgatggccagcgcctctggcaatcgctgatggatctcgcccgcctcggcgccaccgccaagggtggggtctgccgcctggccctgagcgatctcgaccgccaggcccgcgatctcttcgtgcaatggtgcgaagcggccggctgcacggtcagcgtcgatcgggtcggcaacatcttcgcccgtcgtcccgggcgtaacccggacttgcccccggtgatgaccggtagccacatcgacacccagcccaccggtggcaagttcgacggctgcttcggggtgatggccggcctcgaggtgatccgcaccctcaacgacctcggggtggaaaccgaggcgccgctggaggtggtggtgtggaccaacgaggaaggctcgcgcttcgcgccctgcatgatgggctcgggcgtattcgccgggaagttcaccctggaggagaccctggccaagcgcgatgccgacggtgtcagcgtaggcgaggcgctggacgccatcggctacgcgggagcgcgcgattgtctcggacatccggtgggcgcctatttcgaggcgcacatcgaacaggggccgatcctcgaggacgaggagaagaccatcggcgtggtactcggcgcgctcgggcagaaatggttcgacctgtccctgcgcggcgtcgaggcacacgccgggccaacgccgatgcacctgcgcaaggatgccctggtcggtgccgcggcggtggtcgaggcggtcaatcgcgcggccctcggccatcagccgcatgcttgcggcacggtcggctgcctgcacgcctatcccggttcgcgcaacgtgatacccggcgaagtgaagatgaccctggacttccgccatctgcaaccggagcgcctggactcgatgatcgccgaggtccgccaggtgatcgccgctacctgcgagaagcatggcttgcaatacgagctggtgccgaccgccgatttcccgccgctgtacttcgaccagggatgcgtcggcgcggtgcgcgaggcggcgcaggcgctgggcatgccgcagatggacatcgtcagcggcgccggccacgacgcgatcttcctcgccgaactcggtccggcggggatgatcttcgtgccctgcgagaacggcatcagccacaacgagatcgagaacgccagccccgacgacctggccgccggctgcgcggtgctgttgcgggccatgctcaaggcctccgaggcgatcgccggcggccgcctggcggcctga

SEQ ID NO: 321363 - DNA, 1491 bp, Pseudomonas aeruginosa
atgcaacagagcagatcggaagtgaccgagcgcgacggcttggtcgagctgtccgccggcagcgacgtactcgacagcccccgctacaaccacgacatcgccccgacccgggtggaacagcgtacctggaacaggtggcacatcaccgcgctgtggatcggcatgtccatctgcgtgcccacctacaccctcggcggcgtcctcaccgcctacttcggcctcagcgtcggcgaagcgctgctggcgatcctgctggctaacctggtggtgctgatcccgctgaccctcaatgccttcgccggcacccgctacggcattcccttcccggtgctgctgcgcgcttcgttcggcatcatcggctccaacgtgccatgcctgatccgcgccgtggtcgcgtgcggctggttcggcatccagacgctgttcggcgggctggcgatccatctcttcctcggttcgatctttcccgcctggaaagccctcggcggcaccggcgaggtgatcggtttcctcctgttctgggggctgaacctgtgggtggtgctgcgcggcgcggagtcgatcaaatggctggagacactctcggcaccgctgctggtgctggtcggcctcggcctgctggtgtgggcgctgccgcacatatcggtcagcgaactgctggcgcagccgccgaagcgcccggaaggcgccagcgtcaccggctacttcatggccgggctgacggcgatggtcggcttctgggccacgctgtcgctgaacatccccgacttcagccgctatgcgcgtagccagaaggaccagatactcgggcagatcttcggcctgccgctgaccatgttcctgttcgccgccctcggcgtggtgatgaccgccgcctcggcttcgctggtgggcgagacggtttccgacccggtcagcctgatcgggcacatccccagccccggctgggtggcggtggcgatggcgttgatcatcgtcgccaccctctcgaccaacaccgcggcgaacatcgtctcgccgaccaacgacttccagaacatcgcaccgaaactcatcggccgcacccgcgccgtctggctcaccggtttcatcggcctggcgctgatggcccacgagttgctgaagaagctcggctggatcgtttccgacctcagcctggaaagcgtctactccaactggctgctcggctactccagcctgctcgggccgatcgcggggatcatggtggtggactacttcctggtgcgcaggcaacgcctcgatctcgccggactctaccgcgacgacgtctacccggcctggaactggcccggcttcgccgccttcgcggtgccggtggcgctgaccgtcatggccctcggcaaccgccagttccactggttctacgactacggctggttcaccggctcgctgctcggcggcgcgctctactacggcctctgcggccgccgtgcgcggagcccggcggcattggccaaaccgctgccctga

SEQ ID NO: 321364 - DNA, 1440 bp, Pseudomonas aeruginosa
atgtccctgttgatccgtggcgccaccgtggttactcacgaagagagttatcgagccgatgtgctctgtgccaacggcctcatccaggccatcggcgagaacctcgaaaccccctccggctgcgacgtcctcgacggcggtggccagtacctgatgccgggcggcatcgacccccatacccacatgcagttgcccttcatgggcacggtggccagcgaggacttcttcagcggcaccgcggccgggctggccggagggaccacctcgatcatcgacttcgtcatccccaacccgcgacagtcgctgctggaggccttccacacctggcgcggctgggcgcagaaatccgctgcggactacggcttccacgtcgccatcacctggtggagcgacgaggtcgcccgggaaatgggcgagctggtggcacagcacggggtgaacagcttcaagcacttcatggcctacaagaacgccatcatggccgccgacgataccctggtggccagcttcgagcgctgcctggagctgggcgcggtgccgacggtgcacgcggagaacggcgaactggtcttccacctgcagcagaaactcctcgcccagggcctcaccggccccgaggcgcatccgctgtcgcgtccgccgcaagtcgagggcgaggccgccagccgcgccatccgcatcgccgagacgctgggtacgccgctgtacctggtgcatatttccagccgcgaggcgctggacgagatcgcctatgcccgcgccaagggccagccggtctacggcgaggtgctggccgggcacctgctgctcgacgacagcgtctaccgccacccggactgggccaccgcggccggctacgtgatgagcccgccgttccgtcccgtcgaacaccaggaagcgctgtggcgcggcctgcagtccggcaacctgcataccaccgccaccgaccactgctgcttctgcgccgagcagaaggccatgggccgcgacgacttcagcaagattcccaatggcacggccggcatcgaggaccgcatggcgctgctgtgggacgccggggtcaacagcgggcgcctgtcgatgcacgagttcgtcgcgctgacctccaccaacaccgcgaagatcttcaacctgttcccgcgcaagggcgcgatccgcgtcggcgcggatgccgacctggtgctctgggacccgcagggcagccgcaccctctcggccgccacccatcaccagcgggtcgatttcaacatcttcgaaggtcgcaccgtgcgcggcatacccagccacaccatcagccagggcaagctgctctgggccgcaggcgacctgcgcgccgaacccggcgccggacgctacgtggagcgcccggcctacccgtcggtgtacgaagtgctcggccgccgcgccgaacgccagcgcccggtcgccgtcgagcgctga

SEQ ID NO: 321365 - DNA, 1368 bp, Pseudomonas aeruginosa
gtgatcgattccctgaaccacctcccccgtccggacgccggcgcggacacgctcgccgagcgcttcgccgacctcgcgccgccgctcaacgcccgccaggccgccctggaaagcgcccgctgcctgtactgctacgacgcgccctgcgtcaacgcctgcccgaccgagatcgacatccccgggttcatccgcagcatcgcccaggagaatgtccagggcgcggcgcagaagatcctctcggcgaacatcctcggcggcagctgcgcccgcgtctgccccacggaaatcctctgccagcgggcctgcgtacgcaacaacgcccaggaatgcgcaccggtgctgatcggccagttgcaacgctacgccctcgaccacgccggcttcggcgaacatccgttcaagcgctcgccggccaccggcaagcgcatcgccgtggtcggcgccgggccggccgggctgtcctgcgcccaccgcctggccatgcacggccacgacgtggtgctcttcgaggcccgcgccaaggccggcggcctcaacgagtacggcatcgcccgctacaagctggtggacgacttcgcccggcgcgaagtggaattcctcctgcagatcggcggtatcgaactgcgccacggccagcgtctcggcgacaacctggcgctcggcgccctgcacgacgagtacgacgcggtgttcctcggcatcggcctggccgccagcaagcgcctcggcctggaagacgaggacgcccccggcctgctcgccgccaccgactacatccgcgagctgcggcagagcgacgacctgctcgacctgcccgtcgccgaccgttgcatcgtcatcggcgccggcaacaccgccatcgacatggcggtgcagatgagccggctcggcgcccgcgacgtcaacctggtctaccgccgtggcttcgaggaaatgggcgccaccggccacgagcaggagatcgccaaggccagccaggtgcgcctgctgacctgggcccgaccggaacgggtactgcttgacgagcacggccgggtgcgcggcatgcgcttcgcccgcacgcgcctggagaacggtcgcctgggcgacaccggcgagcacttcgaactggccgccgacgccatcttcaaggccatcggccaggccttcgaaggcgccagcctgggcgatccgctggcagcgcaactgcggcgcgacggcgagcgcatccaggtcgacggacagatgcgcaccagcatccccggcatctacgccggcggcgactgcgtggcgctcggcgaggacctcaccgtgcaggcggtgcagcacggcaaactggcggcggaagcgatccacgcccaactcatgctcaacgtggaggctgcgtga

SEQ ID NO: 321366 - DNA, 1275 bp, Pseudomonas aeruginosa
atggccgacctgtctatcgaattcgccggcatcaagtcgcccaaccccttctggctggcctccgcgccgcccaccgacaaggcctacaacgtggtccgcgcctaccaggcgggctggggcggggtggtctggaagaccctcggcgaagaccccgcggcggtcaacgtgtcgtcgcgttattccgcgcacttcggaccgaaccgccaggtgcaggggatcaacaacatcgagctgatcaccgaccgctcgctggagatcaacctgcgcgagatcgcccaggtgaagaaggactggccagaccgcgcgctgatcgtgtcgctgatggtgccctgcgtcgaggagtcgtggaaatacatcctgccgctggtggaagccaccggcgccgacggtatcgagctgaacttcggttgcccccacggcatgcccgagcgcggcatgggcgcggcggtgggccaggtaccggagtacgtggagatggtcacccgctggtgcaagacccactgctcgctgccggtgatcgtcaagctcacccccaacatcaccgacatccgccagtcggcgcgcgccgcccatcgcggcggcgccgacgcggtgtcgctgatcaacaccatcaactcgatcaccagcgtcgacctggagcgcatggtcgccctgcccgtggtcggcacccagagcacccacggcggctactgcggctcggcggtgaagccgatcgccctgaacatggtcgccgagatcgcccgcgacccgcagacccgcggcctgccgatctgtggcatcggcggtatcggcagttggcgcgacgcagcggaattcgtcgcgctcggctgcggcgcggtgcaggtatgcacggcggcgatgctgcacggcttccgtatcgtcgaggacatgcaggacggtctcgcgcgctggatggacagccatggctaccagcggctgtccgatttcagcggcggcgcggtgggcaataccaccgactggaagtacctggacatcaactaccaggtgatcgcccgcatcgaccaggacgcctgcatcggttgcggccgctgccatatcgcctgcgaggacacctcgcaccaggccatcgccagcctgccccgggccgacggtacgcaccgctacgaagtgatcgacgccgagtgcgtgggctgcaacctgtgccagatcacctgtccggtggagaactgcatcgaaatggtgccgcaggacaccggcaagccctatctcaactggacccaggatccgcgcaacccctaccgcgaagcctcctga

SEQ ID NO: 321367 - DNA, 1251 bp, Pseudomonas aeruginosa
atgtccgcagacagcaactacagccagcaaccggtcccgctggcagcgcgcaagagcgcgctggccctgagcgtggtgatgctcggcctgaccttcttttccgccagcatgtggaccggcggcaccctcggcaccggcctgagctacgacgacttcttcctcgccgtgctgctgggcaacctgatgctcggcctgtacaccgcgatcctcggcttcatcggcgcgcgcaccggcctttccactcacctgctggcgcattactcgttcggcagcaagggctcctggctgccctcggcgttgctcggcggcacccaggtcggctggttcggcgtcggcgtagcgatgttcgccatcccggtggccaaggccaccggcctcgacgtcaacctgctgatcctggtttccggagcgcttatgaccctcacggtgttcttcggcatcgccggtctgaccctgctgtcggccatcgcggtcccggcgatcgtcgttctcggcagctactcggtatggctcgcggtgcgcgacgccggcggcctggcggcgctgcagcaggtgacgccgagcgcgccgctgagcctctcgaccgcgatcgccctggtggtcggctcgttcgtcagcgccggcaccctcaccgccgacttcgtccgcttcggccgcagcgcgcgtaccgccgtggtggtgtgcctggtggcgttcttcctcggcaactcgctgatgttcatcttcggcgcggccggcgcggcggcggtgggcaagtcggacatctccgacgtgatgatcgcccagggcctgctgatcccggcgatcctggtcctcggcctgaacatctggaccaccaacgacaacgcgctgtatgcctccggcctcggcttcgccaacatcaccggcctctccagccgcttcctggcgatgctcaacggcgccctcggcaccctcgccgcgctctggctgtacaaccacttcgtcggctggctgaccttcctctccgccgccatcccgcccatcggcggggtgatcatcgccgactacctgagtcgccgccggcgctaccgccagcacccctgcgcggacatccaggcgatcaactgggcggcgatcctcgccgtcgcctgcggcaccgccgccggccactggctgccggggatagtgccggtcaacgcggtgctcggcgccgccatcgcctacctgctgctcaatcccctgctgagccgcagcccgaacaaaccagaagaggtcctccatgctgattga

SEQ ID NO: 321368 - DNA, 1272 bp, Pseudomonas aeruginosa
atgctgattgacaacctgcgcctgcgcggccgcgaaggtctctggcaactgcgcgtcgccgatggccgtatcgccgccctggtgccgatggaacaggccgccgacgacgccggcgagcgcctggacggcgccggcggtcttgccgtgccgccgttcatcgagccgcacatccacctcgacaccacccagaccgccggccagccggagtggaaccgctccggcacgctgtttgaaggcatcgagcgctgggcccagcgcaaggccctgctcagccacgaggacgtcaagcagcgcgcctggcagaccctgaaatggcagatcgccaacggcgtgcagcacgtgcgcagccacgtcgacgtctccgacccgaccctcaccgcgctcaaggccatgctcgaggtgcgcggcgaagtggcgccctgggtcgacctgcagatcgtcgccttccctcaggagggcattctctcctaccccaacggcctggaactgctggaggagtcgctgcgcctgggcgccgacgtggtgggggcgatcccgcatttcgaattcacccgcgagctgggcgtcgagtcgctgcacaaggccatcgacctggccaagcgctacgacctgccagtggacgtgcattgcgacgagatcgacgacgagcagtcgcgcttcctcgagaccctggccatgctcgcccatcgcgacggcctcggcgcacgggtcaccgccagccacaccacggcgatgcactcctacaacggcgcctacacctcgcggctgttccgcctgctgaaactgtcgggaatcaacttcgtcgccaacccgctggtgaacatccacctgcagggtcgcttcgacgactacccgaagcgccgcggcatcacccgggtcaaggaactgctcggtgccgggatcaacacctgcttcggccacgacgacgtgttcgacccctggtacccgctgggcaccgcgaacatgctgcaggtgctgcacatgggcctgcacgtgacgcagatgatgggctacgacgagatcgacggcggcctcgacctgatcacccgcaacagcgcccgcaccctcggcctgcgggaatacggcatcgaggtcggccatccggccaacctgctggtgctgccggcccgcgacggcttcgacgcggtgcgccggcaggtcccggtgcgctactcgatccgcggcggacggctgctcgccgagacggtcccggcgcagaccacggtgttcctcgaacaggctgaagcggtggacttcacccgcgccagctga

SEQ ID NO: 321369 - DNA, 621 bp, Pseudomonas aeruginosa
atgggcacacacaagatcgagatccgccgccgcaacgtcgagaagattctcctggccgccgaaaaagtcttcgccgaaaaaggctacgccggcacctccatgggcaacatcgccgaagaagccgaactgccgcgctccaacctgcactactacttcagcaccaaggacgagctgtaccgcgacgtcctcctcggcctgctcgaggtctggaagcaggacgccctctgcttcgagatgttcgatgacccaagggtggtattgaccagctatatccgcgcgaagatgaaccattcgcgcacccgcccgcatggctccaaggtctgggccaacgaaatcatgcatggcgcgccgctgctcggcgccaccctcgacgacagcctctacgaatgggccaagatgaaggaggcgaagatccgccagtgggtcgaggaaaagcgcatcctgtcgatcgaaccgagcagcctgctctacatgatctgggcctccacccagcactacgccgacttcggctaccaggtcgaggtgctcaacggccaccagccgctcagcgacatgcagttcgaaagggcggtgcagacggtgaccagcgtggtcctgcgcggaatcggattggagccctga

SEQ ID NO: 321370 - DNA, 1479 bp, Pseudomonas aeruginosa
atgaaacgctacctgtacctgtggcaccgctggctgggcatcggctgctgcctgctgatggtgctctggttcgtctccggcatggtcatgctgtatgtcggctatcccaagctgactccgctggaacgcctggcccacctgcccgagctggacggctgcgaggcctgcgtaccgctgcggacggccctcgccggcggcgacggaaagaccccgcggagcatccggctggccagcgtaggaggcctgccgacctacctgctggacgatgccgacggacgcacgcgtgcgctggcggcgcgcgacggccgaccgctggcggtggacgcggacagggtgctggcttcggcccgtgctttcagcggcgaagtaccgatgcagttgcaagggcggatcgaggaagacgcctggacccatacccgcaacctcgatccgcaccggccgctatggcgggtgcagaccgcggacgagcagggccggctgctctacctgtcctcgcagaccggcgaggtggtacgcgacgccagccgccgggagcgcgcctggaactggctcggcgcctggctgcactggctctatccgctgcgcggcggcgggttcgacgggcagtgggcgaacctggtgatcggcctgtcgctgctggcgaccctggcgaccgtcctcggcatcctcgtcggcctgctccgctggcgcttccgcaagccctaccgcagcggctcgcgctcgccctatgcgggcggtttccagcgctggcaccacctcgccggcctgctcttcggcgcgctggtgctgagctggatcttcagcgggctgatgtcgatgaatccgtggaacctgttcggccgcggtacgccgctcgacctcgcggcctaccagggcggtagctgggaccgggcgctgcccgccggactggaggcggacgctgtcctgcggcgcttgcgtgccgccgggttgcgggtgcgcgagctggagtggcgggcgctcgacggcgagccctatgcgctcgggcgcagcgccagcggcaacagcctgctgctgacggcggatggcgaaatcctccgcgagctacccgcggatcgcctgctggcggcggctcgcgcgctgctgccgggcgtgccgatgcaggccgaacggttggaacgctacgacttctattactacccgcgcgaagaacacagcatgatgggctacctggagcggcgcctgccggtctggcgcctgcgtttcgacgatccccggcatacctgggtgcacctggatccctacagcggcgcggtggttggcgtgctcgacgacggtcggcgcggcagccgctggctgttttccctgttgcatagctgggactggctgccgctgctgacccggcgtccgctgtgggacctgtggatgctcggtttcagcctcggcggcctggtggtctgcgccagcggctgctggatcggctggcgtcgcctgcgcggccgccgtccgaagcgtcgctga

SEQ ID NO: 321371 - DNA, 2193 bp, Pseudomonas aeruginosa
atgaaaaagcactccacggcccgccgcgtcctcgcgctgggtctcaacctcaccctggccggcgttccggccttgctctgggccgatgaggaacccaccgaactgcccgccctcaccgtcagcgccggcgccgccggggaaaccccgccggccctcgatctcgacgacagcgccggcggcggctcgcgcctgggcctgagcctgcgcgagacccccggctcggtaagcgtggccaaccgtgccagcttcgagcggcgcggcctgcgcagcacccaggacatcgccaacagcctgcccggcgtgaacgcctcggcgccgcccggcttcggcggcttcgtcacctaccgcggcttcagctcgaaccaggtcaaccagttgttcaacggcattccagtgcaatacagcagcgccatgcgtccgctggacgactggatcgtcgaccgcgtcgagctggtcggcggtccgtcctccttcctcaacggcgccggtgccgtcggcggctcgctggactacatcagcaagctcgccgaccgctacggcgatttcatggaaggccgggtgcgctacggcagctacgacgattcggaagtcgccttcggcttcaaccaggccctgggcatcggccccgagccgaagcacttcgtgcgcctggacgtcagccgcagcggcggcaacggctacgtcgaccgcaattcgcgcgaatcgtggaacgtcgctttctccctgctcagcgacctgaccccggacctttcccacaccctggccctggagtaccaggacgagcaggaagacagcccctactggggcacgccggtgctcaatccctacgccggcgagctgaagatcgacaagagccgtcgccgcgagaactacaacgtcgccgatggccgctacgaacagcgcgtgcgctggctgcgctcgatcctcgaataccgggtcagcgacagcacgcgctggcgcaacaccttctaccactacgacgccgagcgcgattaccgcaacctcgagacctaccgctacaacgccgacaacagcggggtggtgcgctccaacgcattcctccagcgccacgaccagcagctcaacggcaaccgcttcgagctacagcacagccagccgctgttcggactggccagcgactgggcgctgggcttcgactacagcatcaacaagcagacgcgcttcccgagtaccgcctccgggccgttcggtacggtcgatccggccagtttcgagccgggccacttctacgacctgccgggcatgcgtcccggccaccggaaggaccgcagcaacgaggtgcgcaccagcgcgttgttcgccgagaaccgcctgggcctgaccgacgagctgtcgctggtcaccgggctgcgctacgaccacctcgacctcgacgtgcgcaaccatcggacggtgaccgccagcgatcctgcacacttcgaacggcgctgggacgtgctcaccgggcgcgccgggctggtctaccagttcactccgcacgccaacgtctacctgcaatacagtaccgccgccgacccgccgggcggggtgctgaccagcgccagcttcggccaggtccgcgactacgacctgtccaccggcgaccagtgggagctgggcagcaagttcgatttcctcgacggtcgcggcagcgccaccctggccgcctaccgcatcgtccgccgggacttctcggtggccgacccgaacaaccccaacctcagcgtgccggtgggccagcagacctccaggggcatcgaggccgccgcctccctgcggatcaccccgaagctgctggccgagggcaatttcgcctgggtcgacgcgcagtacgacgagttcaccgagaacgtcggcggcgtcgccgtctcgcgcaagggcaagacggcgccgaacgtgccggagcgggtcggcaacctgtggctgacctacgacttcgacccggcctggcagggcggggtggacgcgcgctacgtgtcctcggtgtacgccaacaacgccaacacctggcacgtgccgtcctacacggtctacgggactttcctcagctaccggctggacgagcgcacgcggatcaccgggcgcgtgcgcaacctcaccgacgaggtctacgcgcgcttcgtgcagagcacgccgctgtactacgtcggcgacccgcgcaccttcgagctgagcgtgcagacgcgcttctga

SEQ ID NO: 321372 - DNA, 1410 bp, Pseudomonas aeruginosa
atgagcgctgtcatgacgcccgccggtttcaccgactacaaggtcgccgacatcaccctggccgcctggggccgccgcgagctgatcatcgccgaatcggaaatgcccgcactgatgggcctgcgccgcaagtatgccggccagcagccgctgaaaggcgcaaagatcctcggttgcatccacatgaccatccagaccggcgtgctgatcgagaccctggtcgcgctgggcgccgaagtccgctggtcgagctgcaacatcttctccacccaggaccaggccgccgccgccatcgccgccgccggcatcccggtgttcgcctggaagggcgagaccgaggaagagtacgaatggtgcatcgagcagaccatcctcaaggatggccagccgtgggacgccaacatggtgctggacgacggcggtgacctgaccgagatcctgcacaagaaatacccgcagatgctcgagcgcatccacggcatcaccgaagagaccaccaccggggtccaccgcctgctcgacatgctcaagaacggcaccctgaaagtcccggcgatcaacgtcaacgactcggtgaccaagagcaagaacgacaacaagtacggctgccgccatagcctcaacgacgccatcaagcgcggcaccgaccacctgctgtcgggcaagcaggccctggtgatcggctacggcgacgtgggcaagggctcctcgcagtcgctgcgccaggaaggcatgatcgtcaaggtcgcggaagtcgacccgatctgcgccatgcaggcctgcatggacggcttcgaagtcgtatcgccgtacaagaacggcatcaacgacggcaccgaggccagcatcgacgccgcgctgctgggcaagatcgacctgatcgtcaccaccaccggcaacgtcaacgtctgcgacgccaacatgctcaaggcgctgaagaaacgcgcggtggtctgcaacatcggccacttcgacaacgagatcgacaccgccttcatgcgcaagaactgggcgtgggaagaggtcaagccgcaggtgcacaagatccaccgcaccggcaaggacggtttcgacgcgcacaacgacgactacctgatccttctcgctgagggccgcctggtcaacctgggcaacgccaccggccatccgagccggatcatggacggttccttcgccaaccaggtgctggcgcagatccacctgttcgagcagaagtacgccgacctgccggccgccgagaaggccaagcgcctgagcgtcgaagtgctgccgaagaagctcgacgaggaagtggccctggagatggtcaagggcttcggcggcgtggtcacccagctgaccccgaaacaggccgagtacatcggcgtgagcgtggaaggcccgttcaagccggacacctatcgctactaa

SEQ ID NO: 321373 - DNA, 540 bp, Pseudomonas aeruginosa
atgtccacgcacctcgccgatcactacaaccaggcctggctgttcgccgcccgcgcccaccgcaaccagaccctcagcggctcgccgctgccttatctggtgcacctgggcatggtcgccaacgagctgctggccgccgatcgcgacggtgccatcgaacggctcggggaaaccctgcagatcgcggtcctgcacgacaccctggaagacacggcgacctcacccgaggagctgcggcaacagttcggcgagttcgtctgtgccggcgtgcaggccctgagcaagcgcgtgggcgacggccccaagcgttccctcgacgactatctccaggcgcttgccgagggcccggcgcagtacgccctggtcaagctgtgcgaccgcatcaccaacctgcagccaccgccgcagacctggaaccaggacaagatcgcgaactaccaccaggagtcgcagctgatcctcgctcgcctcggccatgcccacgccgcgacggcccgacgcctgcgggaaaaaatcgagcactaccgccagtactactga

SEQ ID NO: 321374 - DNA, 873 bp, Pseudomonas aeruginosa
gtggtcgcgtccaaggaaccgatcatgagtcagagcgaacgccgtttcagcttcgagttcttcccggcgaagaccgaggccggccatgaaaagctgttggccaccgcccgcaacctggcgggctacaagcccgacttcttctcctgcacctacggcgccggcggatccacccgcgaccgcacgttgagtaccgtgctgcaactggacggcgaggtgaaggtgccgaccgcgccgcacctgtcctgtgtcggcgactcgaaagccgagttgcgcgaactgctcggccgctaccgcgaggccggcatccgccgcatcgtcgccctgcgcggcgacctgccgtcgggcatgggcatggccagcggcgaactgcgctacgccaacgaactggtggacttcatccgcaccgagaccggcgaccacttccacatcgaggtcgccgcctatccggaagtccacccccaggcgcgcagcttcgaggatgacctggcgaacttcgtgcgcaaggtgaaggccggcgccagcagcgccatcacccagtacttcttcaacgccgatgcctatttctacttcgtcgagcgggtcgccaagctcggcgtggacatcccggtggtccccggcatcatgccgatcaccaactactccaagctggcgcgcttctccgacgcctgcggcgccgaactgccgcgctggatccgcaagcaactggaagcctacggcgacgacagccgcagcatccaggccttcggcgagcaggtcatcagcgagatgtgcgaacgcctgctggagggcggcgcaccgggactgcatttctataccttgaaccaggccgatccgagcctggcgatctggaagaatctccagctgccacgctga

SEQ ID NO: 321375 - DNA, 1071 bp, Pseudomonas aeruginosa
atggccaactcacgcaagcatctgatctacctggtctacgggcgacagacctaccaccaggaagccctgttcagcatcgccagcgccttcgcccacctccgcgacggggcggcgcatggcctgacggtcagggtctataccgacgaccccagtccctacgccggcctgccggtgcaggtccgcgaagtgacggccgaggagttggtcgcctggtgccaaccgcacggctatcacttccgcgccaagcacgtggccctgcgcgacgccctggaagacgccgaccaggcattgctgatcgacaccgataccttcttccacagttcgcccctgcgcctgttcgaccgcatccagcccggcagcctgctgtgcaacgcgatcggcgcgcgctatggcgaacaccgtaacttcccgctctaccgcgacctctcgccctacctgttcgagcgcggctgggccgacgacgagatgcaccagctcaactccggcgtcatcggcctgcctcgggaagaggcgaaaatactcgaccgttcgttggaattaatggatgaactctatccaattgccaacggtgcctatactcttgaggaattcgtcctggccgtcgccgcccacaagcggctggagctggtgggttgtaccgacctgatccaccattactggagccggaaacagctgttccgcgcgaagatccaggcctggttgtgcaagcacggttcctcccttctcagcgctgcagccctcgacgacaccctcaaggtgaccgatcgactgccacgcccaccgcgtgccaagcgtctgctgtacaagctgggaaccctgccgttgccggctccgatgcgccagttcagtatcgaactgctctacggttgccacgaatacagtaacgagttcgaccgggcctgcggccccgtctggtgggagaaagccgcgaccaatgccatcgaacgctatccgcaggaaccgattgcggaacaaatcgaggattggctgaatcacagcttgctgcgcaacctccttggctcccgggccaacgagatccgccagcatttgcgccagcgtgacctgctctga

SEQ ID NO: 321376 - DNA, 402 bp, Pseudomonas aeruginosa
atggctggcgaaacctcgctgcgcaccctgctgcgcacgctcactcccgaactcaatcccggcgactatgtgttctgtacctgcgccgatggcgcgctgccgaacggcgccgagccgctcgccagcttccgcgagcgcgagggcctgaccctggtgctcgaacgccggcaggccgaacgcctgggcctgccctacgaatacgtggcggcctggatcaccctgacggtgcactcctcgctggcggcggtgggcctgaccgccgccttcgccacggcgctggccgaagccgggatcagttgcaacgtgatggccggctatttccacgaccacctgttcgtcgcccgcgacgagggccggcgcgccctcgccgtgctccagcggctggcggcggaggcacactga

SEQ ID NO: 321377 - DNA, 603 bp, Pseudomonas aeruginosa
atgtggcagagctatctcaacggcatcctggtggctgccggcctgatcatcgccatcggcgcgcagaatgccttcgttctcgcgcagagcctgcgccgcgagcatcacctctcggtggccgcgctctgcgtattctgcgacgcggtgctggtcagcctcggcgtgttcggcctggccaagctgctgctggaaaacccgacgctgctggccatcgcccgctggggcgggatcgccttcctgacctggtacgggctcaaggcgctgcttcgcgcgttgcgcccggacgctctcggcaacgcagcggaaaccgggccacgctcgcgcaaggcggtgcttctggcggcactggcggtcaccctgctcaacccccacgtctatctcgataccgtacttctgatcggttcgctcggcgcccagcaggccgcgccgggcgcctatgccctcggcgcggccagcgcctcgctgatgtggttcttcgccctcgccctcggcgcggcgtggctggccccccggctggcgcgcccggccacctggcgcctgctcgacctgatggtggcggccatgatgctgggcatggccgcgcaactgctgttccggggataa

SEQ ID NO: 321378 - DNA, 582 bp, Pseudomonas aeruginosa
atggctttcgaattgccgccgctgccttacgaaaagaacgcccttgagccgcacatttccgcagaaaccctggaataccaccacgacaagcaccacaacacctacgtggtgaacctgaacaacctgatcccgggtaccgagttcgaaggcaagagcctcgaagagatcgtcaagagctcctccggcggcatcttcaacaacgccgcccaggtgtggaaccacaccttctactggaactgcctgagcccgaacggcggtggccagcccaccggcgccctggccgacgccatcaacgccgccttcggctccttcgacaagttcaaggaagagttcaccaagacttccgtcggcaccttcggttccggctggggctggctggtgaagaaggccgacggctccctggccctggccagcaccatcggtgccggcaacccgctgaccagcggcgacaccccgctgctgacctgcgacgtctgggaacacgcctactacatcgactaccgcaacctgcgtccgaagtacgtcgaggcgttctggaacctggtcaactgggacttcgtagcgaagaatttcgctgcctga

SEQ ID NO: 321379 - DNA, 2064 bp, Pseudomonas aeruginosa
ttgaaactggactcccgacacagcctctcgctcaagctgctgcgtgtcgtgctactggcggcgctagccgttggcgtagtgctcagttgcgcgcagatcgtcttcgacgcctacaaggccaagcaggcggtgagcagcgacgcccaacgcatcctcgcgatggtccgcgacccttccacccaggcggtctacagcctcgaccgggaaatggcgatgcaggtcctcgaaggcctgttccagcacgaggcggtgcgccaggcgagcatcggccatcccggcgagccgatgctggcggagaaatccaggccgctgctggacctgccgacgcgctggctgaccgacccgatcctcggccaggaacgcaccttcagcattcgactgatcggccgcccgccctatagcgaatactacggcgacctgaagatcaccctggacaccgcgccctacggcgagaacttcgtcaccacttcggaaatcatcttcatctccggcattctccgcgccctggccatgggcctggtgctgttcctggtctaccactggatgctgaccaagccgctgtcgaagatcatcgaacacctggtcagcatcaatcccgaccgccccagccagcaccagttgccgctgctcaaggggcacgaacgcaacgagctggggctctgggtgaccaccgccaaccagttgctcgcctcgatcgaaagcaacagccacctgcgccgcgaggccgaggacaacctgctgcgcatttcccagtacgacttcctcaccggcctgccgaaccgccagttgctgcagcagcaactcgaccagatcctcgacggcgccggccgccagcagcgccgggtggcagtgctgtgcctgggcctcgacgatttcaaggggatcaacgagcagtacacctaccagctcggcgaccagttgctgatcgccctcgccgaccgcctgcgcgggcacagcgcgcggctcggttcgctggcgcgcctgggcggcgaccagttcgccctggtccaggccgacatcgagcaaccctacgaggcggccgaactggcgcagagcatcctcgacggcctggaagcgccgttcgagatcgaccagcacgaggtgcgcctgcgcgccaccatcggtatcaccctgttccccgaggacggcgagaccacggagaaactgctgcagaaggccgagcagaccatgaccctggccaagacccgctcgcgcaaccgctaccagttctacatcgccagcgtggacagcgagatgcgtcgccgccgggaactggaaaaggacctgcgcgacgccctgcagcgccacgagctgcacctcgtctaccagccgcaggtggactaccgcgaccaccgcgtggtcggcgtcgaggcactgctgcgctggcaacatccgttgcacggcttcgtcccgccggacctgttcatcccgctggcggaacagaacggcagcatcttcagcatcggcgagtgggtgctcgaccaggcctgccggcagttgcgcgaatggcacgaccagggcttcgacgacctgcgcatggcggtcaatctttccaccgtgcagctccaccacaacgccctgccacgggtggtcagcaacctgctgcaggtctaccgcctgccggcgcgcagcctggagctggaagtcaccgagaccggcctgatggaggacatctccactgccgcccagcacctcctcagcctgcgccgcgccggcgcgctgatcgccatcgacgatttcggcaccggctattcctcgctgagctacctgaagagcctgccgctggacaagatcaagatcgacaagagtttcgtccaggacctgctgcaggacgaggacgacgcgaccatcgttcgcgccatcatccagctcggcaagagcctgggcatgcaggtgattgccgagggcgtggaaaccgccgagcaggaggcgtacatcatcgccgaaggttgcaacgaaggtcagggctacctgtacagcaagccgctgccggccagggaactgacccagtacctcaagcaggcgcgacgcctgagccaggccaccagcagcgaacggccctga

SEQ ID NO: 321380 - DNA, 903 bp, Pseudomonas aeruginosa
atggacttcgacctgcgctggctgttcatcgccgccagcctggggctctgcgcctgggccggctggcagttcgtgcaccgccttgcccgggcgcgtctgctcggcgacgtaccgacctcgcggatccgttcggcggcgcagggtttcgtcgaactctacggggtgctcgaggagggcccggaaggcccgctgcaggctcccttgaccggcaagccgtgcctgtggtggcgctaccgcatcgaagtcgaggaaaagcgcagcggccgcgagaaggcctggcgcaccgtcgacaaaggtgccagcgagtcgccattcggcttgcgcgatgccaccgatgcctgcctggtcgacccacgcggcgccgaggtgcgacccttgacccagcagcgctgggaggcttttcgcgaagcaccgatcgataccctgcgactgctggagagcttcggcaccctggtcggcggagagcggctctaccgctacaccgaggagcgcctgcatgccggcgagccgctctatgcgctgggcgaattccgcagcagcggtggcggtcgccagggactcgatgccgaacgggagcagggtgcggtgatccgtgaatggaagggcgatttccacgggctgctggcgcgcttcgacagcgacggcaacggcgagctggacgagcgcgaatggaaccgggtgcgcctggcggcacggctggaggccgaggatcggcatcgggcaagcagcgccgcgccgacccgccaccggctcggcaagccgggggaggcgcatcccttcattctctccagccagggcgaggacgatctcgccgtgcaactgcgccgccaggcggcgggggccgcgttgctctgcctgggcagcgcgctattggcgggctggctgttcagccgcctgttctga

SEQ ID NO: 321381 - DNA, 573 bp, Pseudomonas aeruginosa
atgagtctgaccgctatcgctttctgggttgtcctgctgctgctcgccggctacgcggtggtgctctacaacggcctggtacggctgaagcacgccgtgggcaaggcctgggccaacatcgacgtgctcctcaagcagcgccatgacgagctgccgaagctggtcgaggcctgcaagcaatacatgcagcacgagcgcgccaccctggagcgggtcatcgccgcccgcaacgccgtcgccagcgcccgcgagcgcgccgacgtgaatgccctgggcaaggccgagagcggcctgcgcgccggcctggggcagctcttcgcgctggccgagaactacccgcagctcaaggccaacgaaagtttccagttcctttcccagcgcatcagcggcctggagaacgggatcgccgatcgccgcgagctgtacaacgaggcggtgaacctgaacaacgtgcgcatcgagcaatttcccgacctgctgatcgcccgtgtcgctggcttcaaggccgccgagctgttgcagttcagcgaggcggagaaggccgacgtcgatctcaaggccctgttcggctga

SEQ ID NO: 321382 - DNA, 1341 bp, Pseudomonas aeruginosa
atgactcgtatgcccctggccaccgccagtctgctggccctcgccatctccctcgccggctgcggcgacgacaagaaagccgaagcgcccgcaacaccggcggccagcacgcagcccgccgcgcccgccgccgccccggccgccaaggtcgacgaggccgccgccaaggcggtgatcaagaactacgcggacctcgccgaagccaccttcgccgatgccctaagcaccgccaaggacctgcagaaagccatcgacgcgttcctcgccaagcctgacgcggagaccctgaaagccgccaaggaagcctggttcgccgctcgtaccccctactcccagagcgaagccttccgcttcggcaacgcgatcatcgacgactgggaaggacaggttaacgcctggccgctggacgaaggcctgatcgactatgtcgccaaggactaccagcacgccctgggcaaccctggcgccaccgccaacatcgtcgccaacaccgagatccaggtcggcgaagacaagatcgacgtcaaggaaatcactggcgagaaactggccagcctgaacgagctgggcggttccgaagccaacgtcgccaccggctaccacgccatcgagttcctcctctggggccaggacctgaacggcaccggtccgggcgccggcaaccgtcccgccaccgactatgcccagggcaaggactgcaccggcggccattgcgaccgtcgtgccgcctacctgaaggccgtcaccgacctgctggtcagcgacctcgaatacatggccggacagtggaaagccggcgtcgccgacaactaccgcgccaagctggaggccgaaccggtggataccggcctgcgcaagatgttcttcggcatgggcagcctgtccctcggcgaactggccggcgagcgcatgaaggtcgcgctggaggccaactccaccgaagacgagcacgactgcttcagcgacgacacccaccacaccctgttcttcaacggcaagagcatccgcaacatctacctcggcgagtacaagcgcatcgacggcagcgtggtcaagggcccgagcctggccgacctggtcgccaaggccgacgccgccgccaacgacaccctgaaggccgacctggccgacaccgaggccaagctgcaggccatcgtcgacagcgccgagaaggatggcgtgcacttcgaccagatgatcgctccggacaacaaggacggccagcagaagatccgcgacgccatcgccgccctggtcaagcagaccggcgccatcgagcaggccgcgggcaagctgggtatccaggacctgaagccggacaacgccgaccacgagttctga

SEQ ID NO: 321383 - DNA, 1422 bp, Pseudomonas aeruginosa
atgtcgttgccgtcaccttccatgccgctcgcctgtctcctgacggcgctccttctgggcggatgcggcgccgacgacgaaccgctgcgcgccgagcccggcgaacacctgtccgggggcgcgaccacggtgctgcaaagcgaccgcaacgccttctccctgccctccgccaacctcgccccgagccggcgcctggacttcagcgtgggcaacagtttcttccgcaacccctgggtcatcgccccttcctccaccaccgcgcgcgacggtctgggaccgctgttcaataccaacgcctgccagaactgccatgtgaaggacggccgcggccacccgccgggagcggacgcggtcagcgcggtgtcgatgctggtacgcctgtcgatcccggccggccctgcggacggcaagaccctgttgcaccagggggtgattcccgagccgacctacggcggccagttgcaggacgtcggcattcccggcgtcgccccggaaggcaaggtgcgggtggactacgagccgctgaaggtgaggttcgaggacggcaccgaggtcgaactgcgcaagccgatcctgcgtatcagccagctcggctatgggccgatgcatccgcagacgatgttttccgcccgcgtcgccccgccgatgatcgggctcggcctgctcgaggcgattcccgaagaggcgatcctggccaatgccgatccggacgaccgaaacggcgacggtatccgcgggcgcgccaaccaggtctgggatgccgcgcggcagcgcaccgcgctcggccgcttcggctggaaggccggccagccggatatcccgcagcagaacgcgcacgccttcgccaacgacatgggcctgaccagcagcctgctgccccacgacgactgcagcgccgcccaggtcgagtgccgccgggcgcccgacggcggcgagccggaagtcagcgacaacatcttcgcccaggtgctgttctacagccgcaacctggcggtcccggcgcggcgcaaggtggacgacccgcaggtgctggccggcaagcgtctgttcgcccaggccaactgcgtggcctgccacgttcccgccttcactaccggttccgacgccagcgagccggagctggccaaccagcggattcgtccctattccgacctgttgctgcatgacatgggcgacggcttggcggacaatcgcccggaatttctcgccagcgggcgggactggcgaaccccgccgctatggggcatcggcctgaccgaaacggtcaacggccacacccagttcctccacgacgggcgcgcccgcaatctgctggaggcgatcctctggcacggcggcgaagccgaagcggccaagcggcacgtgctcggcttcgacgacgaccagcgcagcgccctgctggccttcctgaattcactctga

SEQ ID NO: 321384 - DNA, 1065 bp, Pseudomonas aeruginosa
atgttccgcccacgactgctcttgaccagcctcgccatcgccctcggcgcctgctcgccgcaagacccgcaggccgtcaccagtgccgccctggcgcaacaggtgatcctgccgacctacagccgctgggtggaggccgaccaggccctggccagcagcgccctggcctactgccagggcaaggaagacctggccaaggcccgcgacgcgttccacgccgcgcagaaggcctgggccgagctgcaaccgctgctgatcggcccgctggccgagggcaaccgcgcctggcaggtgcagttctggccggacaagaaggacctggtcgggcgccaggtcgaacagttgctgaagaacaacccgcaggtcgacgccgcggccctggccaaggccagcgtggtggtgcaggggctctccgcctacgaatacatcctcttcgacagcaagatcgacctcgccgacgccgccaccaaggcccgctattgcccgttgctggaagccatcggcacccaccagcagcaactggcccaggacatcctggcgcgctggaagaacgacggcggcatgctcacccagatgagcaagttccccaacgaccgctacgccgacgcccacgaggcgatcgccgagctgctgcgggtccaggtcaccgccctggacatgctgaagaagaaactcggtactccgctgggccggcagagcaagggcattccccagccctaccaggccgaggcctggcgcagcaacgcctcgctggccagcctggacgccagcctgagcggcgcccaggcgctctgggaaggtatcgacggcaagggcctgaagaccctgctgccggccgaacagaaggacctggccggcaagatcgacgccgcctacgccgacagccacgcgaagctggcggcgctggaacagaaaccgctctccgaactgctcgccagcgaagacgggcgcaaccagctcaacgccctctatgacagcctgaacgtggtccaccgcctgcacgaaggcgatctggcccgcgccctcggcgtgcaactgggcttcaacgccaacgatggcgactga

SEQ ID NO: 321385 - DNA, 1095 bp, Pseudomonas aeruginosa
atgctgcgacgtcatgtgatcggcctgggcagcctgctgctcggcgccttgtccttcggcggctggagcttcagccgcctgggtagccaaccgctggtgctatcggcgcgcgacgacgccgatggccagcattacgcggtgggctaccgcctggacggcaaatgccagttcgccacccgcgtggcccagcgctgccacgacatcgtccagcacccgagcctgccgctggcgctgttcgtcgcccgccggccaggcaccgaaagctacctgatcgacctgaacgacggtcgcctgctgcagaccctggtctcgcagaaagaccgccacttctacggccacggcgtgttccaccagagcggcgagtggctctacgccaccgagaacgacactaccgatcccggtcgcggcgtgctcggcgtctaccgtttcgacggcgagcgactgcagcacagcggcgagatatccacccacggcctcgggccgcaccaggtttcctggatgcccgacggcgagaccctggtagtggccaatggcggcattcgcaccgaggcggaaagccgggtcgagatgaacctcgacgccatggagcccagcctggtgctgatgcgccgcgacggcaacctgctgtccaaggaaaccctggcgcagcagatgaacagcgtccgccacctggcgatcggtcgcgacggcaccatcgtcgccggccagcagttcatgggcgatgcccacgaacatgccgacctgctggcgatcaagcgccccggccgtcccttcgaagccttcccggtggccgaggagcagcgcctggcgatggcccagtacaccgccagcgtggcgatccacgacgacctgcgcctggtggccctgaccgccccgcgcggcaaccgtttcttcatctgggacctggacagcggtgccgtacgcctcgacgcgccgttgccggactgcgccggcgtgggcgcggtgaagaacggcttcgtcgtcacgtccggacagggccgttgccgcttctacgactgccagggcgagcgcatcgccgcgcaaccgctggagctgccttccggcctctgggacaaccacctgcacctggcctga

SEQ ID NO: 321386 - DNA, 1131 bp, Pseudomonas aeruginosa
atgttgctccgccgcatgttgatcatgctcgccgcggtgatcgccgtggtggcgattctcgccggctacaaggtctactccatccgtcagcagatcgcccttttcagcgcaccgaaaccgccgatcagcgtgaccgccagcctggccgaaaagcgtccctggcagagccgcctgccagccatcggcagcctcaaggcattccagggcgtgaccctcaccgccgaagtctccggcacggtacgcgacgtactgttcctttccggcgaccaggtgaagctggaccaaccgctgatccagttggaaagcgacgtcgaggaagccaccctgcgcactgctgaggccgatctcggcctggccagggccgagtaccagcgcggccgcgaactgatcggcagcaaggccatctcgaaaagcgaattcgatcgtctcgccgcgcagtgggccaagaccagcgccaccgtcgccgagctgaaggcggcgctggcgaagaagcgcgtgctcgcgcccttcgccgggaccatcggcatccgccaggtggacgtcggcgactacgtctcgcccgggacgccgatcgccaccttgcaggacctttccaccctgctcctggatttccacctgcccgagcaggacttccccctgctcagccgcggccagctggtgaaggtccgggtcgccgcctaccccggccaggtgttcgacgccgagatcgccgccatcaaccccaaggtcgacaacgagacccgcaacctgcaggtccgcgctgccctggagaacccggacggcaagctgctgccgggcatgttcgccaacctcgaggtgatgttgcctggcgaggaacaacgcgtcgtggtgccggagacggcgatcaccttcaccctctacggcgactcgatctacgtcgtcgggcagaagaaggacgagcagggccaggtgtcgaaggatgacaagggccagccgcaacaggtcgtcgagcgccgcttcgtcaggatcggcgaacgccgcgaaggcctggcggtggtgctcgaaggccttgagggcggcgagcaggtagtgacttccgggcaactgaagctcgacaacggcgccgcggtggccatcgtcgccgagcgggacctccagcaagagcactga

SEQ ID NO: 321387 - DNA, 3057 bp, Pseudomonas aeruginosa
atggcttttaccgatccgttcatccgtcgtccggtcctggcgagcgtggtcagcctgctgatcgtcctgctcggcatgcaggccttcagcaagctggtgatccgcgagtatccgcaaatggagaacgcgctgatcacggtgaccacgctctacgccggcgccaacgcggaaaccatccagggctacatcacccagccgctgcagcagagcctggccagcgccgaaggcatcgactacatgacctcggtgagccggcagaactattcgaccatctccatctacgcgcggatcggcgccaataccgatcgcctggtcaccgagctgctggccaagtccaacgaagtgaagagccagctgccgccggacgccgaggacccggtgctgcagaaggaggccgcggacgcctcggcgctgatgtacatcagcttctacagcgagcagatgaacaacccgcagatcaccgactacctgtcgcgggtgatccagcccaagctggcgaccctgcccggtatcgccgaggcggagatcctcggcaaccaggtgttcgccatgcgcctgtggctggacccggtgaagatggccgcgttcggcgtcaccgccggcgagatcaaccaggcggtgcagcagtacaacttcctcgccgccgccggcgaggtgaagggccagttggtggtcaccagcgtcaatgcttccaccgacctcaagtcgccccaggccttcgccgccatcccggtgaagaccgacggcgaccgccgggtgctgatgggtgatgtcgcacgggtcgagctgggcgccgccagctacgacgcgatcagttcgttcaatgggattccctcggtctacatcggcatcaagggcacgcccagcgccaacccgctggacgtgatcaaggaagtgcgggcgaagatgcccgaactggaagagcaattgccgcccaacctcaaggtgtccatcgcctacgacgccacgcgcttcattcaggcctccatcgatgaagtggtgaagaccctcggcgaggcggtgctgatcgtcatcgtggtggtgttcctattcctcggcgcgttccgttcggtactgatcccggtggtgaccattccgctgtcgatgatcggcgtattgttcttcatgcaggccatgggctactcgatcaacctgctgaccctgctggcgatggtcctggccatcggcctggtggtggacgacgcgatcgtggtggtggaaaacatccaccgccacatcgaggagggcaagccgcccttcgaggctgccctggagggcgcgcgggagatcgccgtaccggtggtcagcatgaccatcaccctcgccgcggtctacgcgccgatcggcttcctcaccggcctcaccggcgccctgttcaaggagttcgccttcaccctggccggcgcggtgatcatttccgggatcgtcgccctgaccctgtcgccgatgatgtgctcgcgcctgttgcgccacgaggagaatccctcgggcctggcgcatcgcctcgacctgatcttcgagggcctgaagcgacgctaccagcgcgccctccacggcaccctggacacccgtccggtggtcctggtgttcgccgtgctggtactggcgctgatcccggtactgctgatgttcaccaagaaggagctggcgccggaagaggaccagggcatcgtgttcctcatgaccaactcgccgcaaaccgccaacctcgactacctgaatcgctacaccgccgagttcgaaagcatcttccgcagcttcccggagtattactcggcgttccagatcaacggctacaacggcgtccaggccggcatcggcggcatgctgctcaagccctgggacgaacgcgaaaagagccagatggaattgctccatgcggtgcaggcgaagctcaacgagattcccggcgtgcagatcttcgccttcaacctgccgtcgctaccgggcaccggcgagggcttgccattccagttcgtgctcaacaccgccaacgactacgagtcgctgctgcaagtggcgcaacgggtgaagcagcgcgccagcgagtccggcaagttcgccttcctcgatctcgacctggcgttcgacaaacccgagctggtggtcgacatcgaccgcgagaaggccgcgcagatgggcgtctccatgcaggacctgggggtggcgctggccagcctgctcggcgagggcgagatcaaccgcttcaccatcgacgggcgcagctacaaggtcatcgcccaggtcgaacgcccctatcgcgacaatcccggctggctcggcagctactacgtgaagagccgcaacggccaactggtcgccctctcgaccctgatcgagacccacgaacgggcacggccacggcaactgaaccagttccagcagctcaactcggcgatcatctccggcttccccatcgtcagcatgggcgaggccatcgagacggttcagcagatcgcccgcgaggaagccccgcgtggcttcgccgtcgactacgccggcgcttcccggcaatacgtgcaggaaggcagcgcattgctggtcaccttcggactggccctggcgatcatcttcctggtcctcgccgcacagttcgaaagcttccgcgatccgctggtgatcatggtcaccgtgccgctgtcgatctgcggtgcgctgataccgctgttcctcggcgtgtcgagcctgaacatctatacccaggtcggcctggtgacactgatcggcctgatcagcaaacacggcatcctgatcgtcgagttcgccaaccagttgcgccacgaacaggggctggggcgtcgcgaggccatcgagcaggccgccgcgatccgcctacggccagtactgatgaccaccgcggcgatggtgctcggggtgatcccgctgatcctcgccaccggcgccggggcggtcagtcgcttcgacatcggcatcgtgatcgcgaccggcatgtcggtgggcaccctcttcaccctgttcgtcctgccgtgcatctacaccctggtggccaggccggatgccccgccaggcgtgacgcaagcggcaaacgcacactga

SEQ ID NO: 321388 - DNA, 1197 bp, Pseudomonas aeruginosa
atggccgagagcgctttttccgaacgtatcgtgcagaacctgctggataccgacttctacaagctgaccatgatgcaggcggtgctgcacaactatcccaacgccgaggtggagtgggagttccgctgccgcaaccaggaagacctgcgcctgtacctgccggccatccgcgaacaactggaatacctggcgggcctggcgatcagcgacgagcaactggccttcctcgaacggattcccttcctggcgccggacttcatccgcttcctcgggttgttccgcttcaacccgcgctacgtgcagaccggcatcgagaacgacgaattcttcctgcgcctgaaaggtccctggctgcacgtgatcctcttcgaagtgccgctgctggcgatgatcagcgaggtgcgcaaccgcgcccgctacccggccgccaccgtcgagcaggcgcgcgaacgcctgcaggaaaagttcgattggctgcgccgggaggccagcgccgaggaactggccggcttcaagatggccgacttcggtacccgccgccgcttctcctatcgggtccacgaggcggtggtgagcggtctgaaggaggactttccgggctgcttcgtcggcaccagcaacgtccacctggcacgcaagctcgacctcaagcccctcggcaccatggcccacgaatggctgatggcccaccagcagctcggtccgcgcctgatcgacagccagagtgccgcgttggactgctgggtccgcgaataccgtgggctgctcggcatcgcgctgaccgactgcatcaccaccgatgccttcctgcgcgacttcgacctctatttcgccaagctcttcgacggcctccgccacgactcgggcgacccattgctgtgggcggaaaagaccatcgcccactacctcaagctgggcatcgacccgctgaccaagaccctggtgttctccgacggcctcgacctgccacgggccctgaagatctatcgcgcgctgcagggccggatcaacgtcagcttcggcataggcacgcatttcacctgcgacctgccgggcgtcgagccgatgaacatcgtggtgaagatgagcgcctgcaacggccatccggtggcgaagatctccgatacgcccggcaaggcgcaatgccgggaccctgacttcatccactacctcaagcacgtgttccaggtcgcctag

SEQ ID NO: 321389 - DNA, 243 bp, Pseudomonas aeruginosa
atgaaattagaattcactcgaggtttgttgctggtcggcgctctcgccgtggctacagccgcggctgccgcctggcacgaacccgcgccgaacgtggtgcagatgagcggcggtcatgagtactgcccgacgccttcggcgctcaaggccgagcggccgacgcgccaggaggtccagccgaacaaggacatcctgctgctgatgttcggtctttcccaggggggagccagcctgtcgcgctga

SEQ ID NO: 321390 - DNA, 705 bp, Pseudomonas aeruginosa
atggctcccgatctggcatccctgcaacgtatctccggcgactccgccatcgaccagtggttgcaggtacccggcagctgggtcgaggagcccaacgagcgccgtggcggggccagcggcgtgcagcgggtgtacaccggcgatggacggctgctctatcgcaagcagcagaccggccacgtctaccgcgactggcagcgccctttcggctatcccaccgccatgcgcgagcgcgatgcgctacgggccttcgagtcgctcggtatacgcgtgccgcgcctggtctattccggctgccgcaaggtcgacgggcaatggcaggcgctgctggtgaccgaagccctggagggtttctccagcctcgacgagtgctatgcgcgcggtgaccaggaccgctggggcgaagcgaagcaccaaagaattctgcaacaaatcggcgctaccattgcccggatgaatctcgcccactggcagcacggttgtctctatccgaagcacatcttcgtccgcgtcgagggtgaggccatcgaagtagcgctgatcgacctggagaagagccgccgccgccttacggtgaacaaggcgtcccagcacgatctgaagcagttgaagcgccgttcgtcgtggactggcgcgcagtggcaagccttcatctatggttaccagacggcgtttggcagcgccatcaaagggttgcagacatga

SEQ ID NO: 321391 - DNA, 684 bp, Pseudomonas aeruginosa
atgaacaatccgcctgtcgacctcgacttttctcacaagtatgatcgcgagcatgctgaggcttacctgaagaagcatcaggacggcctcgcccggaaactttcccaccggcgcgacgtccaactcgcccggcacgcgctgaagctcgcggggcagcccaacctggtgctcgacctgccctgcggcgccggacgcttctggccgctgctggcggaaaaggacaaccgggtgatcatcggcgccgacaattccgcggacatgctggcggtcgcctgcgccggtcagccggacggtgtggtgaaacgggtacggcccttgcagacttccgctttcgccatcgacctgccggacagctcggtggacaatatcttctgcatgcggctgctccaccacatcggcgaggcggacgatcgacgcgtcctgctccgcgagtttcaccgggtcacgcgggacagcgtgatcctttccctctgggtcgatggcaatttcaaggcctggaagcgtaggcgcatggaggcacggcgggtagcgaacggggaacagaccggctaccagaaccgcttcgtattaccagccgaaacggtcgagcgcgagttccgcgacgccggcttcgtcgtccagaagcatctcgatttcatcccgctgtatcacatgtggcgggtctatatcttgcgaaaggaataa

SEQ ID NO: 321392 - DNA, 1281 bp, Pseudomonas aeruginosa
atggagtataagcagagcctcgcccgccggatcgtcatcgccttcatgctgatgacggtcgccgtggggggactgttctccgccggcatcgtcggcgtggtccacatcatcgaggagcgcctgatttcccgcgacctgggcggcgaactggagcgcatcctgcgcgacgacctggcccagggacgcaacccggtgctcgatcccggcatgcgcttcttcatcagcgacggccagggctcctacgccatgccgccggcgctggaccaactggatgtcggtttccacgaagtgttcgagggcgacttgtcgttccatgcgctggtgcgcgacatcgatggtcgccgcttcgtcctgctgcaggaccagagcgatttcgaagcgcgcgagcaggtgctctacgcctcggtgctgaccggctacgtgctgagcatcgccctggccggcctgcttggctggatgctcgcgcgcaaggtgatggagccggtggtgcgcctggcgcgccaggtgcggcatcgcgaacagttgctcggtctggcgccgccgttggcgccggactacgccaacgacgaggtcggcgagctggccgcttccttcgacgagacccttggccgcctgcgcgacgcgctcaagcgcgagcaattgttcaccagcgacgtcagtcatgagttgcgtacgccgttgatggtcatcgccacctcatgcgaactgctggccgaagaacccagcctcggcccgcgcgcccgtggccaactggagcggatgaccaaggccaccgaggagatgcgcgacctggtgcaaaccttcctgttgctggcgcgtgcgcagaagggcgaggaaagcctggcgccccacggtagcctggagagcatcgccgacgacctggtccaggtctggcgcgaacaggtcgaagcgcgaggactgaccctgcactaccgcaacgaaggtgcctgcgccggccagttcaacgcgccactgctgcgcgcggtgatgggcaacctgttgcgcaacgcgacccactacaccgatgccgggagcatcacgctgaccctcgacgagcatggtttcagcgtcgaggacaccggggcgggcgtcccggaagaacaacgcgaacgcattttcatgcccttcgttcgcggcagttccagctccgggcgcggcgaaggccttggcctcgggctctcgctggtgaagcggatctgcgcggccgagggctggagcgtaaccctcagcgcggtggagccgcacggctgccggttcgaagttttactcgatgttgcttga

SEQ ID NO: 321393 - DNA, 684 bp, Pseudomonas aeruginosa
atgcgaatactggtggtcgaagacaaccgcgacatcctggccaacctggccgattacctgtcgctcaagggctataccgtggattgcgcgcaggacgggctgtccggcctgcacctggcggccaccgagcactacgacctgatcgtgctcgacgtgatgctgccgggaatcgacggctatgccctgtgccggcgcctgcgcgaagacgcacggcgcgacaccccggtgatcatgctcaccgcccgcgaccagttggacgatcgcctgcaggggtttcgttccggagccgacgattacctggtcaagcccttcgccctttccgaactttccgcacgcatcgaggcggtgctgcgtcgcgcccagggtggcggccgccgcgagctgagcgtggccgatctcagctatgacctggataccctggaggtcaagcgcgcgggcaagtcgctcaagctcaatccgatcggcctaaagctgctcgccgtgctgatgcagaagagcccccatgtggtgcgccgggatgccctggaagaagcggtctggggcgacgactgcccggacagtgacagcctgcgcagccacgtccatcaactccgtcaggtgatcgacaagccattctccgtggccttgctgcatacggtgcatggcgtcggctaccgcctggcggaggagccgaatggagtataa

SEQ ID NO: 321394 - DNA, 795 bp, Pseudomonas aeruginosa
atgacccaggccgccgtccattccccttcccgtccattcaacccctggctgttcctcgccctgccgctgggcctggcggcactgctgctggccttcgagccggtgaccctcgacctcgccctggccaacctgatgtacgacccgggcgccggcttcatcggccggcacagttggttcctggagaacatcctgcacgaccgggtcaagcaactggtgatcgccatcagcgtcctcggcctgctggtctccatcgccggactgttccaccggccatggcgcgcactgagcaggccgctggcctatgtgttcctcgccatgagccttgcagccagcatagtcactccgctcaaggcgctcaccgccgtgcagtgcccctggagcctggcgcagttcggcggcgaggaaacctatagttcgctgctcagcccacggccgccgaccgagcaccccggacgctgctggccgggcgggcacgcatcgtccggattcgtcctgttcgcgctgttcttcgccctgcgcgaccgcaagcccaggctggcgcgctacgccctggccttcgccttcgccatgggctgtctgctatcgctgtcgcgcatgctgcaaggtgcgcacttcctctcgcacaacctgtggacgatgctgttcgactggctgatctgcctcggcctgtaccgcctgatgctctaccgaccggagacgcggggacagcgcaacggcggcgccgacgaaaaccgcgttcaggaagacgattcgtccgctcccagcacgccgaactcgatgggcaccttcatgtag

SEQ ID NO: 321395 - DNA, 330 bp, Pseudomonas aeruginosa
atgcaaggctatcaactgaccttcatcacccagcaggggcgccgccaccagggccagccgatctgcgactggctgctggaagaggcgcgccgcctgggcgtgcgcggtgccaccgcgctggctgccagcgaaggcttcggccagagcggccggctgcattcgatgcacttcttcgagctggccgaccagccgcaggaaatcctcatggcggtcgatcccgagcagtcagaacggctgttcgagtcgatccgccaggccggcgtgcggctgttctacatgaaggtgcccatcgagttcggcgtgctgggagcggacgaatcgtcttcctga

SEQ ID NO: 321396 - DNA, 384 bp, Pseudomonas aeruginosa
atgtggaaatccattctcgccatcgccctcggcgccgccctgggggcgttgctgcgctggttcctcgggctcaagctgaacagcctgctgcccagcattccccccggcacgctgctggccaacctggtcggcggctatgtcatcggcgcggcgattgcctatttcgcccaggcgccgggcatcgctccggaatggcggctactgatcatcaccgggttctgcggcggcctgaccactttctccaccttttccgccgaggtcgtcagcctgcttcaggagggccgcctgggctgggccgccggggccatcgcgacgcacgtcagcggctcgttgctgatgaccctgctggggttgttctcgatgaactggatgctgggcaaatag

SEQ ID NO: 321397 - DNA, 687 bp, Pseudomonas aeruginosa
atgcgcccagtcctgctgctttgctgcctgttcctgtccgccaccgcccaggccgaggattgctcgccgcaaacctccgtcggtagctggtgcgagctgccgctcgcggctctccacccgacccagcagaatgtcggcctgctgcaggtcgaggatgaccaggccaagctcgccgggaagaagcccaaggctctcgagcgctacttgcgcaagaaggagattccggtggtgatcggccccggcggccgcttctacctcaccgatcgccatcacctgagtagcgcgctctggcgcctggacccgaaacagggcgtgccggtgaaggtgatcggccggctaccccaggccagcgacttctgggagaagatgcaggaaaaccactgggtctggctgcacgatgcgcgtggcgcggagatcccgcccgaggccctgccgaacgctctcgccgggcttggcgacgatccctaccgcgccctggccggctacgccgaggacgagaacgccttcgacaaggatcggcagagctatttcatcgaattccactgggcgcgctatttcggcgaacgcatgcactggcggccgatcagccgcgccactctgcccgacgacctgaagcaggcactgcgcctggcctgcgaaccggcggcaagggagctgccgggctaccgccaggactgcccgcactga

SEQ ID NO: 321398 - DNA, 1644 bp, Pseudomonas aeruginosa
atggctgccaaagaagttaagttcggcgattccgctcgcaagaaaatgctggtcggcgtgaacgtgctggccgatgccgtcaaggccaccctcggcccgaaaggccgcaacgtggttctggacaagtccttcggcgctccgaccatcaccaaggacggcgtttccgtcgccaaggaaatcgagctgaaagacaagttcgagaacatgggcgcgcaactggtgaaagacgttgcctccaaggccaacgacgctgccggtgacggcaccaccaccgcgaccgtcctggcccaggccatcgtcaacgaaggcctgaaggccgttgccgccggcatgaacccgatggacctgaagcgtggcatcgacaaggccaccgtggctatcgtcgcccagctgaaagagctggccaagccctgcgccgacaccaaggccatcgcccaggtaggcaccatctccgccaactccgacgagtccatcggccagatcattgccgaagccatggaaaaagtcggtaaagaaggcgtgatcaccgtcgaggaaggctcgggcctggaaaacgaactgtccgtcgtcgaaggcatgcagttcgatcgtggctacctgtccccctacttcgtgaacaagccggacaccatggccgccgagctggatagcccgctgctgctgctggtcgacaagaagatctccaacatccgcgaaatgctgccggtgctggaagccgtcgccaaggccggccgtccgctgctgatcgtcgccgaggacgtcgagggcgaagccctggccaccctggtggtgaacaacatgcgtggcatcgtcaaggtcgcggctgtcaaggctccgggcttcggcgatcgccgcaaggccatgctgcaggacatcgccatcctcaccggcggtaccgtgatcagcgaagaagtcggcctgagcctggaaggcgctaccctggagcacctgggcaacgccaagcgcgtcgtgatcaacaaggaaaacaccaccatcatcgatggcgccggtgtgcaggctgatatcgaagcccgcgtcctgcagatccgcaagcagatcgaggaaaccacttccgactacgaccgcgagaagctgcaagagcgcctggccaagctggccggcggtgttgccgtgatcaaggtaggcgctgccaccgaagtcgagatgaaagagaagaaagcccgcgtcgaagacgccctgcacgctacccgtgcagcggtggaagagggcgtggttcccggcggcggcgtagccctggttcgtgccctgcaagccatcgaaggcctgaagggtgacaacgaggagcagaacgtcggtatcgccctgctgcgtcgcgccgtcgaatcgccgctgcgccagatcgtggccaacgccggcgacgagccgagcgtagtggtcgacaaggtcaagcagggttccggcaactacggcttcaacgctgctaccggcgtgtacggcgacatgatcgagatgggcatcctggacccggccaaggtcactcgttccgctctgcaggctgcggcctccatcggcggtctgatgatcaccaccgaagccatggttgccgagatcgtggaagacaagccggccatgggcggcatgcctgacatgggcggcatgggcggcatgggcggcatgatgtaa

SEQ ID NO: 321399 - DNA, 294 bp, Pseudomonas aeruginosa
atgaagcttcgtcctctgcatgatcgcgtcgttatccgtcgcagcgaggaagagaccaagaccgcaggcggcatcgtgctgccgggttccgccgccgagaagccgaaccgcggtgaagtggtagccgtaggtaccggtcgtgtactggacaacggcgaagtgcgcgctctggcagtgaaggtgggcgacaaggtggtcttcgggccttactccggcagcaacgccatcaaggtcgatggcgaggaactgctggtgatgggcgagtccgaaatcctcgccgtcctggaagactga

SEQ ID NO: 321400 - DNA, 540 bp, Pseudomonas aeruginosa
ttgaatttttccccggctggcgccaactactggtggtaccgggggcaaacgggccccgccaaggactctgaaatgcgcgctttcctctttctgctgttgctcttcccgctggtcgagctggccgtcctgatcaaggtcggcagtatcatcggggtcggctggatcctgttcctgatcgtcgccagcgccttcatcggtgctgcattgttgcgcgtggccggcgtggccaccgcctggcgcgcccgcgaacgactggcccgtggcgaactgccggagcaggaaatgctcgaaggcctgttgatcgccgtcggcggcggcctgctgatgctgccgggtttcatcagcgacatcttcggcatcctctgcctgattcctttcacccgtcgcctgatgctcggcggcctgcgccgccgcgtcgaacagcaggcgctgcgccggcgcgccttcgccgacgacctgaacgcccgctacggacagggtccgtcgcggccgaacgtcatcgagggcgagtacgagcgccgcgacgattcgcgcaactga

SEQ ID NO: 321401 - DNA, 735 bp, Pseudomonas aeruginosa
ttgagcgttgaagctgcaaagaatgcccgagaattgctgctcaaggaataccgtgcggtcctttccacccactcgaagaaatggccgggctttcctttcggttcggtggttccctattgcctggatgccgaaggccggccgctgatcctgatcagccggatcgcccagcacacccacaacctgcaggcggacccgcgctgctcgatgctggtaggcgagcgcggcgccgaggatatccaggctgtcggccgcctcaccctgctggccgaggcgcggcaattggcggaggaggaggtcgccgcggcggccgagcgttactaccgctatttccccgagtccgccgactaccatcgggtccacgatttcgacttctgggtgctgcagccggtccagtggcgtttcatcggcggtttcggcgcgatccactggctggccgccgagcgcgtgccgctggccaatccgttcgccggagaagccgagcgcggcatggtcgagcacatgaacagcgaccacgccgccgccatcgcccactatgtggaactggccggactgccggcgcatgccgcggcgcagctggcgggaattgatacagaaggtttccacctgcgcatcggccagggcctgcactggctgccgttccccgccgcctgcggcaaccccggggccgtgcgccaggcgctggtgcaattggccagggccgagcgctggcctaccgtcgagccggagcagggttga

SEQ ID NO: 321402 - DNA, 759 bp, Pseudomonas aeruginosa
atgcaattgaaagacaaggtcatcatcatcaccggcggctgccaggggctcggccgggcaatgggcgaatatctcgccggcaagggcgccaggctggccctggtcgatctcaaccgcgaacgtctcgacgaagccgtcgctgcctgcaaggccgccggcggcgacgctcgcgcctacgtgtgcaacgtggcggacgaggaacaggttacccacatggtggcccaggtcgccagcgacttcggcgcgatcaacggcctggtcaacaacgccggcatcctccgcgacggcctgaccatcaaggtcaaggacggccagttgagcaagatgagcctggcccaatggcaatcggtgatcgacgtcaacctcaccggtgtgttcctctgcacccgcgaagtggcggcgaagatgatcgagctgaagaacgaaggcgcgatcgtcaacatttcctcgatctcccgcgccggcaacatgggccaggccaactactcggcagccaaggccggggtggccgcggataccgtggtctgggcgaaggaactggcgcgctacggcatccgcgtggccggcgtggcgccgggcttcatcgagaccgagatgaccgccgggatgaaacccgaggcgctggagaagatgaccgccggcatccccctcaagcgtatgggcaagccggtggagatcgcccactcggtggcctacatcttcgagaacgactactacaccggccgcgttctcgaactggacggcggcctgcgcctgtag

SEQ ID NO: 321403 - DNA, 930 bp, Pseudomonas aeruginosa
atgaagaacggtgaccgccttaccggcaagatcaccctgttcgacggcggcaagctgctgctgaagaccgactatggcggcgacatcacgctcaagtgggacaagatctccaccttcgagagcgagcagaacctgctggtcaagcaggatgccgagactggcgagcactccaagggcatcaaggccgccgggccgggccaggtgaccctggtcaacggcgagccgaagaccgtggagctggccagcatccagcagatgatgccgcccaagccgatcctccaggactgggtatggaacggcaacgtcgatttctcgctggaccgcaagcaggccgagaacgatgtgtccgactacgacatcgatttcaagaccaacgcccgccacggactctggcgccacaacgtgcagggcgagtacaaccgcgagaagaagaacggccaggtcagcaccgacaattattccggccagtacgcgctggaccgcttcatcgacgaccactggttctggcagggccaggtcgcctacaagcgcgacatgatcgaggacctggcgaagaagcgtaccgtcggtaccggccccggctaccagttctgggacaacgagctgggcgcgttctccatcgccaccctggtcaaccgcaacgactacgagttcgccgatggcgagaaggagcacttctattcgtcgagcttcaagtgggactacaaccgctacctgctggccaagcagttcgagctgttcaccaacggcgaggtcagcaagccgctgcaatccggcctggactacgagctgcagaccgaggcggggatccgctacaagctgaccagctgggcttcgctgagcatgaaggcggaatgggacaagttcagcggcaacgacggcaacgtcaaccagcgccgctataccttcggcctcggggtcggctggtaa

SEQ ID NO: 321404 - DNA, 969 bp, Pseudomonas aeruginosa
atgctcctggccggccccgtgctggccgacaccgtatggctggacaacggcgaccgcctgtccggcgagatcgtgctgatggacggcggcaagctggcgctgaagacccgttatgccggccaggtgctgatcgattggaaggatatcgacaccatcagttccgacaaacccctgctgatcaagcagcagggcgtatccgggcagcgtagccgaaccctggaggcggcgggcaagggcatggtgcggatcgtcgatggcggcagccataccgtcccgctggccagtattcgccagatggtgccgccgcgaccgctggtggaggacctggtctgggagggcaatctcgacgtcaagctggatagcaagcgcaacgacagcgacaaggacgaatggaagctcaagggcgatacccggcttcgccacggtgcctggcgccacgtgctggcgggggaagtggagcgggaaaagaaggacgggcgcaaggtcgaggacaactgggagctggactacgacctcgatcgcttcttcgacgaacactggttctggcgcggcagctattcgcagaagcacgatgcgatcgacaacctggagcgccagagcgcgctgggaaccggccccggctaccagttctgggacgacgaactcgggcgtttcgacctggtcaccgagatcagtcgctggcaactggagtggcgcgatcagccgcgcgaggatttcacctcctattcgctggagtgggactacaagcggctgctcgccggcacccggctggagctgtacagcaagggaaccgtgctggttcccggcatcgagcggatcgactacctgctcgacagcgaatacggcctgcgctatcgcctgaacagttgggcgcgtctttcgttcctctatgaactggaccagttgcgcaccgaggggggcacccagtccgaccggcattacctgatcggggtcggcgtcggctggtga

SEQ ID NO: 321405 - DNA, 384 bp, Pseudomonas aeruginosa
atgggcgttcacaaggcggacaggaaagggaaaaccgatgagcatgcatgggccggcagcgacccggcaagtgcccaggcgcgccgcgaggccctgtacctggtgctggcgcaggtgccgccggggcaggtggtcagctacgggcaactggccgaactggccggcctaggccgcgccgcccgctgggtcggcaggacgctcagccagttgccggtggatacccgcctgccctggcatcgggttctcggcgccggcggtcgcatcagcctgccggcggacagtcccggcggtcgcgaacaacgcgcacgcttgcgcgaggaaggcgttctcctgcacaacgacaaggtggacatacgtcggcatggctggcttacagcgaagtag

SEQ ID NO: 321406 - DNA, 1785 bp, Pseudomonas aeruginosa
atgactcagcaatcctggcgagaggccctggtcgcctacaagtctcccgccagcctggccctcctgctgctcggcttcgccgccggcctgccgaccatgctggtgttcaacaccctgtcggtgtggctgcgcgaagccggcgtggcgcgggataccatcggtttcgccagttggctggggctggtgtacgccttcaagtgggtctggtcgccgatgctcgaccagtggcgcctgcccttcgtcggccgtctcggccggcgccgttcctggctggtgttctcgcaggtgctgatcgccctgggactgctcggcatggccctgtgcaatccgcagagccacctgccctggctgatcggcctggccctgctggtggcgttcgcctccgccacccaggacatcgcgatcgacgcctaccgcctggaaatcgccgaggatagccgccaggccgccctcgctgcctgctacatgaccggctaccgcgcggcgatcctgctggccagcgccggcgcgctgattctcgccgaatggttcggctccaccagcctcaactacagccagtcggcctggggcctgacctatgcgttgttcgccctgctgatcctgcctgggctggtcaccagcctgctgatccgcgagccggcggtggacgtgccgatccacgtcaacccgtcgcgtttcgacttcaaccaccaactgctctcggtgctcctgctgctgatcctgctgatctcgctgccggcgatgatcaccgccctcctcgaccgcgcctggccgcgcgccggcctctacgcgctgctcatggggatctgcctgtcgccgtggggacgccagcagatccgcccggtccgcgaactgctcgtcaccgtgcgcaggccgctgctggtggcggcgcgcggcaaggaagtgccgctgttcgatttcgtccaccaggcggtctcggtgatggtgctgatcatcctcctcgtcaccgtcaccgccatgtgccgcgcctactactccggcgcctggccgcgcggcacgctgttcctgctgatcgccgcgtcctgcctgtcggcacccggacgcctgctgatggccccggtgctgacgccgatcaccgagttcgtccagcgctatcgctggcaggccctgctgctgctcggcctgatctccacctatcgcctgtcggacacggtgatgggggtgatggccggggtcttctacatcgacatgggcttctccaaggaagtcatcgccagtgtcagcaaggtcttcggcgtactcatgaccctgatcggcgccgccgccggcggggtgctgatcgcccgcttcagcatcctctccatcctgttcatcggcggtgccgcttcggctgccaccaacctgctgttcgccatgctcgcccagctcggcccgctgcacgccgaggccctgcccagccatgacgtgatcagcctggtgatggcgctcgagccgcacgtgctgatgctggtgatgaccatcaccctcgacaacttcagcggcggcctcgccgcctcggccttcgtcgcctacctgtcgagcctgaccaacctgaagttctccgccacccagtacgccatgctcagctcgaccatgctcctgctgccgcgcttcatcggcggctactccggaaccatggtcgagagcctcggctacgagcacttcttctacgtcaccgcggtgatgggcattcccaccctgctgctgatcggctggttgtggctgcgccgcgcgccgtccagcgagacgccggcgccgggacaccagaacgccgagcagcactga

SEQ ID NO: 321407 - DNA, 837 bp, Pseudomonas aeruginosa
atggaattgaactacgaccgactggtgcagcagaccgagtcctggctgccgatcgtgctggagtacagcggcaaggtcgccctggcgctgctgaccctggcgatcggctggtggctgatcaacaccctgaccggccgggtcggcggcctgctcgccaggcgcagcgtcgaccgcaccctgcaaggcttcgtcggcagcctggtgagcatcgtcctgaagatcctgctggtggtcagcgtggcttccatgatcggcatccagaccaccagcttcgtcgccgccatcggcgccgccggcctggccatcggcctggccctgcagggcagcctggctaacttcgccggcggcgtgctgatcctgctgttccgcccgttcaaggtcggcgactggatcgaggcacagggcgtggccggcaccgtggattcgatcctgatcttccacaccgtgctgcgtagcggcgacaacaagcggatcatcgtgcccaacggggcgctgtccaacggaacggtgaccaactactccgccgagccgctgcgcaaggtgatcttcgacgtcggcatcgactacgacgccgatctgaagaatgcgcagaacattctcctggccatggccgacgatccgcgggttctgaaggacccggcaccggtggcggtggtttccaatctcggcgaaagcgcgattaccctgtccctgcgggtctgggtgaagaacgccgactactgggacgtgatgttcatgttcaacgaaaaggcccgcgacgcgctgggcaaggaaggtatcggcattcccttcccgcagcgggtggtcaaggttgtgcagggcgcgatggccgactga

SEQ ID NO: 321408 - DNA, 480 bp, Pseudomonas aeruginosa
atgccttcgttcgacgtggtgtccgaactggacaaacacgagttgaccaacgccgtggacaacgccatcaaggaactggatcgccgtttcgacctgaaaggcaaatgcagtttcgaagccaaggacaagtcggtgaccctcaccgccgaagccgatttcatgctcgagcagatgctcgacatcctgcgttccaacctggtcaagcgcaaggtcgacagccagtgcatggagatcaaggatgcctacccgtcgggcaaggtggtcaagcaggacgtcaacttccgcgagggcatcgacaaggacctggcgaagaagatcgttggtctgatcaaggagcgcaagctcaaggtccaggccgccatccagggcgagcaggtgcgcgtcaccggcaagaagcgtgacgatctgcaggaggccatcgccctgctgcgcggcgaatcgctcggcatgccgttgcagttcaccaacttccgcgattga

SEQ ID NO: 321409 - DNA, 1101 bp, Pseudomonas aeruginosa
atgcccgccggtgtggcggagaccgacgatttcttcccgatggcgcgcgcgaccgcggccgggacccggcctcccgcgacgaaccgggcccttgccggcagcgtaccggcgcccatcctcttctcgagtccgttcatgcccaaccccgatctcagcatcctggtcgtcgacgacgccaagttttccagcgccatgatcggccgcgccctcagccaggccggctaccaggacatccgcttcgccagcagcgccagcgaggccctgcagcagctcgaacaacgcccggtcagcgtgctcctggccgactggctgatgccggagatggacggcctggaactgaccgcccgggtccgccaactggacgaaagcatcaaccactacacctacatcgtcctgctcaccggcaaggaaggcgagaacgtcctcggcgaggccttcgaccgcggcgtcgacgacttcgtcagcaaggccgcgatgaacgagcaactggtgccgcgcatctacgcagccgaccgcctgtgcaacaccctgcaacggttgctggtggaaaaccgcctgctcaccgaaaacatcgcgcggatggaagaacgcaacctggtggataccctcaccggcctcggcaatccccgctacctgcgacagaagctggccgacagcctgcgccaggtggaaacccgcggtggagcgttgtgctacctgctggtcggcatgcccgaggcaccggtcctgcgccagcggcacggcgaggccttccatcgcgagctgctgctcggcgtggccaggcgcctgcaacagctggtccggccgctggatgtgctggtgcgcctggacgagcagcatttcgccctgatcaccctggtggaggacctgcacgaatgctcgtcgagcagcttcaagcggctgcacgacgggctcaacctgaaggccttcaagaccagcgaaggcttcatcagcctgaaagccggcatcgccatgctcggcctcaacagcggggcattgccgctgggcatcgacgaactgctgcagcgcaccgaggccctgttgcccgatgcctatgccagcggcaggatcgcaacctgccggctaccggcactgcgctag

SEQ ID NO: 321410 - DNA, 912 bp, Pseudomonas aeruginosa
atgacctggcatatcctcggcgccggtagcctcggcagcctctgggccgcgcgcctcgggcgcgccggcctgcccgtccgcctgatcctgcgcgaccgccagcgcctgcgccgctaccaacaggccggcggactgagcctggtggaagacggccaggccagcctctacccgatcgccgcggaaaccccggacggcgggcaacccatccagcgcctgctgctggcctgcaaggcctacgacgcggaggaagccgcctccagcgtggcccatcgcctggccggcaacgccgaactgctgttgctgcagaacggcctgggcagccagcaggcggtcgccgcccgcctgccgcgcagccgctgcctgttcgcctccagcaccgaaggcgcgttccgcgatggcgatttccgcgtggtcttcgccggccgggggcacacctggctcggcgatccgcgcgacacaagcgcccccgcctggctggcgcagctgtcccaggccgggatcccgcacagctggagcgacgacatcctcgaacggctgtggcgcaagctggccctgaactgcgcgatcaacccgctgaccgtcctccacgattgccgcaacggcggcctgcggcagcacccggaagagatcgccgcgctttgcgacgaactcggccagttgctccacgccagcggctacgacgccgccgccaggagcctgctggaggatgtccgggcggtgatcgacgccaccgcggccaactattcctcgatgcatcaggacgtcacccgcggccggcgcacggaaatcggctacctgctcggctacgcctgccagcacgggcagcgcctgggactaccgctgccgcgcctgggaaccttgctcgcccgcctccaggcccatctgcgccagcgcggtttgcccgaccgctaa

SEQ ID NO: 321411 - DNA, 2097 bp, Pseudomonas aeruginosa
atgaacctgcgccagcgcctcgacaacctgcccgtagggcagaaactgctcgccgccctgctgatcctgctggctaccgtgctgctggtggccaacctggcgttcatcagcgccgcctactggatttcccaggagagcgtcgccccccaggcgatgcagaccatcggccggctgatcgccaacccggcgctcagccagccggcactcagttcgccgcagaccgccgaggtcctgctgcgccagctcaacgattaccagccgttgcgcgccgcggccctgtacgacagcaatgggctgatgctggccgacctgcaacgcggcgacaccctcaagctgccggcccgcctggaccgcctggagcactggaggcgcggcgagtaccgcctcaatgcgctgatcgaactgccccaggaaaacgcccgccccggctacctgctgctggtggccagcggtgaactgccgagcgcgttctacaccggaaccctcaccgccagcctggcgatcctcggcgtcagcgtgctgctctggctgctggtggcgcagcagatacgccgcctgatcacccggccgatccgcgatctcgaggaactgtcgcggcaggtcacccgcgaggagaactacgccctccgcgcccagcgcggcaacggcgacgagatcggccgcctggccgacgcgttcaacaccatgctgacccgcatcgaggcccgcgagcagcagctcaagcgcgcccgcgacgatgcccaggaagcggtcgagcaggcccagagcctggccgaggaaacccgccgctcgaaccgcaagctggaactggaagtgcaggtgcgcagcaagatcgagaagaagctcaccggtttccagcactacctcaacagcatcatcgactccatgccttcggcgctgatcgcggtggacgagcaactctacgtcacgcagtggaaccaggaggccagccagctttccggcaccagcctggacgatgcggtcaaccagccggtgttcctcgcctttccctcgctcaagccgttccttccgcagctcacccgggctgccgagaagcacagcgtggagcgtgtcgaacgggtcacctgggcgctgatcgacacgccacgccactacgccctgaccttctacccgctgatgggcggcaccggccgcggcgcggtgatccgcatcgacgacatcacccagcggctgagcctggaagaagtgatggtgcaatcggagaagatgctctcggtcggcagcctcgccgccggcatggcccacgagatcaacaacccgctcggcgcgatcctgcacaacgtgcagaacatcaagcggcgcctgtccccggagctggcgaagaacgtcgagctggcggccgaggtcggagtgccgctggaagacatcaatcactacctcgacggccgcgacatcccgcgcctgctggaaggcatccagcacgccggctcgcgggcagcgaagatcgtcacccacatgctcgccttcagccgccgcagccaccggcagatgaccgcttgcgaactgcccgcactgctcgaacaggcggtggaaatcgccggtaacgacttcgacctggccgaaggcttcgacttcaagtcgttgcagatcgtccacgagttcgaccccaacctcggcccggtgccggtgatcgccaacgaggtcgagcaggtcctgctcaacctgctgaagaacgccgcccaggccatccaccagcgcgacgacgaagaggaaggcgaacagggccggatcgtcctgcgcacgcgcctgacgccgccctgggcggaagtccaggtggaagacaacggcagcggcatgcccgaactggtgcgcaagcgtatcttcgagccgttcttcaccaccaaggaagtcggccagggcaccggtctcggcctgtccgtctcgtatttcatcatcaccaacaatcacaagggccagatggaagtacgctcggaactgggccgcggcacctgcttcagcatccgcctgccgctggaaagctccgaagcggtcgccccggcacaagccaaggccctgccgcccgctctgccgcaacccggtagcagcctgcggcggggcgacgaagaggaaggttga

SEQ ID NO: 321412 - DNA, 579 bp, Pseudomonas aeruginosa
atgggcaatcgattgtcgaagatctacacccgtaccggcgaccgcggcgagaccggcctggccggcggacgccgggtgcccaagagccatccacgcatcgaggcgatcggcgcggtggacgaattgaacagccagttgggcctgctccttgccgagctgctggaagcgcgtggcgcacatcccggcctggaggagatcgtccaggcgctggcgccggtgcaacaccgcctgttcgacctcggcggggagctggcgatgccggagtatcgggccctggacgagacggaagtggcacgcctggaaagctgcatcgaccgctggaacgacgagctgggcccgctgaagaatttcatcctccccggcggttcccgcctggtcgcccaggcccatgtctgccgcagcctggcgcgcagcgccgaacggcgctgccaggcgctggaccaggaggaaacgctggagggcgtcggcctgcgctacctgaaccggctctccgacctgctgttcgtcgccgcccgcgccatcgcccggcgccagggcgtggcggagattctctgggaagcagcggcaaaaccggactga

SEQ ID NO: 321413 - DNA, 948 bp, Pseudomonas aeruginosa
gtgaaacgagtacatgtcgccgcggccgtgattcgtggctccgatggccgggtgctgatcgcccggcggccggaagacaagcatcagggcggcctgtgggagtttcccgggggcaaggtggaggacggcgagccggtgcgcgcggcgttggcccgtgagctggaagaggaactgggcatccgtgtcgagcgggcccggccgctgatccaggttcgccacgactatgccgacaagcacgtcctgctcgatgtctgggaggtcgacgggttttccggcgaagcccacggcgtcgagggccaaccgctggcctgggtggagccgcgcgagctggcggactacgagttccccgctgccaacgcgccgatcgtccaggccgcgcgcctgccggcgcactatctgatcaccccggacggcctggagccgggcgagctgatcagcggcgtacgcaaggcggtggaggcgggcatccgcctgatccagttgcgcgcgccgaacatgttcagtcccgaataccgcgatctcgccatcgatatccagggactctgcgccggcaaggcgcaactgatgctgaaaggcccgctggagtggctgggcgacttcccggctgccggttggcacctgacctccgctcaactgcgcaaatacgccagcgccggtcggccgttccccgaagggcgcctgctggccgcctcctgccacgacgcggaggaactggccctggctgcctcgatgggagtggagttcgtcaccctttcgccggtacagccgaccgagagccatcccggcgagccggcgctgggttgggacaaggccgccgaactgatcgccggcttcaaccagccggtctacctgctgggtggcctcggtccgcagcaagccgagcaggcttgggagcatggagcccagggcgtggcgggtatccgtgcgttctggccgggcggcctttga

SEQ ID NO: 321414 - DNA, 636 bp, Pseudomonas aeruginosa
atggccctgaccatcgtgattggcaatcgcaatgactcgtcctggtcgctgcggggctggctggccctgcgcatgagcggggcggcgttcgacgagatcctcgtcccgctggggcggcccgatagccgggagcggatcctgcaatattcgccgaccggcaaggtgcccttgctgaaaagcgaggatggcgacatctgggattccctggccatcgccgagtacctcgccgagcgcttccccgaggcccacctgtggccgcgcggcgaggcggcgcgggcgctggcccgttcggtctgcgcggaaatgcacagcggtttcgccgcgttgcgcggcgagctgccgatggacctgcggcgccagcagccattggtggaattgtccgaggcgacacgacaggatattcaacgtatctgcgaagcctgggcggattgccggcggcgcttcggccaggacggtccgttcctgttcggccacgccagcctggcggatgcgttctacgcaccggtggcggcgcgtttccgcagttatgcggtggaattgccggatatcgcccggacctatgtcgagacgatttatcagtggcctgcgttccgcgcctggtacgacgcggcattgcgcgagcaggccggtagttga

SEQ ID NO: 321415 - DNA, 1218 bp, Pseudomonas aeruginosa
atggctgtcggtcttggccccctgtccaccctgcacccggtccccggtttcgaactcggcatcgcttccgccggcatcaagcgaccggggcgcaaagacgtggtggtcatgcgctgcgccgaaggctccagcgtggccggggtgttcaccctgaacgcgttctgtgccgcgccggtgaccctggccaaacagcgtttcctcggtgaggtgcgctacctgctgaccaataccggcaacgccaacgccggtaccggcgaggccggcctcgccgccgccgcgcaaacctgcgccaagctcgccgaactggccggggtcgccgagacttcggtgctgccatattccaccggggtgatcggcgagcccctgccggtggccaagatcgaggcggcgttgcctgcggccctggccgacctggccgaggaccgctgggccgaagctgccgcggggatcatgaccaccgataccctgcccaagggcgccagccgccagttcgtgcacgatggcgtgaccgtgaccgtcaccggaatcagcaagggcgccgggatgatcaagccgaacatggcgaccatgctcggttatatcgccaccgacgccaaggtcgcccagggcgtgctgcaggatctgttgcgcgacgccgccaacaagtccttcaaccgcatcaccatcgacggcgatacctccaccaacgactgctgcatgctgatcgccaccggtcgcgcggcgctgccggaagtcacccaggccagcggcgcgctgttcgccgcgttgaagcaagcggtaatggaggtttccatggagctggcccaggccatcgttcgcgacggcgagggcgcgaccaagttcgtcactgttcaggtcaacggcggcgccacccaccaggagtgcctggatgtcggctatgccgtggcccactcgccgctgatcaagaccgcgctgttcgcctccgacccgaactggggacgcattctcgccgcggtcggacgtgccggcgtggccaatctggacgtgagcaagatcgacgtgttccttggcgacgtctgtatcgccagccgtggcggccgggcggccagttacaccgaggaacagggcgcggcggtgatggcccaggccgagatcggcatccgcatcgaactgggacgcggcacctgcagcgagaccatctggaccaccgacctgtcccacgaatacgtgaagatcaacgcagagtaccgcacctga

SEQ ID NO: 321416 - DNA, 2751 bp, Pseudomonas aeruginosa
atgtttgcgcctttgttgaagaaactctttggaagcaagaacgagcgtgatgtaaagcgcatggccaaggctgtacaggccatcaatgcgctcgagccccagatggtggcgctctccgacgagcagttgaaggcgaaaacggctgaattccagcagcgctacgccaagggcgaaacgctcgaccaattgctgcccgaagccttcgccgtggttcgcgaggctggcaagcgggtgatgggcatgcgccacttcgacgtccagctgatcggtggcatgaccctgcacgacggcaagatcgccgaaatgcgtaccggcgagggcaagaccctggtgggcaccctgccggtctacctcaacgcgctgtccggcaagggcgtgcacgtggtcacggtgaacgactacctggcgcgccgcgacgccaactggatgcgcccgctgtacgagttcctcggcctcagcgtcggcgtggtcactcccttccagccgccggaagacaagcgcgccgcctacgccgccgacatcacctacggcaccaacaacgaattcggcttcgattacctgcgcgacaacatggccttcagcctggacgacaagttccagcgcgagctgaacttcgccgtggtcgacgaagtggactcgatcctcatcgacgaggcgcgtaccccgctgatcatctccggccaggccgaagacagctccgagctgtacatcaagatcaacaagctgatcccgcgtctcaagcgccaggtcgaagaggtcgagggcaagccgaccgaggaaggccactacagcatcgacgagaagacccgccaggtcgaactcaacgagcagggccaccagttcatcgaggacctgctgagccagaacggcctgctcggcgaaggcgagagcctctactcggcgcacaacctgagcctgctgacccacgtttacgcagcgctgcgcgcgcacaccctgttccaccgcaacgtcgagtacatcgtccagggcgaccagatcctcctgatcgacgagcacaccggccgcaccatgcctggccgtcgcctgtccgagggcttgcaccaggccatcgaggcgaaggaaggcctgccgatccaggccgagagccagaccctggcctccaccaccttccagaactatttccgcctgtacaacaagctggccggcatgaccggcaccgccgataccgaggccttcgagttccgccagatctacggtctcgacgtggtggtgatcccgacccaccggccgatcgcgcgcaaggacttcaacgacctggtctacctgacccaggaagagaagtacgcggcgatcatcaccgacatcaagcagtgccaggccctcggccggccgatcctggtcggcaccgcgtcgatcgagagttccgagtacgtttccaagctgttgcaagaggcaggcatcgagcacaaggtgctcaacgccaagtaccacgagaaggaagccgagatcatcgcccaggctggcgcgcccggctcggtgaccatcgccaccaacatggccggccgcggtaccgacatcctcctcggcggcaactgggaagtcgaagtcgcggccctggagaaccccaccgaggagcagatcgcccagatcaaggccgaatggcagaagcgccaccagcaggtgatcgaggcgggcggcctgcacgtgatcgcctccgagcgccacgaatcccgccggatcgacaaccagttgcgcggccgtgccggtcgtcagggcgacccgggttccagccgcttctacctgtcgctggaagacaacctgatgcggatcttcgcctccgaccgggtgaagaacttcatgaaggcgctgggcatgcagtccggcgaggcgatcgagcaccgcatggtgaccaacgccatcgagaaggcccagcgcaaggtcgaagggcgcaacttcgacatccgcaagcaactgctggaattcgatgacgtagccaacgagcagcgcaaggtgatctaccacatgcgcaataccctgctgtcggcagaggacgtgggcgagaccatcaaggaattccgcgaggaaaccctcagcgccaccatcaaccagcacattccgccgcagtcgctgcccgagcagtgggacatcgaaggcctggaggctgcgctgtacagcgacttcgccgtgcgcctgccgatccagcagtggctggacgaagacgacaagctgtacgaggaaaccctgcgtagcaagatcctcgagcagatcgtcgccgcctactacgagaaggaagagctggccggcgccgaagccctgcgcgccttcgagaagcagatgctgctgcgggtgctggacgacctgtggaaggaccacctgtcgaccatggaccacctgcggcacggcatccacctgcgtggctacgcgcagaagaatcctaagcaggaatacaagcgcgagtccttcaccctgttccaggagctgctggactcgatcaagcgcgacaccatccgcgtgctgtcccacgtccaggtccgtcgcgaagacccggccgaagaggaggcccgcctgcgtcgcgaggcggaggaactggccaagcgcatgcagttccagcacgccgaggctccctcgatggagcaggccgtggccggcgaggaagaagagcttcccgagggcccggctccggtcgtgccgctcgagcctgtgcgcaacgagcagaagatcggccgcaacgagccttgcccgtgcggttccggcaagaaatacaagcactgccacgggcagctggactaa

SEQ ID NO: 321417 - DNA, 924 bp, Pseudomonas aeruginosa
atgcacatcatttttctgagccggcaccatggggccgctcgctccgtccatctgcagccgcggttgctgatgctggccggggcctgcgtggtcggtgccagcctgttggccgggggcttcatgggcgcctggctgttccgcgcgccggctccggtggccggcatcgaagtcgatgccgcgctgcaggcgcagagcgccgagatcagcagcgcccgcgaggacgcgcagcggcagatggacgcactgagcgtgcatctcggcgaactgcaggcgcgcctggttcggctggatgccctcggcgaacgtctcaccgagctggccgacgtcgaccccgacgagttcgacttctccctgagcgtcggccagggtggcgtcgacgaaccgctggagggcagcgcctatgccccgccgtcgttcatggcgacgctagacgaactggcggcacgcctggatacccgcgagcagcagctcgaggtgctggagcaactgctcgccgacaagcacatcagccagtcgacctacctggccggccagccggtgcgccagggctacatctcctcgccgttcgggcgccgggtcaatccggtgagcggccgcctgagcatgcacaagggcatcgacttcgccgcgccggccggcagcgacgtggtggccgtggcggcgggggtggtgacctggtccgggcgcaagaacggctatggcaacgtggtcgaggtcgggcacgccgatggctacaccacgttgtatgcccataaccagaagaacctggtcgaggtcggtgacctggtcaagcgcggccaggtgctggccaaggtcggcagcaccggacgctccaccggctaccacgtacatttcgaagtgatgaaggatggccgggtaatgaatccgcaaagcttcatcgcacgcgcgtctgtttccgagtga

SEQ ID NO: 321418 - DNA, 462 bp, Pseudomonas aeruginosa
atgtcttttcgtcccttgcccgcccaggcatcgacccagttgctgcgccaggccaggccgctgcagatgctgttcgccgaagcccagcgcatctgccgcctgcagcaactgctggaaagccagttgcaaccggcggcgcgcccgtactgccatgtggcttcgtggcgcggcggttgcctgctgctgatcgtcaccgatggccactgggccacacgcctgcgctatcagcagcggcgcctgcagcggcagctgcaggctttcgaagaattcgcgaacttagcgaaaatccttttcaaggtgcaacccaccacgtccacacaacgtgcggcacgtcgcagcttgaccctgtctgccgtcgcggcggaaaaccttcgcgaatccgccgagatcgtcggcaatccacgcctgcgggaagcgctcgagcggttggcaagccgcgccgagaaaagccggcaagaataa

SEQ ID NO: 321419 - DNA, 912 bp, Pseudomonas aeruginosa
atgatcaaacaacgcaccttgaagaacatcatccgggctactggcgtcggtctgcactcgggggaaaaggtttacctgaccctgaaaccggcgccagtggacaccggtatcgtgttctgccgcaccgacctggatccggtcgtggaaatcccggcccgggccgagaacgtcggcgaaaccaccatgtcgaccaccctggtcaagggtgacgtcaaagtggatacggtggagcacctgctctcggccatggccggcctgggtatcgacaacgcctacgtcgagctgtccgcttcggaagtgccgatcatggatggcagcgctggtccgttcgtattcctgatccagtccgccggattgcaagagcaggaagctgccaagaagttcatccgcatcaagcgcgaagtcagcgtggaagagggcgacaagcgcgccgtcttcgttccgttcgacggcttcaaggtcagcttcgagatcgatttcgatcatccggtcttccgtggtcgcacccagcaggcctcggtcgatttctccagtacttccttcgtcaaggaggtcagccgcgcccgtaccttcgggttcatgcgcgacatcgagtacctgcgttcgcagaacctggcactcggcggtagcgtggagaacgcgatcgtggtcgacgagaaccgcgtgctcaacgaagacggcctgcgttacgaggacgagttcgtcaagcacaagatcctggatgccatcggcgacctgtatctgctcggcaacagtcttatcggcgagttccgtggcttcaagtccggccatgccctgaacaaccaactgctgcgtacgttgatcgcagacaaggatgcttgggaagtggtgaccttcgaagacgcgcgtaccgcgcctatttcctatatgcgcccggcggcggcagtgtag

SEQ ID NO: 321420 - DNA, 1185 bp, Pseudomonas aeruginosa
atgtttgaactggtcgataacatcgcacaaaccgccgtcataaaagtgatcggtgtaggtggtggtggcggcaacgccgtcaatcacatggccaagaacaacgtcgagggcgtcgagttcatctgcgccaacaccgacgcacaagcgctgaagaacatcgcggcgcgcaccgttctgcaactcggcccgggcgtcaccaaggggctgggtgccggcgccaatccggaagtcggtcgtcaggcggctctggaagatcgcgagcgcatttccgaagtgctggaaggcgccgacatggtcttcatcaccaccggcatgggtggcggcaccggtaccggcgccgcgccgatcatcgccgaagtggcgaaggaaatgggcatcctcaccgtcgcggtggtgacccgcccgttcccgttcgaaggtcgcaagcgcatgcagatcgccgacgagggcatccgcgcgctggccgagagcgtcgattcgctgatcaccatcccgaacgagaagctgctgaccatcctcggcaaggatgccagcctgctggctgccttcgccaaggccgatgacgtgctggccggtgccgtgcgcggtatctccgacatcatcaagcgtccgggcatgatcaacgtcgacttcgccgacgtgaagaccgtcatgagcgaaatgggcatggcgatgatgggtaccggctgcgccagcggtccgaaccgtgcccgcgaggccaccgaggcggcaatccgcaacccgctgctggaagacgtcaacctgcagggcgcgcgcggcatcctggtgaacatcaccgcgggtccggacctgtccctgggcgagtactccgatgtcggcaacatcatcgaacagttcgcttccgagcacgccactgtgaaggtgggcaccgtgatcgacgcggacatgcgcgatgagctgcacgtcaccgtagtcgccaccggcctgggcgcgcgcctggagaaaccggtgaaggtcgtcgacaacaccgtgcagggcagtgcagcccaggcagccgctccggcccagcgcgagcagcagtcggtgaactaccgcgacctcgaccgtcctaccgtgatgcgcaaccagtctcacggcagcgcggcgaccgcggccaagctgaacccgcaggatgacctggattacctggatatcccggcgttcctgcgtcgtcaggccgattga

SEQ ID NO: 321421 - DNA, 1254 bp, Pseudomonas aeruginosa
atggcaagcgtgcagagcggcaagatgatcgtcggcctcgacatcggtacctccaaggtggtggcgctggtgggcgaggtgacggccgatggccagctggaggtcgttggcatcggtactcatccgtcccgcggcctgaagaagggcgtggtggtgaacatcgagtccaccgtgcagtcgatccagcgcgccatcgatgaggcccagcagatggccggttgccgtatccactcggcgttcgtcggcatcgccggcaaccacatccgcagcctcaattcccacggcatcgtggcgatccgcgatcgcgaggtgaacccggcggatatcgaacgggtactggatgccgcccaggcggtggcgatcccggcggaccagcgggtgctgcataccctggcccaggattacgtgatcgataaccaggaaggcgtgcgcgagccgctgggcatgtccggggtgcgcctggaagccaaggtgcacgtggtgacctgcgcggtgaatgcttcgcagaacatcgagaagtgcgtgcgccgctgcggcctcgaggtcgacgacatcatcctcgagcagttggcctcggcctattcggtgctgaccgaggacgagaaggaactgggcgtgtgcctggtggatatcggcggcggcaccaccgatatcgcgatcttcaccgaaggcgcgatccgccataccgcggtgatcccgatcgccggcgaccaggtcaccaatgacatcgccatggccctgcgtacgccgacccagtacgcggaagagatcaagatccgctacgcctgcgccctggccaagctggccggtgccggcgagaccatcaaggtgcccagcgtcggcgaccggccgccgcgcgaactgtcgcgccaggccctggccgaagtggtcgagcctcgttacgacgagctgttcaccctggtccaggccgagctgcgccgcagcggctacgaggacctgatcccggccgggatcgtcctcaccggcggcacctcgaagatggaaggcgcggtcgagctggccgaggaaatcttccacatgccggtacgcctcggcgtgccgtatagcgtgaagggcctcaccgacgtggtgcgcaacccgatctattcgacgggcgtcggcctgctgatgtacggactgcagaagcagtccgatggcatgtcgatgtctgtgtcaggcagcagctacagcagcgacgaacccaaggcacctgtcctggagcggctcaaacgctgggtccagggcaatttctga

SEQ ID NO: 321422 - DNA, 864 bp, Pseudomonas aeruginosa
atgaatggcgtactgctccgtcatcagcaacccggtggactcggccgcgctccgcgcaagccgatgccgcgcggcgccagccgtctggtggccaaggaaccgctgagcgtgcgcctgccgaaagccgacttcagtttcctcaagtacctggcctggccgctgttgctggccgttctcggctatggcgcctatcgcggcgccgagtacatcctgccgtacgccgaccggccgatcgccaaggtcagtgtcgagggcgacctcagctacatcagccagcgcgcggtgcagcagcggatctccccgtacctggcggcgagcttcttcaccatcgacctggcgggcatgcgcgggcaactggaacagatgccctggatcgcccacgccgaggtgcgccgggtgtggccggaccaggtggtgatccgcctggacgagcaactgccgatcgcccggtggggcgacgaagcgctgctgaacaaccagggacaggcttttacgccaaaggaactggcgaattatgaacatctgccccgcttgcatggtccacagcgggcgcaacagcaggtgatgcagcaataccagttgctcagccagttgctgcgtcccctcgggttctccatcgcccgcctggaaatgagcgatcgcggcggttgggcgctgaccacggcccagggcgtcgagatccagatcgggcgcgaccacgtggtagacaagattcgccgcttcgtaagcatctacgacaaggcactcaaagatcagatttcgaacattgcgcggatcgacctgcgttaccccaacggcctcgccgttgcgtggcgcgagccggtcacgcccgcgacggtggccacggccagcgccgtgcagtga

SEQ ID NO: 321423 - DNA, 960 bp, Pseudomonas aeruginosa
atgaacctttgcctcgatagcctgctgaacggcacccaggatcccaaggcgttcggccgtgtcgccgtgctgttcggcggcaagagcgccgagcgcgaggtgtcgctgaagtccggcgcgatggtcctgcaatccctgctggccgccggggtcgatgccttcggcatcgatgtcggcgaagacctgctgcaacgcctggtcgaggagaagatcgaccgtgccttcatcattctccacggtcgtggcggcgaggatggcagcatgcagggcctgctcgagtgcgcgggcattccctacaccggcagcggcgtgctggcctcggcgctggcgatggacaagctgcggaccaagcgggtctggctcagcctcggcctgccgaccccggactacgcggtgctggccagcgaggatgactgccgcgaagcggcgcagcgactgggtttcccgctgatcgtcaagccggctcacgaaggctcgagcatcggcatggccaaggtcggcgggctcgacgaattgatcgcggcgtggcgcgaagcggcccgctacgactcgcaggtgctggtcgagcagtggatcagcggcccggaattcaccgtggcgaccttgcgcgggcaggtgctgccggcgatccgcctgggcacgccgcacaccttctacgactacgacgccaagtacctggccagcgatacccgctaccaggtgccctgcggtctcgacgaggccaaggaacgcgagctgaaggaactcaccgcgcgcgcctgcgacgccctgggcatccagggctgggggcgggcggacgtgatgcaggacgccgaagggcgtttctggctgcttgaagtcaacaccgcaccgggcatgaccgaccacagcctggtgcctatggccgcgcgggccgccggcctggatttccagcaactggtgctggcgatcctggccgatagccgcgaggcgaggggataa

SEQ ID NO: 321424 - DNA, 1443 bp, Pseudomonas aeruginosa
gtggttaaagaaccgaatggcgtcacccggaccatgcgccgtatccgccgcatccatttcgtcggcatcggcggcgccggcatgtgcgggatcgccgaagtgctgctgaacctcggctacgaggtatccggctcggacctcaaggcctcggcggtgaccgagcgcctggagaagttcggcgcgcagatcttcatcggccaccaggcggaaaacgccgacggcgccgacgtgctggtggtgtccagtgccatcaaccgggccaacccggaagtggcctcggccctggaacggcggattccggtggtgccgcgtgcggagatgctcgccgaactgatgcgctaccggcacggcatcgcggtagccggcacccacggcaagaccaccactaccagcctgatcgcctcggtgttcgccgccggcggcctggacccgaccttcgtcatcggcggccggctgaacgccgccgggaccaacgcccagctcggcgccagccgctacctggtggccgaggccgacgagagcgacgccagcttcctgcacctgcaaccgatggtcgcggtggtcaccaatatcgacgccgaccacatggcgacctacggcggcgacttcaacaagctgaagaagaccttcgtcgagttcctccacaacctgccgttctacggactggcggtgatgtgcgtggatgatccggttgtgcgtgagatcctcccgcagatcgcccgcccgaccgtgacctacggcctcagcgaagacgccgacgtgcgcgcgatcaacatccgccaggaaggcatgcgcacctggttcaccgtgttgcgcccggagcgcgagccgctggacgtctcggtgaacatgcccggcctgcacaacgtgctgaattccctggcgaccatcgtcatcgctaccgacgagggcatctccgacgaagccatcgtccaggggctgtccggcttccagggcgtgggccggcgcttccaggtctacggcgagctgaaggtcgagggtggcagcgtgatgctggtggacgactacggccaccatccgcgcgaagtcgccgcggtgatcaaggcgatccgtggcggttggccggagcgtcgcctggtgatggtctaccagccgcatcgctatacccgtacccgcgacctgtacgaagacttcgtgcaggtgctgggcgaagccaacgtgctgctgttgatggaggtctatccggccggcgaagagccgatcccgggagccgacagccgccagctgtgccacagcatccgccagcgcggccagcttgacccgatctacttcgagcgcgacgccgacctggcgccgctggtcaagccgctgctgcgcgctggcgacatcctgctttgccagggcgctggcgatgtcggcggcctggccccgcaactgatcaagaacccgctgttcgccggcaagggagggaagggcgcatga

SEQ ID NO: 321425 - DNA, 1074 bp, Pseudomonas aeruginosa
atgaaaggtaatgtcctgatcatggcgggtggcaccggcggacacgtgttcccggcactcgcctgtgcgcgggagttccaggcgcgcggctatgccgtgcactggctggggacgccgcgcggcatcgagaatgacctggtacccaaggccggcctgccgttgcacctgatccaggtcagcgggctgcgcggcaagggcctgaagtcgctggtcaaggcgccgctggaactgctcaagtcgctgttccaggcgctgcgggtgatccgccagctgaggccggtctgcgtgctcggcctgggtggctatgtcaccggcccgggcggcctggccgcgcgcctcaacggcgtgccgctggtgatccacgagcagaacgccgtggccggcaccgccaaccgcagcctggcgccgatcgccaggcgcgtctgcgaggcattcccggataccttcccggccagcgacaagcgtctgaccaccggcaatccggtgcgcgccgagctgttcctcgacgcgcatgcccgcgcgccgttgaccggccgtcgggtcaatctgctggtgctcggcggcagccttggcgcggaaccgctgaacaagctgttgccagaggccctggcgcaggtgccgctggaaatccgtccggcaatccgccatcaggccggtcgtcagcatgccgagattaccgccgagcgttatcgcacagtggcggtcgaagcggacgtcgcgcccttcatcagcgacatggccgcggcctatgcctgggccgacctggtgatctgtcgcgccggcgcgctgaccgtcagcgagctgacggcggcgggtttgcccgccttcctggtgccgttgcctcacgcgatcgacgatcaccagacccgcaatgccgaattcctggtacgcagcggcgccggccgcctgctgccgcaaaagtctaccggcgcggccgaactggccgcgcagctgtccgaggtcctgatgcatcccgaaaccctgcgctccatggcagaccaggcacgcagcctggcgaaacccgaggctacccggacggtggtcgatgcctgcctggaggtggcccgtggttaa

SEQ ID NO: 321426 - DNA, 1200 bp, Pseudomonas aeruginosa
atgctgtcggtgttgcgccccttcccgtcgccgctgttgagccggcacggcatcgacctggacttcccgctgctggcgggttgcctggcgctgctcggcctcggcctggtgatggtgacttccgcctcttccgaggtggcggcggcgcagtcgggcaacccgctgtacttctccgtccgtcacctgatctacctggtgatcggcctgatttcctgcggcctgaccatgatggtcccgatggccacctggcagcgttggggctggaagctgttgctggtcgccttcggcctgctggtgctggtgatcacccccggcatcggccgcgaggtgaacggctcgatgcgctggatcggcttcggcctgttcaacatccagccttcggagatcgccaaggtctgcgtggtgatcttcatggccggctacctgatccgccgccagcaggaggtccgggaaagctggatgggcttcttcaagcccttcgtggtgttgctgccgatggccggcctgctgctgcgcgagccggacttcggcgccaccgtggtaatgatgggcgctgccgcggccatgctgttcctcggcggggtggggctgttccgcttcggcctgatggtgctgctggcggtcggcgcggtggtcctgctgatccagacccagccctaccggatggcacgcctgaccaacttcaccgacccctgggccgaccagttcggcgccggctatcagttgagccaggcgctgatcgccttcggccgcggcggctggttgggcatgggactgggcaacagcatccagaagcagttctacctgccggaggcgcacaccgacttcgtcttcgccgtgcttgcagaggagctgggcatcgtcggcgccctggcgaccgtcgccctgttcgtgttcgtcagcctgcgcgcgctgtacatcggcatctgggccgagcaggccaagcagttcttctccgcctacgtggcctacggcctggccttcctctggatcggccagttcctgatcaacatcggggtgaacgtcggcctgctgccgaccaagggcctgaccctgccgttcctcagctacggcggcagttcgctggtgatctgctgtgcctgtctggggatgttgctgcgcatcgaatgggaacggcgaacccacctgggtagcgaggaatatgagttcaacgaagaggactttgccgatgaaaggtaa

SEQ ID NO: 321427 - DNA, 1347 bp, Pseudomonas aeruginosa
atgagcctgatcgcctccgaccacttccgcatcgttgtcggcctcggcaagagcggcatgtccctggtgcgctacctggcgcgccgcggcttgcctttcgccgtggtcgatacccgagagaacccgccggagctggccaccctgcgtgcccagtatccgcaggtggaagtgcgttgcggcgaactcgacgccgagttcctctgctccgcccgcgaactctacgtcagccccggcttgtcgctgcgcacccccgcgctggtacaggccgccgcgaaaggcgtgcgcatctccggtgacatcgatctcttcgcccgcgaggcgaaggccccgatcgtcgccatcaccggttccaacgcgaagagcaccgtgaccaccctggtgggcgaaatggcggtggccgcggacaagcgtgtcgccgtcggcggcaacctcggcaccccggcgctcgacctgctggccgacgacatcgagctgtacgtgttggagctgtcgagcttccagctggaaacctgcgatcgcctcaacgccgaggtggcgaccgtgctgaacgtcagcgaagaccatatggatcgctacgacggcatggctgactaccacctggccaagcaccggatcttccgcggtgcccgccaggtcgtggtgaatcgcgccgatgccctgacccgaccgctgatcgccgataccgtgccgtgctggtcgttcggcctgaacaagccggacttcaaggctttcggcctgatcgaggaagacggccagaagtggctggcgttccagttcgacaagctgctgccggttggcgaactgaagatccgtggcgcccacaactattccaacgcgctcgccgcgctggcgctgggccatgcggtcggcctgccgttcgacgccatgctcggcgcgctgaaggcgttttccggcctggctcatcgctgccagtgggtacgcgagcggcagggcgtgagctactacgacgattccaaggccaccaacgtcggcgccgccctggcggcgatcgaggggctgggtgccgacatcgacggcaagctggtgctgctcgccggcggagacggcaagggcgccgatttccatgacctgcgcgagccggtcgcgcgcttctgccgggcggtggtactgcttggccgtgacgccgggctgattgcccaggcactgggcaacgcggtaccgctggtgcgcgtcgcaacgctggacgaagcagtccggcaggccgccgagctggcccgcgaaggcgatgcggtgctgttgtcgccggcctgcgcgagcctggacatgttcaagaacttcgaagaacgcggacgcctgttcgccaaagccgtagaggagctagcgtga

SEQ ID NO: 321428 - DNA, 1083 bp, Pseudomonas aeruginosa
atgctcctgctgctggccgaatacctgcaacagttctacaagggcttcggcgtcttccagtacctgaccctgcgcggcattctcagcgtgctcaccgcgctgtcgctgtcgctgtggctggggccctggatgatccgtaccttgcagatccgccagatcggccaggccgtgcgcaacgacggtccgcagtcgcacctgtcgaagaagggcaccccgaccatgggcggcgccctgatccttaccgccatagccatcagcacgctgctgtgggcggatctttccaaccgctacgtgtgggtagtgctggtcgttaccctgctgttcggtgccatcggctgggtggacgactaccgcaaggtgatcgagaagaactcccgtggcctgccgagccgctggaagtacttctggcagtcggtgttcggcatcggcgccgccgtgttcctctacatgactgccgaaaccccgatcgagaccaccctgatcgtgccgatgctgaagagcgtcgagatccagttgggcatcttcttcgtggtcctgacctacttcgtcatcgtcggttcgagcaatgcagtgaacctcaccgacggtctcgacggcctggcgatcatgccgacggtaatggttgccggcgcgctgggcatcttctgctacctgtcgggcaacgtgaagttcgccgagtacctgttgattcccaacgtaccgggcgccggcgagctgatcgtgttctgcgccgcgctggtcggcgccggcctcggcttcctctggttcaacacctatccggcgcaggtcttcatgggcgacgtcggcgcgttggcgctgggcgccgcgctgggcaccatcgcggtgatcgtgcgccaggaaatcgtgctgttcatcatgggtggggtgttcgtcatggaaaccctctcggtgatgatccaggtcgcttccttcaagctgaccggacgccgcgtcttccgcatggcgccgatccatcaccatttcgaactgaaaggctggccggagccgcgcgtgatcgtgcgcttctggatcatcaccgtgatcctggtgctgatcggcctcgccaccttgaagctgcgttga

SEQ ID NO: 321429 - DNA, 1377 bp, Pseudomonas aeruginosa
atgcttgagcctcttcgcctcagccagttgacggtcgcgctggacgcccgcctgatcggcgaggacgccgtcttttcggcggtttccaccgacagtcgcgccatcgggcccggccaactgttcattgccctgagtgggccgcgtttcgacggccacgactatctcgccgaggttgccgccaagggcgcggtggctgcgctggtggagcgcgaagtcgccgacgcgcccctgccgcaattgctggtgcgcgatacccgtgcggccctggggcgactgggcgcgctgaaccggcgcaagttcaccggcccgctggcggccatgacgggctccagcggcaagaccacggtcaaggagatgctcgccagcatcctgcgtacccaggccggcgatgccgagtcggtgctggctacccgtggcaatctgaacaacgacctcggcgtaccgctgaccctgctgcaactggcgccgcagcaccgtagcgcagtgatcgaactgggcgcctcgcgcatcggcgagatcgcctacacggttgagctgacccgcccgcacgtggcgatcatcaccaatgccggaaccgcccatgtcggcgagttcggcgggccggagaagatcgtcgaggcgaagggcgagatactcgaagggctggccgccgacggcaccgccgtgctgaacctggacgacaaggccttcgacacctggaaggcccgtgccagcggccgtccgttgctgactttctccctcgaccggccccaggccgatttccgcgccgccgatctgcagcgcgatgcgcgcggctgcatgggcttcaggctgcagggcgtagcgggtgaagcgcaggtccagctcaacctgctggggcggcacaatgtcgccaatgccctggctgccgccgctgccgcccatgcactgggcgtgccgctggatgggatcgtcgccgggctgcaggcgctgcagccggtcaagggccgcgcggtagcgcaactgaccgccagcgggctgcgtgtgatagacgacagctacaacgccaaccccgcgtcaatgctggcggcgattgatatactgagcggcttttccgggcgcaccgtcctggtcctcggagacatgggcgaactcggttcctgggccgagcaggcccaccgcgaggtgggcgcctacgccgctggcaaggtgtccgcgctctatgcagtcggaccgctgatggcccacgccgtacaggcgttcggcgccacgggccggcacttcgccgaccaggccagcctgatcggggcgctggccaccgaacaaccgacaaccaccattttgatcaagggttcccgcagtgcggcgatggacaaagtcgtcgcggcgctgtgcggttcctccgaggagagtcactaa

SEQ ID NO: 321430 - DNA, 1464 bp, Pseudomonas aeruginosa
atgcctatgagcctgaaccaactgtttccccaggccgagcgcgatctgctgatccgcgagctgaccctggatagccgcggcgttcgtccgggcgacctgttcctggcggtgccgggcgggcgccaggatggtcgtgcgcacatcgccgatgccctggccaagggcgcggctgccgtggcttacgaggcggaaggcgccggagagctgccgcccagcgatgcgccgctgatcgcggtgaaggggctggccgcgcaactgtcggcggtcgccgggcgtttctacggcgagccgagccgcgggctggacctgatcggcgtcaccggcaccaacggcaagaccagcgtcagccaactggtggcccaggccctggatctgctcggcgagcgctgcggcatcgtcggcaccctcggcaccggtttctacggcgccctggagagcggccggcacaccacgccggacccgctcgcggtgcaggccacgctggccacgctgaagcaggccggcgcccgcgcggtagcgatggaagtgtcttcccacggcctcgaccagggccgcgtggcggcgctcggtttcgatatcgcggtgttcaccaatctgtcccgcgaccacctcgactatcacggttcgatggaagcctatgccgccgccaaggccaagctgttcgcctggccgggcctgcgctgccgggtgatcaacctggacgacgatttcggccgtcgactggccggcgaggagcaggactcggagctgatcacctacagcctcaccgacagctcggcgttcctctattgccgcgaagcgcgcttcggcgacgccggcatcgaggcggcgctggtcactccgcacggcgagggcctgctgcgcagcccgttgctcggccgcttcaacctgagcaacctgctggcggcggtcggtgcgttgcttggcctgggttatcccctgggcgatatcctccgcaccttgccgcaactgcaggggccggtcggccgcatgcagcgcctgggaggcggcgacaagccgctggtggtggtggactacgcgcatactcccgacgccctggaaaaagtcctggaggccctgcgtccgcacgcggccgcgcgcctgctgtgcctgttcggctgcggtggcgatcgcgatgccggcaagcgtccgctgatggctgcgatcgccgaacgcctggcggatggggtgctggtcaccgacgacaacccgcgcaccgaggccagtgcggcgatcatcgccgatatccgcaaaggcttcgctgccgctgacaaggttaccttcctgccgtcgcgcggtgaggcgatcgcccatctgatcgcttccgctgcggtggatgacgtggtgctcctggctggcaagggtcacgaggattatcaggagatcgatggcgtacgccatccgttctccgacatcgagcaggccgagcgcgccctggccgcctgggaggtgccgcatgcttga

SEQ ID NO: 321431 - DNA, 1740 bp, Pseudomonas aeruginosa
atgaaactgaactatttccagggcgccctctacccatggcggttctgcgtgatcgtcggcctgctgctggcgatggtcggcgccatcgtctggcgaatcgtcgacctgcacgtgatcgaccatgacttcctcaagggccagggcgacgcgcgtagcgtgcggcatatcgccatccctgcgcaccggggcctgatcactgaccgcaacggcgaaccgctggcggtgagcaccccggtcaccaccctgtgggccaaccccaaggagctgatgaccgccaaggaacgctggccgcaactggcggcggcgctcgggcaggataccaagctgttcgccgaccgcatcgagcagaacgccgagcgcgagttcatctacctggtccgtgggctgaccccggaacagggcgaaggcgtgatcgccctgaaggtgccgggcgtgtactccatcgaggagtttcggcgtttctacccggctggcgaagtggtagctcatgcggtcggcttcaccgatgtcgacgaccgcggtcgcgaaggtatcgagctggctttcgacgaatggctggccggcgtgccgggcaagcgccaggtgctcaaggatcgccgtggccgcgtgatcaaggacgtgcaggtcaccaagaatgccaaaccgggcaagacccttgcgctgtccatcgacctgcgcctgcagtacctggctcatcgcgaactgcgcaacgctctgctggaggacggcgccaaggccggcagcctggtgatcatggatgtgaagaccggggagatcctggccatgaccaaccagccgacctacaacccgaacaatcgtcgtaacctgcagccggcggccatgcgcaaccgggcgatgatcgacgtgttcgagccgggctcgacggtcaagccgttctcgatgagcgcggcgctggccagcgggcgctggaaacccagcgatatcgtcgacgtctacccgggcaccctgcagatcggccgctacaccattcgcgacgtatcgcgcaattcgcggcaactcgatctcaccggcatcctgatcaagtcgagcaacgtcggcatcagcaagatcgccttcgacatcggcgccgaatccatctactcggtcatgcaacaggtcggccttgggcaggacacggggttgggcttccccggcgagcgcgtcggcaacctgcccaaccaccgcaagtggccgaaggcggaaaccgcgaccctggcctacggctacggtctctcggtaaccgcgatccagttggcgcatgcctatgcggccctggccaacgacggcaagagcgtgccgctgagcatgacccgagtcgaccgcgtgccggatggcgtgcaggtgatctcgcctgaagtggcttccaccgtgcagggcatgctgcaacaagtggtcgaggcccagggcggggtgttccgcgcccaggtgccgggttaccacgccgccggcaagagcgggaccgcgcgcaaggtctcggtcggcaccaagggctaccgggaaaacgcctatcgctcgctgttcgccggtttcgccccggccaccgatccgcgcatcgcgatggtcgtggtgatcgacgagccgagcaaggcgggctacttcggcggcctggtgtcggcgccggtgttcagcaaggtcatggctggcgcgctgcgcctgatgaacgtgccgccggataacctgccgacggccaccgaacagcagcaggtcaatgctgcgcccgcaaaaggagggcgtggctga

SEQ ID NO: 321432 - DNA, 294 bp, Pseudomonas aeruginosa
atgagccgtctcttcgtcaagcgcctgcctaccggcagcttcctcatgttgctgctttatataggtctgctgctctcggcgattgccgtggcctacagcacctactggaaccggcaactgctcaactcgctgtattccgagctgagcgtgcgcgacaaggcgcaggccgagtggggccggttgattctcgagcagagcacctggaccgcccatagccgcatcgaaagcctggcggtggaacagttgcgcatgcgcgttcccgacccggccgaggtcaggatggtggcgccatga

SEQ ID NO: 321433 - DNA, 942 bp, Pseudomonas aeruginosa
atgaatgccacctaccgccatatcaccgttctgctcgaggaggccgtttccgcactggccccgcgggaggacggctgctatctggacggtaccttcggaagaggggggcatagtcgagccttgctcgagaaactgggcgccgggggacgcctgctcggattcgacaaagatccccaggccatccagacaggaaaagcattggcggccgaagacggccgcttcgtcattgtgcagcgctcgttcgccgaactgggcgatgaggtgcgcgcacgcggtctcgaagggcggatcgatggcgtcctgctcgaccttggcgtgtcgtcgccgcaactcgacgatcccgagcgcggcttcagcttcctcaacgatggtccgctggacatgcgcatgaatcccggccagggcatcagcgcagcggagttcatcgccaatgccgccgaagaggaaatcgcccgggtcttcaaggaatatggcgaagagcgcttcgccaagcggatggcccgcgccatcgtgcagcgccgccaggagcgcccgttcgaacggaccgccgatctggccgaagtgatcacggttgccaaccctgcctgggagaagggcaagaatccggcgacccgcgcattccagggcctgcgcatccatgtgaacaatgagctgggcgatctcgagcgtggccttgacgccgcgctcgaatcgctggccgtcggcggccggctggtggtgatcagtttccattccctggaagaccgcatcgtcaagctgttcatgcgcaagcacgccaagggcgaggcggacaacctgccgcgcgacctgccgatccgttccaaggtcttcgagccgcgcctgaagctgctgggcaagccgcagtacgcttcggaagaagaactcaaggccaacccgcgctcgcgcagcgcggtcatgcgcgtggcggagaagctgagatga

SEQ ID NO: 321434 - DNA, 405 bp, Pseudomonas aeruginosa
atgccgagtcggtatcgtgacgagctcgtttcgcgttgtgccggccagctcatcgtcactatcgacgcagtcgacccctgcctcaccgtttaccccttgcccgaatgggaactgatcgaagccaagctgcgcgagctgccttctttgcgagaagaaacgcggcgcctgcagcggctgctgatcggtaatgccgtcgatctggaactggacggaaacgggcgtttcctgattccgccgcgcctgcgcgagtacgccaagctggacaagcgggcgatgctggtggggcaactgaacaagtttcagttgtgggatgaggatgcctggaacgccatggctgaagccgacctggcggcaatcaaacaacccggtgggctgccggacgaactacgcgacctgatcctttga

SEQ ID NO: 321435 - DNA, 849 bp, Pseudomonas aeruginosa
gtgtcagcaggcactctgttcgtagtggcgaccccgatcggcaatctcgacgacatcagcccgcgcgccctgcgggtgctgcgggaggtggccctggtggctgcggaggatacccgccattcgatccggctgttccagcacttcggcatcgagacgccattggcggcctgccacgagcacaacgagcgcgaggagggcgggcgcttcatctcccggctgcagggtggggaggacgtcgcgctgatctcggacgccggtaccccgctgatttccgatcccggcttccacctggtgcgccaggcacaggcgctgggtatccgggtggtcccggtgccgggctcctgcgcgctgatcgcggcgctgtcggcggcgggattgccgtcggaccggttcatcttcgaaggtttcctgcccgccaaggctgcgggacgacgcagccgcctccaggcggtacaggaagagccgcgcacgctgattttctacgaggcgccccatcgtctgctggaaagcctggcggacatgcgcgacgtgttcggcggggagcgccgtgcggtgctggcgcgggagctgagcaagaccttcgagaccattcgcagcctgccgttggccgaactgcacgattgggtcgcgtcggacagcaaccagcagcgcggcgagtgcgttgtgctggtggcggggtggcaggcgccggaaggcgaggagtcgatcggtgcggaggcgctcagggtgctcgacctgctgcttgccgagctgccgttgaagaaagccgcggcgctggcggcggaaatcaccggggtgcgaaaaaaccttttgtatcaacaggctttgcaacgccaagggaagagttga

SEQ ID NO: 321436 - DNA, 1815 bp, Pseudomonas aeruginosa
atgatcgcttgcctgcgtccgctttctgctctgatcctggccggtctgctgaccgcctgcgcgacctcgtccaattccggactgggcgaacttccccgtacgccgaatgccagcatcgagcagttgttgcaacaggccagccagagcaagcccgaggaagcggcgctgctgcgcctctcggcagcggaccttgcctaccagcagaaggacctcgccaggtccaccgccatcctgggacagattccgctggaaagcctgaagccggcccagcaggtcttcgccagcaccctgaacgccgaactggccctcgcccgcagcaagcccaaggccaccctgcaggcattgcagcatccgagcatgcagcatctcagcgaactgccggtgacccagcaggttcgtacccagcgcgccaaggcccaggccctcgccgccgacggccaggtccttgccgcagccaaggagcgcatctacttcgcaccgctgctcgagggcccggcggtgatcgagaaccaggaaaagatctggaccctggtcagcagcctgccggtcgaccagttgcaaccgagcgccaacgaaggcgacctcagcggctggctgaccctggcacgcatcaccaagacctcgccgaccctgcagcaacagcaggccagcatcgagagctggcaacagcagaaccccgagcacccggcggccaagcacttgccggcggcgctggagaaactcaagacgctgtcccagcagccgctgacccgcatcgccctcctgctaccccagcaggggcagttggccaacgtcgcccgggccctgcaggacggcttcctcgccgcccacttccaggcccagcaggccggccagaatcctccttcgatcaagctctacgacagtacccaggtgcgctcgctagatgacttctaccgccaggcccaggccgatggcgtcgaactggtcgtcggtccactggagaagccgctggtcaagcaactcgctagccgcgagcaactgccgatcaccaccctcgcactcaactacagcgacaacagccaggaaggcccggcgcagctgttccagttcggcctcgccgccgaggacgaagcgcgcgcggtggccagccgggcttggggcgacggcatgcgccgggccgtggcgctggtgccgcgcggcgaatggggcgaccgcgtgttggccgccttcagccagagctggcagtccgcgggcggcagcctgatcgccgccgagcatgtcgaccagccggtacaactggcgcaacagatcgccgacctgctgcaactgcgccagagcgaaggccgcgcccagcgcctgcagggcgccctcggcagccagatcgccacccagccgtcgcgccgccaggacatcgacttcgtgttcctcgccgccaccccgcagcaggcccgccagatcaagccgaccctggccttccagtacgccggcgaccttccggtctacgccacttcgcacctctacaccgggaccaacaacccgacccaggaccaggatctcaacggcatccgcttctgcgagaccccgtggctgctcaaccccagcgacccgacccgccagcaggtcgccgcccaatggccccaggccaacggcagtatgggccgcctctacgccatgggcgtcgacgcctaccgcctcgctccgcgtctgcctgaactgaaggccgtgccgagcctgcagatcgacggcctgaccggtaccctgagcctgaatccgacccaacgtatcgaacgccagttgcaatgggccgagttccgcaatggccaggtccagccgctggggaccagcagcttttga

SEQ ID NO: 321437 - DNA, 246 bp, Pseudomonas aeruginosa
atgctcgacggcgatacagtagtattcgtcgaagtccgctcccgccggcatcgcgcctggggcggagccctggagagcatcgacgcgcgcaagcggcagcgcctgattctctccgccgaactttttctgcaacaggaggcgcgctgggccaaacgcccctgtcgcttcgatgtggtcaccgtcgataccagcgacggacaatcaccaccgcgactggactggattcagaacgcattcgacgcctga

SEQ ID NO: 321438 - DNA, 594 bp, Pseudomonas aeruginosa
atggacatgcaacaccgtatccgccagctcttccaggccagcatcgagaccaagcagcaggcgctggaagtactgcctccctatatcgagcaagccagcctggtgatggtcaatgcgctgctcaacgagggcaagatcctctcctgcggcaatggcggctcggccggcgatgcccagcacttctcctccgaactgctcaaccgcttcgagcgcgaacgtccgagcctgccggccgtggccctgaccaccgacagctcgaccatcacctcgatcgccaacgactacagctacaacgaagtcttctccaagcagatccgcgccctgggccagccgggcgacgtcctgctggcgatttccaccagcggcaattcggccaacgtgatccaggccatccaggcggcccacgaccgcgagatgctggtggtcgccctgaccggccgcgacggtggcggcatggcttcgctgctgctgccggaagacgtggagatccgcgttccttccaagatcaccgcacgcatccaggaagtccacctgctggccatccactgcctctgcgacctgatcgaccgccaactgttcgggagtgaagaatga

SEQ ID NO: 321439 - DNA, 579 bp, Pseudomonas aeruginosa
atgagccgtaccgccttcgtcgccgccaccctggccctgagcctggccctgggaggctgcagcagtttcctcagcgccacccgggacaaaccgatcgacgacgatcgcgggacccgaaccatcggcagcaagatcgacgactcgctgatcgagaccaaggccgcggtgaacatcgccaaggccgatccggccctggacaaggactctcacatcgtcgtggtcagctacaacggcatcgtgctgatcgccggccagaccccgcgcgctgacctcaagagcaaggccgaacaggccgcgcgcacggtgcagaaggtcaagaacgtgcataacgaactgcaggtgacctcgccctcctccctgctcgcccgcaacaacgacgcctggatcaccaccaagctgaagacccagatgctcagcgatcccaacgtgccctcgtcgcggatcaaggtggtcaccgagaacggcatcgtctacatgatgggcctggtcaaccagcaggaagccgcccaggctgtccgcgtcgcccagggcgtcgacggggtgcagaagatcgtcaagctgttcgaatacataaactga

SEQ ID NO: 321440 - DNA, 408 bp, Pseudomonas aeruginosa
atgaattccagccgtccctatctggtccgcgcgctctatgaatggatcgtcgacaacgattgcacgccacatatcctggtgaacgcagagttcgccggggtaaaggtgcctccgggttatgccagcgatgggcagatcgtgctcaatgtctcgccctctgccgtgcggcatctgcacatggacaacgaggcggtcagcttcgaggggcgtttcggcggcgtggcgcagagcctgtacattccagcgctggcggtaatggccatctacgcccgggaaaacggacagggcatggtcttcgatctggagcagccgggtccggtggacgacgagccgggcgatgacgatggcggaccgtccgatgagccgccgcgtcccagtggcaggccatccctgaaggtggtcaagtaa

SEQ ID NO: 321441 - DNA, 618 bp, Pseudomonas aeruginosa
atggcttcaatcaacaagctgacctgctattccgaccctgccgatcattactgccatcgcatccgcctggtcctggccgagaagaacgtggcggtagaggtgatcgatatcgaggcgggccgctgtccgccgatgctggcggaggtcaacccctacggcagcgtaccgaccctggtcgatcgcgacctggcgctgtacgagccgacggtggtcatggaatacctcgacgaacgctatccgcatccgccgctgctgcccgattatccggtgaagcgtgccaacagccgcctgttgatccatcgtatccagcgggactggtgttccctggtggaccggattctggatgcgcgcagcaaggaggccgagcgggtccaggcgcgcaaggagttgcgcgagagcctgaccggggtttccccgctgttcgccgacaaggcatatttcctcagcgaggatttcagcctggtggattgctgcctgttgccgatcctctggcgtctgccgttgctgggcatcgagttgccgcggcaggccaagccgttgctcgactacatggagcgcggattcgcccgggaaagcttccgggccagcctgtcttccgttgaacgagatatgcgttaa

SEQ ID NO: 321442 - DNA, 783 bp, Pseudomonas aeruginosa
atgaaaaagcaattcgctgcactgattctggcggtactgccagtcctgggtttcgccgctggcggccatgggccgcaactggatcatgtcgatatcgacctgaccgacaaggcggccatgcaggatggcgcgcgtaccttcgccaactactgcatgggctgccatagcgccaagttccagcgttacgagcgtgtcgccaccgacctgggcattcctgccgatctgatgatggagaagctggtgttcaccggcgccaagatcggcgaccacatggacatcggcatgaagccggccgacgccaagacctggttcggcgccgctccgccggatctgaccctggttgcccgcgtacgcggcaccgactggctgtacagctacctgcgctcgttctacgaggatcccaagcgtccgtggggcgtgaacaacgtgatcttccccaacgtcggcatgccgaacgtcctggcgcccctgcagggacgccaggtgatcggctgcaagcaggtacaggtggtcgaggatggcaagaagcagttcgatccgttgaccggtaccccgctgactcacgaagcttgtgaccagttgaccgtggtgccgaagaccggcgagctgaacgaagcccagttcgacgagaaggtcaagaacctggtgaccttcctggcctattcggccaacccgaacaagctggcctccgagcgtatcggtacctacgtcctgctctacctggccttcttcttcgtattcgcctatctcctcaagcgcgagtactggaaggacgtgcactaa

SEQ ID NO: 321443 - DNA, 1212 bp, Pseudomonas aeruginosa
atgaacaagttcatggcttgggtcgatgcgcgttttcccgcgaccaagatgtgggaagaccatctgagcaagtactacgcaccgaagaacttcaacttctggtatttcttcggctccctggcgctgctggtgctggtcaaccagatcctcaccggcatctggctgaccatgagcttcacgccgtcggccgaagaggcgttcgcttccgtcgaatacatcatgcgcgatgtcgactacggctggatcattcgctacatgcactccaccggtgcatcggcgttcttcatcgtggtctacctgcacatgttccgcggcctgctctacggctcctatcagaagccgcgcgagctggtgtggatcttcggcatgctgatctacctggcgctgatggccgaggccttcatgggctacctgctgccttggggtcagatgtcctactggggcgcccaggtgatcatttccctgttcggcgcgattccggtggtcggcgaagacctggcccagtggatccgcggtgacttcctgatctccggcatcaccctgaaccgcttcttcgccttgcatgtgatcgccctgccgatcgtcctgctcggcctggtcgtgctgcacatcctggcgctgcacgaagtcggttcgaacaacccggacggcgttgacatcaagaagaagaaggacgagaacggcgtaccgctggacggcatcgcgttccatccgtactacaccgtgaaggacatcgtcggcgtggtggtgttcctgttcatcttctgcaccgtgatcttcttcttcccggaaatgggcggctacttcctcgagaagcccaacttcgagatggccaaccagttcaagacccccgagcacatcgctccggtctggtacttcaccccgttctacgcgatcctccgcgcggttccggacaagctgatgggcgtggtggcgatgggtgcggcgatcgctgtgctgttcgtcctgccgtggctggatcgcagcccggttcgctcgatccgctacaagggctggctgagcaagctgtggctggtgatcttcgcggtgtccttcgtgatcctcggctactacggcgcccaggctccgagcccgctgggtactaccctgtcgcgcgtttgcaccgtcctgtatttcgccttcttcatcctgatgccgttctacacccggatggagaagaccaaaccggttccggaaagggtgactggctga

SEQ ID NO: 321444 - DNA, 594 bp, Pseudomonas aeruginosa
atgagtaatgacggcgtgaatgcaggccggcgtcgcttcctcgtcgcggccacctctgtggttggcgcggcgggagcggtgggtgctgcggtcccgttcgtagggtcatggttccccagtgccaaagccaaggctgctggcgcgccggtgcaggtgaacgtgggcaagatcgatccaggtcagcagatcatcgctgaatggcgcggcaagcctgtattcatcgtgcaccgcacgaaggagatgctggacgccctgccgagcctcgaaggacaactggccgacccggactccaaggcctcggagcagccggagtacgtcgatcccaagcttcgctcgatcaagccggaactggcggtgatcgtcggcatctgcacccacttgggctgctcgccgaccttccgtcccgaagtcgcccccgccgacctcggtccggactggaagggcggctacttctgcccttgccacggctcccactacgacctcgccggtcgtgtctacaaaggccagccagcgccgctgaacctgccgattccgccttatacgttcgatgctgacgacgtcatcaccatcggcgtggaccaggagaaagcctga

SEQ ID NO: 321445 - DNA, 393 bp, Pseudomonas aeruginosa
atgtcggcgactcaaaattacggcactggccgtcgtaagaccgctaccgctcgcgtcttcctgcgtccgggtactggcaagatttccatcaacaaccgtggtctcgatcagttcttcggtcgtgaaaccgctcgcatggtcgtgcgtcagccgctcgagctgaccgagaccgtcgagaagttcgacatcttcgttaccgtcgttggcggtggcgtaagcggtcaggccggtgcgatccgtcacggcatcacccgtgccctgatcgagtacgacgaaaccctgcgtagctcgctgcgcaaggccggctacgtgactcgcgatgcccgtgaagtcgagcgtaagaaagtcggtctgcgtaaagcgcgtaagcgtccgcagtactccaagcgttaa

SEQ ID NO: 321446 - DNA, 429 bp, Pseudomonas aeruginosa
atgaaaacctataccgcgaaaccggaaactgtacagcgcgactggttcgtcgtcgacgctgccggccagaccctgggtcgtctggcgaccgaaattgcccgccgcctgcgtggcaagcacaagcctgagtacactccgcacgttgacaccggcgactacatcgtcgtcatcaacgccgagcaggtgcgtgtgaccggtgccaagaccaccgacaagatgtactaccaccactccggcttcccgggcggcatcaagtcgatcaacttcgagaagctgatcgccaaggcccctgagcgcgtcatcgagaccgctgtaaaaggcatgctgccgaagaaccctctgggtcgcgatatgtatcgcaagctgaaggtgtacaagggtgccagccacccgcacaccgctcagcagccccaagaactgaagatttaa

SEQ ID NO: 321447 - DNA, 1038 bp, Pseudomonas aeruginosa
atggagtatcgcccgctcggccgcaccgatctgaaagtcagcgccctctgcctcggcaccatgacctggggcgagcagaacagcgagcaggacgccttcgcccagatcgccagggccaaggccgccgggatcaatttcatggataccgccgaaatgtatccggtgccgccccgcgccgagacctacgccagcaccgagcgcatcatcggcaactggttccgccgcagcagcgaccgcgccgactggatcctcgccagcaagatcgccggccccggcaacggcatcagccatgtgcgcgacggcaacctcaagttcaaccgccagcacatcgtcgccgccctcgatgccagcctggagcgcctgcagacagactggctggacctctaccagttgcactggccggagcggcggaccaacttcttcggccagctcggctaccagcaccaggaagagagcttcacaccgctggaggaaaccctggaagtgctcgacgagcaggtgcgcgccggcaagatccgccacatcggcctgtccaacgagacgccctggggcaccatgaccttcctcaggctcgccgaggagcgcggctggccgcgcgcggtatcgatccagaacccctacaacctgctcaaccgcagcttcgaggtgggcctggcggaaatcgccatccgcgagcagtgcggcctgctggcctactcgccgatggccttcggcatgctttccggcaagtacgcggacggcgcccgcccggccaacgcgcgcatcagtctgtacagccgcttcacccgctacaccaacccgcaggcggaagcggcctgcgcgcgctacgtagcgctggcccgcgaacatggaatggaaccggcgcagatggcactggcctacgtcacctcgcggccgttcgtgaccagcaacatcatcggcgccacctcgctggaacagctggaaaccaatctcggcagcgtcgacctgaggctggacgaggaattgctcgccggtatcgatgcaatccaccgggagcaaccgaacccggctccctga

SEQ ID NO: 321448 - DNA, 1137 bp, Pseudomonas aeruginosa
atgataccgagaaccctgttcagctccgaccacgaactgtttcgcgacagcgtgcgcaagttcctcgaacaggaagccgtgcctttccatcaccaatgggaaaaggatgggcatgtcgaccgcgcgctctggaacaaggccggcgaggccggaatgctctgttcgcacctgccggaagagtatggcgggatgggcgcagacttcctctacagcgccgtggtcatcgaagagatcggtcgggccggcctgaccgggatcggtttctccctgcattcggacatcgctgcgccctacatcctccactacggcagcgaggcgctgaagcgcaagtacctgccgaagctggtatccggcgagatggtcgcggccatcgccatgaccgagccgggggccggttccgacctgcaaggggtgaagaccactgcggtactggatggcgacgagtacgtcatcaatggctcgaagaccttcatcaccaacggcttcctcgccgacctggtgatcgtggtggcgaagaccgatccgaaggctggcgccaagggcataagcctgttcgtggtcgaggcgggtacgccgggcttcagcaagggcaagcgcctggagaaggtcgggatgaaggcccaggacacctccgagctgttcttccaggatgtgcggattccccgggagaacctgctcggcaaggacggccagggattcatctacctgatgcaggagctgccgcaggagcgcctgaccgtcggtatcggcgcgctggcgtcggccgaggcggccctgcaatggacgctcgactacactcgcgagcgcaaggcgttcggcaagtcggtggcggacttccagaatacccgcttcaagcttgccgagatggctaccgagatccaggtcggccgggtcttcgtcgatcgctgtatggagcagcatctccagggcaagctggacgtacccaccgccgccatgtgcaagtactggacgacggacctgcaatgcaaggtgctcgacgaatgcgtgcagttgcacggcggctacggcttcatgtgggaatatccggtggcgcgggcctgggccgatgcccgggtgcagcggatctacgccggtaccaacgagatcatgaaggagatcatcgcgcgggccctgtga

SEQ ID NO: 321449 - DNA, 999 bp, Pseudomonas aeruginosa
atgcgcgctcaatccgctccggtgctgaaacatgtcggcatcgtcgccatcgacggcgtcttcgcctcgaccctgatgcaggccaaggacttcttccacatggccagcctgcgccacggcaagcagcagggcctcggtctccagccggccttccgcacccgcatcctcagccccgacggccagccggtacgcagcttcagcggcgacagcatcgccgtcgacggtcccctcgccgcctgcgatatcgtggtcctgcccgccttctggggcgatttcgacgcgctcgaacggcgctatccgcaaatcgttccctggttgcgccgcagccatgccgagggaaccgccctctgcggcgaggcgaccggggtcttctggctggcccaggcaggtctgctggatggcaaggaagcgaccacctactggcgcttctatcgagaattcgccgaacgcttcccgaacgtgctgctcaaccaggagaagcacctgaccgatgccgacgacctgttctgcgccagcggcgtcacctccgcctgcgacctctacatctatctgatcgagcgtttctgcggcggatcggtggcccaggcggtggcccgggataccctctacgaagtacagcgcagctacaccccagggcgtatcggcttcggcggacagaagctgcaccatgacccgacgatcctgcagatccagcaatggctggaagaccacttcgccgacaagttccgtttcgaggacgtcgcccgcgaccacggcatgagcatccgcaacttcatgcggcgcttccaggccgctaccggcgacaagccgctgcactatctgcagcgactgcggatcgagaccgccaagggcatgctctcgagcacgcgcaagagcatcaagacgatcagctacgaggtcggctacgacgacgccagcttcttcgcccgcctgttccgccagcacaccgaactctctccccaccattaccgtcgccagttcatgcagaaggaaagctga

SEQ ID NO: 321450 - DNA, 963 bp, Pseudomonas aeruginosa
atgcgcctttatctgctcgccttcctggccctcttcggtatgaatgctatggccgccgacaactggaaagccttcccctacgaccagagcgcctatgactatccaggcgacaagttgaaggaagcctggccgcgcctgacccgcggcttcggcgactacccctatccggacgccgactgggtggtgaacatggcgaccgcccatccggatgccctggaaaagaccgtgaaggccggcaccggcttcaccggcaagccggaagaggccgcgcaatatgcggcacgactgcaggatgtctggcgcctgctgttccgcggcgactacgccaaggccaaggagcagggactggccctgggagtcggcggccaggtaccggcgatgttcgcccaggtgctctacgccatgttcctggctcccgaccaggcggagaaacagcgcctgctcgaagaagtcatcgactacaccgaacaggccggcccgctggtcaaggccgatatcgtcgcccagttcggcagcgtctacgccaaggcgcgcctggccgaggagctatcggtaccggtagtgctcaagcgcggctataccagcgaaatacccaaggaactggacgctctcctggccaggcaacccaaccagccgttcgccctggcgctctacggcggctacgaggcgggagtgatccgcaaggtcggcaagctggtcggcaagatgacctacggggtcagcgccgacaagatggagcagtacttcgcccgctccttccgccaggccaacgacctgccgatcggccactacgagtacgccaacgcgctgacctacgtatacggcgacaacgagcgggagaaggccatcgcccaactgaagcaggccgtggcgatcaagccgatcaacgccatggaagccctcgaagtggcccatgcgaagaagctcctcgccggcttcgagcagaacaccgcgcagcgctga

SEQ ID NO: 321451 - DNA, 1095 bp, Pseudomonas aeruginosa
atgacgcccctcgagcgctaccaggccgatctccaacgccccgatttcttccacgatgccgcacaggcgaatgccgtgaagcatctgcaacgcctctacgatgacctggtcgccgccgaccacgccaagcccggcctgttcggcaagctgctcggcaggaagtccggcgggccggtgaagggcctgtatttctggggcggcgtcggccgtggcaagacctacctggtggacactttcttcgagtcgctgccgttcgagcagaaggtgcgcacgcacttccaccgcttcatgaagcgggtgcacgaagaactgaagaccctcaagggcgagaagaacccgctgaccatcatcggcaagcgcttcgccgacgaggcgcgggtgatctgcttcgacgagttcttcgtctccgacatcaccgacgcgatgatcctcgccaccctgctggaagagctgttcaagaacggcgtgagcctggtggcgacctccaacatcgtgccggacggcctgtacaaggacggcctgcaacgcgcccgtttcctgccggcgatcgccctgctcaaggaacataccgagatcgtcaacgtcgatagcggcgtcgactatcgcctgcgcgcgctggagcaggccgagctgttccactggccgctcagcgaacaggtcgaggaggagatggcgcgcagcttcaaggccctgaccccggactgtgccaaggcccagcgcgacgaggcgctgatgatcgagaaccgcgagatccgcgcgcgcctgacctgcgacgacgtggcctggttcgaattccgtgagctgtgcgacggcccgcgcagccagaacgactacatcgaactggcgaagattttccacgccgtgctgatctccaacgtcgagcagatgggcgtcaccaaggacgacatggcgcggcgtttcatcaacctggtggatgagttctacgaccgcagcgtcaagctgatcatctccgccgaggtcgagctaaaggatctctacagcggcggccggctggagttcgaattccagcgcaccctcagtcgtctgctggaaatgcagtcccacgaatacctgacgcgtccgcaccggccctga

SEQ ID NO: 321452 - DNA, 1347 bp, Pseudomonas aeruginosa
atgactactcgtatcctgaccggcatcactcctaccggcactccgcacctgggcaactacgccggcgccatccgcccggcgatcctcgccagccgtcggagcgacgtggattcgttctacttcctggcggactaccacgccttgatcaagtgcgacgatcccgctcgtatccagcgctcgcgcctggaaatcgccgcgacctggctggccggcggcctggacgtcgagcgtgcgaccttctaccggcagtcggacatccccgagattcccgagctgacctggttgctcacctgcgtcagtgccaaggggctgctcaaccgcgcgcatgcctacaaggccgcggtggaccgcaatgtcgaggctggcgaagacccggacgccggcgtgaccatgggcctctacagctatccggtgctgatggccgcggacatcctgatgttcaacgcgcacaagatcccggtcggccgcgaccaggtgcagcacgtggagatggcccgcgacatcggccagcgtttcaaccacctgttcggcaacggccgcgagttcttcgtcctgcccgaagcggtgatcgaggaaaacgtcgccaccctgccgggcctggacgggcgcaagatgtccaagagctacgacaacaccatcccgctgttcagcccttccaggcagctcaaggacgccatcgcacgcatcgtcaccgactcgcgcgcgccgggcgagccgaaagacccggacagttcgcacctgttccttctttactcggccttcgccagcgccgaacaggtcgccgcgttccgccaggagctgctcgacggcctggcctggggcgaagccaagcagcgcctgttccagttgctcgacaacgaactgggcgaggctcgcgagcgttaccaggcgctgatcgccaagccggacgatatcgaggacattctcctcgccggtgccgccaaggcgcgccgcatcgccaccccattcatcgccgagttgcgcgaggcagtcggcctgcgctccctgcgcgagccgctgaaaagtgccgagagcggcaagaagaaggccgccaaggctgcgcgcctggtcagcttccgcgacgacgacggcagcttccgcttccgcctgctggacgccgccggcgaacagctactgctgtcccgcgccttcgccgacggcaaggccgccggtgcggtgagcaagcgcctgctggctggcgagactgccgacctgcgggccgagggcaatgcctttggcctgtggctggatggcgaggcggtggcgcagagcccggccttcgccgacgccgccgcccgtgacgccgccatcgagcgcacccgcgaagcgctggcaccgcaggagtag

SEQ ID NO: 321453 - DNA, 630 bp, Pseudomonas aeruginosa
ttgtctacccgcgaaatccctgtatccatcgatggcccctgcgggccgctggaagccctgcacctcgatctgcccgatgcccgcggcatcgccctggtctgccatccgcacccgctgttcgccggcaccatgcagaacaaggtggtcgccactctgcaacgcagcgcccgcgatgccggcctggcgaccctgcgtttcaacttccgtggcgttggccagagcgctggcagctatggcgaggggatcggcgagatcgacgacgccgaggccgccgcgcgctggttgctggcacgccatccggggttgccgctgacactgatgggcttttccttcggctcctgcgtcgccggcaatctggcggggcgcctggaagcgcagggcgtcgggctggcgcggctgttcatgatcgcgccgccggtggaacgcttcgcggtcagcctgcctgcgcgttgcccgctgaccgtggtgcagccggaggacgacgacgtggtcacgccggccgcggtatatgcctggagcgagtccctggcacgaccgcacgagctgttgcgggtggcagaaagcggacatttcttccatggcaagctgatcgatctgaaggacctgttgctgccacgcctgcaggactga

SEQ ID NO: 321454 - DNA, 447 bp, Pseudomonas aeruginosa
gtggaacagtcgctcaccgcctggctgctgccggccctcgccctggtcgccggggtcgccatcggttttctgatcgcccgcctgctgcccaacgccgcgccgaacaaggtgcaacgccagatggacgacctgcaggaccgcttcgacagctatcagcgcgaagtcgtgacccatttcaacaccaccgccagcctcgtgaagaagctgacccagagctaccaggacgtgcaggagcacctctccgacggcgcccagcgcctggccctggacgaacagacccgccagcgcctgctggctgcgctgcatgccgacgaggcctatccggccgagcgccgcgagcgcctgactccgccggcctccggcgaagtgccgaaggactatgcgccgaaaagcccggacagccccggcaccctcgacgccacctacggcctgaaaggcaagtactga

SEQ ID NO: 321455 - DNA, 1902 bp, Pseudomonas aeruginosa
atgtctcatcaatccgatctgatcagcgaggacatcctcgcctacctggggcagcacgaacgcaaggaactgctgcgcttccttacctgcggcaacgtcgatgacggcaagagcaccctgatcgggcgcctgctgcacgactccaagatgatctacgaggatcacctggaggccatcacccgcgactcgaagaaagtcggcaccacgggcgacgacgtcgacctggcgctgctggtcgatggcctgcaggccgagcgcgagcagggcatcactatcgatgtggcgtaccgctacttcagcaccgccaagcgcaagttcatcatcgccgacacgcccggccatgagcagtacacccgcaacatggctaccggtgcctcgacctgcgacctggcgatcatcctgatcgatgcccgctacggtgtgcagacccaaacccgccggcacagtttcatcgcgtccctgctgggtatccggcatatcgtggtcgccatcaacaagatggacctgaagggcttcgaccagggtgtcttcgaacagatcaaggccgactacctggcctttgccgagaagatcggtctgaagaccagttcgctgcacttcgtgccgatgtcggcgctcaagggcgacaacgtggtcaacaagtccgagcgttcgccctggtacgccggccagtcgctgatggaaatcctcgaaaccgtcgagatcgccgccgaccgcaaccttgatgacatgcgcttcccggtgcagtacgtgaaccggccgaacctgaacttccgcggtttcgccggcaccctggccagcggcgtggtgcgcaagggcgacgaagtggtggcattgccgtcgggcaagggcagcaaggtgaaatccatcgtcaccttcgagggcgaactggagcaggccggtcccggccaggccgtcaccctgaccctggaagacgagatcgacgtttcccgcggcgacatgctggtgcatgccgacaatcgcccgctggtcaccgacggcttcgatgccatgctggtgtggatggccgaggagccgatgcttccgggcaagaagtacgatatcaagcgcgctaccagctatgtgccgggttcgattccgagcatcgtccacaaggtggacgtgaataccctggagcggaccccgggcagcgagttgaagctgaacgagatcgccagggtcaaggtcagcctggacgcgcccatcgcgctcgatggctatgagcagaaccgcaccaccggcgccttcatcgtcatcgatcgcctgaccaacggcaccgttggcgccggcatgatcatctccgctccgccggcggcccatggcagcagcgctcatcacggctcgaatgcccatgtgacgcgcgaggagcgtgccggccgcttcggccagcagccggcgaccgtactgttcagcggcctctccggcgccggcaagagcaccctggcctacgccgtggagcgcaagctgttcgatatgggccgcgcggtctacgtgctggacgggcagaacctgcgccacgacctgaacaaggggttgccgcaggaccgcgccggacgcaccgagaactggctgcgcaccgcccatgtcgccaagcagttcaacgaggccgggttgatcagcctctgcgccttcgtcgcgccgagcgcggaagggcgcgagcaggccagggcgctgatcggcgccgagcgcctgatcaccgtctatgtgcaggcgtcgccgcaggtttgccgcgaacgcgatccacaggggctgtatgcggcgggcgaggacaatatccccggcgagtccttcccctacgacgtgccgctggatgccgacctggtgatcgatacccaggcgctgagcgtcgaggacggcgtgaagcaggtgctcgacctgttgcgcgagcgccaggcgatctga

SEQ ID NO: 321456 - DNA, 918 bp, Pseudomonas aeruginosa
atggtcgacaaactgacgcacctgaaacagctggaggcggaaagcatccacatcatccgcgaggtggccgccgagttcgataacccggtgatgctgtactcgatcggcaaggattccgcggtcatgctgcacctggcccgcaaggccttcttccccggcaagctgcccttcccggtgatgcacgtggacacccgctggaaattccaggagatgtacaggttccgcgatcggatggtcgaggaaatgggcctggacctgatcacccacgtcaacccggacggcgtcgcccagggcatcaacccgttcacccacggcagcgccaagcacaccgacgtgatgaagaccgagggactcaagcaggccctggacaagtacggtttcgacgctgccttcggcggcgcgcgccgcgacgaggagaagtcgcgggccaaggaacgggtctattcgttccgcgacagcaagcaccgctgggacccgaagaaccagcgtcccgagttgtggaacatctacaacggcaaggtgaagaagggcgagtcgatccgcgtattcccgctgtccaactggaccgagctggacatctggcaatacatctacctggaaggcatcccgatcgtcccgctgtacttcgccgccgagcgcgaggttatcgagaagaatggcacattgatcatgatcgacgacgagcgcatcctcgagcatctctctgacgaagagaaagcccgcatcgagaagcgcatggtgcgcttccgtaccctcggctgctacccgctcaccggcgcggtcgagtccagcgccaccacgctgccggaaatcatccaggaaatgctcctgacgcgtacttccgaacgccagggtcgggtcatcgaccatgaccaggccggttcgatggaagaaaagaaacgtcagggctatttctga

SEQ ID NO: 321457 - DNA, 1104 bp, Pseudomonas aeruginosa
atgcgccgtaccgccctcgccctgcccctgttccttctggtctcagcatgcagcagcgaaccgacgccaccaccgaaacccgccgccaaaccccaggctcgcaccgtcatttcaccccgccccgtacgccagtcggtgcaaccgatactgccgctgcgcggcgattacgcgaacaatccggcggcacagcgcttcatcgacaggatggtcagccagcacggcttcaaccgccagcaactgcacgatctgttcgcccagacccagcgcctggactgggtgatccgcctgatggaccggcaagccccgacctataccccacccagcggaccgaacggcgcctggctgcgctaccggaagaagttcgtcacgccaggcaacgtacagaacggcgtgctgttctgggaccaatacgaaaccgacctgcaacgggcatcgcgcgtctacggcgtgccgccggagatcatcgtcggcatcatcggcgtggaaacccgctgggggcgtgtgatgggcaagacgcggatcatcgatgcgctgtccaccctgtccttctcctaccctcgccgcgcggaattcttcagcggcgaactggagcaattcctcctccaggcgcgcaaggaaggcaccgacccgctggccctgcgcggttcctatgccggcgccatgggctacggccagttcatgccgtcttcattcaccaagtacgcggtggacttcgatggcgatgggcatatcgacctgtggaatccgcgtgacgccatcggcagcgtcgccaactatttcaagcagcacggctgggtcagcggcgatcgcgtggcggttcccgccagtggccgggctccctcgctggaagatggcttcaagacgctgtacccgctggacgtgctcgcttccgccggattacgcccgcagggtccgctcggcggccaccggcaagccagcctgctgcgcctggacatgggcaggaactaccagtactggtacggcctgccgaacttctacgtgatcacccgctataaccacagcacccactacgcgatggccgtctgggaactgggcaaggaagtcgaccgggtgcgtcaccgctccgtcgtcaggcaggattag

SEQ ID NO: 321458 - DNA, 759 bp, Pseudomonas aeruginosa
atggctatcgccctgagcaccctggtcgaagaggccgaccgttatctggatgccgcgcgcatccaggactactgcccgaacggcctgcaggtcgaaggccggccgcaggtgcggcggatcgtcagcggggtcactgccagccaggcgctgctggatgccgccgtggaggccgacgccgacgtggtgctggtgcatcacggttacttctggaagggtgagaacccctgcgtggtcggcatgaagcaacggcgcctgaagaccctgctgaacaacgatatcagtctgctcgcttaccacctgccgctggatctgcatccggaggtgggcaacaacgtgcagctcgcccggcagctcggcttcgaagtggaagggccgttggagccgggcaacccgcgttccatcgtcctcctcggttcgcttgccgagccgatgcagcctgccgatttcgctcggcatgtgcgcgatgcgctggggcgtgagccgctgctggtcgatgccggtcagccgatccggcgcatcgcctggtgcaccggcggcgcccagggctatatcgaccaggcgatcgccgctggcgtcgatgcctacctgaccggcgaggtttccgagcagaccgtgcacagcgcgcgggagaacggcatcagcttcatcgccgccggacaccatgccaccgagcgctacggggtacaggcgctgggcgactacctgggcaagcgcttcgccatcgagcacttgttcatcgactgtcctaatcctgcctga

SEQ ID NO: 321459 - DNA, 987 bp, Pseudomonas aeruginosa
atgtacgccatcgccgaagacacccttcccgcacgcgtattgaaagaactgttgctctatcgccgccgttaccccgagcatcgccagagcgccagcgaagcggacgagatccgccgcatcgaacaggtccagttgccgcgcatcgccgccttcatcgaagccggcgagcccatcgaattcgtcctgccggcgtttccggccaagtcgccgaaccccggcaaggtcctcgacagccgtccggacatggccgagcgcctgtcgctgtcgttcctcaaccacctgtgccagcgcatccagctgttctatgcaccgggcgcgaagatcaccgtctgctccgacggccgggttttcggcgacctggtgaggatcggcgatgcgcacatcagcgcctaccaggatgccttgcgcctgatgatcgaggagatcggcgccacccatatcggcgtgttcaacctggaggacgtacgcgccttcgaggcccagcgcgacaaccacgagcagctccgccagttgctgatcgacggctacgccgagccgctggaaagcatccgcgagaccctgctggccagcgaagaaggcctgctgctgtaccgcgccatcacccgtttcctctacgaggacggcctgacccccgactaccagggctcgaagactgccctgcaacgcgacgccaaggagcgcgcctacggggtgatccagcgcagctgggcctggggcgcgctgctggccgaccagttcccccgcgcgatccgcctgtccatccatccgcagccggcggacagtctgaagttcggcatccacatgatgccgacccgcgacgactggctgacgccctggcacggcgtggcggtgaacaccgaggaccgcttcgtgctgatgaagcgcagcgaggtgctggaactcggcggcgagctggtgcagatcaacggccagcccagtcactaccgcctgccggccagggccgcccggcgcgccgccgtggcctga

SEQ ID NO: 321460 - DNA, 876 bp, Pseudomonas aeruginosa
atgaacgcctatctcagcgatcaaccggtacgtctctcgccgctgcgcgacgaacagggcaaccagccgcgcttcggcctgctgctggagcccggccgccccggcatgcacgtcggcgaactgccggcgcagtggctcaagggcctggctcgcagccaccacctgctgctcctgcgcggcttcgccgccttcgccgacgccgagagcctgacccgctactgccacgacttcggcgaagtcatgctgtggccgttcggcgcggtgctcgagctggtggaacaggaaggcgccgaggaccacatcttcgccaacaactacgtgccgctgcactgggacggcatgtacctggagacggtcccggaattccaggtgttccactgtgtcgacgcgcccggcgacagcgacggcggccgcaccaccttcagctcgaccccggcggcgctgcaactggccgacagtagcgagctggaactctggcgccgcgccagcggccggtaccagcgcagcgcggcgcactacagcagccgctcggcggcgccgatagtcgagcgccacccgcgccgcgaattccccatcctgcgtttctgcgaaccgccggtcgagggcgacgccagcttcatcaacccctccgagttccactacgacggcatcgccccggaacagcgcggcgaactgctcgacagcctgcgccgctgcctgtaccacccacaggcgcactacgcccaccgctggcgcagcgacgacctggtgatcgccgacaacctgaccctgttgcacggtcgcgaggccttcgcccaccgcgcgccgcgccacctgcggcgggtgcatatccacgccgagccggcgctgcgcaacccgcacctgcagcgcgactga

SEQ ID NO: 321461 - DNA, 1503 bp, Pseudomonas aeruginosa
atgagccattccgtccccaacgcgctgatgaccggcgccgactatctcgacagcctgcgcgacggtcgccaggtctacctcaacggcgaacgggtcgccgacgtcacccggcacagggcgttccgcaacgcctgccgcagcatcgccgggctctacgacggcctccacggcgagcagcgcgacgtcctcacccgggtcgatgcccagggccgccgcagccaccgcttcttcacccccgcgcagaacgccgaggacctgctcggcgcgcgcgacgcgatcggctgctggtcgcgtatgacctacggcttcatggggcgtaccccggactacaaggcggcgttcatgtccgggctggaggccggcgccggcttctacggcgactaccggcagaacgcctgcgcctggcaccgcgccttcgccgaccgcgggctgttcctcaaccacgcgatcatcaatccgccgctggaccgcagcaaggcgatccacgagatgcgcgacgtgttcgtccacgtcgaacgcgagaccgaccagggtatcgtcgtcagcggggcgaagatgctcgccaccggcagcgccatcaccaacgccaccttcgtcgccccggtcgcctcggcgcagatggaagccggcaaggccgaggacttcgccctggtgttcttcgcccgcatggacaaccccggcctgcgcctgatgtgccggccatcctacgaggagcgcgcgagcagtcccttcgactatccgctgtccagccgcttcgacgagaacgacagcgtgctgctgttcgacaaggcgctgattccctgggaggacgtcctggtctaccgcgacctgcgccgcgccaccggcttctatgccgagtcaggcttcgccaacctgtacaacttccagtccggcatccgcctcggggtgaagctggagctgatgatcggcctgctttccctcggcgtgcgcgccaatggcacccagggcttccgcgggatacaggctgccctcggcgagctgatcgccctgcagcacctgctgcaggcgctgaccaccgccatggcccgcgacccggagcgcaacgccgccgggtcggcggtgccgcgcctggagtacgccaatgccctgcgcatccaggtgccgcagatctggaagcgggtccgcgagctgctggaaagcgccctcggcggcgccccgctggtcaccgtctcgggcgccgccgacctgcgcgacggcgaggcgcggcggctggtggacagctactaccgcggtgccgagctggagccggagcagcgcctgaagctgttcaagctgatctgggacgccaccggcagcgagttcggcgcgcgccacgcggtctatgagagccattattccggcaatgccgagcagatccgcctcgactcgctggcctgggccagccgtcgcgggcacctggcctactgcgaggcgatggtccagcgctgcatggccgactacgacatccacggctggctgcgggggccctggcggcatgactga

SEQ ID NO: 321462 - DNA, 648 bp, Pseudomonas aeruginosa
atgactgagcgcaaacgctggctggccggctgcctctcggccctgctttccctgccgctggccgccgccgtgccgggcccggacgcgcccgccgacctggcgcgcggcaaggcgatggcgcagaaaatgtgctcgcgctgccacgacgacgacggcaacggcgggccgcggccgaaccgcagctacccgaagctcgccgggctcgaccgggaatacctgtacaagcagatctacgacctcaagacccagcgccggcgcaacccggccaccaacggccgcggcgaggagctgagcgcggcggacgtggtcaacgtctccgcctggttcgccgcccagcgcatgagtgccggcgagcagaccctggccgacccgaggcaacgcgaacgcggccgccagctcttcgagaacggcctggcgcagcgcggcgtaccgccctgcgtcacctgccacgggcccgccgcccagggcctgggggcgctgaaggcgccgcgcctggccgggcaatgggcggaatacctggcaacccagttgcacggcttccgcgacggcaagcgcggcaacagcgcgaccatgcgcgcggtcgccggcggcctggaggatagcgacatccaggcgctcgccggctacctgggcagcctggggccgtag

SEQ ID NO: 321463 - DNA, 939 bp, Pseudomonas aeruginosa
atgagcgccgccctggagcgattgaatcatctgaacctgaatcacttgtatgccttcgtcgccgtcgccgaacacaacagcttcaccgccgcggcggaggccctgggcttgtcgaaatcgctactcagcgagcagttgcgacgcctggaggccgacctcgggatccagttgctgacccgtaccacccgtcgcatgacccttaccgatcgcggcgaactgctgttcggcgtggcccagcgcatgctcggcgagctggacggcgcgctctccgatgtgcgcgacctgcagggcgagcccagtggccggttgcgcatcaccgcgccgcaggacttcgtcaagtggcacatcagcagcgtttccgcggcgttcatccggcagtttcccaaggtccaggtggaaatgctggccgatgaccagttcagcgatctggtcggccagcgcatcgatctcgcggtacgtatcggctggccgcgcgactccggcctgcatgccagcaagctgtgcgacttccagcaggttgccgtggcgacgccgggatacctcgccggcctgccgccggtgctccagccgcacgacctggcgcgttgcgaatggatcggccatacccgcctgagcacgccctggacctggaccttcgaacgccagcgcgagcgtgccacggtacagacccgagggcgcctgctggcgaacaacaccctggcggtgtaccgcctggtgctcgacggtgccggcgtcagcgtgctgccgagcttcctggtagcccgcgagatcgcccgcggacggctggtccggctgctgcccggttggcgcctgccgcagggcggcatctatgccctgtacccctcggcgcgctacatgccggtgcgggtcagggcgttcatcgagtcgctgcgcgagcatctcggtcgcgagccgttccgcctggcgcagagcgaatga

SEQ ID NO: 321464 - DNA, 1023 bp, Pseudomonas aeruginosa
gtgaatggttcagtactgcccagccgtggccgcgtcaccatcaaccaggtggccgaggccgccggcgtctccaaggccagcgtgtcgcgctatatcggcggcgaccgccagttgctcgccgatgccaccgcccggcgcatcgagcgcgccatcgaccagctcgactaccgccccaaccagatggcccgaggcctcaagcgcgggcgcacacggctgatcggaatgctggtggcggacatcctcaacccctactccgtggccgtcatgcatggcgtggaaaccgcctgccgcgaacacggctacagcctggtggtgtgcaataccgaccgcgacgacgagcaggagcgtcatcacctggccgccctgcagtcctacaacgtcgaaggactgatcgtgaacaccctcggccaccatcccggcgaattgcgcgccctgcaccgcgaactgccgatggtgctggtggaccgccagttggccgagctggataccgacctggtcggcctggacaacgccgacgccgtcgaacaggccctcgaccacctgcagcaccgcggcttccgcgacatcctgctggtcaccgaaccgctcgacggcaccagctcgcggatcgagcgggtccaggccttcaatgcctccatcggccggcgaccggcgctcaagggccaggtcctgcaaaccgacgacttcttccgcgacggcctgcgcgccttcctttcggccagcggccccgggccgaaggcgctgttcacctgcaacggcgtcgccaccctctgcgccacccgccaactgcgcgacctcggctgccggctgttcgatgaggtcggcctgctggccctggacgaactcgactggtacccactggtgggcagcggcatcaccgccctcgcccaacccaccgacgaaatcggccgcaccgccttcgaacgcctcctggcgcgactcgaaggcgaccgcgagccggcgcgccgggtgaccttcccggcgcaactgatcgttcgcggctcgacccatccacgcggctag

SEQ ID NO: 321465 - DNA, 783 bp, Pseudomonas aeruginosa
atgtcccttcaccccgtctccatcagtctttccagctatggcgcggacctcgttcgcagtcgcggccaggccagcttcctgcccttgctggcgatggccggcgcgcagcgcgtggaactgcgcgaggaactcttcgccggcccgccggataccgaggcgctgaccgccgccatccagttgcaggggctggagtgcgtgttctcctcacccctcgagctgtggcgcgaagacggccagttgaaccccgagctggagccgaccctgcgccgcgccgaagcttgcggagccggatggctcaaggtctcgctcggccttctgccggaacagcccgatctcgccgccctcggccggcgcctggcgcgccacggcttgcaactgctggtggagaacgaccagacgccccagggcggccggatcgaggtgctggaacgcttcttccgcctcgccgaacgccagcagctggacctggcgatgaccttcgacatcggcaactggcgctggcaggagcaggcagccgacgaagccgccctgcgcctgggccgctacgtcggctacgtgcactgcaaggcggtgatccgcaaccgcgacggcaagctggtcgcggtgccaccgtcggccgccgacctgcagtactggcagcgcctgctgcagcatttcccggaaggcgtggcgcgggccatcgaatacccgctgcagggcgacgacctgctcagtctcagccgccggcacatcgccgccctcgcccgcctcggccagccccaggaggaacgccagcatggctga

SEQ ID NO: 321466 - DNA, 951 bp, Pseudomonas aeruginosa
atggctgacttcgagatcctctgcttcggcgagaccatggccatgttcgtcgccgaacagcccggcgaactggaccgggtcgagcagttcggcaagcgcatcgccggcgccgacagcaacgtcgccatcggcctcgcccgcctcggcttcgcggtggcctggctgagccgggtcggcgacgactcgctcggccgtttcgtactcgacagcctgacccgcgagggcctcgactgccgcttcgtcgaggtcgacgcgcaagcgcccaccgggttccagatgaagtcccgcgaggtcgatggtgccgacccgcgggtcgagtacttccgccgcggctcggcggccagccggctgggcctcgcccatatccgcgaagaaatgctcggcgcccgccacctgcacgccaccggcattcccccggcactctcggcgagtgcctgcgaactgtcccacgaactgatgcggcgcatgcgcggcaagggcgccagcctgtccttcgaccccaacctgcggccctcgctgtggcccagcgagcgccgcatgatcgccgagatcaacgccctcgccgcgcatgcccactgggtcctgccgggcctggaggaaggccgcctgctcagcggctggcaggaacccgcggatatcgccgcgttctacctggacatgggcgtcgacgcggtggcgatcaagctcggcccgagcggcgcctactatcgcgatgcccacggcgaagggctggtccccggcgtgccggtggcgaccgtggtggacaccgtgggcgccggcgacggcttcgcggtcggggtggtcagcgcgctgctggaaggcctgccgctgcccgacgcggtggcgcgcggcaactggatcggcagccgcgcggtacaggtccgcggcgacatggaggggctgccgaaacgcagccaactgctcgaccgcgagcgccgcaggagcgcctga

SEQ ID NO: 321467 - DNA, 1308 bp, Pseudomonas aeruginosa
atgaccatgcctcgcctcgccagcagccgctggtggtacatcatgccgatcgttttcgtcacctacagcctggcctacctggaccgcgccaactacggcttcgccgccgcctccgggatggccgacgacctgcggatcactcccgggctgtcctcgctgctgggcgcgctgttcttcctcggttacttcttcttccaggtgccgggggcgatctacgcggaaaagcgcagcgtcaagaagctgatcttcgtcagcctgatcctctggggcggactggccaccctgaccgggatggtcgccaacgtctatctgctgatcggcatccgcttcctcctcggcgtggtcgaggcggcggtgatgccagcgatgctggtctacctctgccactggttcacccgcgccgagcgctcgcgggcgaacaccttcctgatcctcggcaacccggtgaccatcctctggatgtcggtggtctccggctacctggtggagcatttcagctggcgctggatgttcatcatcgaaggcctgccggcggtgatctgggccttcatctggtggcgcctggtggatgaccgcccgcgccaggccgcctggctgagcggctcggaaaaacgcgacctggaagacgccctggccgccgagcagcagggcatcaagccagtgaagaactaccgcgaggcgttccgttcgccaaaggtcatcgtcctctcgctgcagtacttctgttggagcatcggcgtctatggcttcgtcctctggctgccgtcgatcctcaagcacggcgccaacatcgacatcatagaagccggctggctgtcggcgctgccctacctggcggcggtgatcgccatgctcggggtgtcctgggcctcggaccggttgcagaaacgcaagcgtttcgtctggccgccgctgctcatcgcgtccatcgccttctacggttcctacgccctcggcagcgagcacttctggctgtcctacgccctgctggtgctggccggggcctgcatgtacgcgccctacggaccgttcttcgccatcgtcccggaagtcctcccggccaacgtcgccggcggcgccatggcgctgatcaacagcatgggcgcgctgggctcgttctccggctcctggctggtcggctacctgaacggcatcaccggcgggcccggggcttcctatctgttcatgagcggagcgctgctgctgtcggtgctgctcaccgtgttcctcaacccgcacgccgacaagcgcgagcccgatgccgctcgcgcgcacgcctcgcggcgggcggcgccggcccacccctga

SEQ ID NO: 321468 - DNA, 987 bp, Pseudomonas aeruginosa
atgaagaaagtggttctctacaaacgtctctccgcgcccctgatggaacgcctgcgcgaacgggtcgaggtgctcctggtcgaggagcccggccgcgacgacctggcccgcctgcgcgacgccctgcccgaggcccacggcctgctcggcgccagcctgcgcctggacgccggactgctcgacctggcaccgcgactggaagccatcgccagcgtctcggtgggcgtcgacaactatgacatcgactacctcgaccgccgcggcatcctcctcagcaatacccccgacgtgctcaccgagaccaccgccgacaccggcttcgcgctgatcctggcgacagcccggcgggtagtggaactggccggctgggtgcgcgccggggaatggaagaagagcgtcggcgccgcccagttcggtaccgacgtgcatggcaagaccctcggtatcgtcggcatgggccgcatcggcgaggccctggcccggcgcgggcaccacggcttcggcatgcgcgtgctgtaccacagccatagcccgaagccccacgtcgaagaacgctacgcagcgagctaccgccccctcgacgcgctgctcgaggaatccgacttcgtctgcctgaccctgccgctgaccgccgccaccgaaggcctgatcggtgccgcgcagttcgcccggatgcgcccgcaggcgatcttcatcaacatctcccgtggccgggtggtcgacgaggcggccctgatcgaggccctggcccagcggcggatccgcgccgccggcctcgacgtgttcgagcgcgagccgctgtctcccgactcgccgctgctgcgcctgccgaacgtggtggccactccgcacatcggctcggccaccgaggaaacccgcgaagccatggcccgctgcgcggtagacaacctgctggccgccctcgccggcgcgcggccgctgaacctggtcaatccttcggcctgggcgcaacggcgaggcgcctga

SEQ ID NO: 321469 - DNA, 717 bp, Pseudomonas aeruginosa
atgcccgatgacaaggccgtcaacggccgccgcgacttcctgcgcaagaccctgaccgtgatcccggcggtgaccctggccggctatggcgtcggccatgccatgcagacgcccgccgccgagcaggacaaaccccgcgaacgctaccagcctcgcttcttcaccaacaccgaatgggctttcgtcaacgccgcggtggcgcgactgatccccagcgacgacaacggccccggcgccatcgaggccggggtgccggagttcatcgaccgacagatggaaaccccctacgggcacggcgcactctggtacatgcaggggccgttcgtcaccgacgccgcgccggagttcggccatcagttgaagctggtgccacgcgacatctaccgggtcggcatcgccgccctgggacgctggagcaaggccaaccagggcaagccgttcgccgagctggagccgtcggcgcaggacgacatcctgcaacgcctggaagccggccagatcgacctgcaggacctgccggccaagctgctcttcggccagttgctgcaaaacacccacgaaggcttcttctccgatccgcagcacggcggcaatcgcggcctggtgggctggaagctggtcggtttccccggcgcccgcgccgacttcatggactgggccgaccgcggcgagaagtatcccttcccgccggtggcgatttccggcgagaggggttga

SEQ ID NO: 321470 - DNA, 1776 bp, Pseudomonas aeruginosa
atggcgacgacactcaaaccggtggacgcggtggtggtcggcttcggctggaccggagcgatcctggccaaggagctgaccgaggccgggctcaacgtggtggcgctggagcgcggcgagaaccgcgatacctatcccgacggcgcctacccgaacaccctcgacgagctgacctacaacacacgcggcaagctgttccagaatctctccaagagcaccgtgagcatccgccacgggatcaacgacaccgcgctgccctaccgtcagctctccgccttccttcccggcgacggcgtcggtggcgccggcctgcactggtccggcgtgcatttccggatcatgcccgaggaactgcgcctgcgcagccattacgaggaacgctacggcaagaaattcatccccgaaggcatgaccatccaggactacggggtcagctacgaagagctggagccgcacttcgatttcgccgagaaggtcttcggcacctccggcaccgcgcatacggtcaagggccaggtggtcggcaagggcaatccgttcgccgccgaccgctcggacgacttcccgctgccggcgctgcgccaggtgtactccgcgcaactattccgcaaggccgccgaggaactcggcctgcacccctacgacctgccggcggccaacgcttcggggccctggaccaacccctacggggtgcagatggggccgtgcaacttctgcggcttctgcagcggctacgcctgctacatgtattccaaggcctcgccgaacctgaacatcctgccggcgctgcgccagaccccgctgttcgaactgcgcgccaactgcaacgtgctcaaggtcaacctcgacagcgacggcaggcaggccaccggcgtgacctacgtcgacgcccaggggcgcgagatcgtgcagccggcgaagctggtgatcatcagcgccttccagttccacaacgtgcgcctgctgctgctctccggcatcggcaagccctacgacccgcgcaccggcgagggcgtggtgggaaagaacttcgcctaccagaacatggccaccatcaaggcgttcttcgacaaggacgtgcataccaaccccttcgtcggcaccggcggtggcggcgtggcggtggacgacttcaacgccgacaacttcgaccacggaccgctgggcttcgtcggcggctcgccgatgtgggtcaaccaggccggctccaagccgatcggcggcctcgccgtgccgcccggcacgccgagctggggtagcggctggaaacaggcggtcaaggacgcctacacgcacaccgtgtcgatggacgcccacggcagcaacatgacctaccgcgacaactacctcgacctcgacccgacctacaaggacgcctacggccagccactgctgcgcatgaccttcgactggaaggacaacgagatccgcatgagccgctacgtcaccgagcacatgcgcaagatcgccgaagcgatgaacccgaaggccatctcggtgagcgtcaagaacttcggcgaccacttcaatacacgggtctaccagaccacccacctgctcggcggggcgatcatgggcagcgatccgaagaccagcgtgctcaaccgctacctgcagagctgggacgtgcacaacgtcttcgtcatgggcgcctcggccttcccccagggcaccggctacaaccccactgggctggtggcggcgctggcctactggtcggccaaggcgatccgcgagcaatacctgaagaaccccggtccgctggtgcaggcatga

SEQ ID NO: 321471 - DNA, 1320 bp, Pseudomonas aeruginosa
atgaaaccgacagccttcctcgccctctccgccctcgcctgcggcatcgcccaggccgccgcagcgccggacccggccctggtcaggcagggtgaatacctggcccgcgccggcgattgcgtggcctgccacaccgccagggacggcaagccgttcgccgggggcctgccgatggaaacgccgatcggcgcggtgtactcgaccaacatcaccccggaccgcaagaccggcatcggcgactacagcttcgaggacttcgaccgtgccgtgcgccacggcgtggccaggtccggcgacacgctctacccggcgatgccctacccgtcctacgcgcgagtcagcgaagcggacatgcgcgccctctacgcctacttcatgcatggcgtggagccggtggagcagcccaacaaggccagcgacatcccttggccgctgtcgatgcgctggccgctggcattctggcgctggaccttcgctcccgaggtgaaggacttccaggccgccgccgggcaggacccggtgctggcgcgcggcgcctacctggtcgaaggccttggccactgtggcgcctgccataccccgcgtgggctgggcatgcaggagaaggccctggcggcgagcgatggcgcggcctacctgtccggcagcgcgccgctggagaactggatcgccaagagcctgcgcggcgaccaccggaccggactgggcagctggagcgaagccgacctggtcagcttcctgcgtaccggccgcagcgagcgcagcgcggtgttcggcggcatgtccgacgtggtggtgcacagcatgcagtacatgaccgacgccgacctcaccgccatcgcccgctacctcaagtcgctgccgccggcggaccccgccgaccagccgcacgtctacgacgagagcgtggcccaggcactgttccacggcgacgacagcaagaccggcgcggcgctctacgtcgacaattgcggggcctgccaccgcaccgacggcaagggctatgcgcgggtcttcccggccctggccggcaacccggtagtgaccggcagcgacccgacctccctggtgcacatcgtgctcaagggcggcaccctgccggccacccaccaggcaccgtcgagcttcaccatgccgccgttcggctggcggatgaacgaccaggagatcgccgacgtggtcaacttcatccgcaccagctggggcaaccaggcgccaagcgtcagcgtcgacgaggtcaggcgcctgcgcaaggacaccggcgcggcggcggtgggcgacattccgccgccgggaccggccgcggcggatcgcggctga

SEQ ID NO: 321472 - DNA, 603 bp, Pseudomonas aeruginosa
gtgctcagcggtaccgtgcgcatgacctgctccgacgccgtcctgcatggcctgctgctgccggcgctggcgcgcttcatgcctggctatccggccctgcaactggagctggcgacctccaacgactttgccaacctcagccggcgcgacgccgacatcgccctgcgcatgacccgcacgccgccggaacacctggtcgggcgcaacctcggcgaggtgcgctacgtgctctgcgccagcgaacgctacctggagggccgcgacgcgacggagcccgccatgctgcactggatcgccccggacgattttcttcccgaccacccgagcgtggtctggcgtcgtcgacactatcccggggtgctgccggcctaccgctgcaacggcgtgctggcggtcgccgagatggcccgcgccggcctcggcctggcggcgatccctgcctacctgctacgcgacggcgacggcctgcgggtactggacgccgacctcgagggctgcgccagcgccctgtggctgctgacccgtccggactgccgggcgttgcgctcggtggtcgcgttgttcgacgagctggggcggcatgtgcgattgggagatgagtga

SEQ ID NO: 321473 - DNA, 1071 bp, Pseudomonas aeruginosa
atgtccacccctcccgcggcgccgctgcgcattgccctggtcggcgaccacgacccgcacatcaccgcccaccgggcgattcccctggccctgcgcctggccggcgaggcactcggcctggagatcgcattcgactggctggccagcgaccgcctgcccgccgagccggcgctggagcgctatgacgggttctggtgcgtgccgggcagcccctatcgcgacgccgacgcggtgctgcgcctgatcgcccatgcccggggccggcgccggccgttcctcggtacctgcgccggcttccagcacacgatcctcgagttcgcccgcaacgccctcggctggcaggcggcgacccatggcgaggagcatccgcacagcgaccaggcggtgatcgccgccctcccctgcgctctgctcgaagcccgcgaggaagtccgcctgctgcgcggctcgcgcctggccctggcgtatgccgccgactggatcgaggcggactaccattgccgctacgcaatcgccccgcgcttcgccgcggaactcaccggcggcgcactgcgggccagcgcctggagcgccgacggagcgatccgcgcggtggagctggaacagcatccgttcttcgtcgccaccctgttccaacccgagcgggcagccctggccggcgtcctgccgccactgccgaaggcattcgtcgaggcgtgccggacgcagcgccgcgaccgcccccggcgcggcccgacaccttattacgcagtgatcttcagctcccatcgcagcgccgtcgacgacggctacgccgaagcggccgagcgcatgctggaactggccagccgccagccgggctatctcggcgtggagtcggtccgcggcgccgacggtttcggcatcaccgtctcctactgggacagcgaggcggcgatccgtgcctggagccgccacgcggagcaccgcgacgcccaggcgcgcggccggcgcgactggtacgccggtttcagcgcgcggatcgcccgggtcgaacgcgaatacgccttcccggctcagccggacaccgcgcagtctccggcctcgtcctga

SEQ ID NO: 321474 - DNA, 1206 bp, Pseudomonas aeruginosa
atgagcaacccctatctcgaactgttcgccgcgcccggcgccaagggcttttcagccgccggcctgctggcgcggatgcccctgtcgatgaccggcctgggcatcgtcaccatgctttcccaggtgtatgccgactactggctggccggtaccgtggcggccaccttcgtgttctgcaatgccttgctcgcgccgcaggtatcgcgcctggtggaccgcttcggccagggccgggtgctgctcccggccgcgctggccagcgccctggcgatgagcgcgctgttgctgtgtacgcactatcgagcgccgaatgcctggctctacctgttcgccttgctcgccggggcgatgccgagcatgccggccatggtacgggcgcgctggaccgagctgtaccggggctcgccgaagctgcacacggcgttttccttcgaatcggtgatggacgaggtgtgctacatcatcgggccggtgctggcggtgagcctcagcgtcggctggttcgccgaggcggggccgctgctggcgacgctgttcctggtcgccggggtgagcctgttcagcctgcaacgcggcaccgaaccgccgctgcatgcccatccgcggcgccgcgccggcagcgcgctggcctatccggcggtacgcgtgctggcgctggtgctggccgccatcggggtgatcttcggcgcggtggaagtggtcagcgtggccttcgccgaggcgcacggcaacaaggctgcggcaagcctggtgttgtcggtctatgccgtcggctcatgtctcgcgggattgctgttcgggctgctgcgctggcgcctggcgctttcccggcaactgctctgcatggttacgctgatggccctgagcctgatgccgctgctaggggtggagagcatccttgcgcttgccctgaccgtgctggtggccggcttcagcgtggcgccgacgatgatcctggccatgggcctggtcgagcgcgcggtggacccggcgcgcctcaccgaaggcctgacctgggccatcaccgggctgggcatcggcatggccctgggctcggcgctggccggttgggtggtggagggctacggcgccgccagcggtttcctcgtcgcggtcggcgccggctggctggcctggctgctggccctggcctgcttccgggtgctggctcaggacgaggccggagactgcgcggtgtccggctga

SEQ ID NO: 321475 - DNA, 591 bp, Pseudomonas aeruginosa
atggcccgcaagcctcgcgccgagatgatcgaggaaacccgcgccaagctgatcgacgccgcgcgccgagcgttcgccgacaacggctacgccggcgcctcgatggacgaactgaccgccagcgccggcctcacccgcggcgcgctgtatcaccacttcggcgacaagaaaggcctgctggccgcggtggtgcagcagatcgacgacgagatgaatcttcgcctcggcgccatcctggctgccggcgaggacctctggagcggcttccgtgcctacaaccgggcctacctggaaatggccctggaagcggaaatccagcgcatcgtcctgcgcgatgccccggccatcctcggcagccccagcagcgaggccagccaactgcgctgcctaagctcgatgaccgggcaactgcgcgaactgatggacagcgggcgcgtccgccgcaccgacgccgaggccctggcctggctgctcaacggcgcgctggtggacgccgccctgcgtatcgccaacgccgaacacccgccggagagcctggccagggcctgccaggccctggacgtgctgctcgacggcctgctcatggagtga

SEQ ID NO: 321476 - DNA, 516 bp, Pseudomonas aeruginosa
atggactaccgcatcagaaccagccgcgacgaggacgccgcgctgctcccggccatcgagcgctcagccggggaaagcttccgcctgctgcccgagctggcctggatcgccgacgccggggtcgccggggtggacttccatcgccgcctgatcgagcgcggcagccactggctggcggaagacgccgatggccagccggtcggtttcctcgccgccgaacgctgcgccgacgagttgcacatcgccgagttgtccatcgcccaggcccaccagcaacagggcctgggccgccgcctgctggagcgcgcggtgacctacgcccacgccagccactgccgggcgctgaccctgacgaccttctgcgacgtgccctggaacgcgccgttctacgcacgcctgggcttccagcggctgacctggcaggaagccggcgagcgcttgcgcgcgatcctcggccacgagcaggagatcggcttcgccgccgacagccgctgcgcgatgcgcctggtgctctag

SEQ ID NO: 321477 - DNA, 1698 bp, Pseudomonas aeruginosa
atgagcagtcaacgccgaaactaccgcttcatccttgtcgtcaccctgttcgtcctcgcctccctggccgtctccggacggttggtctatctccaggtccacgaccacgaattcctcgccgaccagggcgaccttcgctcgatccgcgacctgccgatcccggtcacccgcggcatgatcaccgaccgcaacggcgagccgctggcggtatccaccgaagtcgcgtcgatctggtgcaaccccagggaaatggccgcccacctcgacgaggtgccgcgcctggccggcgccctgcaccgccctgcggcgccgctgctggcccagctccaggccaacccgaacaagcgcttcctctacctcgagcgcggcctgtcgccgatcgaggccagcgaggtgatggccctgggcataacgggggtacaccagatcaaggaatacaagcgtttctaccccagttccgagctgaccgcgcagttgatcggcctggtcaacatcgacggccgcggccaggaaggcaccgaactgggcttcaacgactggctgagcggcaaggacggggtacgcgaggtggcgatcaacccgcgcggctcgctggtcaacagcatcaaggtgctgaagacgcccaaggccagccaggacgtggccctgagcatcgacctgcgactacagttcatcgcctacaaggcgctggaaaaggccgtgctcaagttcggcgcgcactccggctcggcggtcctggtgaacccgaagagcgggcagatcctggcgatggccaacttcccctcctacaacccgaacaaccgcgccagcttcgccccggccttcatgcgcaaccgcaccctcaccgataccttcgagccgggctcggtgatcaagccgttcagcatgtcggcggcgctggcctccggcaagttcgacgagaacagtcaagtcagcgtggcaccgggctggatgaccatcgacgggcacaccatccacgacgtcgcccggcgcgacgtactgaccatgaccggggtactgatcaactcctcgaacatcggcatgagcaaggtcgccctgcagatcggacccaagccgatcctcgaacagctcggccgggtcggtttcggcgcgccgctgtcgctgggcttccccggcgagaacccgggctacctgccgttccacgagaaatggtcgaacatcgccaccgccagcatgtcgttcggctacagcctggcggtgaacaccgccgagctggcccaggcctactcggtgttcgccaacgacggcaagctggtgccgctcagcctgctccgcgacaacccgcagaaccaggtgcgccaggcgatggacccgcagatcgcacggcgcatccgggcgatgctgcaaaccgtggtggaagacccgaagggcgtggtccgcgcccgcgtgccgggctaccacgtggcgggcaagagcggcaccgcgcgcaaggcctcgggccggggctacgcggacaagtcctaccgttcgctgttcgtcggcatggcgccggcgtccgacccgcaactggtgctggcggtgatgatcgattcgccgaccaggatcggctacttcggcggcctggtctcggcgcccaccttcagcgacatcatggccggatcgctacgcgccctggcgatcccgccggacaacctgcaggacagcccggccgtcgccgaccgccagcaccacggctga

SEQ ID NO: 321478 - DNA, 471 bp, Pseudomonas aeruginosa
atgaagaattcctgcgcatctcgtgaactgagcgtcggcgaactggccaggcgtgccggcgtggcggtctccgccctgcatttctacgaaaccaaggggctgatcagcagccagcgcaacgccggcaaccagcggcgcttcagtcgcgagacgctacgccgggtggtggtgatcaaggtcgcccagcgggtcggcattcccctcgcggagatcgctcgcgccctgcagaccctgccggcggggcgcagccctagcgcggcggactgggcgcgcctgtcggcgcagtggaaggaggatctcaccgagcgcatcgacaagctgctgctgttgcgcgaccaactggacggctgcatcggttgcggctgcctgtcgctccaggcctgcccgttgcgcaaccccggcgaccagctttccgccgaggggccgggagcgcactggctggacgccgagggccgcgagcacgacggctag

SEQ ID NO: 321479 - DNA, 378 bp, Pseudomonas aeruginosa
atgctcatcccctcctcctactgctgcaccgacgatcagtgcccggccgctagcgagcggtcgccgtgctacgcgcaactcatcgatatcgaggtggaacccgccagccagttgtcgctggcgctggaacagaacgcgcacctgcaacgcctggaacgctgcttcaggaactgcccgggctacctgtccgccagcctgcaccccagcgaggacggccagcacgtgctgaactacacctgctggcgttcacgcgaggactgcgaacgcgcctggcaggcccgggaggacgcgcaaggcccgctgagcgcgggcgtctggcggctgggggcgaaaagcgtgcgtttcgagaccttcctggtcgacgccgagggctgctga

SEQ ID NO: 321480 - DNA, 1062 bp, Pseudomonas aeruginosa
atgaccctacagatccgcggctacgccgcccagtccgccagcaccccgctgaccgcccatcgcttcgaacgccgcgcgccgcgcgccgacgacctggtgatcgacatcctctactgcggcgtctgccactcggacctccatcaggcgcgcaacgaatggcacaacagcctgtacccgctggtgccgggccacgagatcatcggccgggtcgccagcgtcggcgaggcggtgagcggtttcgcggtcggcgaactggtcggcgtcggctgcatggtcgactcctgccggcactgcgccgcctgctccgagggcctggagcagtattgcgcggaatacccgaccctgacctacaacggccgcgaccgccacgacggcctgccgaccttcggcggctactcggagcgcatcgtggtctcggccaggttcgtcctgcgcattccccaggggctcgatccgaaggcggcggcgccgctgctgtgcgccgggatcacgtcctactcgccactgcgtcactggaaggtcggtcccggcagccgggtggcggtggtcggcctgggcggcctcggtcacatgggcctgaagttcgccagggcgctcggtgccgaggtggccctgttcacccgctcgccgggcaaggaagaggaagcgcggcggctcggcgccgaccaggtgatcctttccaccgacccacagcggatggccgccgtcgccggacgcttcgacctgatcctggacaccgtgccgcaccagcacgacctcaatccctatctggcgaccctcaagcgcgacggcaccctcgtactggtcggcctgctcgagccgctggagccggcggtgcacggtgcgcaactggtgatgggacgccgctcgatcgccggctcggccatcggcggcatcgccgagacccaggaaatgctggatttctgcgcggcccacgggatcgcctgcgacatcgagatgatcgagatccagcagatcaaccaggcctacgagcggatgctggccagcgacgtgaagtatcgcttcgtgatcgacatggcctccctgcagaagtccttctga

SEQ ID NO: 321481 - DNA, 891 bp, Pseudomonas aeruginosa
atgagcactacttccaccgacatggcgtcgctgatcgccaccctgcaagacgaaccgggtttcgacgccacccgcatccccggggttcgcctgatgcgcgccgaacaggcctatccgcgcagcccggtgttctatgagccgcgcatctgcatcctcgcccagggccagaagatcggtttcctcggcggcgaaacctaccgctacgacgccgaacgctacctggtgatgtcggtgcccctgccgttcgaatgcgaaacccacgcctccgccgccgaacccttgctgggagtgagcgtcgacgtggatatcggcaccttgaaggaactgctgctacagatggaagaggctcccggcagcgacgacgacaatgagctggcacccagcgcgccgatggcttcggtaccgctggacgcggggatggccgatgcggtgatgcgcctgctgggctgcctgcagagcccgctggacagccatatcctcggcccgcaactggtccgcgagatcatcttccgcgccctgcgcagcgagcagggcaacgccctgcgtgcggtggccggccggcacagcggctacgggcgcatggccagggccctgcggcgcatccacaccgactacgccagtgcgctggacatcgacaccctggctcgcgaggcgaacatgagcgtgtcgaccttccaccacaacttcaaggcgatgaccttcacctcgcccctccagtacctgaagagcgtgcgcctgtacaaggcctggagcctgatggtgcaggacgggctgaacgccagtaccgccgccaaccaggtcggctacgagagtccctcgcagttcagccgcgagttcaagcgctacttcgggcgcacgccgagcgaggaagtccaggccgcccgccgctag

SEQ ID NO: 321482 - DNA, 351 bp, Pseudomonas aeruginosa
atgcccagccccgccgaagtgttcaagtgcctggccgacgagacgcgtgttcgcgccaccctgctgatcgtcgaccagggcgaactgtgcgtctgcgaactgatgtgcgccctcgccgacagccagccgaagatcagccgccacctggcccagttgcgcagtgccgggctgctcctcgaccgtcgccagggccagtgggtgtattaccgcctgaaccctgcgctgccggcctggatccacgaagtcctgcaagtgaccctgcgggccaacggcgactggctgcaagccgacgcagcgcgcctgcgcgacatggacggccgcccgcagcgcgcctccgcctgctgccaatag

SEQ ID NO: 321483 - DNA, 1284 bp, Pseudomonas aeruginosa
atgctgatcgccttcgccatcttcctgttcaccctggtcctggtcatctggcagcccaggggcctcggcatcggctggagcgccagcatcggcgccctgctcgccctggcgctgggcagcgtcgcgccgggcgacatcccgaccgtctggaacatcgtctggaatgccaccgccaccttcatcgcggtgatcgtcatcagcctgctgctggacgaggccggcttcttcgaatgggccgcgctgcacgtcgcgcgctgggctggcggcgacggccggcgcctgttcgccttctgcgtgctgctcggcgcggcggtctcggcgctgttcgccaacgacggcgcggcgctgatcctcacgcccatcgtgatgtcgatgctgctggccctgcgcttcagcccggcggcgaccctggccttcgtcatggcggcgggcttcatcgccgacagcgccagcctgccgctggtggtctcgaacctggtgaacatcgtctcggccgactacttcgggctcggcttcggcgagtacgccgcggtcatgctgccggtaaacctggtgagcgtcgcgacctccctgctggtgctgttcctctatttccgccgcgacctgccgccggtctatgcgctggagcaattgaagccgccgcgggcggcgatccgcgaccgcgcgaccttcgtcgtcggtggctggatgctgctggtcctgctcgccgggctgttcgccctggagccgctgggcgtccccgtcagcgcggtggccgcggcctgtgcggcactgctgctggcggtggccgggcgcgggcgggtgatctcgacccggcgggtgctgcgcgaagcgccctggcagatcgtggtcttctcgctgggcatgtacctggtggtctacggcctgaagaacgccggtctcaccgacctcctggcgcagctcctgaaccgcctggccgagcacggcgtatgggcggccgcgctgggtaccggactgctttccgccgccctctcgtcggtaatgaacaacatgcccagcgtgctgctcggcgccctgtcgatccaggccagcgacaccgccggcgcggtgcgcgaagcgatgatctacgccaacgtcatcggctgcgacctgggtccgaagatcacccctatcggcagcctggcgacgctgctctggctgcacgtgctggcgcgcaaaggcatgcgcatcacctggggctactacttcaggatcggcgccctgctgaccctgccggtcctgctggcgaccctttcggccctggccctgcgcctggccatctga

SEQ ID NO: 321484 - DNA, 471 bp, Pseudomonas aeruginosa
atgcgagtcctgttcatgtgcacggccaacagttgccgcagcattctttccgaagccatgttcaaccacctggccccgccgggtttcgaggcatgcagcgccggcagccagcccagcgggcgggtgcatccgcgcagcctggcgaccctcgaacaggccggcatcgccacccacggcctgtacagcaagggcagcgaagccttcgaaggcgcaccgccggacatcgtcattaccgtttgcgacgccgccgcgggggaagcctgcccgctgtatctcggcgcagcgctgaaggcccattggggcctggccgatccctccgccctggatggcgacgaagccctgcgggatgcggcgttccacgccaccctggcacgcatcgaacagcgttgccgagccttcctcggcctgcccttcgctaccctggatcgcgaccagctcaagcgtgagctggagcgcatcggctcgctctga

SEQ ID NO: 321485 - DNA, 693 bp, Pseudomonas aeruginosa
atgtccgaacaactacccaacctcgatcccgcgctgctcggcgacccgccccccgtctccgggcacaggccgcgcatcctcctgctctacggctcgacccgcgagcgctccttcagccgcctgctggtgctggaggccgcacgcctgctcgaacgcttcggtgccgaaacgcggattttcgacccttccgggctgccattgcccgatgatgcaccggtggagcatcccaaggtccgcgagttgcgcgacctggtgcagtggtcggaaggccaggtctggtgctcgcccgagcgccacggtgcgctgtccgcggtattcaaggcgcagatcgactggattcccctggcactcggggcggtgcgcccgacccagggcaagaccctggcggtgatgcaggtctgcggcggctcgcagtcgttcaacgtggtcaaccagttgcgcgtgctgggtcgctggatgcgcatgttcaccatccccaaccagtcctcggttcccaaggcctacctggagttcgacgaagcgggccggatgaagccatcgccctactacgaccgggtggtcgacgtgatggaggagttgttcaagttcaccctgctcctgcgcgagcgcacggacttcctggtggaccgctattcggagcgcaaggaaagcgccgagcagctttccgcgcgggtcgaccagcgttcgctctga

SEQ ID NO: 321486 - DNA, 945 bp, Pseudomonas aeruginosa
atggaaagctggaatccctaccacgacacggagctctatttcgatgctccttcacccctgtgccagtcgcagatcctcgacgcgcgcgaaatgctcggcagcgccaccggtcactaccaggcgcggacggtgcgcccgtcgatgcagtatttcgattgcgacctgagcttcaccgagccgctgcgaacccacaaggtgctgccggaaggcctgtgcatcgtgcagatgttcgacggccagtggcggcacagcgtcgacggcggcgagccttatctctacaacctgggcggtccttcggtgctcggcaccggcgagccgatggaggccttcgatatcctgccggcgggcagccgcgtgcgcctgggcgggctgcggatcgccgccagctatctggaagaggaactggaaaccggcgatggcgccttgcggccgctggcgcggctgaagggcgacggcgcgagctttacccagttgtcccgttgcggcgccatcaccgccctgttcgagcgcctctaccagaatccataccgcggcgccctcggacgcctgcacgaagagagcctgaccctgggcctgctggtggagctggccgcctacctgggcggcgcggaccttcgtcgcgcgcgcaccccacgcgcccagcgcgacctggcccatgaagcgcgccgcctgctggaggcgaacctcggtgagccgccggccagcctcgaactggcgcgccaactgggggtcggcgaaaccaccctgcggcggattttcaagaacgagttcggtcgctcgatgttgcagtacgtccgcgaccggcgtctcgagatcggccggcagatggtccgcgagggtcgctggcagatcgcgcagatagcctatcgcctgggttactccagtccggaaaacttcacccatgcctaccgcgcgcgcttcggccatccgccggggcgcgagtga

SEQ ID NO: 321487 - DNA, 429 bp, Pseudomonas aeruginosa
atgatagcaaagtggactgcggcgctgctgatgggcgcactggcgtggggatcctgcacggcgcaggccgaagaggcgcggccgccagtcgccgacaaggtggtggcctatcagggccagcaggggctcaaggtctggaccctgcgtatcggcgaagcggcggccggcgaagcgctgttgcaggtcgaaggactggaccacgactgggaccgcctgatccacaaggtaaaggtggaaaagagcgccagggacagtcgctactccaccgaactgaacggcagcaagtatgtgatcctgatcgtgcgcgacggctggggcgagctctacctgcccggcgaacagcagacgcggcaggtcgcctatagcgagtcgctgtcgtccgcaggcgagccccaggcattcctgaccgactacctcgagcagaaataa

SEQ ID NO: 321488 - DNA, 1458 bp, Pseudomonas aeruginosa
atgagccacgatacgctgcgggtaaggctgctcgcattcctcttcctgattcccctggcgctctacgcctggtccgccgtgcaggccttccgggtcgactcgaccctgcgcgacgaacagttcatgcgcgactggagcgcctcggtgcgcaacgacccggacaccgccggcgccattccccgtcacctgttccgtccggcctatggcgtcgaaggtcatcttcaccagttcgccgaagacgccgaggccatccgccgcgaccatccttggctggctctgcgcggctggctggccgctatcggcaagctctgcgcgctggcgtcggcgctggtcgcggccgtcttgctggcgagactggaatacgacgggcgccgctcgatgcgctcgcaagcctacctgctcggccacctcgcgccggcctggcggcgcctcggtcgactggtcccgctgcacgccggcctgctggtcgccgccctggccagccagttgctctacgaagcgctgtggagctacagccactggcacagccacggcttcgtcgccctgctcttctcactgccgctgtggctgctgttcctcggcggcctgctcatgctgcggcgcctgcgcggcgaactgctgccgctggaggaaccggtgctccacctgctcggccgcgaactcgaccgcgtcgccgcgcccggcctctggcaatggctgggacagatcgccgaccgcgccggagcgccgctaccggaccatgtcgtcaccggcatcgagcactgctacttcgtcacccaggccaaggtcctgctggcaccccgcggcattccgctggaggggcgtaccctgtacatcccgctgacctatgcctcggtcatgagcgaggccgaaagcgccgcgatcatcggccacgaactgggccacttcgccgccggcgacaccgcccacggtgcatccctgtcgctcctgcagcggcaggtgcgcctgcgcatcgaacgcatcgccgcccccgaggatgggcatgtcggcctgctcggcaagccgggcctgtgggccgcgctgtacttcctcgatcgcttcgagcgcgcctacctgcactggaatcgccgccaggaactggccgccgacaaggtcggggcgcgggtagccggcgcgcgggtcttcgccatcgcgctgctacgcacctgcgcccttgcaggactgatcgaacgcctgctggccagcccgcagacgcgcaacctggtgcatgcgctgaccgaccatctgcgcgggaactccctggaactggacgaacacgacagcgctcgccgcctggaacaccccttcgacagtcacccgccgacctaccagcggatcgcggacctttccctggcgctcgacgacgatctgctgcgacaggcaaggcgcatcgtcagcgccgacgacacgcagtggctcaaccgcctgctcgatgcaggccacggggaaagccggtga

SEQ ID NO: 321489 - DNA, 672 bp, Pseudomonas aeruginosa
gtgatcccgccgggcgcgcaaacgccctgccccgccgggacaaggggcgacgaagccacgcagttgcggcgcttcgtcgccagcgtccccaaccggataagcatcggcgccgcccgtggcgcggcgccgctgtccgccctgctcggcctgctgctgctcggcggcgcctggaccttgcgcgaccaccccggtcccggccatgaggcggcggcgctgtgcctgctggcggcggccgccctcctcatgtgcctggcctgcctgcagcgcaacgccaggagcgcgccgttcctcgtcctcggccaggggcgcctgcgcgcccgcagcctgtcggcgccgctggacctgctggaggtcgccgacctgcgcctggaggacggggtctggttctccgcgatagtcctcgaactgcacggcaaggcgctaccggcaccatccacgcgcccgctcgatccgttcgccgcgcgtgccgtcagcgaatgccgggacggcccacgggttcgcctgctgtcccccggctggcgcctcaacggtcgcaacctgtcgctactggaagccgcggaggtcatcgacctctacctggacatcgcccgcgcccaggcccggctccgccaactgggcgagatcccgcccagtgcttcctcttcactcccaactccaaggatatttccatga

SEQ ID NO: 321490 - DNA, 663 bp, Pseudomonas aeruginosa
atgagcaaccaggaaccccgggacctcgtctccaacctcgccgaaaccctcggtgccgaacacgaagagctgaaccaggcgaagaccgccgaggtcatcgcccacctggagcgggtgatcgccaacgtaccgccggccaccgagttcaccaatacccgcaagtacgtggtgctgggtccgctgctgagcatcgtgcccttcatcatgaccggcatgtggttctcccagggcaagccgggggtcggcgtcgtcggcttgctgctcggcctgttcgggctgttcctcggctaccagcatcgcaactccggcaagacccccttcatgcgcctgacccgtacccagctctgggccgacagcctgtcggctccggtcgagctggccgacgtcatcgatttcagcgtcaaggccgacatgctgcaaaccacccagaccctccacctgcggcccgaaacgccgctgccgacccatcgcgccgtacgccaggtgttcgcctcccaggccatggccttcaaaggcaaggacccgcgcatcaccatcatgtcggccggcctgcagagcgatggcaagaagctggactgcgacgacatggcggcgatcctcgacgcctacatccaggccgcccacgcccagcgctacctgcaacaactgcgcagccagggctga

SEQ ID NO: 321491 - DNA, 1545 bp, Pseudomonas aeruginosa
gtgaagggcacggtccatccgcgaaggctgctgctttgcctggtgctggttccagcgctgctggcggggctcggcgcctggcagtgctggcgcgccgagcagcaggccgagcgactgggcgccgcgcagcagcgggtcgagcgcgcgctcgccgaagcgcgggcgctgccgccgagggccagcgtccgggtggacggccgggcctatgtgcgcgacctggccctggcgcggctcgacgagcaactcgccgacacacgaagcgcacagcgcctgaatcgcttcgccgccgtcctcgccgatagcggagcctgcctggcggcgctggtcgccgtattgggagccgtctccctggccggcatcgccggcgccgcacgcagcgcactgcgctcgcgtcgctgcctgctcctgtggttcgagctgggccgacgcctgctgccctgcctgctcctcgcccagatcggcctgctcgccctggccctggcctgtgccggaacgttcgagatcctcgggctgtggcgggtcggccaggttccggtcagcgaaggacgcacccaactgagcgtggcgctgatccttctcggcctgctggcgtcggcgtggcaaatgctggcgaagatcagccgcttgcgcctgcgcccggcgccggccctgcatgtcatcggccgccggctgggcgaagaggatgcaccggaactctggacgctactgcgcgagctggcggcgcgcctcgacacgccagccccgcagcacctgttggtaggtctctgcgacggcttctacgtgaccgccaaccgcgtctgcctgcaaccttccggcgagcatctggaaggacgcagcctatacctctcgctaccgttgctgggcctgctggaccgcgccgaactgagtgcagtgatcgctcacgaactggcccacttcgccggccgcgacgcccattacagcctgcgcttcctgccgatctaccagggcgccgcgagccaactggccgccatcgaggagcaggaagccaacgtcttcgaacgtgcggcactggaaccggcgcgactgttggccgggtacttcctcgaacgtttcggcctcgccgtgaaccactggagccgcctgcgcgaattcgccgccgaccgccgcgccgcacaactggccggtgcgccggcgatggcctcggccctgctgcgcagcgcggcggccggcgcgccgatacgggcgttcctcgaacactgcctgctcgctccggcgcgcgcgccggacaacctggtggacgccatccacgtctacctgggccagtccggcctggaagcaccggcccccggggcggagggactccaggtccatccgcaggatacccaccctccgctgggcctgcgctgcacggcgctgggagagagcttcgaacgcacctgggccgggaccgccggccgggccgttccgacacgaccgccgagccaggcgctgggcgtctggttcggcgcccccctggcgttgagccgagcgctcagcgccgacctgctcggcaagacctgtgagaatccccatgcaagaaactga

SEQ ID NO: 321492 - DNA, 636 bp, Pseudomonas aeruginosa
atgcaagaaactgacgaaaccctcgacgaactgccgccgctggaagcccgctgcgagatccgcgagatctcgcggggcaccgcctgcgttgccctgctcgctggcctggtggctggcgccaccggtctctggctcgcttcgctgccccacgcctggcgcctggccagtggccaatggctgttctggctgccagccgcgctgctgctgggcggcggcctgtacgcctgcctggcgggcgtgttcctctaccggcgccacggccaggtcgcgctcaccctgacgccggagagcatcgccttcgccaacgcgccgcaggtgccgatgtacaccttccagtcgctggagatcgagcgcgggcgctggctggaactcaccttcgcgaccaccttcgactgcacggcgccgagcttcgacaaccatgcccgtttcgacccgcgggctttcgcccgccccgaagcccgcgcggtggccggcggcaagcgggtcaagctggcgctgtgcggcgccgcgctgaacggccagaaaatggagctggagccgctcgcacgactgatctaccggtacatcctcgccggccatcgccagcgcgccctgcaacatcatcgcgcgcccgtgagcgacggcagcggggcctga

SEQ ID NO: 321493 - DNA, 288 bp, Pseudomonas aeruginosa
atgagccacaaccttgccgaactgccgctgtcccgacgccgcgccctggagcgcgagaaacaggcctgcctgcgcctccacctgtcccgcaatcgtgccagcgaacgcctggagtgcgccgtgcgcgacgaagtcgagcgcctgctgggtgcccgcgaacgccagggggccggctggccggagtgggtcagcgcggagctctgcgtggcggacgacccgctcttcgtgcgcaaggtggtggcgcgcctgaaagccgcggtggactggcaacgccagcgcgcagcctga

SEQ ID NO: 321494 - DNA, 2121 bp, Pseudomonas aeruginosa
atgccgtcccgaccccgacccagcttcgtctcccacctgttgcccggctccctggcgctctgtggcctggccatcgcctgcgccgtccagggcgaggagcgacgcagcctcgaacccatggtggtgaccggcagctacaaccccagcgacaccttcgacctgccgttctcggtggatagcatcgagcgtcggcagatcgctgacggccagctcggcatcaacctctccgaagtcctgccgcgggtacctggcctggtggtgcagaaccgccagaactacgctcaggacctgcaaatctcctcgcgcggctacggcgcccgctcggccttcggtatccgcgggctgaagctgctcgccgacggcatcccggccagtacgccggatggccagggccaggccgcgaccctcaacctcgacgtcgccgagcgcatcgaggtactgcgcgggccggcctcgacgatctacggcagcaacgccggcggggtgatccagatgttctcccgcgacggccagggcgccccgcgggtcggcgcggaaaccaccgtcggcagcgatggcctgagccgcaaccacctgtacacggaaggcgagggcgacggggtcggtttcctggtggatgcctcgcggatggacaccgacggctaccgcgaccacagcgccgcgcgccgcgtccagaccttcgccaagctgaacttcaggcccgacgccgacagccgcgtggcgctgatctacagcagcctggaacagaacgacactgaagatccgctggggcagacctgggacgcctacaagcacgacccgcgctctgtcaccgccaacgctgagctgtacgacacgcgcaagagcatcgaccaccagcaggccgggatgaactacgagcgctacttcggcgaggcgaccttgcaggtcaacgcctacgtgggcaagcgcagtgtcgtgcagtatctgtcgatccccaggggggtggcctccaacagtcagcgtggcggcggcgtggtggacttcgaccgcgacttccacggtggcaccgtgcgctggctgcagccggtacgccaggcgccgggcgtgctgaacctgaccgtcggcctcgactacgaccagagccgcgacgaccgtcgcggctaccagaacttcaacggcgaccagctcggcgtgaagggcgagttgcgccgcgacgaggtggacaccgccaccagcctcgatccctacctgcaggcgagctgggccatcgacgcctggaccctgcaggccggggtgcgccacagcaccatgaagatggaggtcgacgaccgctacctgagcaacggcgatgccagcggctcgcggcgctaccggaagaacaccccgtcgttctcggtgatgtacgccttcacccccgacctgcacggctacctcagcgccggcaagggcttcgagactccgacccaggcggagatggcctatgcgccggtggcggcgaacgcgccggacgtcttcaacttcggcctcaagccagccaccagcagccagtacgaagccgggctgaaggcgcgcctgtggggcaatacgcgggtcaacgcggcgatcttccagatccgcaccgaggacgagatcgtcgtcgccagctccctcggcggtcgcaccagctaccagaacgccggcaagaccctgcgtcgcggcttcgaactgggcctggagagcgaactgagcgagcactggaacgccaacctggcctatacccggctatccgccacctacgattcggatttcaaggccggcggcaagaccatcggcaagggcaagcacctgccgggcgtgccggaaagcagcctgttcggcgaactggtgtggaagcccgcggagggcatcagcatgggctgggaaggcatgtaccgcagccaggtctacgtcgaggacagcaacagcgaaaaggccgcgccgagctatgcggtattcaactggcgcacccgcttcgagcagcgcctgggagcctgggccttccaccagctggtgcgcctggacaacctgttcgaccgccagtacgtcggctcggtcatcgtcggcgacggcaaccggcgatactacgaagcggcccccgggctgtcctggtacgcgggagccggggtcgaataccagttctga

SEQ ID NO: 321495 - DNA, 2412 bp, Pseudomonas aeruginosa
atgagcgaaggtaaccgcagtcgatcgcgcctgctgccgagcctgctcggcctgttgatcctgctgtccggcctggcgctgctggccggcggcatcaagctggcgagcctgggcggctcgctgtactacctgctggccggcatcggcctggccctgagcggactgttgctgctgctgggcaagcgtgcggcgctaggcctgtacgctctggtgctgttcgccagcaccgtctgggctctgtgggaagtcggcctggactggtggcaactggtgccgcgcctggctctgtggttcgtcttcggcctgctgctctggctaccctggttccgccgcccgctgctggccgacggtccggcgccgctgggcaccgcggcgctgggcgtggcggtggtcctggccggcgccgccgcggtgggcagccagttcaccaatccggggcagatcgtcggtcgcatcgaccgcgacagcggcatgaccagcaccgccccggcgatgccggacggcgactggcaggcctacgggcgcaccgagttcggcgaccgctactcgccgttgaagcagatcaccccggccaacgtcggccagctcgaggaagcctggcgcatccgtaccggcgacctgccgaccgccgacgatccgctcgaactgaccaacgagaacaccccgctgaaggtcaacggcatgctctacgcctgcaccgcgcacagcaaggtgctggccctcgacccggacaccggcgcggaaatctggcgcttcgatccgcagatccagagcccggtaggcttcaagggcttcgcccacatgacttgccgtggcgtctcctactacgacgaagagcagtacgccaggagcgacgtcggcgcgccgccggccgcgctctccgaggccggcaaggcggtcgccgccagttgtccgcggcgcctgttcctgcccaccgccgacgcccgcctgatcgcgatcaacgccgacaacggcaaggtctgcgaggacttcggggtcaagggcgcggtcgacctgacggccggcatcggtccgttcaccccgggcggctactactccacctcgccggcggcggtcacccgcaatctggtgatcatcggcggccacgtcaccgacaacgagtcgaccaacgagccgtccggggtgatccgcgccttcgacgtgcacgacggcaagctggtgtggaactgggacagcggcaacccggacgagaccgagcccctggctcccggcaagttctatacccgcaactcgccgaacatgtggtcgctggccagcgtcgacgagaagctcggccaggtctacctgccgctgggcaaccagatgcccgaccagtggggcggcaaccgcacccctggcgccgagaagttcagcgccggcctggtggccctcgacctgaacaccggcaagctgcgctggaactaccagttcacccaccacgacctgtgggacatggacgtcggcagccagccgaccctgctcgacctgaagaccgccgatggcgtcaagccggcgctgatcgcgccgaccaagcagggcagcctgtacgtgctggaccgccgcgacggcacgccgatcgtgccgatccgcgaagtgccggcgccgcagggcgcggtggagggcgaccataccgcgccgacccaggcgcgttccgacctcaacctgctgcgcccgccgctgaccgagcgcgacatgtggggcagcagcccgttcgaccagatgctctgccgcatccagttccgctcgctgcgctacgagggccagtacaccccgccgtcggagcagggcagcctgatctatccgggcaacgtcggagtgttcaactggggcggggtgtcggtcgacccggtgcgccagatcctcttcaccagccccaactacatggccttcgtctcgcagatggtgccgcgcgacaaggtgcccagcggaagcaagcgcgagggcgagaccagcggcgtgcagccgaacaccggcgcgccctacgcggtgatcatgcatccgttcatgtcgcccatcggcctgccgtgccaggcgccgtcctggggtgacgtggcgggtatcgacctgaccaccgccaaggtcgtctggcagcacaagaacggcaccagccgcgacaacaccccggtgccgatcggcctcaccgtcggcgtaccgagcatgggcggctcgatcaccaccgccggcggcgtggccttcctcagcggcacgctcgaccagtacctgcgcgcctacgacgtgaaggacggcaagcagctctggcaggcgcgcctgccggccggcggccaggccacgccgatgagctacaccggcaaggacggtcgccagtacgtgctgatcgtcgctggcggacacggctccttcggtacccgcatgggcgactacatcatcgcctacgccctgcccaggcaatga

SEQ ID NO: 321496 - DNA, 1359 bp, Pseudomonas aeruginosa
gtgaaatcccatcttctccgcccggccctgcgccccgtggccggcggcctattgtccgcctccctgctgtgcaacgcggcgcacgccgccgaggcgttctcgccgaactcgaaatggatgctcggcgactggggcggcaagcgcaccgagctgctggagaagggctacgacttcaagctggagtacgtcggcgaggcggcggccaacctcgacggcggctatgacgacgacaagacaggacgctacaccgatcagttcgccctgggcgtgcacatggacctggagaagatcctcggctggaaggctaccgagttccagttcaccgtcaccgagcgcaacggcaagaacctttccaacgaccgcatcggcgacccgcgtgccgggcacatcagctcggtgcaggaggtctggggccgtgggcagacctggcggctgacccagctatggctcaagcagcagtacttcgacggcgcgctggacgtgaaattcggccgtttcggcgagggcgaggacttcaacagcttcccctgcgatttccagaacctggccttctgcggctcgcaggtgggcaactgggcggggagcatctggtacaactggccggttagccagtgggcgttgcgggtgaagtacaacttcgcgccggactggtacgtgcaggtcggcgcctacgagcagaacccgtcgaacctggagaccggcaacggcttcaagatgagcggcagcgggaccaagggcgcgctgctgccggtggagctgatctggcagccgaaggtcggcgccgagcaactgccgggcgagtaccggctgggttactactacagcacggcgaaggccgatgacgtctacgacgacgtcgacggccagccgcaggggctgaccggcaacgacttcaagtcgcgcggcagcaagcatggctggtgggtggtggcgcagcagcaggtcacttcgcacaacggcgatgcctcgcgcgggttgagcctgttcgccaacctgacggtccacgacaaggcgaccaacgtggtggacaactaccagcagctcgggatggtctacaaggggccgttcgacgcgcggccgaaggacgacatcggcctgggcatcgcgcgcatccatgtcaacgacgatgtgaagaagcgccagcgcctggtgaaccaggtgaacggcatcgacgactacgacaacccgctgtaccagccgctgcaggacaccgagtacaacgccgagctgtactacggggtgcatgtgaccgactggctgacggtgcggccgaacctgcagtacatcaagcagccgggcggggtcgacgaggtcgacaacgcgctggtggcggggatcaagatccagacggtgttctag

SEQ ID NO: 321497 - DNA, 282 bp, Pseudomonas aeruginosa
atgacccagccgccgctgcgcctgcgcaatgccgccagggacggctggctgatgctcgaatgggcggacggcgcggtcagccggatcgaccatgcgcgcctgcgcgccgcctgtccctgtgcgcaatgccgggcgcagcgcctgcgcggacggatcgtcgcggcggagcagggcgtgcgcctgcgcgatatccgcctgcagggctacggcgtgcagttgctgttcgacgatggccacgagcgcggtatctacccctggtcctatctgcgcgacgaactctga

SEQ ID NO: 321498 - DNA, 966 bp, Pseudomonas aeruginosa
atgacttgtaaaaacgccaccctgcccgaaatcctcgaactgttgccgcgcctggaggacgccgaccccggagtacgccgcctggcgctgatcgaactggccgacctggagctgccggaggcgctgccgttgctggttgcggccctgcgcggcgatcccgaccccggcgtgcgcggcgaggccgcgcgcctgctggaggcctgggaggaagacgcggtggtcgatgcgctctgtgcggccctggccgatccggtgccggcggtggccgatgccgccgcgcagagccttggcgaactcaaggaaccggccgtcgggcggcgcctgctgccgtggctcgggcatgccgatgccttcgtccgcgccagcgtattgcgtgcgttgcgcgaactgcgcctggaggagagcgccgtgccggccctggccgccctcggcgatccgcaggcggcggtgcgccgcgaggcggtggcggtactcggctggctccgccaccagccggccctggccgaactggccaggctggccagcgccgatgtcgacccggaggtacgccgggcggccaccggcgccctcggcctgagccgcgaggcgacggtgctgccggcgctctgcgcggcgctggcggacgctcaatggcaggttcgcgaagaggcggcgacgacccttggcaagctgggccgggaggaggccggcgagccgctgctgaaggccctggcggacgactactggcaggtccgcctgcgcgccgcgcgggcgctcgggcgcttgcgccaccgcccggcgcgggaggcgctggaagcattgctcggccatcccatcggcaacctgcgcaaggaggccgccctggccctcggcgaactggcggacccggcctcggcccaggccttgcgggtcgccgaaggcgacggcgatcccgaggtgcgcaaggcggtgcgcatcgccctggcgcaactgcgggtgccggcatga

SEQ ID NO: 321499 - DNA, 855 bp, Pseudomonas aeruginosa
atgacgacggccggcaacagcctggggcgcatccagatccgcgacctgagcatccgcctggggcaggggagcgaagccttcgaggcggtccgcgatctgagcctggaggcgcggccgggcgagttcgtctgcctgctcgggccttcgggatgcggcaagtcgaccctgctcggcgccctggccggccacctgcggccaagcgccggcagcgtgagggtcgacggccggagcgtggaaggaccttcgccgcagcgtggcatggtattccagcagcacaccctgttcccctggcggcgggtccgcgacaacgtcgccttcggcctgaagatgcagggcctggcccgcgccgagcgcaaccggcgcgccatggagatgctcggactggtggggctggcggacttcgccgggcgctggcccggccaactgtccgggggtatgcagcagcgcgtggagatcgcccgggtgctggtcaaccggccgcgcctgctgctgatggacgagcccttcggcgccctcgacgcgcagacccggctgaagatgcagaccttgctgctggacgtatgggcgcgggtccgcaccacggtgctgttcgtcacccacgacatcgacgaggccctgtacctggcggacagggtgctggtgatgagcccccgtccgggacggatcatcgccgacctggcgctggacttcccgcgcccgcgcgacacccggctggtgaccagcgccgacttcgtgcgcctgaaacgccactgcctggaactgctcgaccacgacgacggccgccagttgccgcgcctgaccccgctcggcttgccgccgggcatcaccccggaccgactgcggatcgccatatga

SEQ ID NO: 321500 - DNA, 798 bp, Pseudomonas aeruginosa
atgagttcgcttccgatctcccgaccctggcgctgggccacccgcgccgcttcgctggcggcctgcctggcgttctggcagctcgccgccggtctgcaactgaatctgggcctggtgaccttcgccaacgtgccgacgcccggtgcggtgttgctggcggcctgcaacctggcccagtccagcgtgctcctggcgcacctcggcgccagtctggcgcgggtcttcgccggctatctgctggccgccgcgctgggcatcgccctcggcctggcgatcggccgctcggcctgggccgaggccttgctgctgccgccgctggaagtgctgcggccgatcccggcggtggcctggattcccctggcgatcctgatgttcccttcgtcggaggcctcgatgatcttcattaccttcaccggcgcgctgttcccgatcctgctcaataccgtgcatggcgtggaggcgctcgatccgcgcctgctggcttcggcgcgcagcctgggggcggggcgccgggcgctgctgcgcgaggtgctgctgcccggcgccggaccgggcatcttcaccggcctggcgatcggcatgggcacctcctggttctgcctggtgaccgccgagatgatctccgggcaatggggactgggttactacacctgggcttcctacaacatccagaactacgacgaggtggtggtcggcatgctgctcatcggcctcttcggcatgggcagcagtgggttggtgaagcgcgtcggcgcgtcgctgacgccctggtacgcggcgggaggcaaggtccgatga

SEQ ID NO: 321501 - DNA, 1407 bp, Pseudomonas aeruginosa
atgcgactgcgtgcaatcctggccagcctggcgctggccctgacttccctgggtgcccaggcggaaaccatccgcgtggccatcggcactcaggacaccaccatcaactgcgccgccggcgggctgctgatccgcgagctgggcctgctggagaaatacctgccgcgcgagggccgctacaaggatgcggactaccgggtggagtggaagaacttcaccagtggcgcaccgctgaccaacgagatggtcgccggcaagctcgacttcggcgccatggccgactttcccggcaccttcaacggcgtggccttcgccgccgccggcaagcgcagcctgttcatcagcgtgctgtccggcagcacccgtggcagcggcaacggcatcgtggtaccgagcggctcgccggtgcagtcgctggccgaactgaaaggccagaccatctccgtaccgttcgcctccaccgcccatggcatgctgctgcgcgcggtggcggcgcaaggctgggacccgcagcgcgacgtgaccatcatcgcccagccgccggaaatcgccggttcggccttgcaggcgaacaagattgccgcccatgccgacttcgtacccttcgccgagctgttccccaatcgcggcttcgcccgcaagatctacgacggttcccaggccaacgcgccgaccttccatggcgcgctggtggacgccgcctacgccgagcgctatccggaggtggtggtggcctacctgcgggcgagcatcgaagccaatcgactgctggccgccgaaccggagaaatacagcgagctgatcgagaaggtcaccggcatcgaggccgaggtcaattacctgttccacggtccgctcggcctgcagacccgcgaccaggcctggaaacccgaataccgccaggcgctggcgacctccatcgacaccctgaagctgctgaagaaggccgaccgtgggctggacgtcgagcgtttcgtcgacgaacgctacatccgcgaggcctaccgtcaggccgggctggactaccaggcggcgctggcagactacgcaccgtcgccgctgcgcgccagcgacgcgcgcagcggccggccgatcgaggagttcgaacgggtagcgcagatctgggtgaagggcgaggccagggtgcgccattacgcttcgccggagtcggccctggccgatcttgccgagctgaaggcgcagggcaaggcgattcgtgcgatctacgcccaggatcgtgacagcgggatcaagctgctggccaaccaggcgtggttcgtccgcgacggcgagggtcgcctcaacgccttcctgctccgcgagcaggcccaggactatgcccgccgccatggcggcgaggtacgcgactttgccgccgccagccagcaggcgctggcgctccgctga

SEQ ID NO: 321502 - DNA, 246 bp, Pseudomonas aeruginosa
atggcctaccgaccccaggacatcttcttccgcagcagcgccccggtgaccatcgacgaagaccgctgcatcgccgacaagggctgcaccgtctgcgtcgaggtctgcccgatggacctgctggccatcgatccgacgacccgcaaggcctacatggcctacgacgagtgctggtactgcatgccttgcgaaaaggactgcccgaccggcgcggtgaaggtcgagattccctacctgctgcgctga

SEQ ID NO: 321503 - DNA, 1725 bp, Pseudomonas aeruginosa
atgaacaccctggagcaggaatacgacatcgtggtgatcggcggcggcaccgccgggccgatggcggcgatcaaggccaaggagcacgaccgcgaactgcgcgtgctgctggtggacaaggccaacgtcaagcgcagcggcgccatcagcatgggcatggacgggttgaacaacgccatcgtccccggccacgccacggccgagcagtacacccgggaaatcaccgtggccaacgacggcatcgtcaaccaggcggcggtctacgcctatgccagccacagcttcgagaccctgcggcagctggatcgctggggcgtcaggttcgaaaaggacgagaccggcgactatgcggtgaagaaggtccaccacatgggcgcctatgtgctgccgatgccggaagggcacgacatcaagaaggtgctctaccgccagctcaagcgtgcgcggatccccatcgccaaccgcctggtctgcacccgcctgctcaccgatgccgagggcgcggtgaacggcgtactcggtttcgactgccgcagcggcgacttccatgtgatccgcgccaaggcggtgatcctttgctgcggcgcggcgggccgcctgggcctgccgtcctcgggctacctgatgggtacctacgagaacccgaccaacgccggcgacggctacgccatggcctatcatgccggcgccgagctggccaacctggaatgcttccagatcaacccgctgatcaaggactacaacggcccggcctgtgcctacgtcaccggcccgctgggtggctataccgccaacgccaggggtgagcgcttcatcgaatgcgactactggagcgggcagatgatgtgggagttccaccaggaactcgaaggcggcaatggcccggtgttcctcaagctcgaccacctggcggaggaaaccatccagaccatcgaggacatcctccatggcaacgaacgccccagtcgcgggcagttccacgccgggcgcggcaccgactaccgccagcagatggtcgagatgcacatttccgagatcggcttctgctccggccactcggcctccggcgtgtgggtcaacgagaaggccgagaccagcgtgaagggcctctacgccgccggcgacatggccgcggtgccgcacaactacatgctcggcgccttcacctatggctggttcgccgggcgcaacgccgccgaatacgtcgccgggcgcgccttcagcgcggtcgacagcgcccaggtcgagcgcgagcgtgcgcggatcgaggcgccgctgctgcgcgagcatggcctgccggcggcgcaggtggagtacaagctgcgccggctggtcaacgactacctgcaaccgcccaaggtgacccgcaagatggaattgggcctgcaacgcatccaggccatcgccgaggatctggagcggatcaaggcggacaacccccacgagctgatgcgcgccctggaagtcagcgctatccgcgattgcgcggagatggccgcgcgcgcctcgctgttccgcaccgagagccgctggggcctgtaccaccaccgggtggactatccgcggcgcgacgacgctgcctggttttgccacgcgcacctgaagaaggacgagcagggacgcatggccagcttcaggaaaccggtcgaaccctacctgttcgccatcgacgagggcgaacagcaggcctaccagcgcctgcggctgaggaacgacgccgcctag

SEQ ID NO: 321504 - DNA, 750 bp, Pseudomonas aeruginosa
atgggcaaactgctcccgctttctcccgtgccgctgtacagccagctcaaggagctgctgcgcgggcgcatcctcgacggcgtctacccgccgctcagccgcatgccctcggagaacgagctgggcaaggccttcgacgtcagccgcatcaccgtgcgccaggcgctcggcgacctgcagaaggaagggctgatcttcaagatccacggcaagggcaccttcgtcgcccggccgaaggcgttccagaacgtcagcaccctgcaaggcctgggcgagtccatgacgcagatgggctacgaggtcatcaaccgcctgcatggcctgcgctacgtgccggccggcgcgcgggtggccgagcgcctgcgggtggaagagggcagccctgtgtgcgagatcaagcgggtgcggctggtcaaccgcgagccggtttcgctggaagtcacctacctgccgcaggcgctcggcgagcgcctggagaaggccgacctggtgacccgcgacatcttcctgatcctcgagaacgattgcggcattcccctcggccatgccgacctggccatcgacgcggtgctcgccgatgccgacctgacccgcgccctggcggtcgaggagggcgcgccgatcatgcgtatcgagcgcctgacccatgccgccgacggcgcgccgctggacttcgaatacctctactaccgcggcgacgctttccagtatcgcctgcgcatcgatcggcagaagggagagcgggcatga

SEQ ID NO: 321505 - DNA, 1452 bp, Pseudomonas aeruginosa
atgatcaggatcgacttttcccagttgcaccaggcccgcgaagatgccgcggcggccatgccgagcatcgccggcaagaagattctcatgggcttctggcacaactggccggccggcgccgccgacggctaccagcagggctcgttcgccaacatcgcgctggaagacgtgccgagcgagtacaacgtggtcgccgtggccttcatgaaagggcgcggcatcccgaccttccagccatacaacctgtccgacgcggagtttcgccgccaggtcggcgtgctcaacgcccagggccgcgcggtgctgatttcgctggggggcgccgacgcgcacatcgagttgcacgccgggcaggagcaggcgctggccgccgagatcgtccgtctggtggaaacctacggtttcgacggcctggacatcgacctcgagcagagcgccatcgacctggccgacaaccagcgggtgctgccggcggccctcaagctggtgcgcgagcactacgccgggcagggcaagcacttcatcgtcagcatggccccggagtttccctatctgcacaagaacggcaagtacgtgccttatctgcaggccctggaaggcgtctacgacttcatcgcgccgcagtactacaaccagggcggcgacggcctgtgggtccaggaggcgaacggcggcaagggcgcctggatcgcgcagaacaacgacgcgatgaaagaagacttcctctactacctcaccgagagcctggccaccggcagccgggacttcgtgcggatcccggcgcagcgcctggccatcggcctgccgagcaacgtcgatgcggcggctaccggctacgtgatcgatcccgccgcggtgagcaacgcgtttcgccgcctggaagccgccggtcacgcgatcaagggcctgatgacctggtcggtgaactgggacgatggcctgaacaagcgcggcgagcgctacaactgggagttccgcaagcgctacgccagcctcatccatgacggcgagggcggcgaccagcgcccggcggcgccgcagggcctgcgtctactggagcgcggcgagaccagcctggtgctggcctggaacgcctccagcgggcagcgtccgatcgattactacagcctctatcgcgacggcgccatggttggccagagcgccgcgctgggttccaccgacagcggcctgacggcggacacccgctacagctatttcgtcaccgccaccgatacccagggcaaccagtcgctgcccagcgaaggcctggaggtcagcaccagcggcggggcggtggatccgcaattcccgcaatggcgggagaaccaggcctatcgggtcgacgatggggtgacctacgaggggctgcgctatctctgcctgcaggcgcacacctccaacagcggctggacgccgccggtagccttcaccctctggcggccgctgcgctga

SEQ ID NO: 321506 - DNA, 543 bp, Pseudomonas aeruginosa
atggttctgcgcgaatacacccaacgccaccggctcgacgccgtcgccccggccgactaccaccgccatctgccggagcaggtcgcgcgcggcctgccttccgccgagctggtggtgttccgcgtcgccgacgagcattccgacaccgcggcgttcagcgcacgctacggctttggcctggaggactgcgccaacaccctggtcctgcgctacaagcgcgacggcgccgaaggctatgccgcggtggtcaacctgggctcgcggcggctcgacgtgaacggcgcggtcaaggcgctgctcggggcccgccggctgtccttcgccgcccgcgaggtcgccaccgagctgaccggcatgcagttcggcggcatcaccgcgttcggcttgcccgaaggcatgccgctgctggtcgacgcggcggtcttcgaacggccgttggtggtgatgggcgccggggtccgcgagaccaagctgctgctgtccccggcactgctgaaagaccttcccggagtggtggtcgccgaactcagcgaagccggttga

SEQ ID NO: 321507 - DNA, 6228 bp, Pseudomonas aeruginosa
atgagtgcgtcagaagacctgcaatccactgtgcaaccggccgcgagcgaagcgctcgaaggattcccgctgtctcccttgcagacccgcgcctggcgccgccatgccgagcggccggaaaatacggttgtcggcgtgcgcctgcacgccccggccgatcccgtggcgacgctggagcggctgcgccgggcgctggacggcgaggcgcaactgcgcgtggcctaccggacgatgccgggcatgagcctgccggtgcaggtactggatgggcgcgcggccgatctgctggtcgagcgcctgccgggagacggcgactgggccggacgcttcgcgcgcgaaagcgcgcgtctcgccgcttcgcccctgggcggggaaggccagccggtactggcgctcggcctgctgctggacgccgccggagagacgctccaggggctgttgctggcggcgccggcgttcgtcgtcgatgcggccagcctggtggcgctgctgcgccgcggcctggggccggccggccaggcgagcgcggacgagggagacgaggcgctgctgttccagcatttctccgagtgggccaacgaggcgctggccggcgaagacggcgaaagcgccagcggttactggcgagagcaggcggccgttgcggcggagagtccgctggcgctggcggacgacctgggcgaaggcgagtggacggcgcggcgcctgctgccgcgcgcgctgctcgaacgcctggccgccaacggcttgccggaggcggccgccctgctggcctggacccaggtcgccgggcagttccagggcgacgagggactcccgctggaaatggcgcgactggtctcggggcgcctgttcaacgagttcgccgagctggccggaccgttcgccggggtcgcgccgctgtgcctggagaatgtccgcgcgggcagcgtcggcgagcggctcgacgccctccaggcggcgatcctcgcccaggaggaggcagcggccctgcgcgatccctttgcccccgactggccgcttgccgagttgggcttcgcctggctggcgggcgaactggatggcgccggggtggccgagctggattgccgtcagccgccgctgggcgggttcctcgagttgcaggtgctgccccacggcgaaggccggctggctagcctgcgggtccgtcgcgaccatgacggaacgctggccgggcgcttgctcgacgcctgggtcgaatgcctggaaagcatcgccgccgacaggcaactgccactggccgggctgccgttgatcggcgcggccgagcgcgagcgctaccaggcctggcagggcgagcgcgtggagcccgcgccggtggaatccctggtggccgcgttcgatctgcgcgccgccctgcagccgcaggcgccggcgttgctggatgcccacggcagcctggatttcgccacgctgcgcgcgcgcagcgaagcggtcgccgaagcgctgctggctgccggcgtgcggcccggccaggcggtggcggtgatgaccgggcgcaaccgcgaggcgatcgtcgccctgctcggggtgatgcgcgcggcggcggtgtacaccccggtcaatccggagtttccggcggcgcgggtggagcggatgcgcgaagcgggcgggatcgtcttcgcccttgccgatgccgagtgcgccgggcgcgcccgcgaggccttcgccggggcctgcctggacctgtcgacgctgccgcttgccggcagcggcatgagcctgccggcgccgggcgggcgcgatgcggcctacatgatcttcacctcgggcaccagcggccagcccaaaggcgtggtggtcgagcacgccagcgcgctcaacctgtcccaggccctggcgcgcacggtatacgcgaacgtggtgggcgagggcctgcgggtgacggtcaacgcgccgttctccttcgattcctcgatcaagcagattctccagttgctctccggccattgcctggtcctggtgccgcaggaggtgcgcagcgatccgcagcggatgctggggttcctcgaagaacggcgcatcgacgtgctcgactgcaccccgtcgctgttccgcctgctgctccaggccggcctcgacgatgcccacccggcgctgcccgggcgcatcctggtagggggcgagcgcttcgacgaagcgtcctgggaggtcgccgccggctggcgccgctgccaggtgttcaatctctacggtcctaccgaagccacggtgaacgccagcctggcgcgggtcgccgagcatgcgcggccgaccatcggccgcgccctggccaacgtcgatctgcatgtggtcgatggcctcggtcgtcgcaagacccgtggcgccagcggcgaactgtggatcggcggcgccggggtggcgcgcggctatgccggcgacgccggcgaggcggccgggcgtttcctcgaggagggctggccgggcagcggccgcctgtaccgcagcggcgacctggtgcgctggcgcgccgacggttgcctggagttcctcgggcggatcgacgaacaggtgaagatcaacggctaccgcatcgaactgggcgagatccgcagcgcgttgctggaacacccggcggtgggcgaggcggcggtactcaccgacgaggccgatgcggccgaaccgggcgcggatcgccggatcgtcgccttcgtcaccgccgccggtgagaccgcggacgagtcctggctggaagtcgacctgcccagcgggcaccgggtcgccggactgaacctcaacgaaaccgagtacgtctaccaggaaatcttcgtcgacgaggtctacagccgcgacggcatcgtcctgccgccggacgcggtagtcctcgacgtcggtgccaacatcggcctgttctcgctgtacatcgccagccgcgcgccgcgcgcgcgagtggtcgccttcgagccgctggcaccgatccgccggcgcctggaggccaacctcggacgctacgcaccgcaggtcgaggtattcggcatcggcctgtccgacgccgagcgcgaagaaaccttcacctactatccgggctactcgaccttctccgggatcgccgagtacgccgacgccagcggcgaacgcgacgtcatccgacgctacctgagcaaccagggcgaggagggcggggccaacctgctgctggacaacatcgacgaaatcctcgacgaccgcctgcgcgccgaagcccaccgctgccgcctgcgccgcctcgaccaggtgatcggcgaactgggcctggagcgtatcgacctgctgaagatcgacgtgcagcgcgcggaaatggatgtgctgctcggtctcgacgatgcggcgctggccaaggtccggcagatcgtcctggaggtccatgacaagcgcgacggtgccaccgccggccgcgccgatgccttgagcgaccttttgcgccgccatggcttcgaggtgagcatccgtcaggacgcgctgctggagggtaccgaccgttacaactgctacgcggtgcgcccgggctatgccgagtcgctggctgagcgcatcgactggcgcgcggtcgcgccgcgccccgccgcggccctcggcggcgagctgagcgagcaggccctgcgtggcttcctcgaggcgcgcctgccggcctacatgctgccgagccggatcgcccgggtcgaacgcctgccgctgaccgccgaaggcaagctcgaccgtcgcgcgctgttggcggcgctggccgccgaggcggccgcgcagaccctggaagcgccggccaatgccaccgaggcggccctgctggatatctggaagagcgtgctgaaacgcccggcgatcggcatcagcgacaatttcttccaggtcggcggcgactccatccgcctgatccagatgcaggtcatggcgcgcgaggcggggcttgcctttaccctgcgcgacgtgttcaaccaccagagcatccgcgaactggcgcgcctgctggccgctccggcgagtccggcggatgcggacgcgagctcggcgccgcgggcgctggagccgttcgccctgttgtcggcggcggaacgcaagcgcctgccggaggggctcgacgacgcctatccgatgaccagcctgcaacagggcatgctcctgcaaagcgaggccagcggcgatccacggctgttgcacaacgtcgtcctgcacgaggtgcatggacgcctggacagcgagttgctggcgcgcgcctgggcgatcctgatcggccgccacgcgatcctgcgtaccggcttcgacctgcacggcggccaggcgcccttgcaatgggtccacccggccacggcggtcgccgccgaggtgccggtgcacgacctgcgtggcctcgatggggaaacacggcgcctgcgcctgcgtgcctggatcgaggaagagcaggccaccccgttcgactggagccgcccaccgctggtgcgcctcgccgcgctggcgctggacgagcggcgcttcgccctgggcgtcgccgaacaccatagcgtgctggacggctggagcctgcaaagcctggtggacgagctgctggcggtctacgccgaccttctcgccggtgtcgtcgcgcgggaagcggaagcgcccgcggtaggcttccgcgactacgtggcgctggagcgtgaggccgaggccaacgccgcctcggcgctgttctggctcgactacctggccggcgcccgctaccggccgttgcccggcctggcggaggagggaccccggcgcatggcggcggtccgcgtggacgtgccggccgacagcctgtcgcgcttgcgcgccctggccgaacgcagcggcttgcccttgcgttcgttgttgctggcggcgcatggccgagcgttgtgccgcttcagcgatgccgatgaagtagtcaccggcttcgtcagccacgggcgccccgaggagccgggagcggaccgcctgctcggcctgttcctgaacaccctgccgtgccggctgtcggcttccgtcgatctgctcgacagcgcccgtcgcgcattcgactacgagcgcgcgagcctggaacatcggcgccatccgctggcggcgattcgcaggcgcaaccgcgagttgcaggtgggcttccagtacgccgccggacgtttccccgccgagcgcgccgaggcgctggccgacgcctaccgcgaggcgttgctggcgctgctcgaggacccggcgcagccgcccacggcggcccaggccgaggacagcgtggagctgcggcgggtgctcaaggtgttgtcccgggtgctcggccggccgctggcggccgaccagggcttcgccagtgccggcgggcattcgctgctgggcgtgcaggcgatcgccgaattgcgccggctgaccggcaggcaactgagcctggggctgttgcagggcgatccggatgcccgcgaagtggtgcgccgctgccatgccgccgacgcgccgccgttgccgcccgccaccgagcgcgcccgggccctgtggttgcagcgcagcgggagcgcgcagccgcgcctgcgcctgatcgcgctgccgcccgcgggcggcaacgccggcactttccgtggttgggacgcgcgcctgccggcggacgtggagctgctggcgatccagtatccggggcgccaggaacgccaggacgagccattcgtcaccgatgtagaggccatgctctgtgccatcgacgacgcgctcctgccattgctcgaccgtccgttcgccctggtcggcgccagcctcggcggcatgctcgcctacgaactggcggcacgcctggaaagcctgcacggcctgcgcgccaggcagttgttcgtgatcagcagccgcgctccggggccggacctggaatacccgcgcttccatgcgatgggcgacgccgagttgctgcgaaccctgcgcgagtacgacgtgctgccgctggaagtgctcgacgacccggagctgcgcgagatcagcctggccaccctgcgcgccgattcgcgcctggccgccgactatcgctaccgcccgcgcgagccgctggccataccgatcaccgcgatcctcggcgagcaggacccgggcgtctccagggcggccatcgacggctggcggcggcacgccagccgctacgagctggagaccctggccggcggccacggcctggtggtgacggcggcggaggaggtctgcgcgatcctgcggcagcgcctggcgcccgatgtgcctggcggcgtgccggcgaacctggcaacctga

SEQ ID NO: 321508 - DNA, 1020 bp, Pseudomonas aeruginosa
atgagcgcctcgttcagcgcgccgcgcctgcgcccccggcagctctcggccggcgacctggtggaggaaagcctgctcgacccggccaacgactacctgcgcatcgtccgcgcgcgccagccgggcatggacctgcggcaatggatcgccgccgccggcgcagggctgcgcgacagcctgctgcggcatggcggcatcctgtttcgtggcttcgcggtagacggagcggagggcttctcccaggcggtacaaagcttttcgccgaacatgctcgactacctggagcgcgcggcggcacgccaggaagtggcgcaccgggtgttcacctccaccgagttctcgccggacggctggattccgccgcaccacgagatgtcctactcgcacaactggccgagctatatccacttctactgccagacgccgcccgccacccagggccgcacgcccctggccgacgagcgccgggtcagcgctcggatacccgaggcgatcaggcagcgcttcctccgccatggggtgtgctacgtgcgcaactacgggccggagatcgacctgacctggcaggaaggcttccagaccgacagtcgcgccgaggtcgaggcctactgccggcagaccggtacccaatggacctggctcgacgaccagcgcctgaatacccgccaggtacgccaggcgatggtgcgccacccgctcagcggcgagacgctgtggttcaaccacgcgcacatgttccatgtctccaacatgccgccgtccctggcccgggccttgctcgacgaggtcggcgaacagggcctgccgcgcaacgcctactacggcgacggcagcccgatcgaggcggaggtgctggacaccatccgcgccgcctaccgcgaggaaacccgcgcgttcgcctgggagcgcggcgatgtcctgatgctcgacaacttcatcagcgtccacggccgcgagccgtacaccggcgagcgcaaggtgctggtggcgatgaccgacctgcatgtccaccaaccctga

SEQ ID NO: 321509 - DNA, 1089 bp, Pseudomonas aeruginosa
atggaacgaacagctcccagtctcaccggtcgcggcttcgcccggccgcgcaatctcagcccgcgcagcagcgaggcgctggtgcggcgcccggcggcggagcgcgacggcctgccgctgctgatcgaggcacaggctcccggcctgtccctggccgactggattcgcgagcagggccagtccctgcacgacgacctgaacctggctggcggcctgttgctgagaggcttcgaggtcgactcggcagagcgcttccgcgcagccgccgctgccttcgccccgcaactgctcgactacaaggagcgttcctcgccgcgtagccaggtcagcggcgaggtctacacctccaccgagcatccggtggaccagccgatcttcctgcataacgagcagtcctataccgccgactggccgctgtacatcatgttccattgccaggtcgcgccgctcgagggcggcgccaccccggtggcggccaaccggctggtgctccgccacctgccggacgaattgctggaacgcttcgggcgcctgggcatcctctacgtgcgcaactaccgcgccggcctcggcctgtcctggcgcgaagcgttccagaccgacagccgcgccgaggtcgaggcgttctgcgctgagcaccggatcgcccatgcctggatcggcgacgagcacctgcgcacctggcagaggcgcgcggcgttccaacgccacccgtataccggcgagcgcctgtggttcaaccacggcatgttcttccatgccaccagtctcgagccgggcctgcgcgatgcgctgctgcgcagcgtcgccgaggaagacctgccgtaccagacctactacggcgatggcagcccgatcgaggcgcagaccctggcgaccatccgcagcgccatagaccgcgagacgcggcgcttcgactggcgcgtgggcgacgtgctgatcctcgacaacatgctcgcccagcacggccgcgagccgttccgcgggccgcgacggatcctcaccatcatgtccacgccgtattccagcctggcgcccgccgatgtcccgccgacaccttcgcgcctggcgctcggaggtgccgcatga

SEQ ID NO: 321510 - DNA, 2916 bp, Pseudomonas aeruginosa
gtgcgcctgcgcgccgccggggtggctccggagcagcgggtcggggtctgcctgcggcgcgacagcggcctgctggtcggcctgcttggcgtgctccgcgccggcggttgctacgtcccgctggacccggcctatccggaggagcgggtggcctacatgctcgacgacgccgactgcctgctggtgctggtcgacgcgagcacccgcgagcgggtcgccgcgctgggccggccatgcctgacgttggaggagggcggcgaccaggcgaacgacctggcgctgcccgcgagcgaggtcggcgccgaccacctcgcctacatcatctatacctccggatccaccggacgccccaagggcgtcgccatcgagcacggcagcgcccatgccttcctgcgctgggccggccagcactatgccgccgaagaatggagcggggtactggcggcgacctcggtgtgcttcgacctgtcggtctacgagctgttcggcaccctggccgaaggcggcacgctgcacctggtggaaaacctgttcagcctgccggactacccgcgccgcgacgagatcagcctgctcaataccgtgccctcggtgtgtgccgcgctgctcgccctcggcgacctgccgggcggggtgcgcacgctgaacctggccggcgaaccgctgcgcggccacctggtgcgacagattcgtggccaaccccaggtacggcgcctggtcaatctctacgggccgaccgaggacaccacctattcgacggtgcacgaactggacctgcacgccgaagcgctcgacgagccgcccatcggccgaccgctgcccggcaccacggtggaggtgctcgacggcttcgaggcgccgctgccgctgggcgtggccggggaactgtacctcggcggcatcggcctggcgcgtggctatttcggcaagccggagcagaccgccgagcgtttccgcgtcgatccgggcagcggcgagcgccgctatcgcaccggcgaccgcgtacgcatgcgcgaggacggcgtgctggaacacctcggccggctcgacgaccaggtcaagttcaacggcttccgcatcgagctgggcgagatcgcctcgtgcctggcgagttttcccggggtgagcgaagcctgcgccatgctcaccgaggacagcgccggcctgcgtcggctggtcggctacctggcggcgccgttcgccccgccgctccaggcgctgaacgagcaccttgggcaaagtctgccgcactacatgttgccgtcggcgttcgtggtcctggcggagctgcccaagacgctcaacggcaagatcgaccgcaaggccctgccgcgtccccaggcgaccggcgccgagccgcaggcgctgcccagcgatccgctggagcaggcgctacaccaggcctggcaggcgcagcttggtgcgccgccgcgcgccggacagggcttctacgccgccggcggcgattccctgcgggcggtgcacctgctcgcgacgctgcgccagcgactgtcccgccgcgtaccgttgcaggcgttcgccggtggcccggcgacccccgaggccctgctggaactgctgcgccaggccgcgcccgagggcgacgagccggagccgagcgccggcgccgccgggctgagcctcgccgaacggcgcctgtgggtggcccagcaactggcgccggaggacacctcctacaacctgctggcccacctgcgcatagtcggcgccacggccgacgccatcgaacaggccttgcgccagttgctggaacggcatgtggcgctgcgccggcgtgtcgaaacgggcgtcgacgggccgcagccgcatgcgctggcggcgcatgcggtgcccctgcaacgcctgctggcgagcgacgccgtccacgccgagcggttgctggaggatggcgtgcgccgtgagggcgcgcgagtcttcgacctcgcccacgaggcgccggcacgcctgctgctggtcgtcacccgcgacagcgcgcgcgccgacctcctgctcagcgtccatcactacgccttcgacgatgtgtcgctggcggtctttgccgcggaactgaagacgctgctcgatggcggtcgcctgggcgtgctcgccagcacgccggaacaggttgccgcccgcgagcgcgcggcgttggcctcgggacgcctggaccgtgtcgccgagcgctgggctgagcgtttgttgccgctggcgaaggctcccggcgccgcgccggcgcgcccggaggagagcggcgggcgcgccggccaacgcctcgccctgccggtttccgccgccgtccatgccgcctgccgggcgctggccgaacgcacctcggtaagcccgttcagtgctgcgctacaggccttcgccgaagtgctcggcgccgaactgggcgtcgacgacctgctcgtcggcgtggccctggccgggcgttcgcgcctggaaatgcaggggctggtcggctgcttcgtcaacctcctgccgctggcggtcggcctgcgtccggagcagtccgtggagtggcgcctgcgccaggtcggccatgatctgctggaactgctcgaacaccaggacgtgcccctcgaatgcgtgacccaggccctgcgccagcgcggcgccagcggcctgccgatccgcatcgcctgcggcgcgcacaacggtcgggcggccccggcggtggatgccggggtgcgcgtcgaagccgacttcatcccggtgcctggcgcgcgcctggacctgacgctgtggctggaagaccagccgcagggttggctggccgtctggaccggggccagcgcgatcttcgacctgcaccgcatcgagcgcctgcaccaggcctgggagcggcgcctgctggcgaatgccggcgaacctatctcgaaacgcatgtcgccggagggctgcaacgcttcctga

SEQ ID NO: 321511 - DNA, 801 bp, Pseudomonas aeruginosa
atgcaggagcgacatggcttaccgttacgcagcttttcgtcgggcaaggcgctgaccgcgggacgcgcagtgcgcccggaggttgcgcaggagcggcgctacctgcaaggcgccccgctggggctggagttgccgggacgaatcgccttgcgcgacccgcattgcgcctggcaatggttcgagccggaggcggccgcggaagcgttcccggcggcgcactggctggcggcgttcctggtactgctgggacgctacggcaacgaagagatcaccctgggctttcccgagccgatcacggttcgcgggcggcaggcgcccgcgctgctgcgttccgcctaccgggcgatggagtcgtccgccgaacgtagcgcgcggctggcggaagaactcgatgacgcccggcggcagctatccgccgacggccaggagcgcgccgccctggccgggcgctgcgcggtccaggtgctggcggcgcggccgacggcgagcagccccggctggctggccctggtgctggcggcggacggcagcgtcggcctggctctgcgcgatccccagtacgacgaattgcggcgtatcgccggccatctcgcgcgcctggcgcgcggcctggtcgacgcccaggcctgcgtcggccggctgccctggctggacgccgacgaagagcgccgtttgcaggccctgcgcagcgagccccaggccgccccgtcgcgcggcgtactccaccatctgttcgaggcccaggcgcggcgcacaccgcagcgcatcgccgtgcacgccgccgaccgtagcctcagctaa

SEQ ID NO: 321512 - DNA, 618 bp, Pseudomonas aeruginosa
atgtcgctctccgtggatctgctgctggcgttctccctgttcgccttcgtcacctccgtcacgcccggtccgaacaacaccatgttgctggcctcgggggtcaacttcggtttcgtccgctccatcccgcacatcctcgggatcagttgcggcttcttcatcatggtgatggcggtgggcttcggcctgggcacggtgttcgaggcctatccggtgctgtacaccatcctgcgctacgtcggcgcggcctacctgctgtacctggcctggaagatcgccacgtccggcccggccggcaacgacccggagggacgtggcaagccgttgagctactggggcgcggcggcgttccagtgggtcaacccgaaggcctgggtgatggcggtcggcgccataagcacctatacgccgttgcagggctacttcaccaacgtggtggtgatctcgacggtatttgccctgatcaacgcgccgaccatcggaatctgggccggtttcggcagcatgctgcgcaacgtgctgcgcgatccgcgctggctgagggtgttcaacgtagggatggcgctgctgttggtcgcgtcgctgtacccgatcctcgcggaaagccattcggcctga

SEQ ID NO: 321513 - DNA, 867 bp, Pseudomonas aeruginosa
atgagtcgagtcacgcgcgttcgcgaagaatacgaagtccagctcgaacccctgctggaggtctccctggagcggcgcctgcccctgagccagcgtctctggcaacagggctggctgcgcaaggggctgatcctggcgctgctggcgctggcctgggagctggcggcgcgggtccagggcaacgacctgctgctgccaggcttcctgcagacggccagggccctcggcgagggcctggccagcggcgaactgccggccaaggcggggatctccctgctggtgctgttcaagggctacctgctggggatcgtcctggccttcgttctgaccagcctggcggtctccacgcagttgggccgcgacctgctcgggaccctcacggcgatgttcaacccgctgccggcgatcgcgctgctgccgctggcgctgctctggttcggcctgggccagaacagcctgatcttcgtgctggtgcattcggtgctctgggcgctggcgctgaacacctatgccggtttcctcggtgtctcggagaccctgcgtatggcagggcgaaactacggcctgcgtggcctgcgcttcgtcctgctgatcctggtgccggcggcgctgccgtcgattctcgccgggctgaagatcggctgggccttcgcctggcgcacgctgatcgccgcggaactggtgttcggcgcgagcagcggcaagggcgggctcggctggtacattttccagaaccgcaacgagctgtacaccgacaaggtattcgccggcctggccgtggtggtgctgatcggcctgctggtggagaacctggtgttcggcagcatcgagcgcctcacggtgaagcgctggggagtgcaacgctag

SEQ ID NO: 321514 - DNA, 849 bp, Pseudomonas aeruginosa
atgaacgccgcctcccgccaaccttccacgctccccgccgacgccctgctggcggtggacggagtcagcctcgaataccgcacccgctcgcgcgtggtgcgggccacccagcgggtcagcttcgaagtcgacccggccgatcgcttcgtcctgctcggcccgtccggttgcggcaagtcgaccctgctcaaggcggtggccggcttcatcacgcccagcgagggcgagatccgccttcagggacaggcggtcagggcgcccggccccgaccgtatcgtggtgttccaggagttcgaccagttgccgccatggaagaccgtacggcagaacgtgctgttccccttgcgggtgtccggccaggtgacgcgcgacgaggccgagcgacgcgccgacgaatgcctcgagaaggtcggcctggcgggcttcgccgaggcctacccgcacacgctgtccgggggcatgaaggcgcgggtggcgatcgcccgggcgctggcgatgcagccgaagatcctgctgatggacgagccgttcgccgcgctggacgcgctgacccggcgaaagatgcaggaagaactgctgcgcctgtgggaagaggtgcgtttcaccctgctgttcgtcacccactccatcgaggaggcgttggtggtgggcaaccgcatcctgctgctctcgccgcacccggggcgggtccgggccgaagtgcacggccacccgttcgggctgcacagccttggcggcgagccgctgcaagccgcggcgcgacgcatccaccgcttgctgttcgacgagggcggcgaaccgacggcggccgcgaccctcgacttcgccgatatccggctggcccattga

SEQ ID NO: 321515 - DNA, 483 bp, Pseudomonas aeruginosa
gtggcgctgccgcatccggacgccaccgccgcgctggtggccggcggcaccgagctgaccgggcatttctccaacccgccgttccaggaccaggcgctggccaacccgaaggtccacgtggtgctcgacagctacgagctgctggggccgaattcgccgaccgtgctgttcgccacggagaagttccgccaggacaacccgaagacctaccgggccttcgtcgaggcgctgaaggaagcggcggccttcgcccagaacgacaaggcggccgccgccgatacctatatccgggtgaccggggcgaagatcgaccgagccgcgctgctgaagatcatcgccaatccgcgggtggagttcagcgtcacgccgaagaacacctatccgctggcggagttcctctaccgggtcggtgcgatccgcaacaagccggcctcctggcaggactatttcttccaagacggcgcgccgttgcaggggagttga

SEQ ID NO: 321516 - DNA, 597 bp, Pseudomonas aeruginosa
atgaaccgcattccccgattcacccgcctggtcgccgcgctcggcctgggcctgagcctcgccaccacgctgctggccagccggccggcgcaggccgagggcgagatccgcatcgccgagcagttcggcatcgtctacctgctgctcaacgtggtccgcgaccagcgcctgatcgaaaagcacggccaggccgagggcctgcaaatcaaggtcgactggacccaactgtccggcggcgcggcggtcaacgatgcgctgctgtccggggcgatcgatatcgccggtgccggcgtcggtccgctgctgaccatctgggaccgtacccgcgggcgccagaacgtcaaggcggtggcttcgctgggcaacttcccctactacctgctgagcaacgacccgcgggtcaggagcatcgccgacttcggcgccggggatcgcatcgccgtgccggcggtggggtttcggtgcagtcgcgcttcctccagtacgccgcggcgaagcagtggggcgacaagcagttcgaccgcctcgacaagtacaccgtggcgctgccgcatccggacgccaccgccgcgctggtggccggcggcaccgagctga

SEQ ID NO: 321517 - DNA, 888 bp, Pseudomonas aeruginosa
atgtccgtttcccttccggcgccagcgcgcgccgacgttcccttgcagatccgtgccctcgatgccgcgttcggcgccgaggtgctcggcctcgacctcgggttgcccctggccgccgaggacttccgccgtatccaccgggcgcacctggaccaccatgtgctggtgttccgcgagcagcgcatcaccccggcgcagcagatcgccttcagccggcgcttcggtgagttgcagatccatgtgctgaagcagttcctgctcccagggcatccggagatcctcatcgtttccaacatcgtcgagaacggccagcccgtcggtctcggcgatgccggcaagttctggcactccgacctttcctataaggagctgccgagcctcggttcgatgctgcatgcccaggagctgccggaggagggcggcgatactctgttcgccgacatgcacaaggcctgggacagcctgccggaagccctgcgcaaggccatcgagggacgcacggcggcgcattcctataccgcccgctacagcgaaccgcgcttcgagggcaactggcggccgaccctgagcgctgcccagctcgccgaggtgcgcgaagtggtccatccgatcgtgcgcacccacccggaaagtgggcgcaaggcgctgttcgtcagcgaaggtttcaccacccgcatcgtcggcctgccggctgacgagagcgcccaactgctcgccgagctgtatgcgcacagcgtgcgccccgagcacatctaccggcatcgctggcaggcgcatgacctggtgttctgggacaaccgctcgctgatccatctcgccggcggttgcccggcacacctgcggcgcaagctctaccgcaccaccatccagggcgacgcgccgttctga

SEQ ID NO: 321518 - DNA, 159 bp, Pseudomonas aeruginosa
atggaccgcaccgacaacgtcatcgatttcgcccgctaccgctcgcgccgccaggcacgccgcctgggcgaaatgatgtgggcggtgtacgcctggcgggccggctacgccgtgccgcaaccgccagccaggcacgacgagcgcagccgccgggcctga

SEQ ID NO: 321519 - DNA, 633 bp, Pseudomonas aeruginosa
atgaacctacccgccagcgatggcgtcgcccacctggaactggccgccggcgtgcataccgaacccgatgatctgattggccagcgcgtcgcccacaacctgctgcgcctgcgcggcaagcgcaatctctcgctggacgctctggcgcggatttccggtgtcagccgggcgatgctggcgcagatcgagtccgggcgcagcgtgccgtcgatcaaggtgctgtgcaagatcgcccagggcctcaaggtgtcggtggcagccttcctcgacgatcgcgccttcgccggcgtcgccgtgctgccggcgcaacagagcaagcgcctggtcagcgccgacggcgccttcaccagccgcgcgctgttccccttcgatgtggcgcgccaggtggagttctacgaactgcgcctgcgcggcctcggccaggaagacgccgaggcccacgcccccggcacccaggagaacctggtggtggcgcagggggtactggaagtgcgggtcaacgaggagcgcttcctgctcgccaccggcgactcgatcctgttctacgccgaccagccgcacagctaccgcaaccccgccgatagcgaagccctggcgtacctggtgatgacctacccggagcgcctggactga

SEQ ID NO: 321520 - DNA, 504 bp, Pseudomonas aeruginosa
atgatgaatgccatgcagatgccgatgaacatgaatgccgccatgccgatgatgcccatgatgggcatgccgatgatgatggcgaccatgcagtgcgaaacgatggacgacggcatgctgtgcaagatgatgccggcgatgggcatggacatgggccagttccgcaacagcgccgagatgatggcgatgatgatgaactgcggcatgcccatgatgatgcagtgcggcaacctggcgatgatgggcatgtcccaggcctgcatggcgatgatgccgacgatgggcatggggatgggcatgccgatgatgggcatggctccgatgaagtgcatgatggagtgctccatgcagggcgacgccatgcactgcaggatgatgccgatgcagggcatggacatggagatgttcaagaactgctgcatgctgatggcgaagatgatggagtgcggcatgccgatgatgatgagttgcaacggcatgccgatgatgtgctgcacctgctga

SEQ ID NO: 321521 - DNA, 1254 bp, Pseudomonas aeruginosa
atgggacgccgcgaagcatttccggagaacgccggggccgctgcgtcggccgtggcgccgcggctgccgctgagtgcgctgctggcgatggcgatgtccggcttcgtcgccattctcagcgaaaccctgccggccggcctgctgccgcaaatcggcgcggggctggcggtcagcgaggcgctggccgggcaactggtcagcgtctacgccttgggttcgctactggccgcgctgccggcggcgagcctgacccagggctggcggcggcgccgggtgctgctgctggcgctgctgatcttcttcgtctgcaacagcctaaccgccgtttcctcggattaccgcctgaccctgctggcgcgcttcggcagcggcgtcgccgccggcctcgcctggggcctgctggccggctacgcgcggcgcctggtgccgccggagcagcaggggcgggcgctggcggtggccatgctcggtgcgccgctggcgctgtcgctcggcgttccgctgggcacctggctgggcggcctgctcggctggcgctgggccttcggcctgttgtcgctgaccgcgctgctgctggtcggctgggtgctgcgcagcgtgccggacttccctggccagccggccgggcggcgcctgcgcctgctcggggtgctgcgcacgccgggcgtgcgtccggtattgctggtgatcgtcgcctgggtgctggcgcacaacatcctctacacctatatcgcgccgttcctcgccaaggtcggcctgggcgcctcggtggacctggccctgctggtattcggcagcgccgcggtggcgggaatctggctggtcggcgtgctggtcgaccggcacctgcggcggatggtcctggccagcctggcgctgttcgccgtggcggcgctggcgctgtgcctgggcgctcgctggagctggctggcgttcgccggcctggccctctgggggctgacgttcggtggcgcggcgacgctgctgcagaccgcctcggcggacgccgccggggagggcgccgacctggcccagtcgatgatcgtggtggcctggaacctggccatcgccggcggcggagcgttgggtggcatggtgttgcagcgctggggcagcgagatgctgccctggaccctgctaccgctgatcggcttggccgccgtgctggtctggggcaatgccgcgcacgctttccgcgtcggcccgcgcgacttccgcagggcatcgtccgagcaccggaaagcggcgcaatag

SEQ ID NO: 321522 - DNA, 1176 bp, Pseudomonas aeruginosa
atgtccagtttcgaacgcgagccaggctgcggcctggcggaaaatgtcgatcaggtgatcgaggcggcattcgccgaccagcgcctggtgggggcggtggtgctggtggcacaccgggggcagtggctctatcgacgggctgccggcctggccgaccgcgaagccggccggataatgggcgaggacagcctgttccgcctggcctcggtgagcaagccgatcgtcagcgtcgcggccctgagcctggtggacgagggccggctggccctcgatgagccgatcgccgactggttgccggcgttccgtccgcgcctggccgacggccgcgaggcgcgcatcacgccgcggcagttgctgagccacagcgccggcctcggctatcgcttcctcgaagccgacgcagacggcccctatgcccgcgccgggatttccgatggcatggacctgccgggtttcgacctggccgagaatctccgtcgcctggcctccgtgcccttgctctacgaacccggccgcgcctggggctattcgctggccaccgacgtgctcggcgcgctggtggagcgggtcgacgggcggccgctggcggaagcgctgcggcagcgggtcgggattccagccggcatgcgcgacagcggcttcctctgcgccgacgcgtgccgactggcggcggtctacgtcagcgaccggccacgcccgcgccgaatggccgggcgggagaccgtggcgccgttcgaggacagcgtcggcattcgcttcgagccgagtcgggctttcgaaccgtctgcctatgcgtccggcggggcggggatgatcggcagcgccggcgacgtgctgcgccttttggaaatccttcgccagggcggcgcgccgttgctgacgcctggcctggtggaggagatgggtcgcgaccaggtacccggcctggaactgccggccaatcccggtttcggcttcggcctgggtttctccgtgctgcgcgacccggctatcgcgcaatcgccggaggctcccggcacctggcgctggggtggcgcctacgggcattcctggttcgtcgaccgggcccgcgaactgtcggtggtggcgcttaccaacaccctgttcgagggaatgtcgggacgcttcgtcaacgacctgcgcgacgccgtctaccgttccgcggagctgcgctga

SEQ ID NO: 321523 - DNA, 894 bp, Pseudomonas aeruginosa
atggacagcctcagcggtttcaccgtcttcgtccgcgtcgccgagacccgcagcatcgtcggcgccgcccggaccctcggcgtcagcgcctcggcggtgggcaagcgggtcgcccgcctggaagagaaactcggcgtgcgcctgttccaccgcagcacccgcagcatcaccctgaccgccgaaggcagcctgttcctcgagcgcagccggcgcatcctggccgagatcgaagccaccgagctggagctgtcgcaaagccgcgagaccccgcgcgggcgcctgcgggtcagcctgccgctggtcagcgggctggtcctgccgacgctcgccgatttcatgcaggcctatccggacatcgagctagacctcgacttcagcgatcgcgtggtggatgtcgtcgacgaaggcttcgacgtggtcctgcgcaccggccagccggtggattcgcggctgtccatgcgcgaactgggtgagttccagctgaagctggtcggctcgccggcctacttcgcccgccacggcacgccgcgctgcccggaagacctgctgcgacacacttgcctgcactaccgcttccccaataccggccgcctcgaggaatggccgctgcgccgcgcggacggcgaagccccgccgcagattccggtgtcgatggtctgcaacaacatcgagacccgcgtctgcttcgccctgcgcgaccagggcatcgcctgcctgccggacttctcgatccgcgaggcgctgcgcgaaggacgcctggtcagcgtcctcgacaccttctgcgagcgccgcgcgcagttcttcctgctctggccgtccggccgccaggtctcgcccaagctgcgcgccttcatcgacttcgtcgcgccacgggtgatcgccatgctgggctga

SEQ ID NO: 321524 - DNA, 1299 bp, Pseudomonas aeruginosa
atgatcaacatcgagacgccgacctactacacggcgaccaagaagtacgaattgtccttcccctccctggaaaccgacctggacgccgacgtggtggtgatcggcggcggcttctccgggatcaacaccgcgcttgagctggccgagcacggcatcaccgacatcgtcgtgctggaggcccgccacctcggcttcggcggtaccgggcgcaacggcgggcagatcatggccggcatcggccacgacctggagaagatccgcaaggacgtcggcgaggacggcctgcgggcgatcttcgagatcagcgacctcggcgccgacatcatcaagggccgtatcgagaagtacgccatcgacgccgacttctgccacggctacggctacatgggcttcaacgcacgccaggcgaagaccctgctggcctgggaaaaggaattccggtcgctcggctcgccccatgagatccgttacctgcacggtgccgaggtgcgtcagatcatcggctcggacgcctacggcagcgccctgctgcacatgggcggcggccatgtgcactcgctcaacctgctgctcggcgaagccaaggcgctggccggcctcggcgcacggatattcgaatacagcccggcgctggaggtgcaatacggcgagcgcatccgcgtgcgcacggccaagggctcggtcaccgcgaacaagctgctctgggcctgcgacagcttcctcaaccggctcgaacccgagctgcaccgcaccaccatcaatacctacgcgttccagatgatgaccgagccgctgccggacgaactgatccagcggatcagcccgatccgcggcgcctacagcgacatccgcccggtcatcgactactaccgggtgaccaacgagaaccgcctgctgttcggcgccgccacacccttcgtcgaacgcatccccggcgacctcaaggcctggaaccgcaagctgatgctgaagatcttcccctacctggagcacgtccgcatcgacctcgcctggggtgggccgatggcttgcagcgccaacctgttcccgcagatcggcagcctctcggggcggcccaacgcgttcttcgtccagggttattccgggttcggcgtgacccccagccacatcgtctgcaaggtcctcgccgaaggcatgagcgaaggctcggcgcgctacgacctgctcagctcggtgcgccgcatcccgatccacggcaaggaccacttccgcccgctgctgctcagcgcaggcaagacctggcaccagctctccggctactggaacggccggcgctga

SEQ ID NO: 321525 - DNA, 366 bp, Pseudomonas aeruginosa
atggccattaccgttatccgccacggcatcaccctcgacgaactggacgcctggggcagcgtcgccgacctcggctcggagatcctcgaaggcgaggtgaaagccttcggcaagatgaccgcaggagcccccaccgacccggtcagcgccgcctacttcggcaccaccgccggcaagttccgcatgacctatccgttcagcgaacaggccacggtggtcagcggcgaggtccgcctcaccgacgagtccaccggccagagcacgctctacaaggccggcgacagctggttcgtcagcaagggcaccccggtgctctgggaggttgccgacggcggcttcgtcaagcactactacgcggtggcttga

SEQ ID NO: 321526 - DNA, 1032 bp, Pseudomonas aeruginosa
atgagcatcaccaagaacgacaagaacacgcgaaccaccggacgtcccaccctcaacgaagtcgcgcgccgcgccggggtcagcccgatcaccgcgtcgcgcgcgttgcgcggcgtcgccagcgtcgccgaagaactggcgcagaaggtccgcgacgccgcccgcgaactcggctacgtggccaaccccgcggcgcgcgcgctggcctcggcgcaaagccacagcgtggcggtgctggtgccgtcgctggccaacctgctgttcatcgagaccctcgaggcgatccacgcggtactgcggccgcagggcctggaagtgctgatcggcaacttccactactcgcgcaacgaggaagaggacctgatccgcaactacctggcctaccagccacgcggcctgctgctgaccggcttcgagcgcaccgagagcgcccggcggatgatcgaggccagcggcattccctgcgtgtacatgatggacctggactccggctccgggctcaattgcgtcggcttctcccagttgcgcgccggcgaggccgccgccgagcacctgctggcacgcggccgcaggcgcctggcctacatcggcgcccagctcgaccagcgcaccctgctgcgcggcgaggggttccgccgcgccttgcaaaaggccggctgctacgacccggggctggaaatccttacgccgcggccgtcctcggtggccctcggcggcgaactcttcgtgcagttgctggccagccagccgcaggtcgacggggtgttcttctgcaacgacgacctggcccagggcgcgctgctggaggccctgcgccgtggggtcaaggtgccggaacagatcgccgtgctcggtttcaacgatctgccgggttcggactgcacggtcccgcgcctgagcagcatccgcaccccgcgcgaagccatcggccggcgcgcggcggagcagttgctggcgctgatcgccggcaaggaggtgcgcgatagcgcgctggacatggggttcgagctgatggcgcgggagagcacctga

SEQ ID NO: 321527 - DNA, 522 bp, Pseudomonas aeruginosa
atgcatccacccctccaagccctggtcatcatgggtgtcgccggttgcggcaagtccagcgtcagccaggccctctgccagcgcagcggcgcccacggcatcgaaggcgacagcttccatcccgccgccaacatccgcaagatgagcgccggcatccccctcaccgacgacgaccgcgccggctggctggacaccctcgccgagcagctgcgccaggcggtggccgccggcaagctgccggtactgacctgttccgccctcaagcgcgcctaccgcgaccggttgcgccgcgcggtgcccggcctcggcatcgtctacctggaactgaccccggcggtcgccgccgagcgcgtcgcccagcgccccggccacttcatgccggcgaccctgatcgacagccagttcgccgccctcgagccgccgctcgacgaacccctgaccctgcgcctggacgccaccctgccggtggaatgcctggcgcaggccgcccacgcctggtggctggagcacgccgccgcctga

SEQ ID NO: 321528 - DNA, 1353 bp, Pseudomonas aeruginosa
atgttcggcatgtcacacgatgcctacctgctcctcgacgccctggtgaccatcatcggcctgatcgtgctgatcacccgcttcaaggtgcatcccttcatcgccctgatcatcgccgccggcttcctcggcctgacctcggggatgccggtggagaagatcgtcaaatccttccaggacggcttcggcggcgtgctcggcttcgtcggcgtgatcctcgccctgggcaccatgctcggcaagctgatggccgattccggcggcgccgaccagatcgcccgcaccctgatccgcgccttcggcaaggagcgggtgcactggtcgatgatgctcgccgcgttcctggtgggcatcccgctgttcttcgagatcggcttcatcctgctgatcccgctggtgttcatcgtcgcccggcgcagcggcgtgtccctgatcaagatcggcatcccgttgctcgccggcctttccgcggtgcacggtctggtgccgccgcatcccggcccgctgctggcgatcggcgtgttcggcgccgacatcggcaagaccatcctctacggcctgatcgtcgccctgcccaccgccgccatcgccggcccgctgttcggcgcgctggtctcgcgctacatacccggcacgccatcggcggaactggtcgagcagatcgcccacgagcccgagacccaggacctgcccagcttcggcgtgaccctggcgaccgtgctgctgccggtgttcctgatgctgctgaagaccttcgccgacgtcgccttccccgatggccacgcgttccgcgcctggatggacatgatcggccatccgatcagcgccctgctcctggccctgctggtggcgctctataccttcggctacgcccgtggcttcgactcgaagaagatcctcaggctgctcgaccagagcctggcaccgaccgccgccatcgtgatgatcatcggcgccggcggcggcttcaagcagatgctggtggccagcggggtcggcgacgtcatcggccatctcgcggtgaacgcgcagatctcgccgatcctgctggcctggctggtggccgcggtgatccgcatcgccaccggctcggccaccgtcgccaccatcaccggggccggcatcgtggtgccggtgatcgacctgattcccggcgtcaaccgcgagttgctggtgctcgccaccggcgccggctcgctgatcctctcccatgtcaacgacgccgggttctggctggtcaagcagtacttcaacatgagcgtcagcgagaccttcaagacctggaccgcgatggagaccatcctctccgtggtcggcctggtcttcatcctgttgctgtcgctggtgctctga

SEQ ID NO: 321529 - DNA, 144 bp, Pseudomonas aeruginosa
atgaccgaaccaatgcaacgccccgaccacgaagcctcgcgctggccgcgcgacttcgatatccgccagcgctatgccgagcagcaggaactgcttgagccacccccggcgcggccccgcgaagagcctaccgccgacgcctga

SEQ ID NO: 321530 - DNA, 1626 bp, Pseudomonas aeruginosa
atgaccgccccgctccacctcgattcgctgtttcccagcctcgacgccattcccgagcagtaccgccccgacgcccccatcgagcagcgcgactacctggtcgacggccaactgcgatattgggacggcccgctggcgccggtacgcagcccggtattcctcgccgaggccgacggcgagcgccaggtgatcctcggcagcaccccgctgctcgacgccgacgccgcgctcgccgcgctcgacgccgcggtgcgggcctacgaccacggccagggcctgtggccgaacctgcgggtggccgagcgcatccagcacgtcgaacgcttcctggcgcggatgcgcgagcaacgcgaggcggtggtcaagctgctgatgtgggaaatcggcaagaacctcaaggactccgagaaagagttcgaccgcacctgcgactacatcgtcgataccatcgaagcgctgaaggaactcgaccgccgctccagccgtttcgaactggaacagggcaccctcggccagatccgccgggttccgctgggcgtggcgctgtgcatggggccgtacaactacccgctgaacgaaaccttcaccaccctgatcccggcgctgatcatgggcaatacggtggtgttcaagccggccaagttcggcgtgctgctgatccgcccgttgctggaagccttccgcgacagcttcccgccaggagtgatcaacgtcatctacgggcgcggccgggaaaccgtgtcggcgctgatggccagcggcaaggtcgacgtgttcgccttcatcggcacccattccggcgccagcgacctgaagaagctgcacccccgcccgcaccgcctgcgcgccgccctcggcctggacgcgaagaacccgggtatcgtcctgccgcaggtcgacctggacaacgcggtgaacgaggcggtcaccggcgcgctgtccttcaacggccagcgctgcaccgcgctgaagatcctgttcgtccacgaaagcgtgctgcgaccgttcctcgacaagttcagcgcgcgcctggccagcctcaagccgggcatgccgtgggaaccgggagtggcgctgacgccgctgccggagccgggcaaggtcgactacctcgaaggcctgctgaacgacgccctggccaagggcgcacgagtggtcaatgcgggcggcggcgagcatcggcaaagtttcttctaccccgctctgctgagtccggtgagcccggacatgcgcctctaccacgaggagcagttcggtccgctggtgccggtggtgccctatcgcgagctggacgaggtgatcgactacgtcctgcgctccgactacggccagcagttgagcctgttcggcaacgacccggcgcagatcggccggctggtcgacgccttcgccaaccaggtcggccggatcaacgtcaacgcccagtgccagcgcggcccggacagctacccgttcaacggccggaagaattcggcggaaggcaccctgtcggtccatgacgcgctgcgggtgttctccatccgcaccctggtggcgacccgcgacaccgaggcgaacaagaccctggtcagcgagatcatccgcaaccgcgcgtcgaacttcctcaccaccgactacatcttctga

SEQ ID NO: 321531 - DNA, 1260 bp, Pseudomonas aeruginosa
atgaacgcccgcgtccatcccgaagccaccgccaccagtctctccgaaggcgccgactacgaactgctcgcccagcgtttccgaccgatcttcgcgcgcatcgccgaaggcgccgtcgagcgcgaacggcaacgcgaactgccccacgaggcgatcgcctggctcaagcaggccggcttcggcgccgtgcgcgtgccgcgcgagcacggcggcgccggcgcctcgctgccgcagttggttcagttgctgatcgaactggccgaggccgactccaacatcacccaggccctgcgcggccacttcgccttcgtcgaggaccgtctcaatgccgagcccggccctggccgcgaccgttggctgcggcgcttcgtcgagggcgacctggtcggctgcgcctggaccgaggtcggttcggtacggctgggcgaagtgctcacccgcgtctcgcgcaaggacgacggtcgctgggtggtgaacggcagtaagtactacagcaccggcagcctcttctccgactggatcgatctgtatgcccagcgcgacgacaccggcgccgatgtgatcgcggcgatccgcaccgaccagcccggcgtgcgccagagcgacgactgggacggcttcggccagcgcaccaccggcagcggcacgtcgctgttcgaggatgccgaggtggaggaagagaacctcatcgacttcgccagccgcttcaagtaccagaccgcgttctaccagttggtcctgctcgcggtgctggccggcaccggccgcgccgccttgcgcgacgtcgccgccgaggtgcgcgggcggacccgtatctacagccacggcaatgccccgcgagtcagccaggatccccaggtgcagcaggtggtcgggcgcatcgccgcgcgcgtctacgccgccgaggcggccaccctgcgcgccgccgaagcggcccagcgcgcctacctggcgcgcttcgtaggcgacccgcaggcggagaaggaggccaatatcgccgccgagatcgaatcggccaaggcccaggcgatcgtcgccgaactggtgttgcaggccaccagcgagctgttcgacgccagcggcgcttccgccgtcggccgcggcaagcagctcgaccgccactggcgcaatgcgcgcaccgccgcctcgcacaatcccctgatctacaagcaacggatcgtcggcgactgggagatcaacggcagcgagccgccctacgtctggcagatcggcagcggtccggccacggcgtcccgctga

SEQ ID NO: 321532 - DNA, 1236 bp, Pseudomonas aeruginosa
atgagcgcactggaaaagaacgccgccgatccctatcggcaaccgctgccacggaccccggcccggcgcatcgccgacgacgccgaggcgatccgcgtcgcccgcgaactggccgggctgttcgccgaggaagcctcgctgcgcgaccgccagcgccggctgccggtggccgaactggaagccttctcgcagagcggcctatggggcatcagcgtaccgcgcgcctacggcggcgccgaggtcggctaccggaccctggccgaagtactgaagaccatcgccgcggtagacccgtccctggcgcagttgccgcagaaccacctggcggtgctcgaccatttgcgcctggacggcagcgaggagcagaaacgcttcttctacggcctggtgctagacggcgtgcgcttcggcaacgccttctccgaacgccacagccgtaccgtcgccgaattccagacacgagtgctggcggatggcgacgggttccgcatcgacggccgcaagttctattcgagcggcgccctgctcgcccactgggtaccggccgtcggcctcgacgccgagcagcgcgcgcacctggcgttcatcccgcgcgacgcgccggggctgacggtgatcgacgactggtccggcttcggccagcgcaccaccgccagcggcaccgtcatcctggacaacgtgcgggtgccggccgagcacgtcatcccggtgcaccgcgccttcgaccgccccaccgccgccggcgccgtatcgcagttcatccaggccgccatcgacgccggcatcgcccgtggcatcctcgccgagaccgtgcagcaggtgcgccgccacgcgcggccatggatagacgccaaccagcagcatgcctgggaagacccctacaccatccagcaggtcggcgacctgcgcatccgcgtgcgcgccgcggaagccgtgctcgacctggcggccgacgccatcgaagcggcgctcgccgcccccgacgaggagagcgtggccgccgcctcgatcgcggtggccgaggccaaggtgctcaccaccgaagccgccctgctcgccgccaaccggctgttcgaactggccggcacgcgctcgaccctggaggaactcaatctcgaccgccactggcgcaacgcccgcacccacaccctgcatgacccggtgcgctggaaataccatgccatcggcaactaccagttgaatggggtgaagccaccgcggcacgcctggctctag

SEQ ID NO: 321533 - DNA, 1410 bp, Pseudomonas aeruginosa
atgccgcgcgaaatccgtctcaacgccttcgaaatgaactgtgtcggccaccagtcgcccggcctctgggcgcatccgcgcgaccgctcctcgcagtacaaggacctggagtactggaccgacctggcgcggttgctcgaacgcggccgtttcgacggactgttcatcgccgacgtgctgggcatctacgatgtgctcgacggcaatggcgacgcggcgatccgccaggccgcccaggtaccggtgaacgacccgctggcgctgatcacgccgatggccgcggtgactcgccacctgggcttcggcctgaccgcctcgctgtccttcgagcatccctatcccttcgcccgccgactctcgaccctggaccacctgaccaagggccggatcggctggaacgtagtgacctcctacctggaaagcggcgcgcgcaacctcggccagcaggcccagctcgaccacgaccgccgctacgactatgccgacgaatacctacaggtgctctacaagctcttcgaaggcagttgggaggacggcgcggtgctccgcgaccgtcgccgaaggatcttcagcgacccgggcaagattcacgagatccgccatgtcggcgagcacttccaggtacccggcatccatctctgcgaaccgtcgccgcagcgcacgccggtgctctaccaggccggcgcgtcgagtcgtggcaagcgcttcgccgccgagcacgccgagtgcgtgttcgtcgccgcgccatcgaagaccgtgctcaagcaggcggtcgccgacatccgccagcgcgtcgccgaggccggccgcgatccgcgcaaggtactggtgttcaacctgcagacggtggtgctgggcgaaaccgacgccaaggccagggccaagttcgacgaataccgcgccttcgtcagctacgaaggggccctggcgctgatctccggctggaccgggatcgacttcggccagtatcggccggaccaggtgctgcggcacatccacaccaatgcgatccaatcggcggtggaagcgttttccagcgccgatccgacgcgcacctggacggtccgcgagctggccgactgggtcggtatcggcggcttcggaccgctgttcgtcggcagcccggcgaccgtcgccgacctgttgcaggagtgggtggaggacaccgacgtggatggcttcaacctggcctatgcgctggcccacgaaaccttcagcgacgtggtcgaattgctggtgccggagttgcagaagcgcggggtgtacaagaccgaatatgcgccgggaaccctgcgcgagaagttgttcggcgacggcccgcggctgccggattcccatccggcggccggctatcgcgacctgcgggccctctgggagaaggaggccgggcgcaacgcgctgccggcctga

SEQ ID NO: 321534 - DNA, 1443 bp, Pseudomonas aeruginosa
atgcccagcaccgtctcgtcgtcgcggctcggcctcgccgggctctgcatcctgctggcggggcaactgttgccgatgatcgatttctccatcgtcaacgtcgccctcgacgccctcgcccattccctcggcgccagcgaaaccgaactggaactgatcgtcgccgtctacggcgtggccttcgccgtgtgcctggcgatgggcggccggcttggcgacaactacggccgtcgccgcctgttcgatctcggcgtcgccctgttcgccgtcgcctcgttgctttgcgggctggccggttcggtctggctgctgttggtggcgcgcgccctgcagggcgtcggcgcggcgctggtcgtgccgcagattctcgccaccctgcatgtcagcctcagcggccacgcgcattcccgcgcgctggccgcctacggcgccatcggcggcctggccttcgtcgtcggccaggtgctcggcggcttcctggtctccgccgacatcggcggcctcggctggcgcagcgtgttcctgatcaacctgccgatctgcctcggcattctcctttgcagccgccgctgggtaccggagacccgcgccgagcatgccgcccgcgtcgacgcgccgggcaccctgctgctcgccgcgctgatcctctgcctgctgctgccgctggctctcggcccatcgcagcactggtcctggccctgcgccctgctgttggcggcggcggtgccgctgctggcctggctgtggcgcaccgagttgcgccaggaacgccgccaggcctggccgttgctgccgccgtcgctgctgcgcctgccgagcatccgcttcggcctgttgctggcgatcctgttcttcgcctgctggagcggcttcatgttcgccctcgccctggccctgcaggccggcgccggtctctcgccggtacaggccggcaatgccttcatcgccctcggcgcctcctacttcgtctcggcgctgctcaccgcccgggtggcggcgcggatcggcccggtacgcctgctgctgctcggctgcgtcatccagatgtgcggcctgctcggcctgatgctgaccctacaacgggtctggccgcagccgggcatcctcaacctggcgccggcgaccctggtgatcggcttcggccaggcgttcatcgtcagcagcttcttccgcatcggcctctcggaggtgccggccgcccaggccggcgccggcagcgccatgctcgccaccgtccagcaggcctccctcggcctcggctcggcgctgctcggcgcggtgttcgcgcacaggctggagcgccatggcgactacctggaagcgacgcagacgaccctggccgtcgagttcgtcctgatgacgctgctgctcggcgccacctgcctcttctacctgcgccgcgtgcgcacggtgccattgcgctgcgactcgccgggcaactga

SEQ ID NO: 321535 - DNA, 864 bp, Pseudomonas aeruginosa
atgcccctcgacgcccctgccagccacgctgcggaaagccccgcgcagccgtcccgcgccgaacagctgggggccttcctgcgccgccggcgggaaagcatcgagccgcagcgggtcggcatttcccgcctcggccgccgacgcacgccgggcctgcgtcgcgaggaggtggcgcagctcgccggggtcggcgtgacctggtacacctggctggagcagggccgcgcggtacgcgcttcggagcaggtgatcggagccatcgcccgggccctgctgtgcaacgagacggaaacccaccacctgttcaacctcgccgggctggccgcgccgacctcggcgcggcgggcggtctgcgagaagccctcggccgccacccaggccatcctcgatgccctcgacccgttgccggccatggtgcagaacgcccgtttcgacatccgcggctacaaccgcgcctattgccggctggtgggcatcgacctggcggagatccccgaggaagaccgcaactgcatctacctggcgctgacccacgagcgctggcgctactgcatggccaaccgcgaggaggcgttgccgcggatggtcggcttcttccgcgcggcaatggtcgagcgcatgggcgatccgctgtgggagcggcagttgcagcgctgcctggaggcttcggcggagttccgcgagatctggcggcgcaacgaggtgatgggtatcgaaaaccagctcaagcgcttccgtcatgcgcgctgcggcgaattcgaactgcagcagaccaactggtggtcggcgccgaagaacggcgatcgcctgctggtcttcgtccccctcgacgaccacgcccgcgactgcctggagcaactgtga

SEQ ID NO: 321536 - DNA, 867 bp, Pseudomonas aeruginosa
atgagcgccaacctggatatcgagctgctgcgtaccttccatgccatcctgcgcttcggccgctttctcgccgcggccagccacctcaaccgcagcccctcggcggtgagcacccacgtccggcgcctggaggaactggccggcggccggctgttcgagcgcgacaaccagtcggtgcggctgaccccgctggggcagcggttccagcgccagactgcagagctgctggagacccacgaccgcgtgctcgccgggttgcgcagacgggaagagccgctgcgggtgcgcttcggcatttccgaggaatacgccggcaagctgctcggccgtctcctgccgcgcctcagcgcggaactgccggcgctggagctggaggtgctcaccgacgccagcggcaggctggccggacgcctgcggcgcggccagctggacctcgccctgctggtgcaagcgcaagacgaccccccgtacgacgggcactcccgcgagatcggcggcacccagccggtgtgggttgccggccacggcctgcggatcgatccgcaacgcccgctgccgctggccctgcacggccagggttgtccctatcggcaggcgctgctggaagccctcggcgcgacgggccggcgctggcgcacggtggtcagcagtccaggcgcggcggcgctggaagcggccatcgaaggcggcctggcgatcggcgtgatcgaccgtgcgcgggtcggcccgacgatgcgcgtgctggggccggcggagggcttcgccgaactgcccgcccaccgcattcgcctggccttcgccccgggagagcggccgccggcgctggagcgcctcggcgaactgatcgccgaggagttccggctctga

SEQ ID NO: 321537 - DNA, 903 bp, Pseudomonas aeruginosa
atgcgcgcgaccacctgcaccccgcgagcgatgcccggggcgacccgcctgctggccgtgcaactgggcatggtactggcctggagttccggcttcgtcggctaccgctatgccatggaacaggcgccggtgttcctcaccagcttctggcgcttcgccgtttgcctggcgctgctgctgcccttcgcctgggccgggctgcgccggttgtcggcgcgccagtggcggcgccaggcgctgatcggggcgttggcctacgcgggctacatcgcgccgatcgccaaggccatcgaactcggcgtctcgccgggcgtggcggcgctgatggccgacctgttgccgctgctggtggccttgctggcgctggtcctgccggggcagcgaacgctgccggggcagtggccggggatcgccctgggcgtcgccggggtgctctgggccgggcatgcggcgctggcgctggggcgggcgccgggctgggcctacggcctgccgctgctgggcatgctggcgctggccctggccaccctgttgcagaagcgctgggacgatgcgccgggatcgctggccgtggtgctgttcgtgcagatcggcgccgcgctgccggcgttcgccggcctggcgctggcggagggtagcctgcggccgccgctgtccggcggattcctgttcgggctcgcctggctggtgctgctgcccaccttcggcggctacggcctgtactggctgggcctgcgccatctttccgcacagggtggcagcgcggcgctgtacctgagcccggcgctgaccctgctatgggcgcactggatgttcgccgagccgctgacacccatgctgctgggtggcctgctgctgtcgctggccggcctcggctggctgtatcgcgccgagcgtcgctag

SEQ ID NO: 321538 - DNA, 1254 bp, Pseudomonas aeruginosa
atgagcgccgactacgacctgctgatcgtcggtgccggccccgccggcctggccgcagcgctggccgccgcgccgagcggcgcgcgcatcgccctggtcgacgacaacccggccgccggcggacagatctggcgcgacggcccgcgtgccagcctgccgccgcgtgcccatcagatgcgccaacgcctggccgggcaggccaatgtcgagcacttcccggcgacccgggtggtcgcctgcggtcccggcaggcgcctgttgctggaagacccgcaacgtggctggcaggtcggctaccgacgcctggtcctctgcaccggcgcccgcgaactgctgctgccttttcccggctggaccctccccggcgtcaccggcgccggcggcctgcaggcgttggccaagggcggcctgccactggccggccagcgcctggtggtggctggctccggcccgctgctgctggccagcgccgccagcgccagccagtgcggggcgcgcctgctgcgcgtcgccgaacaggcgccggcgagaaccctggccgccttcgccgtacgcctcccgcgctggcccggcaagctgtggcaggccgccggcctgttcgcccgtagctaccgcgccgacagctacgtgctcgccgccctcggcgaggagcgcctggaagccgtgcgcctgcgcgaaggcggtcgggtccgcgagatcgcctgcgaacgcctggcctgcggcttcggcctggtgcccaacgtgcaactcggccaggccctcggctatcgcctcgacggcccggcgctcgccgtcgacgaatggcaggccggcagcctgcccgaccactacgccgccggcgaatgcaccggcttcggcggcagcgaactggccctggtggaaggcgccatcgccggccatgccgccgtcgacgagcgcgacgcggcccgccgcctgtggccacgacggcgacgctggcagggcttcgccgacgccctggcgcgacacttcgccctgcgtgccgaactgcgcgaactggcggaggcggataccctggtctgccgttgcgaagacgtccccttggccgcgctggccgggcatgccggctggaccgaggccaagctgcacagccgttgcggcatgggcgcctgccaggggcggatatgcggcagcgccgcgcaattcctgttcggctggacgcctccggcgccgcgtccgccgttcagcccggcgcgcctggagaccctggcccgctggcagagcgacgccggctag

SEQ ID NO: 321539 - DNA, 237 bp, Pseudomonas aeruginosa
atgatcgaactgttcatcgaccggcgtccgctgcgggtcgccgtcggtaccagcgtggcggccgccctcgccctcggcggcgacggctgctcccgcagcgcggtcggcggcgggcggcgcgcgccgttctgcggcatgggcgcgtgccaggaatgccgggtattgatcgacggtcggcgacgcctggcctgccagaccgtctgccaatccggcatgcgcgtggagacccaggcatga

SEQ ID NO: 321540 - DNA, 1065 bp, Pseudomonas aeruginosa
gtgaacgccgaggtcatcgtggtcggcgccggcatcgtcggcagcgcctgcgcccatgaactggcgcgtcgcggcctcgacgtactggtgctggacagccgccgcggcggtgccaccgcggtgggcatggggcacctggtggcgatggacgacaacccggccgaactggccctcagcgactactcgatccaggcctggcgcacctgggcggcggatctgccggaagactgcgcgtaccgcaattgcggcaccctctggctggccgccgacgccgccgaactcgccgaagccgagcgcaagcgccaggccctgctggccgccggcgtcgcctgcgagatgctcgacgccgcgcgcctgcgtgacttggaaccggtcttgcggccaggcctcgccggcgccctgaaggtgccgggcgacggcatcctctacgcgcccaacgcggcgcgctggctgctcgaacgagccggcccgcgcctgcgtcgattgcacgccgaagtcagcgaagtggacggcagccgcctgcgcctggccgacggccgctggctgagcgccgaggcgctggtgctggccaacggcatccatgccggcgagctgtgcgcggagctgccgatccgcccgaagaaaggccacctgctgatcaccgaccgctatcccggcaccctccgccatcaactggtggaactcggctatgtcagcagcgcccacgccagcagcggtacctcggtagccttcaacgcccagccgcgccccaccgggcaggtcttcctcggctcctcgcggcagttcgacacgctcgacccgcaggtggaaggcccggtgctggcgcgcatgctgcggcgtgccctggactacctgccggggctcgccggcctcaatgcgatccgtgcctggaccggcttccgcgctgccactccggctcgtggccgaccgccagccacaggcccggctgcgccgggcagcgcgcgcctgctcgccgcccagttgttcggcgaaacgccgccgctggatgccacgccttatctgccgcaacgcttcctctccagctccaggagtgcccgtccatga

SEQ ID NO: 321541 - DNA, 945 bp, Pseudomonas aeruginosa
atgcaacgcatccgcatcatcgattcgcataccggcggcgagcccacccgcctggtcatcggcggttttcccgatctcggccagggcgacatggccgagcgccggcgcctgctcggcgagcgccatgacgcctggcgcgccgcctgcatcctcgaaccgcgcggcagcgacgtactggtcggcgccctgctctgcgcaccggtcgatcccgaagcctgtgctggagtgatcttcttcaacaacagtggctacctcggcatgtgcggccacggcaccatcggcctggtcgcctcgctggcacacctcgggcggatcggtcccggcgtgcaccgcatcgagacgccggtcggcgaggtcgaggcgaccctccacgaggacggctcggtcagcgtgcgcaacgtgccggcctaccgctaccgtcgccaggtcagcgtcgaagtgcccggcatcggccgggtcagcggcgacatcgcctggggcggcaactggttcttcctggtcgccggacacggccagcgcatcgccggcgacaacctcgacgccctcaccgcctacaccgtcgccgtccagcaggcgctggaagaccagggcatccgcggcgaggacggcggcgccatcgatcacatcgaactgttcgccgacgatccccacgccgacagccgcaacttcgtgctctgtcccggcaaggcctacgaccgctcgccctgcggcaccggcaccagcgccaagctggcctgcctggccgccgacggcaagctgctgcccggccagccctggcgccaggcgagcgtgatcggcagccagttcgaggggcgttacgaatggctcgacggccagcccggcgggcgtatcgtgccgaccatccgcggccgcgcccacgtcagcgcggaagccaccctgctgctggcggacgacgatccgttcgcctggggcatccgccggtga

SEQ ID NO: 321542 - DNA, 669 bp, Pseudomonas aeruginosa
atgctcaacgcccccaacctgggcatcgccccttcggcctccgagatcatcgccaagcacctgcgcgaagcgatcatcgccgggcatttcgccgaggacgaaccgatccgccaggacgacatcgcgcaactcttcaatgtcagcaagattcccgtccgcgaggccctcaagcgcctggaggcggaaggcctggtgctgttccagcgcaacaagggcgcggtggtgacgcgtatttccgaaccggaactggcgcagatgttcgaagtgcgggtgctgctcgaggcgcaggcgatccgcctggcggtgccgaacatggacgagaccaccttcgcccgtgccgaggcgatctgcgccgacttcgtcggcgaagacaacgtcggccgctgggccgaactcaactggcaactgcacgcctgcctctacgaaccggcgcagcggccgttcctggtcaacctgatccgctccatccacgacaagctggaacgctacctgcgcatgcagatgagcctgtccgaaggcaagcagcgcgccgaccaggaacaccgcgagatcgtcgccgcctgtcgcgccggcgatgccgaacgggccgcggcactgatcgaggcacatatcgtcggggtctgccggaccctctacgaacacctgccgaaccgcccggccagcacctga

SEQ ID NO: 321543 - DNA, 2061 bp, Pseudomonas aeruginosa
atgtatttcggggcgtccgcgatggccaagccttccttcttttcctccgacctggtgcaggtgctgctgtgcccgcgtctgcacgaactgcagttcgccgtgaaggccctgctggccggcgggttggctctgtacctggccttcggcctggagctggagcagccgcaatgggcattgatgacggtgttcgtggtcagccagccctatagcggcatggtcctggccaagggcatgttccgcctgatcggcacctgcgccggtgcgctggtgtccatcggcatggtcgcgctctatggccaggcatcgctgcccttcctcctgctgatggccctctggctggcgttctgcaccgccggcgcgtcgctgctgcacaatcatgcgtcctacggtttcgtcctggccggctacaccgcggccatcgtcgccctgccggccagcgccgatccggcgacggtgttcgaccaggcggtggcccgctgctcggagatcggcctgggcatcctctgcgcggcgctggtgaatgtgctgctctggccgcggcgcctggaacgccagttggcgaaccagggcaaggcggcctgggaggccggcttgcaggcggccgcggcggaactgcgcggcgccgacgaacgcggcgagctgctcgcggcgctggggcggatcgccgcggcggacgcccagcgcgaccacgcctggttcgagggcgcgctcggccgcgcccgttcccaggccttgcgcgtgctaggcctcgacctgctcggcctgctgcgcgcggcgcgcaaggtggctcgcgagcggaggctgctcgatccggccagcgcgcacgccttgcagccctggctggaagaactcgaggcactgttgcgcgagggccgccaggccgagttcgaggcctgccggcagcgcttgcgcctggcgctggacgcggcgcacggacagttgcacctgtgcctggtctgcctcgaacgcctgctcggcgaggcgagggcggccgggcgcagcgtcgaggcgctggtctatggcgcgcccacccgccaggcgccgggcgccatcgcctggcaccgggacattgagcgcggcgtgctgttcggcctgcgcagcgccctggcgttcctctgcgtggccgcgttctggctggccagcgcctggccgagcgggttgggcgcggtgtcgatcaccggcgtggtgctgagtctcttcgccagccgcgacaacccggcccaggccggcctgaacttccttcgcgggattctcctgtcgatcccgctggccggcttcgtcgcactgttctacctgcccggcgtggacggcttcccgctgctctgcctgggcctgggcgtaccgctgttcttcgccgcgctgtgcgtgaaccgggcgagcctggccgggatcgcctcgccgttctgcatcttcttcgtgaagaacgtcgcgccgagcaacagcatgagctacgacctcgcgcacttcctcaacaacgccctgtcgacggtgctcggggtggccttcgccgtgctggtgttcaacctggtcagcctgcggccgggcgaacgccattaccggcgcatgctgcaggccaccctcggcgacctggcgcggctcaccctgcgctcgccggcgcaggccgaggcctggttcggcgggcgcactgcggatcgcctgatccgcctggcgcagcgctacgaccgtttgccggaggggcgccgccagccctggtcggacggcctgatgggactcgacttcggcgacgagctgctctacctgcggcagtgcctggaggaggtcccggcgtccctggcgcaggcccgcgaccgctacctgcggcgcctgcgcctggcgctgctgggcgatggcccgcgggccgagcgtgaacacgccctcgacccgccgaccgcgcgcctgctcaaggccctggccgccagcccgctggccggcagcgaacgcggcgagctggccggcgccgcgctggtgcagttgcaggccacctggcggcagtggtgccgcagccatgctccggctgggatggcgctgcgcgcggacccgctccccggagccgggcgctag

SEQ ID NO: 321544 - DNA, 1851 bp, Pseudomonas aeruginosa
atgaacagagttttcctgaccccggcagccgtggcgctgtgcggcgcgtcttccctgagcctggccgaaccggtcagccttgccgaccaggtggtgaccgccacccgtaccgcccagaccgcttcccagagcctggcggcggtgagcgtcatcgaccgcgaggatatcgagcgcagccaggcgcgcagtgtgccggagctgttgcgccaggtacccggcgtgtcgctggcgaacaacggcggtttcggcaagaacaccacgctgttcctgcgcggcaccgagtccgaccatgtgctggtgctgatcgacggcatcaaggtcggctcggccagcgccggcctcaccgcgttccaggatttgccggtggagctgatcgagcgcatcgaggtggtctgcgggccgcgttccagcctgtacggctcggaggccatcggcggggtgatccagatcttcacccggcgcggcgacggccagggcgccaagccgttcttctccgccggttacggcacccatcagaccctggagggcagcgccggggtcagcggcggcgctggcaacggctggtacagcctcggggtgagcagtttcgatacggcggggatcaacaccaagcgcgccggtactgcgggctatgagccagaccgagacggctaccgcaacctgtccggcaacctgcgcggcggctatcgcttcgacaatggcctggaactcgacggcaccctgctcagggccaagtcgcacaacgactatgaccaggtcttcggcaactccggtttcaatgccaacgccgacggcgagcagaacctggtcggcggccgtgcccgcttcactccgttcgatccctggctggtgaccctccaggccgggcgcagcgaggacaaggccgatgcctatcaggatggccgtttctactcgcgcttcgatacccgtcgcgacagcctgtcctggcagaacgacctgaccctggccgaaggccatgtgctgaccctcggctacgactggcagaaggacgagatcagcagcagcgaagccttcagcgtcgactcgcggctgaacaaaggctggttcgcccagtacctcggccggtacggtcgccaggattggcaactgagcctgcgacgcgacgacaaccagcagttcggcgtgcacgataccggcagcgccgcctggggctacgcgctgagcgacgcgctgcgcttcaccgtcagctacggcacggcgttcaaggcgccgaccttcaacgaactctactaccccgactacggcaatcccaacctggacgccgagacttcgcgcagcctggaagtcgggctgagcggtacgcatggctgggggcactgggcggtgaatgccttccgtaccaacgtcgacgacctgatcggcaacgatccgcgtccggcgccggggcgcccctgggggcagccgaacaacatcgacgaagcgcgcatccgtggcgtcgaactggtcctcggcagccagtggctgggctgggactggaacgccaacgcaaccttcctcgacccgcaaaaccgttccggcggcgtcaacgacggcaacgagctgccgcgccgggcgcggcggatgttcaacctggaactggaccggcgcttcgagcgtctttcgctgggcgccagcgtgcacgccgaaggccgacgctatgatgacccggccaacaaggtgcgcctgggcggctacgccaccctcgacctgcgcagcgagtaccggctgaacgacgaatggcgcctgcagggccggatcgccaacctgttcggtgccgactacgaaaccgcgtatggctacaaccagcctggccaggcggtctacctcagcgtgcgctaccaggccctgtga

SEQ ID NO: 321545 - DNA, 612 bp, Pseudomonas aeruginosa
atgaacgaatcccccgagaaggaccagcgccaccgcgagcggatggagcgcaagaaggccgtggtcgacgagaagatcgcccaggcccgcgacgaacgcggcgtgctcctggtgcatagcggcaacggcaagggcaagagcagctcggccttcggcatggtcgcgcgggccctgggccatggcatgaaggtcggtgtcgtgcagttcatcaagggcgccgccagcaccggcgaggaagccttcttccggcgcttccccgaggaagtcagctaccacgtgatgggcgagggcttcacctgggagacccaggaccgccagcgcgacatcgccaaggccgaggcagcctggaaggtcgccgcgcaattgctggccgacccggacgttggcctggtggtgctggacgaactgaacatcgccctcaagcacggctacctggaactggacagggtcctcgccgacatccaggcgcgcccagccatgcagcatgtggtggtgaccggccgcggcgcgcagccggggatggtcgaggccgccgacacggtgaccgagatgagtctggtcaagcacgcgttcaaggccgggatcaaggcgcagaaaggagtggaattctga

SEQ ID NO: 321546 - DNA, 1308 bp, Pseudomonas aeruginosa
atgacccaggcacgctgtccggccctgctgatcgccgccccggcctccggccagggcaagaccaccgtcaccgccgccctggcccgcctgcatgcgcgccaggggcggcgggtgcgggtgttcaagtgcgggccggacttcctcgacccgatgatcctcgcccgcgcctccggcgcgccggtctaccagctcgacctgtggatggtcggcgaggccgaagcgcgacgcctgctggcgcgggccgccggcgaggccgacctgatcctcatcgaaggggtgatgggcctgttcgatggcaacccctcggcggcagacctggcgcggcgtttcggcgtgccggtgctgggggtgatcaacggcgcggcgatggcccagaccttcggcgcgctagcctacggcctggcgcatttccagccggacctgccgttttccggagtgctcggcaaccgcgtcggcagccagcgccacagcgacatcctgcgcgattgcctgccgcccggcatgcgctggttcggcggcctgccgcgctcggccgagttcgaactgccgagccgccacctgggcctggtccaggccgaggaactggccgatctcgatgtgcgcctggacgccgccgccgatgccttgcgggccagcgccgagaccgacctgccggagccggtgaccttcgaggtgcccgctccggcgccgctgcaacgcagcctggaaggcgtgcgcatcggcgtggctcgcgatgcctcgttcgccttcctctaccaggccaatctcgacctgctgcgcgaactcggcgccgaactggcgttcttctcgccgctgcaggaccaggcgttgcccgccgtggacagcctgtacctgccgggcggctaccccgaactgcacctggggcgcctgcagggcaatcgcgccatggccgaggcgatccgagcccaccatgccgccggcaagccgctgctggccgagtgcggcggcatgctctacctgctcgactgcctggaagacgccgacggcgagcgcggcgaactgctcggcctgctgccgggccgggcgcgcctgcagaagcgcctgaccgccctggccttgcaggaggtcgagctgccggaagggcggctgcgcgggcataccttccatcactcgaccctcgactgcgccgtcgagcctctggcccgtggcgtctgcccgaacggccggaacacggcggaggcggtgttccgtcttggccggctgacggcttcctatatccatttctacctgccttccaacccgcaggccgccgctgcgttgctggcgcccgcgcgagacgccgactga

SEQ ID NO: 321547 - DNA, 657 bp, Pseudomonas aeruginosa
atgtccgattcttcccacgccttcagcgccacggagcgcgccgccgtctaccgggccatcgccgagcgccgcgatatgcgccacttcagcggcggcagcgtggcgccggagctgctcgcgcggctgctggaggccgcacaccaggcgcccagcgttggcctgatgcaaccctggcgcttcatccgtatcaccgagccggcgttgcggcgggccatccacgggctggtcgaggaggaacgcggacgcaccgccgaagccctcggcgagcgctccgacgagttcatgcggctcaaggtcgagggcgtgctggattgcgccgaactgctggtcgccgccctgatggacgaccgcgaacgccatgtgttcggtcgccggaccctgccgcagatggacctggcgtcgctcgcctgcgcgatccagaacctctggctggccagtcgcgccgagggcctggggatgggctgggtatcgttgttcgatccggccgcgctgggcgagttgctcggcctgccgcccggcagcgaggcggtggcggtgctctgcctgggcccggtggcggagttctacccggcgccgatgctggcgctggagggttggagcgaaccgcgtccgctggccgagctggtctaccagaaccgttggggcgagcgagcatga

SEQ ID NO: 321548 - DNA, 939 bp, Pseudomonas aeruginosa
atgagcgcactgctgggtatcctcggcgtggcgctggatgcgcgcttcggcgagccgcagggctggcacccgctggtcgccttcggccgcctggccgatcgcctggagcgccgtttcaaccgctcgcgcctggccggcgagggcgatcccggggtcggctggcgcagccacggggtgaccgcctgggtcctcgcggtactgccgctgaccctgctggcctgggcgctcgctgaacttccctacctcggctggctggtccaggccctggcgctgtacgccgcgctcggcctgcgcagcctcggcgagcacgccgaaccggtggcgctggccttgcgcgccggcgacctggacgaggcgcggcgacgtgtcggctacctggtcagccgcgatacccgcgaactggaccaggccggggtcgcccgcgcggccaccgaatcggtactggagaacggcagcgacgcggtttacgccgccctgttctggttcgccgtggccggcgcgccgggggtggtgctgtatcgcctgagcaataccctggacgcgatttggggctaccgcaacgcgcgcttcgagcgcttcggctgggccgcggcgaagatcgacgacatcctcaactacctgccggcgcggctggtggcgctgacctacgcgctgctcggcgacacccgccaggccctgcgctgctggcgcgagcaggcgccgcaatgggacagtcccaacgccggcccggtgatggccgccggcgccggtgcgctgggggtttccctgggcggcgcggcgatctaccacggcgagctgcaccagcggccgctcctcggcagcggcccgcagccgcagggccgcgacatctatcgggccctggcgctggtgcgccagggcgtgctgctctggctgctggtgctggccggactctgggccatggggtggctgcatgcttga

SEQ ID NO: 321549 - DNA, 996 bp, Pseudomonas aeruginosa
atgcttgaacacggagggcggttgcgcgaggcggcgcgccgctacgacattccgctggcggactggctggacctgtccaccggcatcgcgccctggccgtttccgctgccggcgatccccgagcaggcctggacccgcctgccggagagcgacgacggcctggaagccgccgcctgcctctactacggcgccgaacgggtattgccgctggccggcagccaggcggcgatccaggccctgccaaggttgcggcggggcgggcgggtcggcgtcctgtcgccgtgctacgccgagcacgcccacgcctggcgccaggccgggcacctggtgcgggagatcggcgaggccgaggtcgagccctatctcgacagcctcgacgtgctgctggtggtcaacccgaacaaccccaccgggcgggtcttcgagcccgccgagctgctggcctggcatgcccgcctgcaacgtcgcggcggctggctgctggtcgacgaggcgttcatggactgcaccccgcagtcgagcctggcggcctgcagcaaccggcccggattgatcgtgctgcgctcgttcggcaagttcttcggcctggccggcgcgcggctcggcttcgccctcggcgaacggccgctgttgcaggcgctggccgagcagctcggcccgtggacggtcaatggcccggtgcgccatgtggcccagagtgccttgcgcgaccgccagcaacagcgccagcagcgcgagcgcctgctggccgccagccagcgcctggaggaactgctgcgccgccacggctggccgccggcgggcggcagcgcgctgttccagcgcctggtcgatccacgctgcgcggcgttgcacgactacctggcgcggcgcggcatcctcacccgccaattcgagcagccggccagcctgcgcctcggcctgcccgccgacgaggccgcctgggcccggctcgatgccgcgctgctcggcttcaaggagcctgctcatgagtga

SEQ ID NO: 321550 - DNA, 1473 bp, Pseudomonas aeruginosa
atgagtgatcgcgggcggaccctgatggtccagggcaccacctcggacgccggcaagagcaccctggtgaccgcgctgtgccgctggctggcccggcgcggcgtcgcggtggtgccgttcaagccgcagaacatggcgctgaacagcgcggtcaccgccgacggcggcgagatcggccgcgcccaggcggtccaggcccaggcctgccggctgacgccgcacaccgacatgaacccggtgctgctcaagccgaacaccgacatcggcgcccaggtgatcatccatggccgcgcggtgaccagcatggacgccgccgcctaccacgactacaagcgcgtggcgatggaagcggtgctggcttcccatgggcggctcgccgccgcctaccgggtggtgatggtggagggcgccggctcgccggcggagatcaacctgcgcgccaacgacatcgccaacatgggcttcgccgaagcggtggattgcccggtgatcctggtcgccgatatcgaccgcggcggggtcttcgcccacctggtcggcaccctggaactgctctccgactcggagcgggagcgggtcaagggcttcgtcatcaatcgcttccgcggcgacatcgccctgctgcaacccggcctcgactggctggaggcgcgcaccggcaagccggtgctcggcgtgctgccctatgtcagcgacctgcacctggaggcggaggacgccatcgacacgcgccaggcggccaaggtcgggccgcgcctgaaggtggtggtgccggtgctgccgaggatcagcaaccacaccgatttcgatccgctgcgcctgcacccccaggtcgagttgagcttcgtcggccccggcgaggcgctgccgtcggcggacctgatcgtcctgcccggctcgaagagcgtgcgcgccgacctcgcggcgctgcgcgagcgtggctgggacgaggcgatcctccgtcacctgcgctacggcggtcgcctgctggggatctgcggcggcctgcagatgctcggcgagcgcctgcacgatccgctcggcctggaaggcgcggccggcagcagcgctggcctcggcctgctggcgttggacacgaccctggaggcggacaagcaattgcgcaacgtacagggccgcctgagcctggaggatgcgccgctgtcgggctacgagatccatgccggagtcacccgtggcgaagccctggcgcggccggcggtggtgctcgacgatggccgcgcggatggtgcccgcagcgtcgacgggaacgtcatgggcacctacctgcacggcctgttcgaatccaccgcggcctgttcggcgctgctgcgctgggccggcctgcgcgaggtccaggcggtggactaccaggccttgcgcgaacgcgacatcgagcggctcgccgacctggtcgagcgccacctggataccgggcgattgctcgccctctgcggagaaccccatgcgtga

SEQ ID NO: 321551 - DNA, 522 bp, Pseudomonas aeruginosa
atgcgtgacctgatccttggcggcgcccgttccggcaagagccgcctggccgagcgcctggccgccgagagcgggctggcggtgagctacatcgccaccgcccaggccggcgacggcgaaatgggccggcgcatcgccgagcaccgcgcgcgccgcccggcccactggcgaaccctggaagagcccctggcgctggcggcgacgctgcgcagcgaggccgaggccggacgctgcctgctggtcgactgcctgaccctgtggctgaccaacctgctgctctgcgacgatccccagcgtctcgacggcgagcgcgaggcgctgctggaatgtctcggcgagctgccgggacggatcatcctggtcagcaacgaaaccgggctcggcgtggtgccgctgggcgaactcagccggcgctacgtcgacgaggccggctggctgcaccaggccatcgccgaacgctgcgaacgggtgaccttcaccgtcgccggcctgcccatgccgttgaaaggagaaccgctatga

SEQ ID NO: 321552 - DNA, 1056 bp, Pseudomonas aeruginosa
atgagtctgcaatggtggcgcgacacctgccgcgaggcggacccgcagatgcgccggcgcgcggccgaacgccaggaccggttgaccaagccgcgcggctcgctgggccgcctggagcaggtggcgatcgacctggcggcgttgcaggggcgcgaacgaccgagcctggagaggctctgggtgacggtcttcgccggcgaccacggggtagtcgccgagggcatctcggcctatccgcaggcggtcaccggcgagatgctgcgcaacttcgtccgcggcggcgcggcgatcagcgtgctggcgcgcgaactcggcgccggcctggaggtggtcgacctgggcaccgccgtccccctggaagccttgcccggcgtgcgccacctgcgcctggcggcgggcaccgcgaacttcgtcgaggccccggcgatgggcgccgaacagtgcctgctggcgctcgaggccgggcgcgaaagcgtgcgccgcgccgagcaggccggcagccagctgttcatcggcggcgagatgggcatcggcaataccaccgcggcggcggccatggcctgcgcgctgctggatgcgccggcgagcgcgctggtcgggccgggaaccgggctggacgccagcggcgtggcgcacaagaccgcggtgatcgagcgcgccctggccctgcacggcgcccatcgcgccgaccccttcgaaaccctccgccgtctcggtgggctggagatcgccgcgctggccggcgcctacctggcctgcgcgcagaaaggcatggtcgccctggtcgacggctacatctgcagcgtcgcggcgctctgcgcggtgcgcctgaacccggcctgccgcgactggctgctgttcgcccacagcggcgccgagccgggccatcgccatgtgctcgaagccctggcggcgcaaccgctgctcgacctcggcctgcgcctgggcgagggcagcggcgcggcgctggcggtgccgctgctgcgccaggcctgcgcgctgcacgcggggatggcgaccttcgccgaagcggcggtctcggaccgcccggcatga

SEQ ID NO: 321553 - DNA, 585 bp, Pseudomonas aeruginosa
atgagcctgcgcctggacctcctgcggcatggcgaaaccgagtccggcggcggtttccgcggcagcctcgacgacgccttgaccgcgcgtggctgggcgcagatgcgcacggcggtggaaggcggacgctgggacctgctggtcagctcgccattgcaacgttgccgcgccttcgccgaggaactggcgcagcgccaggggatcgagctggaactggaaaacgatctgcgcgaactgcatttcggcgcttgggaggggcgctcggcggccgccctgatggacggccacagcgaggcgctcggccgcttctgggccgatccctacgcctttaccccgccgggcggcgagccgctgtccgagttcgaggcgcgggtgctggccgcccagcgacgcctgcgccagcgtcatgccggccgtcgtgtgctgctggtgacccatggcggcgtcatccgtctgttgctcgctcgcgcccgtggcctgccgcgcgagcacttgctgcaggtggacgtcggtcatggcgcactgttcggcctgcgcgccggagagggcgatgatcgctggcacgaatgccgggaaggggaatag

SEQ ID NO: 321554 - DNA, 738 bp, Pseudomonas aeruginosa
atgcgcgaagccttgcgctcactgctggtcgccttgcagttcctcacccgcctgccggtgcgcctgtcggcgatgccgacgccggaacagttcggccgcgcggtgctctgctatccactggtcggggtgctgatcggcgtcgtgctgtacgccgcggcgcggtcgctcgacggtacgccgccgctgttgcaggcagccttgctgctgagcctgtgggtggcgctgagcggcgcgctgcacctggacggcctggccgacatggcggacgcctgggtcggcgggctgggcgaccgcgagcggaccctggcgatcatgaaggacccgcgcagcggcccggtggcggtggttgtcctggtactggtcctgttgttgaagttctccgccctggcggcgctgctcggccagggcgaggccgggttgttgccgctggccccgtggctggcgcgcagcagcctgccgctgctgttcctgaccacgccctacgcgcgccccggcggcctcggccaggccatcgccgagcacctgccggcgcgcagcctgccgtgggtgctgggggtgagtttcggcctggccctggcgttcggcctggccggcctgctggcgttgctggtgacgctgatgctcttcgcctggctgcgcagccgtttcctcgcgcgcctcggcggcaccaccggggacaccgccggcgcgctggtcgaacttaccgagtgtgcggtgctggtggcgctggctctgtag

SEQ ID NO: 321555 - DNA, 1506 bp, Pseudomonas aeruginosa
atgttccggcagaaccgctggctggtcctggccatcgtctccagcgccctgttcctcatcatcatcgacatgaccgtgctctacacggccctgccgcgcctgacccacgacctcggcgcgacggccgcggagaaactctggatcgtcaacgcctatccgctggtggtcgccggcctgctgcccggcgccggcttgctcagcgaccgccttggccacaagcggctgttcctcgccggcctgccgctgttcggcctggcctcgctgtgcgccgccttcgcccccagcgccgcggcgctgatcgccgcccgcgccgggttggcggtgggcgcggcactgatgatgccggcgaccctgtcgatcgtccgccatgtcttccaggacgaacgcgaacgcgccctggccatcggcatctgggcctccgtcgcctctgccggcgcggcgctggggccggtggtcggcggcgtgctgctggagttcttctggtggggctcggtgttcctcatcaacgtcccggtggtggtcgtcgctttgttgctggcgctgccggccatcccggcctgcggcggccaatcgcggcgcccatgggacgccctcggctcgctgcaggtgatgttcggcctggtcggggtggtgtatgcgatcaaggaactcagcacacgcgccccggacttcgggctggccgtcctcgccgcgctcggcggcatgctctgcctgtacctgttcgtccgccgccagcgccgcgcccgcgaaccgatgatcgatttcacgttgttccgcaaccggcgcttcgcccgcggcgtcgcggtggccctggtggcgaccatggcgctggtcggcatggaactggtgttcagccagcacctgcaactggtgcagggcctgacgccgctgaaggccggcctgttcgtcctgccgatcccgctggcctcgctggtggtcgggccgctggccggctggctggtgccgcgctggggcgagaaccgggtgatgtgcgcctccctgctgctcggcagcgccggattgctcggcctggccctgtcctaccagtccgccaccggagcgcaactggccagcctggtgctgctcggcgtcggcttcggcggcgcgatgaccgccgcctccaccgcggtgatgctcaacgtggacgaacagagttccggaatggcggccgccatcgaagacgtatcctacgaactgggcggggtgatcggcgtgaccctgctcggcagcctgatgagtttcgtctacgggatgtcgctgaggctgccctcggccgagctgccggcgcgggtccgcgacagcctcgacgacgccctgttggtcgccgagggcctggcgccggaggtcgcgtcgcggctcgtcgagcttgcccggcaggctttcgaccaggccttcgtcgccgtgctactggccgccgccgcgctgctcttcctcagcgccatggcggtcctgcgccagccgcgtccggctacagagccagcgccaccagcaccgcacactcggtaa

SEQ ID NO: 321556 - DNA, 561 bp, Pseudomonas aeruginosa
atgggacgccgacgaacgatcgaccgtgaccagttgctcgatgccgccgaggcggtgatcgcccgcgaaggcgcggccggcctgaccatcgatgcggtggcgaaggaaatgggcattaccaagggcggcgtgcagtactgcttcggtaccaaggatgcgctgatcgacgcgatcttcgagcgctggggcaaggcctacgacagcctgttcgaagcggtggcagggaagcagccgacgccactgacgcgggttcgcgcacatgccgaggcgacccagcgttcggacgagctgtccagcagcaaagcggcggcgctgatggcggcgctgatccaggctcccgagcacctggagggcagcaaccagtggtatcgcagccggttggaaggcctggacctgtccgcacctgagggacgccgtgcgcgcctggcgttcctggcggtggagggcgctttcatgttgcgctacttccgcctgatggacattggccaggaggaatgggactcgatgctcgacgacgttcgtgcgttgttgctgaccccgactggcgccagcggagactga

SEQ ID NO: 321557 - DNA, 1821 bp, Pseudomonas aeruginosa
atgcccgtttacaaagccccgctgcgcgacacgcgcttcctgctcaacgaagtcttcgatttccccgagcattaccgcaacctggtcaacggagccgaagccacgccggacatggtcgatgcgatcctcggcgaatgcgcgaagctctgcgaggaagtgatcgccccgctctaccacagcggcgacgaggaaggctgccacctggagaacggcgaagtacggacgccgaagggctacaaggaagcctacgaggcctatgtcgccggcggctggcagggcctctcgcacccggtggagtacggtggccagggcctgccgatgagcctcggcgcgctcaagcaggagatgatgggcaccgccaactggccgttctccatgtatcccggcctctccctcggcgcgatgaacaccctgatgcagcacggcaccgaggaacagaagcagacctacctggttccgctcaccgagggccgctggggcggcaccatgtgcctcaccgagccgcagtgcggcaccgatctcggccaggtgaagacccgcgccgaggccaaccccgacggtagctacgccatcagcgggacgaagatcttcatctcttccggcgaacacgacctgaccgagaacatcgtccacatcgtcctcgcccgcctgccggacgcaccgaagggcacccgcggcatttccctgttcatcgtgcccaagttccttcccggcgaaggcggcgcgctcggcccgcgcaacggtgtgagttgcggcgcgctggagaagaagatggggatcaaggcctcggccacctgcgtgatgaacttcgacggcgccaccggcttcctcatcggaccgccgaacaagggcctggaatgcatgttcaccttcatgaacagcgcccgcatcggcaccgccatccagggcgtggccaccgccgagctggcctaccagggcgccctcgcctacgcccgcgaacgccgctccatgcgcgcgctctccgggatcaaggaacccgaccaggtcgccgacagcctgatgcaccacggtgacgtgcggcgcatgctgctgacccagaaggccatcgccgaaggcggccgggcgctggtctacctggccacccagtacgccgaccggatgatccagggcatcctcagcaacgacgacgccgaatacgaacgctgggacgacaagctcggcttcctcacgccgatcctcaagggctgcctgaccgaactcggcctggaaagcgccaacctcggcatgcaggtgttcggcggccacggctatacccgcgaacacggcatggagcagatcgtccgcgacgcgcggatcgccaccctctacgaaggcaccaccggcatccaggccctcgacctgctcggccgcaaggtcctgctgatgacccagggcaaggccgtgcgcgacttcaccaggggcgtggcccggttcgccgtcgacctgctgaagaacgagccgcgcatgcgcggccgcgccctggtgctgctcaagctctgcgcccaatggaacctgctgaccctgcgcattgccctcaccgcgcgcaagcaacgcgatctggtgagcaccgccagccacgactacctgatgttctccggctacgccacgctggcctattcctgggccctccaggaagccgctgcgcgccggcgactgcgccagggcggcagcgagtcggcggacttctacaaggccaagatcgccaccagcgagttctacttcgcccgcctgcttccgcgcgccaagggccacgcggcggcaatggcgaagccgacgggttcgatcatggacctgaagagcgagcacttcgccttcgactga

SEQ ID NO: 321558 - DNA, 414 bp, Pseudomonas aeruginosa
atgctaccgacccaatgcctctgtaccaaactgcgtcgcgccgcccgcagcgtttcccgcttctacgacgaggcgctggccgataccggcctcaaggtggcgcagttttccctgctgcggcacctgcggcgcctggaccggccgagcatttccgaactcgccgaagccatgggactcgaccgcagcaccctcggtcgcaacctgcgggtgctggaaggcgacggcctgctgcgcctgaccggtggcgaggaccagcgcaaccgcctggtcgagctgacgcctgccgggctggatgccctggagcgcggaacgccggcctgggaagacgcgcagcggcgtctcgccgggcggcttggcgaggagcgcagcggcgccttggcggcgttgctggtggaactggagcgactggactga

SEQ ID NO: 321559 - DNA, 1200 bp, Pseudomonas aeruginosa
atgccgcgtgccgccttctggatcctgctgtccggagccctgatcctcgccctgtccctcggcgtgcgacatggcttcggcctgttcctcgcgccgatgagcgccgacttcggctggggccgcgaagtcttcgccttcgccatcgccttgcagaacctggtctggggcctggcccagccgttcaccggggcgctcgccgaccgctacggcgcggcgcgggcggtgctggtggggggcctgctgtacgccctcggcctggtcctgatgggactctcgcagtcggccagtgggctgtcgctgagcgccggcctgctgatcggcctgggcctttccggcacctcgttctcggtgatcctcggcgccgtcggccgcgcagtgccggcggagcagcgcagcatggcgatgggtatctccagcgcggccggctccttcggccagttcgccatgttgcccggtaccctcgccctgatcggctggctgggctggtcctcggccctgctcgccctgggcctgctggtggcgctgatcgtgccgctggccgggctgatgaaggatcgcccgttgccgccgcagggccatgaacagagcctcggcgaagcgctgcgcgaggcctgcgcgcattccgggttctggctgctggcgctgggcttcttcgtctgcggcttccaggtggtgttcatcggcgtacacctgccggcctacctggtcgaccagcacctgccggcgcaggtcggcaccacggtgctggcgctggtcgggctgttcaacgtgttcggcacctacatcgccggctggctcggcgggcgctggtcgaagccgcgcctgctgaccgcgctgtacctggtgcgcggggtagtgatcgtgctgttcctctggctgccgctgagcgtctacagcgcctacgccttcggcgtggccatggggctgctgtggctgtccacggtgcccctgaccaacggcaccgtggcgaccctgttcggcgtgcgcaacctgtcgatgctcggcggcatcgtgttcctcttccaccagttgggcgccttcctcggcggctggctgggcggggtggtctacgaccgcaccggcagctacgacctggtctggcagttgtcgatcctgctaagcctgctcgcggcgctgctaaactggccggtgcgcgagcgtccggtggcgcgcctgcaggtggccggaggcgcggcgtga

SEQ ID NO: 321560 - DNA, 555 bp, Pseudomonas aeruginosa
atgaaacctcgcgtgctgttgtccgtcctggcgctcgccgggctgccgctgagcggctgggccgccgattgcccggaactgttgcagggccagttgaccaagctgcgttccaaggaaagcatcgatctttgccagcgttacgccggcaagccgctggtggtggtcaacactgccagccactgtggcttcaccccgcagttcaaggggctcgaggcgctctaccagcgttacaaggggcagggcctggaagtgctcggggtaccttccgacgacttcaagcaggaagccgcggataccgccgagaccgcgaagatctgctatggcaactacggcgtgaccttcgccatgacccagccgcagcacgtgcgcggcgacgaggcgatcccgctgttccgccagttggccgagcagagcggccaggcgccgcgctggaatttctacaagtacgtggtggatcgccagggcagggtggtcgcgcagttctccagcaagaccaccccggacgatccgcagctccaggccgccatcgagaaggccatcgccagccagccctga

SEQ ID NO: 321561 - DNA, 480 bp, Pseudomonas aeruginosa
atgggtatttccgccaacgatctttgccagcacgtgatacgcccgaccctggactacctgtcctgccacagccccgccgccgaagcgctgctgctgggcgcggcggcctgccagtcggcgctggggagcgccctcgacgaccgccgtggccacggcctgtaccggatcgccagcgaacgccaccagcagctctgggaccagtacctggcgctggacccggagcgcgccagccgggtccgcggcctggccagccagcatgccttcctcgccgcgccgcacctggaactgacggtgaacctgcgctacagcacggccatcgcctggtcgctggtggaagccgcgcgactgccactgcccgaccagcacgaccacctcgcccaggctcgcgtgtggcgccaggtattccagccgcacggtcgcctgcacgagttcatcgacgcctggcaacgctgcatcggcagcctcagccaggtcgcctga

SEQ ID NO: 321562 - DNA, 594 bp, Pseudomonas aeruginosa
atgaatgtcaagagcaggcagcaggaaaatgccgaggcgacccgcgaggcgctgctggaaagcgccctctccgccttcatcgaacatggctatggcggcgtctccatcgacgccatcgcccgcgaggcgcgcgtgaccaagggcgcgttctaccaccacttcggcagcaagcaggaactgctcgccgaatgctacgaacgccaggtacggacgatcgccgaggacctggacagggtgccggcgcatgtcgacaagtgggcggaggccgccgcactggccgaggccttcatcgacagcgtgatggcgcgcggcaagcggcaactgtcgctgcaggaggtgatcacggtcgtcggctgggagcgatggaaacgcatcgactcgcgccacacgctgcgctacgtcgggcgcctggtggacgaactggcggccagtggcgaactcaaggactaccgccgggagaccctggtcggccagctctacggcttccttacccaggccgcgatgagtcttcgcgatgcacgcaacaagcggcaagcggccaatgaagtgaaagccatcatccgcgacttcctctacagcctgcgcaggggctga

SEQ ID NO: 321563 - DNA, 840 bp, Pseudomonas aeruginosa
atgagtaccgcagtggagatcgcctgccgtgacggtgtgcgcctggccggcgaccacttcccggccgtcggcgatgcgcaggggagcatcgtggtggcctgcgcgctcggcgtcaggcgcgccttctaccagcgcttcgccgtcctggccgcggcttccggctatgaggtgctgttgttcagctaccgcggcagcgaaggcgacgaccctgccgtggctagctatcgcctggccgactggggacgcgaggacatcgatgcggcgctggcctggtgccgagcgcgcgcgccggagctaccgcgctatttcgtcggccacagcatcggcgcgcagttgctcggtctggctggtcaggccagcggattgagcggcgccgcgttcgtcgccggttcgtttccgtactggaggcgctggcgaggcaggcaacgctggcagatgttcggcctgttctgcgtggcggtgccgctactgaccggactgctccgacgctttcccagtcgtttcttcggcctcggcagcctggatatgccgagtcatttcatgcgcgactgggcgcgctgggtgcggcagccggactacctcctggcaccgcgcttcggattgcagcggcagggttacgaggcgctggacatccccgtcgccagcttcctgttcgaggacgacgactacgtgccgtgggctgcggcggaaaagcttcaccaggtctatgccgcggcgcacctggagttgcgtcgcaagggacgggccgagggggcagtcgggcatttcgggctgttccgcaacgaggcgttgcagaaggagttgctcgactacttcaggaagctgcccgacgcggcgtaa

SEQ ID NO: 321564 - DNA, 855 bp, Pseudomonas aeruginosa
atgtcgtccgcccaactgctgaccgcgcaacaactggccgcccgcctcagcgaacccgacctgctggtcctcgactgccgtttcgccctcgaagacccgtcctacggtgcccgcgtctatcaggagaaccacattcccggcgcgcatttcgccgacctcgaacgggatctttccgctcccgtgcgcaagggcgtgaccggtcgccatccgctgccggatcccgccgagctagcgctcaagctacaagcctggggcctgcgccaggatagccaggtggtgctctacgacgacggccccggcgcattcgccgcccgcgcctggtggctgttgcattggctgggcaagcgcgatggggtctacctcctcgatggcggcctggcggcctggaaggctgcgggactggcactgaccaatggcgaaagcagccttcgacccggcgatttccagggccagcccgatgcctcgctgctgatcgacgccgccaccctccaggcccaactgggccaacccggactggcgctgctcgatgctcgcgcgcagccgcgcttccgtggcgaagtcgagcccatagatccggtcgccgggcacattcccggtgcccagtgcgccgccttcaccgacaaccttggcagcgacggccgcttccttccgccggaacaattgcaccagcggttctccgccctgttgcgcggtcgcccggtggacgagctagtcgcctactgcggctccggcgtcaccgcctgccacaacctgttcgccctgagcctcgccggcttcccgcttccgcgcctctacgccggctcgtggagcgagtggatcaccgacccgcgccgcccggtcgccaccggcgactga

SEQ ID NO: 321565 - DNA, 660 bp, Pseudomonas aeruginosa
atgccggagctttctttccgtcgtcgctcaccagggctacgccctcggttgccttggctttttccgacttcgcgagcaatggttcgggaaactgcaatggggaagtactgcaacctgccaatagggccagacagacgacaacggacaacgggtggcgcaagaaggcaaagctcggcctatggcaagggtgcatacagtttcctttcaaaaccctgggtgttcccgtcctgcgagaacgagaagcggattccttgttcagtgatgctctccagacgctcgccgccaggcagagtggcgcccgccgcaaaacgccgcagaggctcctcggcgcttttggcaacaagggcgaagatgccgccttcatcgcggacaatgccgcgtagcagccaatcgaccttgattagcgccactccatccacgcccaccgaaacccgcttcgattcagcttcgcgctcctcgtccacggctctcccccaccacgacattccagccaacttgccggcaactgtcgtatcaaccgcaacggacggaacttccgccagaacccacttccgggcttcaggagtgggcaaggcggaaagatcggcactcggagcaaaggcaagtccggcaaagatggaagcgacgagaagcagaagattccagcgagcaaaggcatga

SEQ ID NO: 321566 - DNA, 2010 bp, Pseudomonas aeruginosa
atggacaaggcgatcctcgacgacaagaaggctgacatcagtctgaacgtggaggacgtacagcttgccgcattcatcaacgaggtattcggcaacatcctcggtttgccgtttgagatcgaaagcgctctgaaggaaaagactgatcgcgtgaccgttcgtttggaacagccgcagactgcacagatggtctacgaagtcgcgcgccaggtgctcgtcaactacggcgtggagatactccaccaaggcgatatctatcgcttccagatcaagcaggtagggctcagcccggacgagccgcccattctcatcagtggcgaagcacggcctagtgtgccgattgcctatcggccggtatttcaattcgtggcgttgcacagcgtcgaccccaaggatgtgattccctggttgaacagtgcctacgaaaaatccggcctgagcgtgatggccgatggtgcgcggagtggcttgatgctcaagggcatgtcttccatcgtcaaccaggccaccgaagccgtccgccttctcgatcaacctttcatgcgtggacgtcacagcctgcgtatcgacccggccttcgtcagtgctgccgacatggccagtcaactcaagagcgtgattgcggcgcaaggctacagcgtcggtatcggcgaagcggtcggcagcataatgctggtaccgctggaaagttccaatggcctcatcgtcttcgccaacgatggccagcttctcgacttggtgcgcgagtgggcgcagcaggtcgacagggctccgatggcggttgccgcaggtatcggcgaggagaaggaagggctgttcttctacgaagctcgcaatacccgtgtcaccgaactggccaagtcgttgcgggcattggtatcggggttcgctggggagggtgcctacgggatcacctccggactgcaaagcagcgcttccaagcgatctggcggtggcaggcgcgccggagaagatggcgcggcaccggcggtcgctcccttgctgcaagccgcaggtgccgccgcgttggtggggggcgatggtgctaacggttttctcggtggcttggcggccggtatcagcggcagcggcaccatagtggaggacgagaatcgaaacgccatcttgttccgaggagcggcgcgtacctggcagcagatgcagggcttgctccgggaaatggacaagccggcccgccaggtattgatcgaggtgacggtggccagcgtaagtctcagcgacacccaggagttgggcgtggagtgggagatgctcaacggcagcttcaatagcgcgacctcgaccggaagcaagggcagcgccgggaaaggaggtttcaactacgtcatcaacaccgccggaggcaataccgcagccatccaggcaatggcggacaatcaacgagtccgggtactcgccactccccgtatcttggtcaagagcggcgagcaggccaacatcaatgtcggtcgggatattcctatcccaacggcccaggtcaatgacgacagcaccactgctggaagcaccaacctgcgcaatgaaattgcctaccgctctaccggcacaattctgaatgtcgcccccgtagtctactcggatagtcgggtcgatcttacggtcagccaggagttgagcgacagtggcggttcttccggcggcggtggcaaggccagtggaggaggaatcagcgctccggagatttccaggacgtcgctggaaacatcgcttacgttgaaaagcggtgggtcggtgctgatgggggggctgattcgggacaacataacggactccaacgctggcgtgcctctcctgaaggacattcccgggatcggtttcctcttcggacgccagaaagccgtgaagacccgtgaagaagtcatcatgttgatccagccttacgtgctggaaagtgatgccgatgccagggaagtgacggaaaagctgcgcggcatgctgagcaagacactggcctgctccgatagaccgggcgcctgccgtatggaatga

SEQ ID NO: 321567 - DNA, 1806 bp, Pseudomonas aeruginosa
atgctcaaaagaacactactcagcgccgctgtagcttcggcactgtttgctggagtcgcgaacgctgccggagtggttgctattgccacaagccccactctggaggcgaactcgcctggtgcaaccgagcagtacgggccaggacaggccaactatgtcgtcggcaagagtgtggaaaatggtgccaacctcgacagcaaggcggccaacatcaccctggctcaggagattttcggcaacaagtccgaagaaactacctttgacctacccagcgttacctacaccatcgatccagtgaaggctggaaatgccgctgcgggccacaccatcaagctgacccttggtcgtaccgtcgtgcgcttcgccaaggccgtgaccgccaaccagatcaagatcggcgccctggctgcgggtagcggcttcgtcatcaccagcggcactggcgccaccgacaacacgcttgagctgcgcctcgaccaggcgggtgccgacatgatcaagcagaccgcgaccggcggcaacgtggtgttcttcaacttccgcgagccgagcagccaggacagccagcctgccaaggtcaccaacatgcgcgctccgcttcagggcgatgccaccttcgtggctggatcctggaatccgaaagtgggcctgcagaacgacccgctgaacgaattgcgtttccaggtcacggtttccgcacagttcgataccaccactggcgccgatgccggcaaccctgcgaataacgattctgcaccgcccctgaccattttcacttcgctgcccgcggtttactgggacgttctcaacaccaaccagtatgggcagaatcgcgtcctgcatccgttgaacctgaacaatcaggatcgctccttcgataccacggtgtccgtcggtggcgataacaccgattattatggtgccaactatgcgcgtctgggcgccgtacggctcggcatcaatacggatgtgctcaacgaggcgggtcgaaccgtgtttggtttcgccggtggcgacaaggtgaccagcaccctgtcgggtaacttcaacgggatcagcgacatcggcctgaccaccgggaactgctccgcctttgccgccaatccggggtctgccgccaagctctggaattctgccgccatcgaaggtgtagtggatgcgcagggcaacggtactttgccggtatcgttcgacaactcgaatatcaaccagacctacaacgtctgcgtgaaggcttccggcaccgtgccgatgcaggcgctgcaacgttttgacgtgggtgatctgaaggtcgacttcgagaacgtacgctatgtcgatcgtaccattgcaggtaaccgtctcgacgagttctggaagaacagttgcgtcgccagtctgttcaatctgcctggctccaatgtttccgaccagttcttcattcgtctgaccaacaccagcgacgatggtcgggacggcaaggtacgcggggtactgttcgaccagaacggtaagcgttatccggcgactggcagcacctacctgaccgactcgagcgggaagactgctctgaaagcgcacgaaaccggtgtgtacaccgtaaccgaagtagccaaggccttcggtatcgacggtaccaactggaacggtgccaacgggcgcgcacgtctggtcctggaaggcgagttcccaacctgcgaggcgctcggcctgatccgctctgccaatggcaccatcaccaacatgacctccaccacccaaggcaacttcaacgaagatggctcgtccacctcggagaaccacaaggctggtaacaaccgcaactaa

SEQ ID NO: 321568 - DNA, 1014 bp, Pseudomonas aeruginosa
atgcgcgtattggtcacaggaggtgcaggattcattggctctcatgtgttggttgaactcttaggccaaggcgccaaggttgtggttctggataatcttgtcaacggttcttcggaatctctaaagcgagtggaaagaataaccgggcgtccggttggcttcgtactgggagatgttagagacagtcttcttgttgagcgcctgctgatcgatgagaaggttgatgcagtcattcatctggcgggattgaaagctgttggagaaagcgttgatgacccgctggagtattacgagagcaacgttcagggaactatttcgctgctacgcgccatgcagagggtcggggtattcaagattgtcttcagttcttccgcaacgatctatcagatgcctggcaccttgcctatatccgagagttcgaaagtgggaggcgtggccagtccctatggccggacaaaactgactgccgagcacatgctcgatgacctggctcgctccgatgcgcgttggtccatcgcggtgctcagatacttcaaccccatcggtgctcatgaaagcggcctcatcggtgaggacccatgcggtaccccaaacaatcttctgccctatatcgcccaggttgcagtcggacgtttgagtcggttgacggtacatggcggcgactatccgactatcgacgggacgggagtccgggactacatccatgtttgcgacctggcagcaggacataccagggcgctcgagtacctgcggcaggggcacggctaccacgtttggaatcttgggacgggcaccggctattcggtcttgcagatcatcgaagctttcgagcgagtctctggcaggcgcattccctttacggtgtccggtcgccgcccaggtgatgtggccgagtgctgggcggatgtttccaaggcggagcgagagttgggctggaaggcggggctgggcctcgaatgcatgattgcggatgcctggcgctggcaggtttccaatccgagtgggtattcatga

SEQ ID NO: 321569 - DNA, 1152 bp, Pseudomonas aeruginosa
atgaatcacgccgctgttgtcgatgggttgccttttagcaaccttgcgctgatctccaatcaggctttttcaatctacaattttcgtggcgatttcattcgtgaggtcgtacgtcgaggagcgaaggtctacgctttcgctccagactatgacgaggtgacaagccgtcaagtttcggagcttggagcaattccggtttcctacagcttgaaacgtgcgggcatgaatccctttcaggagttgcacgcgctcctgagcctgatctgcaagctgcgggcgctgaagatcgatgccgtgttcagttactttataaagcccgttatctacggtggtatcgcggcttttttgacgggcgtcagattacgctattcgatgatcgaaggcgctggtttcatctattcggaagaaggctatacccattttctacggaagctgcttaggcatgtcgtgacctgttcgatcaggttggtccttcggttctcgtctcgtgtatttctgctcaatcaggatgactatgacctgtttgtgagccctcggctggccaagacgggacgtgccttgatattgccgggtataggcgtcgatcttgattattttgccgcgagttctcccgtgttgcggcctattactttcgtgtttgtcgctcgtcttctcaaggagaaaggtatctatgattttgtggaagccgcgagaatcgttagaaaacgtagtccgctcgcgcgttttctggtcttgggaggcgtcgacagtaatccaggaaaggtttcacgggaggaaatgaaccagtgggtagccgaaggcttgttggagtggcctggccatgtgcatgacatcaaggcatgggtggccaatacgagtgtattcgtgctgccctcctattatagagaaggtgtgccgagaagtagtcaggaggccatgtccctggggaagcctgtgataacgactgactggacgggatgtcgtgaaacggtactggatggtttcaatggatttctggtaccgatcaagagtccgcagagtttagccgcggcaatgttgaagttcatcgagtcgccttcgctcatcgcacgtatgggagaagccagtagatcgctggcggaacagcgctatgacgttttcaggataaacaatacgatgctttctgcgttgtag

SEQ ID NO: 321570 - DNA, 987 bp, Pseudomonas aeruginosa
ttgttggagctgggggccggtttcaacatggagtacaccggcagggaaaacataatcttcaatgccatgcttcttggattgggcgagcaggagatttctgaacgcctcgacgagataatccagtttgccgatatcggtgagttcatcgatcgtccggttagaacatattcgagcggtatgttcgtgcgtttggctttctccattgcggcatatgtcgatgccgatgtgctgatcgtggacgaggccctggcggtaggtgacgccgcgtttcagttcaaatgcctgaaccggcttgaagaactgctgctgaaaggcatcaccatcctgctggtctcccacgatatacagttgatcaagagttattgtagtcgagcgatctatctatccaaaggtagagtgatattcgatggcgactgtgaaacagccacggaactctatctgcgggacagtatagagacacagcgggcggaagtccgctcaggaagcctgatcgcttctggcgaacacgggaactcgggaattgcatatggaaatgggcagggcaggtttctatccatccgtatgggtgtacttgacgaagcccgggattacttcgattcgggcgaacgtgtctgggtcgaggtacttgtgcaatttgacctacccgtcccggagcacccaaaaatcaccctgactatccgtgaccagcgcggttacaacctctatggcataaacaatttattgctgggcaaggctctgaatgtcgagcctgacgggcgcttgagaacacgtatcagcttcgactgcgacttgcaggccggcgaatacgccttgacgtttcgtctggagaactctttgtcggagtccgtttgcgaactcatggataaaaaggtcaatgcggcgatattcagggtcttcaattcgcccaagtgcttcgatgcagtggtgaacctgcatggagcattcgagccggttccgttctgctgcgagacccgggctacccaatga

SEQ ID NO: 321571 - DNA, 1251 bp, Pseudomonas aeruginosa
gtgaccacttgttccggggaagcgatgcctgcgtactataacgctggctttatcctggtacgtgatgccaggcgtttcgccgaagtctggtacaggctcgccgaacgcgtccatgcggatccgctgatcaccaacaagatgccctggctggaccagctgacgctacccgtcgctctgcacgcgttgaactacaagacgagagcgctcagcgaacggttcaattatccgcttcatatcaagccgctatccgctgcgtccctaccacccttcttctgccactaccattctctcgacacacttgtcagcgagcgttcgctatgggccgaactggacgaactggccaagcgtttccctgagctgcgcgaagtgcttgcgctggatgccaactggaagaaggcgatcctggctcctgcacctcggctggctttttcggaaggtgattccaccggcactgtcgaggccggacaggacctggtgatcaccgggattccccggagcggaaccagccatctatgccgtctgctctcccagcagcccgacaccgtggcgctcaatgaacctcctcaggtattcgaagcgctgaaactctcgcctcttccttggggactgccacgctactacgcagagttacgtcgcgacatcctggcgggcaggcccgtgccgaacaagcatgtgaatggccgcctggtcgacgacactgccaggggcaacgatcagtccagcgactatttcgctgaggtgcggggggcttcgtttcacctgggaacgaagaacacgcttgcctatatcgcccggctgcccctgattcgcaaggtcatgccgacggcgttgctgatcgcaaccatccgtcatccctacgacaccctgaactcctgggcgaacaccttcgagcacctgcgccaggctgccgtcgaacgccagccgttcggatgtcccgatgacctggccctcacgggatggcagcgcaaggcactactggccattgccgataccgaccacctagctgtccggcgtgctctgtggtggcgttacctggcactgcaactggaggacgccggggattacgtccagttgttgcgctacgaggatttcgtcgaggcgccgcaaacgaccttggccgctctgcgaaacaaccgccccttgcctttcgacgagcctgcggtgtggagcaaggggctggcgccggacgagcaggagctggttgccaacatagtctgcgacgttgccgagcgattccactacgtcttgtag

SEQ ID NO: 321572 - DNA, 729 bp, Pseudomonas aeruginosa
atgctggatatcagtttaatcatgaatttccatgcggaagacgtgctggcgcattggagcctgctgggttttcaacgcatgcgtgaatttgcgtcgcaccatggggtttccgtgcagttggtggcggtgctcgaccgcgcctcgcaaacgactcggcgaatcgtcaggcagcatccgatcctgcgcgagggcgacaaggtccttcaggtcgagcatggtgatctcgggctttcccggaacgccgggatcgatagcgcggatgcgtccacggtgggggtgttggatggcgacgactactgctcggcgaactggttggtcgaagccctgcaggtggtatccgagaagggcaatggcgtcgtggtccatcccgagtacacggtgagccatggagcctgccatttgctggggcgttcggtagatcaactgagcgaagactatcccgtggaaagttgcttcaagcatcacccatgggtttccgttgccgtagccgagaaagccgtattccaggagcttccatacctggagacccgagtcgggaaatccggcttcggttatgaagattggcattggaatctcgaggtgattgcgtccggtcggaagcacaccctggctagcggcacctgcctgttctatcgccgcaaggaagcatcgatgctggccgccatgggcgcgctgaacgcagtggttcgccccggacgattcttcgatggacggtgtttcgatcactag

SEQ ID NO: 321573 - DNA, 1485 bp, Pseudomonas aeruginosa
atgagcctgaacggcagactgaaagctcgtgcggccagcttcgctcgcacagcctatccacctattcttggatcgttgcggcgggtgctctccgagcgccaactacaacgcttcatactggtctgcgaccgtttgaagggctggttgctcaaggaggcagtcgtcgtaccgtcaccctctccgatggcgctgccgccatggatagtcgacgaaatgaaggcgttggcccggatcgagcctgccctgtatccctcggcggcgaagctgcgcgttttcacttcctggaaggccccgatagataacggaccggcgcaactgtaccggggatgtctggcggacttcatcgaatatgcgccggatatggtcttcctcgtcccgcatttgcagcgtggtggcgctgacctgggaatcctgcatcatgtgcggttatgcgccgagatgggcgtgaaggtgacggtagtggtcacgcgggatgtggtgtctccctggctcaaccggcttccggcggaggttcgggtggtggagttcggacgcctgggcaatctgctcggcgaggaggaccggcgcctggtactgctgcgccttttgctgcaatgtcctgccaggagtatccacatcatcaactcgcaactggcctgggaactgctcaagcggcatggcaagacgttgacgttcgagggtaagcggatttacgccagcgtcttttgcgacgacctggacggcaatgcggttcgctgcggctatgccagcgagttcctcccacggtcctggatgcacctggcgggcctgctttcggataaccggaccttcctccaacagattcacgagcgggacggcattccgccggagctcatgcatgggctctactttcccgccagcgaccatgcagaggcgattccgaccgcaggctcgacgattctttgggccagccgtatctcgccgcagaaaaggccggacctgctctacgagattgccctggcgcttcccgaatacctgttcgaagtccacggcgaggtcgatcctgcttgcaggggagaaacccagaggaagctgcgacgcctgccgaatgtcaggcttcatgggcgttacgactccttccaggccctggctcggcaggggcgatatgcgatgttgctgtatacctctcgctatgacggcttgccgaacatcctgctcgaagccactgctgcagggctgcccatagtcgcccccgacgtcgggggtatcgctgagttcctgaataccgaaacgggctatctggtcggcgctgacgccgatgccggcgagttcgcaagggcaatcaggagtgcgctgggcaatcccggggagacggcgagacgggtgaaacgcgcccgcgagttgctgacgcgacgtcatggctgggccgcattcagggacgcggccaggaacatacccggctacctgcctgggggcgtgcggccggaacaagaggtctccatggaaaccgaaccggtgtccgggtga

SEQ ID NO: 321574 - DNA, 879 bp, Pseudomonas aeruginosa
atgacgatcctgcgccagcccaatcgtgggccatccgccgcgcggaatgccggtgtggcgcgggcgagggggcgttatatctgctgcctggatgcggatgactggctggcgtccacctatttggaaaagtgcctggtcttgctggagggaaactctggcgtccgcctggcgtacagctgggtccaggtggtgggagaggagcatcggctgcatcgttccgccggctttcatcccggactgttgcgttacttcaatccgttctgtgtctccgcgatctttcatcgcgatgactggctggcggtaggcggtttcgacgaagccagggaggcacagttcgaggattgggatttctggatcgccctggtcggatgtggggtgcgaggcaggctgatcagggaacccctgttgttctatcaccgccaggtcggctccagactggagaccggcaaacgtcatgccttgagttcttacaagcgcatgcggactcgccatcctcgcctctatcgagggagtccatttcttcgagcgcagcggcaaggctattacgactgctgggcatatcctcctctgctcaacctctcccgcgccgaccaatacaacgccgtcctatccgatgcggtagccgtggtggccgacgcgccgctcaccgaggactggaacgcatggcgtcgacaattcgatgagctgccagcgtcctcgacggttttcgtcattgccggtgggtgccggaagctcccgggctggctgctggagagggcgagcgccatctactggctggacgacctgctgcacgagcggcaatggtcggctttcatcgataacttcaggcggacccgcggaatctccaaggtgttttccgtgggcaggacggcgtggtga

SEQ ID NO: 321575 - DNA, 1248 bp, Pseudomonas aeruginosa
atgctgacggtggtcgccagcctggcggccgagcatcggtggcgggatcgttttaccgcgctcactgcggatgtctgggtgcttccggactttctgtctgccgagaaagcttgcggcttccttgcttatctggtggacagtcgacaacccgacctgatgctgctttccaactctgcattcgcctatgacgtgctggggtacgtccggacccgctacccgggcctgcccgtggtcgacctcaatcatatggaggagggctgggacgatggcggccatccgggtagagccgctcgatgcactgccttgctggacaggcactgggtcgtatccgggcacctgcgccactggctgctcgaccgtggcgtcgaggcgagcaaggtcgaggtgttgcactggttcgccgatgtggactcgtggaaacccgacagcctgacgcgcgcgaaggtccgggcgcgcctgggaatagctccgcagtgcgtagtgatcgcctatgcggggcggctctgcgcgcagaaacgaccggagctgtttgccgccagccttggcgagttggcgcgccgtggtagtgatttcgtcgcgttggtactgggcgatggcgagctggcaggggagctgcggaacgacctccggcgccatggcttggccgggcgggtacggatgctgggctggcaggacgaggctgcgttgcgcgagttgttccaggcctccgatatatttttcctgccatcggccggcgaaggtatcgcactggttctctacgaggcgatggcgtgcggaatggccatagtcgcagccgatgtcggcggtcacgcagaactggtctctgcccactgcggcttccttgttccgcggcgcgatgccgaacgagaggccagggattacgccgctaggctcgagagcctcatgcgcgaaccggaaatgctgaggcggatggggcagaactccgcacgccgcatccgcgaagcattcaccttgtctcttttcgagcggcgtttgcgggagttgctggaacgcgtgccggtttcgactccatgcggcgtttgcacggatagtccggtgcctgccctgggggcggccaggctgtccatgcaatgggcttcctaccgactggcaaacggattgcgctgccggctggatatccagaagcacggccgtttttcaagattcctggagcgatgcgcgaagggggtgttcttcttgcgcacattcggggcgaaggcgctttggcaaaagatcaggaagcactga

SEQ ID NO: 321576 - DNA, 1224 bp, Pseudomonas aeruginosa
atgaagcccaaggtggtggtgattctcggcatgcatcgctccggtacgagcgtactttccgccggactcgagacgctcggggtcgagtttggcgagaatctgatcccacccaggccggacaaccccaagggatactgggaagatgcccgcctggtggctttcaatgacagagtcctggccctgtgcgggttttcgtcgggcgacgtcgggttgtccagtcgccgggtgctgggcgtcgagcgattcgaagagatcgtccagcaggccgtggcgcttttgactgagctactggcaggcaaggcgctgctgggtatcaaggatccgcgtatgccgcgtctgatgccgatctggcaagccgcgttcgatgcattggggctatgggtcgactatgtcattgcggctcgccatcctcttagcgtcgcggagtctcttgctgcccgtgaccacttgagtcgggaaaagagcctgatgctctggtacgaacattcctgtcgctcgatgcagtgggcgctccacaagggggccgtggtggtcgactacgatcgattgctggctctgccgcgacaggaactgggccgtattggccatcgactttccttgccggtggacgagtcggcttgcgcccgcttcgtcggtgatgtcctggatgtcgcattgcgtcactcatcccatgatgcgagcgcgttggctgccgcagcgggaagctttcaggcgctgctcgaggtgcatgaggcactgcagcagcttgccgtggaccggttcgacatcgaagggtggaagggcctggagcgggaattcagcagagcgatgccgttgctggagtacgtgggggagctggacaggcaactctggcaatcggcttcgtcccacaacgagagcatgacgcggttcagcgagcaggtggctgacctggccatgagctgtaccgcacagaggcaactgaacgatggactgagagatcgcttgcttgaggccggtgctcgggacgaacagaacgaacgagccatgcgggaactttctcggcgattgtcggcgtgtcgcgaagagcttgtttccgctcagcgcactctcgccgaaacggacaacttgctacggcgcacgcagatagatcgcgatgatactcacgcccgtttgatggctatattggacagtcgcttctggcgtttcacgaaacccttgcgaaacctgtcccgtctgttcggcagcgagacggggtgtccctga

SEQ ID NO: 321577 - DNA, 591 bp, Pseudomonas aeruginosa
atgaaccctcgtgaacatggaaaacgatcgatcgataacgagacacgcagtgcgctcaagcaccaacgcccagcggtcatctggctgaccgggttgagtggcgctggaaaatccactattgcgaatgccctggaactagcgcttttcgaacagaagaaacatacgtttctcctggacggcgacaatctccgccttggcctgtgccgaaaccttggctacagcgacgaagatcgcaccgagaacattcgaagaatcgcggaagtggcaaagatcctgctggaagccggccttatcgtgatcgtggcaaccatctcgccattttcgcgagacaggcgcctctctcgggaacttatcggcatcgagcatttcatcgaggtctttgtcgacacgccgctctcggaatgcgagagaagagatcccaaaggcctgtacaggaaagcacgctcgggcaagatcgaaaacttcaccgggatcgactcgatctacgaaacgcccgcacagccggacataacgatcgatacactttcagaagaccccaacctggcggtgaagcgaatcatttcctacctggagacgaaccagccagcctga

SEQ ID NO: 321578 - DNA, 255 bp, Pseudomonas aeruginosa
atgactcggcaatccgtactcgccaccggcccggaggccagcgattggtggtgcttcggcagcggcgacgagccggcgcgcgagtcgttctctgccggtgggcgttcgcttgcggcgtcgaggaaacccgtcggcgcacagagcggaatggccgtggccgagcaggcgaaccgcgcgcaagcgtccgggcaggacgccgcgccgggcctgcgaaccttcgacctgctgcctggcaacccgccgaagaacccctag

SEQ ID NO: 321579 - DNA, 417 bp, Pseudomonas aeruginosa
atgcgccggatattcatcgcgccgttactggcgtcgctttccctgggcggctgtatccagatggacacgctgcccgaggtctacgcccgcagccagtggaagggccgttccgccgaggaagcgatagccttcttcggtacgccgcagaacatggagcgcaccgctgacggctcgcaggtggtgatgcagtggtacaccgacaccagctattcccgctatgaagtggtgggctccagctcggagatgcagggcaacgtgatggtgaacaccaactactgggataccgtcaaccaccccaatcgctgcatcatttccgtcaccgtcgacaagagcaagcggatcacccagttcgaggccgacgacggcgagttgctgctgtcccacggctgcgccggcatcaagtacggcccgccgtag

SEQ ID NO: 321580 - DNA, 1623 bp, Pseudomonas aeruginosa
atgaagttcgagaagaataccgagctggaccaggccaacctgcgactgatcgtggccacctgcgcgattctctacgtggtgctgatcggcctgctgcccggcctgaaggtcgagacctacctgccgatcgttgcctactacggcctgttcctgatcgcctccatattgctgcgccaggccatcgtgcgctggccggggcactacccggcgcggcggatcttctgcatgctgcacgactacgccggcacctcgttcggcctgatcgtgggcggcgaggcagcgctgccgctgtacgcggtgatggtctggatcaacctgggcaacggcatgcgctacggctcgcgctacctggccatcgccaccgccctggcgctgctcgcgctactggtcatctatcgactgaccccggcctggcaggctcagccgttcatggtgctgatgctgatgaccaccagtaccgtcattcccttctacgcgcacctcctgctggagcgcacgcgcaaggccaccgaggaagcgttgcaggcgaaccaggagaaatcgcgcctgctggcccaggccagccacgacctgcgccagccgatccactccatcggcctgttcaccgcctgcctgcgcgacgcccgcctgggcgacgaggaacggcgcctggtggacaacatcgaccgctcgctgctcaacgtctcgcaactgttccgctccatcctcgatctctacaccctcgacaacggccggctccaacccaagcaggagaacgtccacctgggcgagttgctgcgcgacctggtccggcgcaacgccgaagcggcgcgctgggccggggtggaactgcgcctgcgcccttgccgcctgtggacgcgaaccgatccggggctgctgtcgaccatgctgcagaacctgctctccaatagcctcaagtacgccgccgagcgcccgctgctgatcggcgtgcggcggcgaggcgacggcctggccgtagccatctacgaccagggccgggggatcgcggaggaacacctgccgcgggtgttcgaggagttctaccgggtacgcgagacgcgcgaccgcgacgtcgagggaatcggcctggggctgtccatcgtccgccgcctggggcagttgaccggcatcgaggtgacgctgcgctcgcgggtcggacgcggcaccgcggtgaccctgcacggcctgccggcggtcgccgcgcaagccctgccccgccgcgacgatcccctgcaggccggcctgctcaccggcttgcgggtgtgcctggtggaagatgatcgcaacgtcctgcgtgccacctcggcgttgctcgaacgctggggctgcacggtccaggcggaaaccgaggcggacggctggcgaaccgattgcgacatcctcgtcgtcgactacgacctcggcccccacgcctccggcgtcgagtgcatcgagcgggtacggcggcaacgcggagaggcgataccggcgctggtgatcagcggccacgacatcgagcgtatccaggccagcgtcgaagacaccgacatcgccctgctctccaagcccgtgcgccccacggaattgcgcgccaccctgcgcgccctgcgcgagcgcccggtggccgccagccacgcttcctga

SEQ ID NO: 321581 - DNA, 633 bp, Pseudomonas aeruginosa
atgactggccgcatcatcgtcgccgatgatcatccgctgtttcgcgagggcatgctgagtatcctccagcgcctgctgcccgaggccaggatcgaggaggccggcgatctcgccggggtcctgcgcctggctggcgaaggcgagcagcccgattcgctgatcctcgacctgcgtttccccggcctgacccgcatcgagatgctcgccgacctgcgccgccagttcccgcgcaccaccctgatcgtcgtctcgatggtcgacgacccgcagctcatcggcgaagtgatgaatgcaggggccgacggcttcctcggcaagagcatcgcgcccgaggaactcggccaggcgattctggccatccgcgccggggaagtgctggtgcgctacgaaccctccggtctcctgccgctgcagcccagcccgcgcctggaggggctcaccgagcgccagctggatgtcctgcgcctgctggcccagggcaagagcaacaaggagatcggccgcgccctggacatctcccactacacggtgcgcatccatgtgtcgtcgctgctgcgggcactggacgtgccgtcgcggaccgcggcggcggtgaagtaccgggcgctgctggggcagggggatgcggagtag

SEQ ID NO: 321582 - DNA, 342 bp, Pseudomonas aeruginosa
atgcgtagcccgcttgccacgatcgcctgcgcctgcctgctgctcggcggctgctccaagtccgccgaggacagcgccaacccattgctgggcaaggatgccgagtgcctcgaactgttcgcccgcagcaatgcgctgtactgcgacatccgcgaggacgaacgcgaatcccaggcgaacggtacgccgcgccggcacaccgactacgaggtagccgatgccgcttacctgctcaaggccaccggggagcgctgcgcgatcgatacgacctatgtcacggagtgttcggcgaaggccgggcagtggctgcagaaggcccgcgccaaggtggcgaagccctag

SEQ ID NO: 321583 - DNA, 921 bp, Pseudomonas aeruginosa
atgaatcagccacatgaatggtcgcccctcagccgtttcgatctgaacctgttccgggtcttcgaagtggtctatcgagaacgcaacctgacccgcgcggcgggcctcctgcatctcagccagtcggccgtcagccacgccctggcgcgcctgcgcgaccagctcggcgacccgctgttcgtccgccaggggcgcggggttgcgccgacgccgctggccgagcgactggcgccgggcatccatgacgccctcgccggcctgcaccgcagcatgaatcgctgccagacgttcgaccctcggcgcgacgcgcggaccttccaactgaacatgccggagcaactggagccgctggtgctcccggcgatcctcgcccacctgcgccaggccgcgccacgcatcgagatacgctgcaacagcctgcactgggcggacctgaaggcggaactgggcgccggacgcatcgacctcgccatcgagatcgcccggcccaccgacgccgccctgcgccgccagcacctgctcgacgacagcctgtgcgtgatggccgggccgggcttcgccggcgacctgagtgcggaggagtacctggcggcggaccatgtcgcggtgacctcgcggcgacgcggcatctgcatcgaagacctggccctcggccacctcggcctgacccgccaggtgcgccagcgctgccagcactacctgtcggcggcgttgctggtggcccagggcggctacctgctgaccctgacccgaggctacgccgaactgatcaaccgcggcctgggcaaccgcctgctgccgatgccgctggccctgccagcggtgactctgaatctctactggtcgcgccaggccgacgacgaagccggcagcctctggctgcgcggcgaactggcggagctggcgacgcgcctgcgctga

SEQ ID NO: 321584 - DNA, 3291 bp, Pseudomonas aeruginosa
gtgaccgctccccccttcaacgccttgctgatcgccaaccgcggcgagatcgccattcgcatcgcccgcgcctgcgccgacctgggtatccgctcggtggcggtgttcgcggaagacgatgccgcgtccctgcacgtgcgcaaggccgatgtcgcgctgccgctggccggccgtggcgtggcggcctatctcgacatggatcggctggtcgcgctggccctggagcagggctgcgaggcgatccatccgggctacggtttcctcgccgagaacggcgaattcgcccgtcgctgccagcgcgcgggcatccacttcgtcgggccgcaagcggaagtgctcgacctgttcggcgacaaggctgccgcgcgcgccctggccgagcgcctggaggtgccgctggtggccgggatcaaccgtgcggtcagcgtcgaagaggccgaggcgttcctggaagggctgggcgatggcgccgcggtgatgctcaaggcccttgccggcggcggcggacgtggcatgcgcgcggtggaggaggttgcgcaactggccgatgcctaccgccgctgccgtgccgaggcgcaggcggcgttcggccgggacgagttatacgtcgagcaacgggtagcgcgggcgcggcacatcgaggtgcaggtgctcggcgacggcagcggtgcggtcagccacctctgggagcgcgattgcagcctgcaacggcgccagcagaagctgctggagatcgcccccagcccggacctgccggaggccactcgcgaggcgctgatcgattgcgccctgcgcatggccggcgcggtgcgctatcgggggatcggtaccttcgagttcctggtcgacgacgagcgccccgggcgcttctatttcatggaagccaatccgcgcatccaggtggagcacaccgtcaccgaggaagtcaccggggtcgacctgctgcacgcccagttgcgtctcgccgccggcatggagcttgccgccctcggcctggagcgaccgccggcgatcggcggctgcgcggtgcaactgcggatcaacctggagaccctggcggccgacggcagcgcccgtccggcggtgggcactatcggcgcctacgaaccgcccagcggtcccggcctgcgggtggacggctacggctatgccggctatcgggtcagccccagctacgattcgctgctggccaagctggtcgtgcgtggtgcggattatcccgccgcgttgcgccgggcctaccgggcgctctgcgaattccgcctggagggcgtggcgagcaacctggatctgctgcgcaaccttctgctgcatccggcggtacaggccaaccgggtcgacacccgcttcgtcgaaagccacctggagacactgctggcgcctatcccggcgagccatccgcggctccgcgccgagtgcccgctcgccgaggacgccgcgcctgcgcgggtcgaggcgccactcggcagcctgccgctgtctgcgccgagcagcggggtgctggtggccttggaagtggccgatggcgaacgggtgcgtgccggccagcgggtcgcgatcctggaagcgatgaagatggaattcgaggtcaaggcacccggcggcggtatcgtccggcgactcgcggcgagcctcggggagcctctggaggagggcgcgacgctgctgttcctcgaaccgacggaggatgacgacgagcaggcaccgaccgaacaggcgctggacctggcgcatatccgcgccgatctcgccgaggtactcgagcgccaggcagcgctgggcgacgagcgtcgtccgcaggcgctggccaggcggcgcaagaccggacagcgtaccgcgcgggagaacgtgctcgacctgctggacgagggcagcttcagcgaatatggcggtttcgccctggccgcccagcgtcgccggcgctccgccgaggagttgctggagctgagccccgccgatggcctggtcgccggcaccggtacggtgggggccgccagcttcggcgtgcaggccgcgcgttgcctggtactggcctacgactacacggtgttcgccggcacccagggggtgatgaaccacaagaagaccgaccgcctgctcggcctggccgaacagtggcgcttgccgctggtgctgttcgccgagggcggcggcgggcgcccgggcgataccgatttcgtcggcgtcgccggcctcgattgccataccttcgtcggcatggcccggctctccgggctggtgccgctggtgggagtggtctccggtcgctgcttcgccggcaatgccgcgttgctgggctgctgcgatgtgatcatcgccacccgcgacgccaccatcggcatggccggcccggcgatgatcgagggcggcggcctgggccgtttcgccgccgaggaggtcggtccgacgggcgtgcaggggcccaacggagtgatcgacgtactggtggaggacgaggccgaagcggtcgcggtggccaggcgctatctcggctatttccagggcccgctgcccgactggagttgcgccgaccagcgcgagttgcgccacctggtgccggagaaccgcctgcgtgcctacgacatccgccaggcgatcgaggtcctggccgaccggggcagcgtgctggaactgcggcgccagttcgctcccggcctggtcaccgcgctgctgcgcatcgagggccgggcgttcggcctgatcgccaacaaccctggccatctcggcggcgccatcgatgccacggctggcgacaaggccgcgcgcttcatgcagttgtgcgacgccttcgacatcccgatcgtctcgctctgcgacacccctggcttcatggtcggcccggaggcggaaaaacaggccacggtgcgccacgtctcgcggatgttcgtcagcgccgccagcctgacggtgccgttcttcaccgtggtcctgcgcaagggctacggactgggagcccaggccatggcggcgggcagcttccattcgccgctgttcaccgtcgcctggcccagcggcgagttcggcgccatgggcctggaaggcgcggtgcggctgggcttcgccaaggagctggcggccgaggaagatccccagcggcgcgaggcgctgttccgcggcatggtggacaaggcctaccgcaacggcaaggcgctgaacatggccagctacctggagatcgacgcggtgatcgacccggcggagacccgcgcctggctcctgcgcggcctggccgtcgccggagaaccggcgccgagggcggggcgcaagcggccgttcgtggatacctggtag

SEQ ID NO: 321585 - DNA, 408 bp, Pseudomonas aeruginosa
atgacccgtgaccgactcgccgagcgctaccgcgcctacatcgactgcctgaaccgccaggactgggcgcgcctgggcgacttcgtccatgaccgggtgcgctacaacgacgtgcagatcggactcgacggctacctgcggatgctcgaaggcgacttcctggcaatccccgacctgcgcttcgagatcgaacgcctgctcgtcgatccgccgggcgtcgcctgccgcctgcacttcgactgcacacccagcggccggctgttcggcatcccggtcaacggccagcgggtacgcttcgccgagaacgtcttctacgaattcgaagacgagcgcatcgccggcgtctggtcggtgatcgacaaggcggcggtcgccgcgcaggttcaggtggcgccgccgtcgtcctga

SEQ ID NO: 321586 - DNA, 666 bp, Pseudomonas aeruginosa
atgaataccctcaccaacgccccgctcgccgatctcctgcaacgcctgttcgccgaagccgaagccagcgcaccgggcgacagtcccgccctcgccgacctctcggaggccgaactgaagcgcctcatgggcagcaagaccgaataccgcgagttctacggtcgcctgaaggacctggcgctgcccgtctcccgcgaaaccggctgcctgctctacatgctggcgcgcagcagctcggcgcgcagcatcgtcgagttcggcacgtccttcggcctgtccaccctgcacctcgccgcggcgctgcgggacaacggcggtggccgcctgatcggcagcgagttcgaaccctccaaggccgagcgggcacggcgcaacctggccgccggggggctgctcgatctggtggaactgcgcgagggcgacgccctgcaaaccctcgccaaggacctgccggacagcatcgacctggtcctgctggacggcgccaaggcgctctacccggaggtcctcgccctgctggaaagccgcctgcgccccggcgcgctggtgatcgccgacaacgccgagcatagtcccgagtacctggcccatgtccgctcgccggccaacggctacctgtcgacgcccttcgccgaggatgtcgagctgtccatgcgcctgggctga

SEQ ID NO: 321587 - DNA, 633 bp, Pseudomonas aeruginosa
atgagcgacaagcgaaacccgcgtatttcctcgcgcaagcagccgcagcaggcccgttccagcgagttggtggcgagcatcctggaggcggctgttcaggttctggccagcgaaggcgcgcaacgtttcaccaccgcgcgggtggcggagcgcgccggggtgagcatcggttcgctgtaccagtatttcccgaacaaggcggcgatcctcttccgcctgcaaagcgacgagtggcggcgcaccacgcgtctgctcggcgagatcctcgaggacaccgcccggccgccgctggagcgcttgcgccggctggtgctggcattcgtgcgctcggagtgcgaagaggcggcgatacgcgtggcgctgagcgacgcggcgccgctgtatcgcgacgccgacgaggcgcgggaggtgaaggcggagggcgcgcgggtgttccaggtgtttctccgggaggccttgccggaggtcgccgaggccgagcgcagcctggccggcgacttgctcaccaccaccctcggcgcggtcggcaagcagttctccgaacagccgcgcagcgaggcggagatcgagcgttacgctgaggccctggccgatatgctctgcgcctatctcgccgcccttgacgagcgctga

SEQ ID NO: 321588 - DNA, 228 bp, Pseudomonas aeruginosa
atgagcgattgggcaatcacctacagcaaggacgaagccaccgagcgccaagtcctgccgttcccccacaagccgagccccgaagaggtcgccgagcacctgctggaatgggccgaggccaacctcaagccgggccactacagcaccggcaagctggaaagcgacgagccggcggaactgctgctgcgccgcttcggcatcgtcgtcactggcatcgccgaagcctga

SEQ ID NO: 321589 - DNA, 1842 bp, Pseudomonas aeruginosa
atgctgtctgccgtacggcgctacaagtcgatgctctccagcgccctggcgcgttgtttcccgcgtaccaccgcctacctgcaggccgagcgcgaggctcgcgaagccttgttgcagccggccaaggcccgctccaggaagaacgccgcgaaggctccggccaaggccgccggcaagcctgcgaagggcgccgttcgggggaccccgcgcaagcccgctgccgcctcgcagggcgcgccgcagggaatctatccggctgccgcactgaaggtcgacgaatcccaggagcgcgccatgcgcgagcaggtggcgcaggccgtgacgctcggtgtggtcagcccgccgtccgaggaacagtgggcgatgatcctctgccgccagccgctggcgcggatcttcgccggtgccggctcgggcaagtcgaccaccctggtcctgcgggtggtgttcatgctctgccacctgggcgtcgagccgcagcggctgacagtgatttccttcaccaacgcctcctgtgcgcagttgcgtgaacaattgctgcggctgctcgcgcactggcagtacccgttcgacgcggcccaggcgcggcagtgcgtgcgcactttccattcggcgctcggcagcctggcccgcgaggtgctcggcaatccgcgctggttcgaacaactggacgaccgcgaccccgccgccgagccggacaacccccttgccgccggacgcctgcgtccggcccagcagcgcctgctgaagcaggcctaccagcagttcaagctggccggcgagttccaggcgctgccgctgtacgaagccttccatgcccaggccgggttcgccgagagcctgggcctgcgcgtcgaacgcctggacagcggcaagctggaatgcgggttgcgcgagaagatcttcgtcgaagccatggcactgttctgggcgaggttccaggcgctgttgcgcgaggagggcctgatgaccttcgacgccgcgttccagcagctcggcgagcggatggccggcggggccctggcggaaacggcgctggcgccgttcacccatctgctgatcgacgagttccaggatgtctcgccgcagatcgtcctctggctacaggcgttgcaccgtcgcctggcgacccagggcaccgcgccgagcctgatggccatcggcgacgactggcagtcgatctacggctggcgcggcagttcgccggagctgttcatcgacttcgaccggcacttcccctcgcgtgggcggggacgcaagagcgcgctgctggtgctggaaaccaactaccgctccgtcgaaccgatcattcgcgacggcgagaaggtgctggccggggtgcgtttcaagcaggacaagacctgccgcgcgttccgcccgatccagccgggcgaccatggcgtgaagctggtgcagcgtttcgacctgcgtgcgcaactgccgaagctactggcggaaatccgcgcccagtgcgagcacgccgccgctcgcgagagcagcgagcgcaccgcggtgctgttgctgagccggcgcaacgagccgttgcaggcgatccaggcggagttggatcgcgcgctgccggtgaagggcatgaccatccatcgcgccaagggcctccaggccgaagtggcgatcgtcgtcgacgactgcctgccgggcgagaagcatccgttgcgcaacgcgctgtacgcggcatcgggtttcttccgcaacagctacgaccaggccatggaggacgaaagcctgcgcctggcctacgtggcgatcacccgtggcgtcagccgggtgctctggtacacgcgcaaggcccagggcgccacggccctgttggcccgacgctga

SEQ ID NO: 321590 - DNA, 759 bp, Pseudomonas aeruginosa
atggacatgcccgatggcttcatccccctgccgccacgcgtcgaaccgcaggcggcctttcgccccctgctcgacgacctgcgccggaccctggcccggcctccgttcgagcgggccgtgcacagcatctacctgtacggcagcgtcgcccgcggcgaggccatcacggggcgctccgacctcgacctgaccctggtcctgcgcgacccgcccagccccgaactggccgcgcaactggaaaccgcgcgcctggcattgcaggcgcgccacccggaagtcagcaagatcgatttcgatatcggccacctggaccaggcccgcgatccggccaaccgcgatagctggggctattggctcaagcaccgctgccgctgcctgtggggcgaagacctggccagcgccctgccgcccttgcgtccggcgaaagccatcgccctggccctcaacggcgactatgcgcaggtgctggaagactatgcgcgacgcctggaaagcgcgtcctcggaggaggagcgccgccgcctgcaacgagaagcggcgaagaagctgatccgctccagcgacatccttcgcggggagacggaaagcgtctggccggaaaccctggagcattacctggcgctgtttcgcgcgcggcaccccggacaggcgccggccctggaatatttcaaggccgtactggacgaccaggtcaccgacccggcggtgttcatcgagcgcctgcgcgcattcagcgcctggatgcagcgccaggcgtag

SEQ ID NO: 321591 - DNA, 942 bp, Pseudomonas aeruginosa
atgaatcgcgaagccctcgataccctcctccagcacctgctcgccgcgctgtccccggcgccggcggagacccgccgtctgttccatggtcgcggccgctgctggccgggcctggaacaattgaccgcggactggctgcagggcgtcctgctggtgactctgttcaaggagccgcagccggaggaactgcaggccttgcgccggaccctggggcaactgaccacggcgccggcctgggctgcgagccagggccggcacctggtcctgcagcaccgctaccgcccagacagcgcctgcgaatggctttcgggcgagccgctggaaacctgggacatcgtggaaaacggactgcgcttccgcctcgacctggggcgcaaccagaacaccgggctgttcctcgacatgcgcctgggccgccgctgggtgcaggagcaggccgccggccgccgcgtgctcaacctgttcgcctacacctgcggcttctcggtggcggccattgccggcggcgccagccaggtggtcaacctggacatggcccgcggcccgctcaaccgcggccgcgacaatcaccgcctgaacggccacgacctcggccgggtgagcttcctcggccacgaactgttcaagtcttggggcaagctgcgcaagctcggcccgtacgacctggtgatcgtcgatccgccgagcttccagaaaggcagcttcgtcctgacccaggactaccgcaggatcctccgccgcctgccggaactgctggtgcccggcggccccctgctggcctgtatcaatgacccggccatcggccccgacttcctcctcgaggaaaccgcccgcgaggcgccgtcgctgcacttcgtcgaacgcctggagaatccgccggagttccccgatgtcgaccccgcggcgggcctcaaggcgctgctgttccgcaacgcaggctga

SEQ ID NO: 321592 - DNA, 2424 bp, Pseudomonas aeruginosa
atgaggcgcgccagcctgcatatgttgctctgccagttcgccatggccctgggcctgctcctgagcctgggcagcgaggcctggaccgccaggccggctccgcaggcggccgtcgacctggaagcgccgcccgccctggccgaggacgccagcctcgaccagctcaacgcgcaactcgacctgatccgccagcgcgttaccgccgacgccagcgacgacctcctcgccgagttgcgccagagcgcgctgcaagtccagcgtcaggccgacgccctgctcgcgctacgggtggccgacatcgagcggctcgacgatcagttgaaagtgatcggcccgccgcagcccgacgaggcggaaagcctcgccgcccagcgccaggccctgacccggcagaagaacgccctgctcgatgacgaacgccaggccacccagctcggccagtcgtcccgcgacctggcggcacagatcgtcaacctgcgccgcagcctgttcaactcgcagatcagcagccgcgcggcgacaccgttcagcccgagcttctggtcgaccctgatccgtcccaccgacgacgacctgcgccggctggacaagctgaaggcggaggccctggtcgccttcgacagcgccatcgcgcccggacaccgctgggccttcgccggaaccctgctggccaccgtgctggtctggagcttcggccgccgcctgctggagcgcatgcttacctgggcgatgatccgctggctgccggaaggccgcctgcggcgcagcgccctagccctggcggtcgggctggcgaccatcctgaccatcgtcggcgcggtgtcgctgatgcgctggggcctggaaagcaacgccagcctgagccccgacatggccagcctgaccgatcaactggtgagcctggcgaccttctgcgccttcatcgccggcctcggccgcgccctgctgatgctgccgcgaccatcctggcggctgccggcgatcccggacaggatcgccagcgccctcggcccgttcccggcgatcctcgcggtggcgctgatgctggtggccaccgaggaacggatcaacaacgtcaccggcaccagcctggccctgaccgtcgccctcaacggcctgaccgcgctggtcaccgcgctgatcttcgccgccgccctgctgcgctaccaccatgtgcggcgcaagcacgacctggagcggccaggcgggatcgccgggctgatccccttcgtcgcctcggtatggatcgcggcgatcctcctcgccctgttcaccggctacctctcgctggcctacttcctcaccggcaagctgctgtggatcagcgtgatcgcggccaccacctacctgctgatcgctttcttcggcgacatctgcgaaaccctgctctcgcccaagcatcccagcggcctggcgctggccaatgcgctcggcctgtcgccgcgccaccaggcccaggccagcacggtgctggccggcgtcggccgcaccctgctgctgctcaccgcgctgctgctggccttccttccggtcggctcgagccccagcgaactgctgcagggcttcgcccaactgggcgaaagcagcaagaccctgggcaacctgaacatcgtcccgcaggacatcctggtcgccctgatgctgttcgtcggcggcctgttcgccctgcgcatcgtcaagcgctggctgagcgagcggttgctgccggaaaccaacatggacgccggcatgcgcgcctcgctggtgaccctggtcggctacctcggcttcgtgctcctggcgatgctggtgatgtccaccctgcgcatcaacctgaccagcctgacctgggtggtcagcgccctctcggtaggcatcggcttcggcctgcaggccatcgtgcagaacttcatttccggcctgatcctgctgaccgagcggccggtgaaagtcggcgactgggtcagcctgggcggggtcgagggcgatatccggcggatcaacgtgcgcgccaccgagatccagatgggcgaccgctccacggtgatcgtgccgaactcgcagttcatctcccagaccgtgcgcaacgtgaccatgggcaatgccctcggggtggtcggggtgaacctgaccctgccgctggacaccgacgcgatgaaggtccgcgaactgctcctgcaggccttcgccgaacacccggcgatcctcgacgcaccggcgccctcggtgacgttcaaggatctcgccagcaacggcctggtgctcaacgccagcggcttcgtcaacagcccgcgttcggtggccggcgcgcgcagcgacctgctcttcaccatcctcgaccgcttgcgcagcgaaggcatcgcgctgtcctcgccgcagagcctgctgatgatccaggatggcggcccggccagcgccgcgcctgcgcccgcgacgcccgattga

SEQ ID NO: 321593 - DNA, 1041 bp, Pseudomonas aeruginosa
atgctgagcgtctacagcgacgatcatcgtctgcacttcggccagtcggaactggtcgacggcaagctgcaaccctgtttcgaaatgcccagccgggccgacaccgtgctggcccgggtgaagtcgcagaaccttggcgaggtgatcgcgccgaaggatttcggccgcgagccgctgctgcgcctccacgacgccgcctacctggacttcctccagggcgcctgggcccgctggaccgccgaaggccacagcggcgacctggtgtccaccaccttccccggccgccgcctgcgccgcgacgggccgatccccacggcgctgatgggcgagctgggctactacagcttcgacaccgaggcgccgatcaccgccggcacctggcaggccatctacagctccgcccaggtcgcgctgaccgcccaggagcatatgcgccagggcgcccgcagcgccttcgccctctgccgtccgccgggccatcacgccggtggcgacttcatgggcggctactgcttcctcaacaatgccgccatcgccacccaggcgttcctcgaccagggtgcccggcgcgtggcgatcctcgatgtcgactatcaccatggcaacggcacccaggacattttctaccgccgcgacgatgtgctgttcgcctcgatccatggcgatccgcgggtcgaatacccgtacttcctcggctacgcagacgagcgcggcgaaggcgccggcgagggctgcaaccacaactatccgctggcccatggcagcggctgggacctctggtcggcggcgctcgacgacgcctgcgtgcggatcgccggctacgccccggatgccctggtgatttcccttggcgtggacacctacaaggaagacccgatctcccagttcaagctggattcgccggactacctgcggatgggcgagcgcatcgcccggctgggcctgccgaccctgttcatcatggaaggcggctatgcggtggaagccatcggcatcaacgcggtcaacgtgctgcagggctacgaaggcgcggcccgctga

SEQ ID NO: 321594 - DNA, 1092 bp, Pseudomonas aeruginosa
atgcaatcgactcgcaagctgctggccggcctcgcgctggccgtttccgccgggctggtccaggccgcgccggaagtacggatctacaactggttcgactacatcgccccggacaccctgaagaacttccaggcgcagaccggcatcgcgccgaagtacgacgtctacgacagcaacgaggtgctcgaggccaagctgctgtccgggcattccggctacgacctggtggtgcccagcgacagcttcctgcccaactacctgaaggccgaggtgttccagccgctggacaagagcaagctgccgaactggaagaacctcaacccggccctgctcaaggtgctcgccggcaaggaccccggcaaccgctacgtgatgccctacatgtggggcaccaacggcatcgcctacaacctcgacaaggtccgcgcggtgctcggcgacgatgcgccgctggactcctgggacctggtgttcaagccggagaacctggcgaagctgcaacagtgcggcgtggccttcctcgactcgcccaccgaggtgatccccgaggtgctgcactatctcggcctgtcgcccaacagccaccagccggaagactaccgccgagccgaggagcacctggcgaagctgcgcccgtacatcacctacttcagttcctcgaagttcgtcagcgacctggccaacggcaacgtctgcgtggccatcgcctggtccggcggagctatgcaggcggccaaccgggccagggaagcgaagaacggcatacgcatcgagtaccgcatcccgaaggagggcgccgcggcctggttcgacgtgctggcgattccgcgcgacgcgaagaacgtcgagcaggcgcacgccttcctcgactacctgctgcgcccggaggtagtggcgccgatctccgactacgtggcctacgccaacccgaacaaggcggcggacggcctgatctcggcggagttgcgcgacaacccgaacgtctacccgccggaagaagtgcaggccaggctgtattcggtggaaatgctgccgccgaagctggagcggctgcgcacgcggacctggagcaagatcaagaccggcaagtga

SEQ ID NO: 321595 - DNA, 912 bp, Pseudomonas aeruginosa
atgcgtaagtccgccgatgccttcgccttccagaccatgctgttgctctgcgtgatctggggcatccagcaggtgaccatcaagtgggcggcgacggacatcgcgccggtcatgcaggcggccatccgttccggcatcgccgccgccctggtcggcctgctgatgtgctggcgcggcggctgggagggcttgcgccagggcaccctgggcgccggcctgctgaccggcacgctgttcgccctggagttcctgttcatcgccctcggcctgcaatacaccacggcttcgcacatgtcggtgttcctctataccgcgccgatcttctctgccctcgggctgcacttcctgcttcccagcgaacgcctgcggcccttgcagtggctgggcgtggcggtgtgcttcggcggcatagcggtggccttcggcggaggcctgtcgtgggcggaaatggatgggcggatgctgctcggcgacgctttcggcctgctcgccgggatgtcctggggcgcgaccacggtggcagtgcgcggcacccggctgtccgaggcaccgccaagcctgacgctgttctaccaattgttcgtggcatgcgccgggttattgctgatcgctcttttcagcggccagttcggcgaggtccgctggaccccggtgagcaccgccagcgtgctgttccagggcgtggtggtgtcgttcgccagctacttctgctggttctggctactgcgtcgctacctggcgaacaacctggcgatcttctccttcatgacccccctgttcggcgtcaccttcggtgtattgctgctgggcgagccgctcagcctgaacttcgtcgccggcgcggcgctggtcctcgccggcatcaccctggtcagcggcgagcagtggctgcgacgcctgctgcgacgctga

SEQ ID NO: 321596 - DNA, 1194 bp, Pseudomonas aeruginosa
atgtcccgtgattttcttcgttcgccgctggtcggcctgctcgcctgcctgctggcgctggtggtcgccatgggggtcggacgcttctccctgaccccgcaactgccgcacctgatccgcgaaggccagctcgacctgaccggcgccggcctgctggccgccgccaactacctcggctacctggtcggcgcgctggacgcgctgttcgcccgcgaagcgcggcaggcgcgcttacgcctgctggtcgggctatgggcctgcttcggcctgaccctggcctcggtctgggccgagggcttctggccgcacgcgctgctgcgcttcggtcttggcgtggccagcgcctgggtactgatcatggtcaccgccctcagccagcgcctcgccgcggaaagcggtcgggcccggctgggcgcgctggtgttcgccggccccggcatcggggtgatggtcaccggcctgctggcggcattgggcaacgccctgggccaggactcggtgttcatctggaagctcttcgccgacctcgcgctggtcctgatcctcatgctcctgccgctgctgccgcgcccggccgcacgcagcgccggccacgacgcgcctgccacggcaagcgagaacgccggcctcggccgcctgacctgggcctacggactggtcggcctcggctacatcatcccggccacctttctctcgcagatggccgcggcgcgtttccacgggcaatggcaggccgacctgttctggccctgcttcggcctggcctcggccaccggggtagtgctgatcagcctgcgccggcagcgcccggacggcacccgccgctggctggtcggcgcgctctggctacaggccctcggcgtgctcgcctgcctgctgccggggatcggcggactggccctgggggtagtgctgaccggcctgccgttcctcgccggcatgcaactggtgatgcaatacgcccgcgaactggcgccgcatacgccgcagcgcaacgccggccaactgaccaccggtttcgccctcggccagttgctcggcccgctgctggcggcgctcagcacgcatttcgccggcggcctgcaaccggcgctggcgctcgccgggctcggcctggtctccgccggcctgctgttgcgccggccgcactcgctcagcgtcgcagcaggcgtcgcagccactgctcgccgctga

SEQ ID NO: 321597 - DNA, 873 bp, Pseudomonas aeruginosa
gtggagttcggccagttgaggatcttccaggcggtcgccgaggaaggctccatcgcccgcgccgccgagcgcctgcaccgggtgccgtcgaacctgtcgacgcgcctgcggcaactggaggaacagcttggcgtcgacctgttcctccgcgaacgccagcgcctgcaactgtcgccggccggcaaggtcctgctggactacgccgcgcggctgttcgccctgcaggaggaggcgcgcgcggcggtgcaggggggcgaaccggtgggcgacttcgccctcggctcgatgtacagcaccgcggcgatccacctgccgccgcgcctggcggaataccaccggcgctatccggcggtgaacctgcaattgcagaccgcgcccagcggcgagctggtcgagtcgctgctgggcgggcgcctggatgccgtgctggtggacggcccgctggacttcgacggtctggagggcctgccgatgttcgaggagcgcatggtgctggtcaccgagaatggccacccgccggtgcgcggtcccgaggacgtggccggcagcgcggtgatcgccttccgcccgcgctgctcctatcgcctgctgctggagtcctggttcgccagcgcgcgggtgagcatgggccgggtgatggagatcgagtcctaccacagcatgctggcctgcgtggtggccggcggcggggtggcgctgatgccggtgtcgatgctgcaaagcctgccggggcgggagtcggtggcggtgcatgcgctggccgaaccgttcgcccgggcgaatacctggctggtctggcgcaagggcatggtcggcgccaacctgaaggcctggatcggtctcctgcaagggcgggaatcggcgttggcttga

SEQ ID NO: 321598 - DNA, 135 bp, Pseudomonas aeruginosa
atgaaactctggctgcaaaacctggcgtggcaactcggtgtcgcccttggcctgatcgagcccccgcgcatgcaacccatcccggtggaaaacgacgagcaacgccggcgcctcgccgcgcggcaacgtcgctga

SEQ ID NO: 321599 - DNA, 729 bp, Pseudomonas aeruginosa
atgagaatcgtcagccgcgaccgctggttcgaaacccggcacttctacaacggtatcagcctgatccacgagccctacgtgcgccccttctatcgctgcaacatgtggcatgtccagggccgcgagcgcgacgtgctggtggacagcggctccggtctggtcagcctgcgcgagcaactgccctggctcaccgaacgaccgctgctggcggtggccagccacacccacttcgaccatatcgccggccaccacgaattcgccgagcgcctggcgcatccggccgaggcggagatcctcgccgcgccggacggcgacaacaccctggcgcgcgcctatgtcggcgacgagatgttcgaggcgcatccggagtgcccgctgtgctacgccgaataccgggtgcgagcagcgccggcgacccgactgatcgacgaaggcgacgtgctcgatctcggcgaccgcgtgctgcaggtgctgcacacgcccgggcactcgccgggcggcatcagcctgtgggaagcggcgacacagacgctgttttccggcgacatcgtctacgacggtccgctggtcgaggacgcctatcattccaacctcgacgactatgccgccagcctcgcgcgcctgcgcgagctaccggtgcgcaccgtgcatggcgggcatttcgcgagcttttccggggagcgtttgagggaaatgatcgtcgcctggttcaggaaccacgatcgatag

SEQ ID NO: 321600 - DNA, 1383 bp, Pseudomonas aeruginosa
atggacgattccgaactctaccgctccctctgcgagatcctcggcgcccgtggcgtgcgcgacagtgccgcgctcgccgggcaggaccccggctaccatccgcagaacctcgccggaagcttcctggtcctgccggaaagcaccgaccaggtcgccgccgtggtgcgtctgtgccgccaggcgggacgcgccctggtaccccagggcggactcaccggcctggtcggcggcggcgccgcgcaagccggcgacgtgctgctctcgctgcgcaggctgaaccgcatacatcggctggatgcggccagccagaccctcgacctcgacgccggcgtcaccctcgaacaggctcaggcgctggccgccgaggccggactcgaccccggcatcgatctcgccgcgcgcggcagcgccagcgtcggcgggctggtcgcgaccaacgccggcggcatccgcgccttccgcttcggcaccatgcgccagcgcgtgctcggcctggaagcggtactcgccgacggcagcgtctacagcgacctgcgcgggctgctgaagaacaccaccggctacgacctcaagcagttgttcgtcggcgccgaaggcaccctcggcatcgtcacccgtgcggtactgcgcctggagccgttgcagcgtcccggcgccaccgccctgctcggcctgcccgacgtcgacgcggcgatcaccatcgccgcgcgcctgcgccgcgagcacgccgaacgcctgttcgcctgcgagatcctctggcacgactacctgcaatgcaccgccgcacccatgggcgacagcgcgccgagcctggcgccctgccctctctacctgctggtggaactggccgaggaccgccacctggatgccggcgaggcgctcaccgccctgctggaaggctgcttcgaggacgggctggtggaagacgccctgctcgccgccaacgaaacccagcgcctggccatctggcgcctgcgcgaagactccgacgcggccatccacgccggcgtcgacagcctgtccttcgacgtatcgctgccggtgccggccctggccggctacgtcgagcgcatccggcggcgcctggacgacctggtgaagggcatgcaggtcttcctcttcggccatttcctcgacggcaacctgcacgtcatgctcgccgccgacgtcccgctgctgccgctgcaccaggcggtggaggaaatcctctacggcgagttgggcgaatgcgctggcgtgatctccgccgagcacggcatcggcctggagaagaaggaagccctgggacgctacgccgatccgctgaagctcgcgctgatggcgcagatcaaggaactgctcgaccccagcgggctgttcaacccgggcaaggtcataccctga

SEQ ID NO: 321601 - DNA, 1602 bp, Pseudomonas aeruginosa
atgaccacctgcggcgaattcctcgtcaagcaactcgaagcctggggcgtcgagaccgtcttcggcatccccggcgtgcataccgtagagctctatcgcggcctgcccggcagccgtatccgccatgtcaccccgcgccacgagcagggcgccggcttcatggcggacggctacgcacgggtcaccggcaagcccggcgtgtgcttcatcatcaccggcccggggatgaccaacatcctcaccgccatggcccaggcctacgccgactcgattccgatgctggtgatctccagcgtcaacgaacgcgcgcgcctggcccacggcaacggctacctgcacgagctgccgaaccagcgcaacctggtaggcaacgtctgcgccttcagccataccctgatgagcgccgaggagctgccggcggtgctcgcccgcgccttcgccgtgttcgacagcgagcggccgcggccggtgcacatcgagctgccgctcgacgtcatcaccgcgcccgccgaacacctggccctgcgcccacgcaccgtcaccagccgcccggcgccggccctcgcgcccttgcgcgaggccgcggcgcgcctgcgcaacgcgaagaagccactgctgctgctcggcggcggctgcgtcgaggccgccgccgaagcgcgtgccctggccgccgcgctggacgcgccgaccgccctgacgatcaacgccaagggcctgctaccggccgaccacccgctgctgctgggcagcaaccagtcctgcgtgccggtacgcgagctggccgccgaggccgacgtggtgctggccatcggcaccgagctgggcgaaaccgactacgacgtggtgttcgacggcggcttcgccctcgatggcgagttgatccgcatcgacatcgacccgcagcaactgatgcgcaactacacgccgagcctggccatccacagcgacgcccggctggccatgcgcgtgctgctggccgaactgccgggcggcgaggcctcgccggacagccccggggcccggcgcgccgccgccgtgcgccagcgcctggccgaagacttcgccggctggtcgcactatcgccagctgttcgccgcgatcctcgccgagtggccggacgcccgcttcgtcggcgactcgacccagaccgtctacagcggcaaccacctggtcgatctcgacgagccgcgccgctggttcaacgcctccaccggctacggcaccctcggctatggcctgcccgccgccatcggcgccaagctcggtgagccgggacgcccggtggtcagcctgatgggcgatggcggcctgcagttcaccctgccggaactggccagcgcggtggaagccaaggtcggcatcgtcgtgctgctgtggaacaaccacggctatggcgagatcaagcgctacatggagcggcgcgagatcactccgctcggggtcgatatctacaccccggacttcctcgccatcgcccgcggcttcggctgcgccgccgaacgcgcgcgcgatctcgagcacctgcgcgaactgctgcgcggcgccccggcggaccgtccgctgatcgtcgaggtgctgcaagccgcgcccttccatccctga

SEQ ID NO: 321602 - DNA, 1392 bp, Pseudomonas aeruginosa
atggccctcgacatattcgtcgttctgatctacgccgcgggcatgatcgcgctgggctggtacggcatgcgccgcgccaagacccgcgacgactacctggtggccggccgcaacctcggccccggcttctacctgggaaccatggccgccaccgtcctcggcggcgcctccaccatcggcaccgtgcgcctgggctacgtccatggcatctccggcttctggctgtgcggcgcgatcggcctcggcatcgtcggcctcagcctgttcctggccaagccgctgctgaagctgaagatctacaccgtcacccaggtcctggagcgtcgctacaaccccgccgcgcgccacgccagcgccctgatcatgctggtctacgcactgatgatcggcgccacctcgaccatcgccatcggcaccgtcatgcaggtcctgttcggcctgccgttctgggtctcgatcctgatcggcggcggcgtcgtggtgctctactccaccatcggcggcatgtggtcgctgaccctgaccgacatcgtgcagttcctgatcatgaccgtcggcctggtgttcctgctgatgccgctgtcgatcaacgacgccggcggctgggacgccctggtagccaagctgccggccagctacttcgacttcaccgcgatcggctgggacaccatcgtcacctacttcctgatctacttcttcggcatcttcatcggccaggacatctggcagcgggtgttcaccgcccgcagcgagaccgtggccaaggtcgccggctccgccgccggtatctactgcgtgctctacggcatggccggggcgctgatcgggatggccgccaaggtcctgctgccggacctggagaacgtcaacaacgccttcgccagtgtggtcgagcacagcctgccgaacggcatccgcggcctggtcatcgccgccgccctggcggcgctgatgtccaccgccagcgccggcctgctggcggcgtccaccaccgtcacccaggacctgctgccgcgcctgcgccgcggccgcggccagtccgacaacggcgacgtgcacgagaaccgcatcgcgaccctgctgctgggcctggtagtgctcggcatcgccctggtggtcagcgacgtgatcagcgccctgaccgtggcctacaacctgctggtaggcggcatgctgatcccgctgatcggcgcgatctactggaagcgcgccaccaccgccggcgccatcaccagcatgaccctgggcttccttaccgtactggtgttcatgatcaaggacggcctcgacgccaatacgccgatctactacagcctggcggtcggcctgctcagcttcgtcctggtcagcctgttctcgcggcgcccgacgggtgtcgccagcgccgcctga

SEQ ID NO: 321603 - DNA, 1512 bp, Pseudomonas aeruginosa
atggataacaacaataaccaacacgcaatcacacgcatcgaaaccttcggggtcgaacagattcccgaccacgaacgcaacgccacgccggtcgatctgttccgcatgatcttcggcggcgccaataccttcgccaccgccgtgctcggcagctttccggtgctcttcgggctgtccttccaggccgggctgtgggcgatcctgctgggcgtcacgctgggcgcgctgatcctcgccccgatgggcctgttcggcccgctcaacggcaccaacaacgcggtctcctccggcgcgcacttcggcgtgcacgggcgcatcgtcggctccttcctctcgctgctgaccgccatcgccttcttctcgctctcggtgtggagttccggcgatgccctggtcggcggcgcccggcgcctggtcggcctggaagagagcgaactgaacctgggcctggcctacggcctgttcgccgtgctggtgctgaccgtatgcatctacggcttccgcttcatgctgctggtcaacaggatcgccgtgtgggccgccagcctgctgttcctgctcggcctgttcgccttcgccggccccttcgacgccgcctacgccggcagcgtgcaactcggccagccgggcttctgggccgccttcatcggcgccaccctgctggccatgagcaacccgatctccttcggcgccttcctgggcgactgggcccgctacatcccgcgccagacctcgcaggcacggatcatgctggcggtgatcggcgcgcagctggcgaccctggttcccttcctgttcggcctcgccaccgcgaccatcgtcgccgtccgcgcgccggactacatcgctgccaacaactacgtcggcggcctgctggccatcgctcccggctggttcttcctgccggtatgcctgatcgcggtgatcggcggcatgtccaccggcaccacttcgctgtacggcaccgggctggacatgtccagcgtgttcccgcgcctgctctcgcgggtgcaggccacggtgctgatcggagtcgcctcgatcggcttcatcttcgtcggccgcttcgccttcaacctggtgcagagcgtctctaccttcgccgtgctgatcgtcacctgcaccaccccgtggatggtgatcatgctgatcggcctgctgacccgtcgcggcttctaccgcccggacgacctgcaggtgttcacccgcggccagcgcggcggcgcctactggttcgagcacggctggaactggcgcggaatgggtgcctggattcccagcgcggcagccggcctggccttcgtcaacctgccggggcaattcgtcggtccgctcggcgaactggccggcggcatcgacctcagcctgccggtcgccctcggcctggccgccctgctctacctggcactgctgcgcctgttcccggaaccgccttgcgtctatggcccgcgaggaccgcgctgggtgcgcgcgcacggcacgcggagggcaccggcgatagccaccgcctga

SEQ ID NO: 321604 - DNA, 420 bp, Pseudomonas aeruginosa
atgaccgacgaccgcgtcgaacaggtgctggaggccgcccgccgactggtggcggccttcgcccgcaacgatgccgaggcctatttcgccgccttcagcgaggacgccagcttcatcttccacaactggcctcagccgctgcgctcgcgcgcggcctaccgcaagttgtgggagcgctggcgacgcgaggacggcttcgaagtgctggcgtgcgaatccagcaatacctgcgtcagcctgcaaggcgacctggcgatcttcagccacgatgtcgccacccggctgcgcctccagggaacggaaagcctgaaccgggaacgggaaaccatcctgttccgcctagaacaacaagaaggccgttggctggcctgccatgagcacttgtcggcgatgccggagtacctgccatcgactagctag

SEQ ID NO: 321605 - DNA, 960 bp, Pseudomonas aeruginosa
gtggacaagaatctccaccagcccctgggcggcaatgaaatgccccgcttcggcggcatcgccaccatgatgcgcctgccccatgtccagtcccccgccgaactcgacgcccttgatgccgccttcgtcggcgtgcccctcgacatcggcacctccctgcgctccggtacccgcttcggcccccgcgagatccgcgccgaatcggtgatgatccgtccctacaacatggctaccggcgccgcccccttcgactcgctgaacgtggcggacatcggcgacgtcgcgatcaacaccttcaacctgctggaagccgtgcgcatcatcgagcaggaatacgaccgcatcctcggtcacggcatcctcccgctgaccctcggcggcgaccacaccatcaccctgccgatcctccgcgcgatcaagaagaagcacggcaaggtcggcctggtccacgtcgacgcccacgccgacgtcaacgaccacatgttcggcgagaagatcgcccacggcaccaccttccgccgcgcggtggaagaagacctgctggattgcgaccgtgttgtgcagatcggcctgcgcgcccagggctacaccgccgaggacttcaactggagccgcaagcagggcttccgcgtggtgcaggccgaggagtgctggcacaagtcgctggagccgctgatggccgaggtccgcgagaaggtcggcggcggccccgtctacctgagcttcgacatcgacggcatcgacccggcctgggcgcccggcaccggcaccccggaaatcggcggcctgaccaccatccaggcgatggaaatcatccgcggctgccagggcctggacctgatcggctgcgacctggtcgaagtctcgccgccctacgacaccaccggcaacacttcgttgctgggcgccaacctgctctatgaaatgctctgcgtcctcccgggcgtggtgcgtcgctga

SEQ ID NO: 321606 - DNA, 894 bp, Pseudomonas aeruginosa
gtgtccaacgccttgcccgacctgcgcctgttgcgcatcttcgccgcggtggtgcgccaccagggcttcgccgccgcccagcaggagttgaacctgtcgacctcggcgatcagcacctacatgagccaactggagaaccagctcggcatcgtgctctgccaccgtggccgcggtggcttcagcctgaccagcaagggcgagctgttccaccaggaaaccttgcgcatcctcggcgaactggaaggcttcgaacgctacgcgctggcgttgaagggcgagctgcgcggcaccctgaacctcggcgtgctcgattccacggtgagcgacccggcgctgccgctggccgaggtgatcggcgccttcagccgcgaacacccggcggttcacctgcacctgctggtgcagagcccctacgaactgcaactgagcgtgctggagaaccgccaggacctggctatcggcgccttttccagtcgcatgaacggactggtctaccagccgctgtaccgcgaacagcactggctgtactgcagcgaccggcatccgctgttcgacgggcggagaattcccgccgatctgatcacccagcaacgcatggtcggccgcggctactggagccaggccgagctggcccggcacggattcaagcacagcgcgggaacggtggagagcatggaggcgcaactgatcctgatcctttccggcggctacatcggttacctgccggagcactacgcccacccgtgggtcgagcaggggcgcctgcgcgccctgctgccggcgaccttcggctaccaggcgccattctccctgatcctccgtcgcggccgctcgcgcgagccgctgatccaggccttccgcgaccagttgcggacgcagatgagcctggcctga

SEQ ID NO: 321607 - DNA, 255 bp, Pseudomonas aeruginosa
gtggtggccgacgaggtgcggcaactggcggaacgcaccagcaagtcgaccaaggagatcgccgacatgatcggtcgcatccagaccggcacccgcagcgtcatcgacgacatgcagcacagccaggaacaggcgcggcgcggcgtggagctggccaacgaggccggcgcggcgatccttggcatccgcgagagcacgcacaaggtggtagaagcggtgcagcagttctcgcgcaccctcaacgccgatctctag

SEQ ID NO: 321608 - DNA, 495 bp, Pseudomonas aeruginosa
atggagttgaacagccagccgccggcgatttccgcgaccatcatgcaggcggtgagcaataccgcccagcgcgtgttgcgctcggccagcgggttgccctggtcgaaccgatgggaatggcgcaggggctgggtagtcggggtgccgggcatttgctactgtcctgtcgagacgtcgaaaatatactataccccagtatattaccttgaggagagagcggtggcccataccatccatgggaagaagaagctcctggcgcgggtgcgccgcatcgccgggcagacccgggcgctggagcaggcgctggaagagggcagcgaatgcgcggcggtgctgcaacagatcgcggcgatccgcggtgcggtgaacggcctgatgaacgaagtgctggaggggcacatccgcgaacacctcggcgccgagcaggcgagcgcggagcagcgtcgcgaagacctggaactggtggtgaccgcgctgcgttcctacctgaagtag

SEQ ID NO: 321609 - DNA, 450 bp, Pseudomonas aeruginosa
atggccgccaaagtcgaacccttctggaaacgcaagaccctcgcccaactcgaccaggacgagtgggagtcgctgtgtgacggttgcggcctgtgctgcctgcagaagctcgaggacgaggacgacggcagcgtctactacacgcgtatcgcctgcaagctgctcgacctgcaaagctgccgctgcaccaactacgccgagcgcatccgtttcgtccccgactgtatccagctcaccccggcgcaggccgacgagttccagtggttgccgccgacctgcggctatcgcctggttgccgaaggcaaggacctgccgctctggcaccacctggtctgcggcgacccggagcgggtccacaaggaacgcatttcccagtccgggcgcatgctcagcgagacccaggtggccgaggacgactgggaggactacctgatcttccgcgccggctga

SEQ ID NO: 321610 - DNA, 528 bp, Pseudomonas aeruginosa
atggatgagcgcttccgtggttccgtctcgcatgcctatcaggcgttccatggcgagttgctgcgcttcctgcgcaagcacctgggcagttcggcggacgccgccgacctcgcccaggatactttcgcccagtggctgaaatggccgggccggcaatcggtcgagcagccgcgcgcatttcttttccagatcgcccgcaacctgttgcgcgaccattggcgccggcagcagagccgcggccaggatctcgaccggccggcggcgaacgacgaacccgccgcgctggaaggcgaggcggccgggccgggcgagcgtttcgaacagcagcagcgtctcagccacctggcggccgcgctggccgagctgccgccgcggcggcgcgaagcgttcgtcctgcacaagttcgacggcctgtcccaggtcgaagtggccgagcgcatgggaatctccctgagcatggtggaaaagcacatcgccagcgccttgctgcactgcaagcggcggcttggccagggaggcgaaggatga

SEQ ID NO: 321611 - DNA, 984 bp, Pseudomonas aeruginosa
atgaagccgctggaacgactggaaccgctgttcgcagacgaaaccgaagaggacatcgatcaccgcgccgcctactggttcagccggcgtcgttccgggcatttcagcgctgcctgccgggccgagctggaggattggctacgcgccgatccgcgccatcgcgaagcgctcgagggcatggagcggctctggcgcgaattcgacggcctgccgcgcccggcgctggacgatattcccgagccggtgccggcctggcgcctgccccgggcgctggcggcggcgttcttcgtgttctgcgcgctgctcgtcgccaccctgttctggcgcgaccagtcgctcggaccgaacctcgcctacggcacggcacctggcgagcagcgcgaggtggtcctggcggacggatcgaagctgttcctcgacgtcgatacccaggtgcaggtgcgttacgccgagcgcacccgcgacgtgctgttgaagaaaggcgaggtgttcttcgtggtcagccacgatccggcccggcctttccgggtcggcagcggcgacagccgggtcaccgtactcggtacccagttcagcgtccggcgcaacgcgcaggccctcgccgtggcggtgaaacaggggcgcgtggcgttgcagccgtccctggagaaggatgccgaacatgtgctgctggctggcgacagcgcgcgcctggacctcgccgagcagcgcctggaactcggccatgtggcgccggagcaggtcgccagttggcgcgatgggcaactggtgttccgcgacaagccgctgggcgaactggtggaggaactgtcgcgctatcgcgccgcgccgatccgcctgggagatccccggcttgccggcaagcgggtctccggtacggtgcggatcgcccgccccgacgattttctcctcgccctgccggcgctattgccggtgcgggtgcagccgcaggctggtggcgaggtgctgatcctggcgcgctga

SEQ ID NO: 321612 - DNA, 2556 bp, Pseudomonas aeruginosa
atgaccttgcctttcacccgcgccgcctggcgcccgctgtgttccgccgccgtgctcggcgccgcgttgtgggccgccggcgccagcgctgccgaacgacgcttcgacctgccggcgcagccgctggccgcctcgctgtcgcgcctggcgcagcaggcgcaggtccaggtgctgttcgacgagtcgctcctgcggggcctgcgcgctccggcgctgagcggcagctacggggtgcgcgaggcgctggagcggttgctggtcggttccgagctggagctggtggaggcgggcggcggctacgtggtgcgccggcgccaggtcgacgcctacagcgacaacgcgctgcaactggacgcgcagaccatcgtcggcaacggtcgcgaagtggacgccagcaacgtcggccgttcgaccctgacccggcgggatatcgaacgccagcaggcggacaacatccccagcctgctgcagaccctgcccggagtgaccatgggcggctcgcccaagccgggcggacagaccaccaacatctggggcctgggcgacgccgaggacgtgccctataccctggacggcgcgcagaagagcggcttcgagcgctaccagcagggcaccgtgttcatcgaaccggaaatgatcaagcgcatcgaggtggagaagggaccgcactcggtgttcaccggcaatggcggcttcggcggcaccgtgcacatggagaccaaggacgcgccggacctgctgcgcgaaggccgcgacgtcggcgccatgctcaagtacggctatcactccaacgaccagcagaagatctactccggcgccgtgttcggtcgcagcgaagaccgccgcgtcgatgccctgctctatctcaacggtcgcgacggccgcgacatgaagctggccgacaacctgccgctgtcgcccaccgactacccgatcaaccccaagcgcctgcccaacagcgcccaggacgagaagaccggcctgttcaagctcaacctgcaccccaccgaggagcacgacctgggtttcacctacctgcgctcgaaaagctcgcgctggacgccgttctccgccagcagctacccgaccccgccgagccagtggaccatcgaccgctacggctacgagctgggcctgacccgcctgctggcccaccgcgataccaccgacaccacctggaccggcaagtacaactaccatccgctggacaacccctggatcgacctgcaactgagctattccgacgcccgcaccgagcaactcgaccgtcgcgaggacaccgccttctaccagctcgccaccggtggcaaacggatgcgtaccgagtaccaggacaaggtcctggagctgcgcaacaccagccgtttcgataccggagcgctacagcacgagctgaccctgggcgcggcgctgcacaagcacaagcgcgacatcctcatgcacatgccgggcaagacctacgagaccccgcgctacaactacggctggctgcaaccggcattcatgccggccggcaagcaggacacgcagagcttctacatccaggacgcgatcacctacggcagcctgaccgtcaccccatcgatgcgcttcgacagcgtgcgcaacgacggccaggccaacctggcgccgatctacgacaatcccaagctcggccatgactatcgcgcccagacctactccggctggtcgccgcggctgtcggtgttctggaccgcgacgccgaacctggcgttcttcgccgactacaccgagacctggcgagcgccggtgatcgacgagcagtacgaagtgcagaacagttcgaccatcggtggcagcagccgcgacctggacgccgagcgcatccatgcgatccgtggcggcagcgtgatcaacctgccggacctgctggtcgccggcgacagcctgcagatccgcaccacgttgttccagaaccgcatcaaggacgagatattccgcacccgcagcgtcggctgccgccagcagtcgatcgacaacggcagtatcggtggtagctgcggcgacatgctgccgctgagcaactaccgcaacttgccgggcctgaccatcaagggcttcgagatcgagagcttctacgacagccagcggctgttcggcagcctgtcctactcgtggatgaccggcaagcacgatggggcctacagcaatccctggggaccgaacgtgtgggcgcgcgacatcccgccgccgaagtgggtggccatgctcggcctgaaggttccggaatgggatgccaagctcggctggcagggcgagttcgtgcgcaagaccgaccgcctgcccagcgatcgctacagcggcgggatgggtaccggttccggcgatatctactgggatcacgcggccaacgacagctacgacactcatcggctgttcgccgagtgggtcccggccaagctgggcctgaaggacacccgcatcgacttcaccgtggacaacctgttcaaccgctcctatcgccagccgctgggcggcgacctggtctacagccagggacgcaacgccaagatcagcgtcacccagttcttctga

SEQ ID NO: 321613 - DNA, 540 bp, Pseudomonas aeruginosa
atgggcctgctcgccgcgatcatgctggccgtctacctggcgaatccgttcggcaccgccagtctcgacccgcgcgcacggctcctcggcgtggcgctgtacaagatcccttcgcgctcgatggaaccgaccttgcaacagggcgacttcatcctcgccaacgccgcgcgctacgccttcgccgacccgcaggtcggcgacctggtggtgttccgcttcccgccgcagcgcagcatcgcctatgtgaagcgcatcgccggaatccccggcgatcgcgtgcggatcgatggcggccggctctacgtcaatgagcgcccggtgacggagccctacctggcgcaacaggcgctgcgccagccggactccctgcgcatggccgagcggaccgtccccgccggccactacttcatgctcggcgacaaccgcgacaactccaacgacagccgctactggggctacgtaccgcgcgccgacctggtcggccgggtgttcgccgtctggtatgccgaggacacccggcgcatcggttcggtgcactga

SEQ ID NO: 321614 - DNA, 2052 bp, Pseudomonas aeruginosa
atgccccatccgcagccccccatcgcccgccgcgacgccggaagcgacccctacgcctggctggaggagcgcgacgccccggaggtgctcgactacctgaaggccgagaacgcctacctggatagcgaactggccgaccaggccgggttgcgcgagaccctgttcgaggagatcaggggacgcatccgcgagaccgacctgtcgttgcccagtccgtggggtccgtggctgtactaccagcgcaccaccgccggcgacgaatacccgcgccactaccgctgcccccgtccggcggacggcagcctggcggtcgacgaaggcgccgagcaactgttgctcgatcccaaccagttggccgacggcggcttcctctccctcggcgccttcagcatcagccccgaccagagcctgctggcctacagcctggacaccagcggcgacgagatctaccgcctgttcgtcaaggacctcgccagcggcgcggtgcaggccctgcccttcgacgactgcgacggcagcctgacctgggccaacgacaaccgcacgctgttcttcggcgaactggacgacacccaccgcccgcacaagctctatcgccaccgcctgggcgaggccggcgccgagctggtgttcgaggaaggcgacgggcgcttcttcctgcactgctaccgctccagctcggaacgccagctgatcctcctgctcaacagcaagaccaccagcgaggcctgggtgctcgacgccgaccagccgcagggaacgttccgttgcctggcgccgcgcgaggaaggccacgagtactaccccgaccacggtcgcctcgacggccggggcctgtggctgatccgcagcaaccaggcggggatcaacttcgccctctaccaggccgaggagtcgcggccgactcgcgagcactggcaactgcgcgtggcccacgacccgcagcggaccctggaagatgtcagcctgaacgccgaggcggtgatcctcggcctgcgcgacggcggcctgccggttatcgaggtgcaaccgcagggcctgccggcctaccgcgtgcagttgccggacgccgcctacagcctctacgtgcaggacagcctggaattcgacagcccctgcgtgcgactgcgctacgaggccctgaaccgtccggcgcaggtacgccagctgaacctcgccgatggcacgcagaccgtcctcaagcagaccccggtggaaggcccattcgacgccgacgcctacgccagccggcgcatctgggccagcagcggcgacggcacgcaggtgccggtcagcctggtggcgcgcaaggaagtcctcgacggcatcgccgccgggcgccccgcgccgctctatctctatggctacggcgcctacgggcatagcctcgatccctggttctcccacgcccgcctgagcctgctcgaacgcggcttcgtctttgccatcgcccatgtccgtggcggcggcgaactgggcgaagcctggtaccgggccggcaagctggaacacaagcagaacagcttcgacgacttcatcgcctgcgccgagcacctgctcgccgagggctactgccgtcccgagggtctcgccatcagcggcggcagcgccggcgggctgttgatcggcgcggtgctcaaccagcgcccgcaactgttcggcgcggccatcgccgaggtgcctttcgtcgacgtgctgaacagcatgctcaatccggacctgccgctgaccgtcaccgaatacgatgagtggggcaacccgcaggagcccgaggtgcatgcgcggatcgccgcctacgcgccctacgagaacgtcagggcccaagactacccgcacctgctggtggtcgccggctacaacgacagccgcgtgcagtactgggaagccgccaagtgggtggcgaaactgcgggcgaccaggaccgacgccaacctgctgctgctcaagaccgacctcggcgccggccacggcggcatgagcggccgctaccaggggctgaaggacgtggcgctggaatacgccttcctgctcaaggtcctcggcctggtatga

SEQ ID NO: 321615 - DNA, 474 bp, Pseudomonas aeruginosa
atgaatgaacaagactatctgatcgcctggggcgcctacgccatcgccggactcggcctgatgctggtgttctggctgatgaccggctggatgtggcgctggctgcgcgaacccctgcggctgatcgtcttcatcctgctgttcacgccgactccggtggacccgcagaacgacctctacgccccggccatcgccatcaccgcgctggatgtcgtgttcaaggtcggcaacaacgcctggcgcgcggtctccgacctggccctggtggcgctgctcggtttcggcctgtacctgctgatcgccgccatccgctggccgctggagcgggcctggaagaatcgtcggcatccgtcgcaggacgccgaggacgagccgaccctgcggcagatgatgcagcccgagttgatgccggacgtcgacacccgcaccgacgagcacggcgaccggcgcatgcgcatcgagccgcgcctgtag

SEQ ID NO: 321616 - DNA, 462 bp, Pseudomonas aeruginosa
atgtcgggatttcccatggattgcgtgttctgcgccatagcgggtggccgcgagccggcgcacagactcttcgaggacgagcatttcatcgtcctgctggacatctttccgctgcgaccggcgcacgtgctgatcgtagcccgcgagcacgccccgcacctgagcgatctttccgccgccgcccgcgacgccctcctggcgctcgccgagcgtatcggtcgcgcattgcgccgggccggtttcggcgtggaaggcatcaacctgttgctcaacgatggcgtggcggccaaccagcacgtggcgcacctgcatctgcacctgattccccggcgtcgcggcgacctgccgcgactgctctggcgcgccctgacccgtttcctgccggtcggtcgcgcgagcctgcaggcgcgtctgcagcgggaacgagaactactacgtacagccttgctcagggaggtttga

SEQ ID NO: 321617 - DNA, 774 bp, Pseudomonas aeruginosa
atgtgtgaactattgggcatgagcgccaacgtcccgacggacatcgtcttcagcttcaccggactgatgcagcgcggcggcggtaccggcccgcaccgcgacggttggggcatcgccttctacgaaggacgcggcgtgcggctgttccaggacccgctggcgagcgtcgattcggaggtggcgcggctggtgcagcgcttcccgatcaagagcgagacggtcatcgggcacatccgccaggccaacgtcggcaaggtcgggctgagcaacacccaccccttcatccgcgaactcggtgggcgctactggaccttcgcgcacaatggccaactggccgacttccagcccaagcccggtttctaccgcccggtcggcgagaccgacagcgaggcggccttctgcgacctgctgaaccgcgtgcgccgggctttccccgagccggtgccggtggaggtgctgttgccggtgctgatctcggcctgtgacgaatatcgcaagaaaggtgtgttcaatgccctgatcagcgacggcgactggctgttcaccttctgctccagcaaactcgcctacattacccgccgtgcgccattcggcccggcgcggttgaaggatgccgacctgaccgtggacttccatgcggaaaccacgccggacgatgtggtcacggtgatcgccaccgagccgctcaccgacaacgagaactggaccttgcagcagagcggcgagtgggtcctctggtggggcggcgaggtgttggccaaggggcgggtctga

SEQ ID NO: 321618 - DNA, 525 bp, Pseudomonas aeruginosa
atgttccgcagttacctgagactgctgctgttcaccctgggcctgctgctcggggtgcaggtgcccggtttcatcgacgactacgccaagcgcgtcgacgcccatcgcctggaggccgcgcagaacatccagggcttccagcagaccgccgggcagttcttcaatggtagcctggaggaactggtcaggcattaccgcagcaacagcgatccggtgttccagcgcgacggcgagaacctcgaccgcctgatgcgtcgcgcgcgcatgctcgacgctgagtggcaggccatgcagggtccctggtacgcccgcgcctggcacatgctgcgcgcaccgaaccatgagttgctgatggaaacctatgccagctacagctaccaggtcctgctcaagcccgaggtgatcgcctggggcctgggctgcgccttgctggtcgcctggatcgccgagctgatcgtgtattcgctggcctcgctgttcggcttcggcgaagaccgccgcacccgcgagcgtcactggagctga

SEQ ID NO: 321619 - DNA, 861 bp, Pseudomonas aeruginosa
atgaatctcttccagctccgcgccttcgacgccgtcgcccgcgaaggcagtttcacccgcgccgccgagcgcctgtgcatcagccagccggcggtgaccggacacgtcaaggcactcgaggagcactaccaggtcaccctgttccggcgcaccgcccggcgcatcgaactgaccgaggagggctcgcgcctggtggcgatcacgcgcaccctgttcgccctggaggaagaagccgaggccctgctcgacgccaatcgacaattggtctccggccgcctcgaagtcgccgccgacggcccgcacctggtgatgccgatgctcgcccggctgcgcgcgagctatccgggaatcaccgtcaacctgcgcctgggcaacgcccaggaaaccctcgcggcgctgctcagcgaacacgtcgacgtcgccgtgctgaccgaggtcgaggcgcgtcccgggctgttcctggaggagttggtgaattcgcgcatctgcgccctgttgcctcgccagcatccctggtgcgaacgcaacgaaggcgtaccgctggaagagctcgaccagcagatcatggtgctgcgcgaacccggttcgatcacccgccgcaccttcgaccgcgcctgtgccgagcagggcgtgcagccgcgggtactgctggagctggacagccgggaagcggtgaccgaagcggtggccgccgaactgggcgtcggcgtggtgtcttccctggaggtcggcaacgatccgcgggttcgcgcggtgccgctggtcggtcccgagctgaccaaccgccacctgatcggctgcctggagaagcgccgcggcctacgggtgatcagggcattcctggaactggcggcggcctga

SEQ ID NO: 321620 - DNA, 1116 bp, Pseudomonas aeruginosa
atgagcactgccgaacgcgcacccatcctgctgacccccggtccgctgaccacctcctaccgtacccgtcgggcgatgatggtcgactggggctcctgggacagcgatttcaacgaactcaccgccagcgtctgccagcgcctgctgaagatcgtaggcggcgaaggcagccacacctgcgtaccgttgcagggcagcggcaccttcgccgtggaagcggcgatcggcaccctggtgccgcgcgacggcaaggtcctggtgttgatcaacggtgcctacggcaagcgcctggcgaagatctgcgaggtcctgcaacggcccttcagcaccttcgagaccgaagagaacgtgccgactaccgccgctgacgtcgagcgtctgctggccgccgatccggcgatcagccatgtggcgctgatccactgcgagaccagcaccggcatcctcaatccgctcgaggccatcgccaaggtcgtcgagcgtcacggcaagcgcctgatcgtcgatgccatgagctccttcggggcgatcgggatcgatgcccggaaagttccgttcgatgccttgatcgccgcctccggcaagtgcctggagggcgtccccgggatgggcttcgtcttcgcccgcagcgccgccctggaagccagcgccggcaactgccactccctggccatggacctgcaggaccagcacgcctatatgcgcaagaccgggcagtggcgcttcaccccgccgacccatgtggtcgccgccctgcacgaagcgctcagccagtacgaagaggagggcggcctgccggcgcgtcagcggcgctacgcgagcaattgcgaaacgctgctcggcgagatggcccggctcggtttccgcagcttcctgccggcggaaatccaggcgccgatcatcgttaccttccacgcgccgcgcgatccgcgctaccgcttcgccgacttctaccaacgcgtgcgggagaagggcttcatcctctatccgggcaagttgacccaggtggaaaccttccgcgtcggctgcatcggccacgtcgacgccggggagatgcggcaggcggtcgccgccatcggcgaggcgctgcgcgaactggaagtcctcgagatctga

SEQ ID NO: 321621 - DNA, 828 bp, Pseudomonas aeruginosa
atgaattacaaccagccagccaccctacaggccgccatcctcgactgggcgggaaccgtggtcgatttcggctccttcgcgccgacccagatcttcgtcgaggctttcgccgaattcggcgtccaggtcagcctggaggaagcgcgcggtccgatgggaatgggcaagtgggaccacatccgcaccctctgcgatatcccggcgatcgccgagcgctaccgcgccgtcttcggccgcctgcccagcgacgacgatgtcaccgccatctacgagcgcttcatgccgctgcagatcgaaaagatcgccgaacattcggcgctgatccccggcgccctgcaggcgatcgccgaactccgcgggatgggcctgaagatcggttcctgttccggttacccggcggtggtgatggagaaggtggtagccctggccgagaccaacggttacgtcgccgaccacgtggtggctaccgatgaagtgcccaacggccggccatggccggcccaggcgctggccaacgtgatcgccctggggatcgacgatgtggcggcctgcgtgaaggtcgacgacacctggccgggtatcctcgaagggcgccgcgccgggatgtggacggtggcgctgacctgctcgggcaatgccctgggcctcacctacgagcagtacaaggcgctgccggcggccgaactggagcgcgagcggacgcgtatcgaacagatgttcgaaggttcgcgtccgcactacctgatcgagaccatcgccgagctgccagcggtggtccgcgacatcaatgcgcgcctggcgcgcggcgagatgccgcagggtaactga

SEQ ID NO: 321622 - DNA, 912 bp, Pseudomonas aeruginosa
atggtcagcctcgaccgcttcgaaacctttcgcgccgtggtcgactgcggttccctcagcgccgccgccgacaccctcggccagacgcgtgcggtagtcagcttcaacctcaagcggctggaggccgagctgggcgtttctctgctcagccgcagcacccggcggatggccctgaccgatgctggcgaacgcttctaccagcgctgcgtgaaggtgctcgacgaggcgcgcctggccatcgacgacgcccgcgccgagcatggcgaactgcgtggcagcctgcgcgtcaccaccacccaggaatacggcctgcgccaactggtgccggccctgcaggcattcgcccggctgcacccggcgttgcaggtacaattgtcgacctcatcgctgcatgccgacctgattggcgaacgcttcgacgtcgcgatccgcctggggcgcctggaggactccacccaccatgcggtgcaactggccagcttcgaggtcctggcggtggccagcccggcctgcctggcggcgctcggcgaaccgccgccgaccgacctggagagtctggagcgcctgcagaatctcggtcacagccggctggcggactccctgccctggcaagtacgcgcccccgacggcgccctgcgcagctaccgcggaccgcgccatcccatgctgctggccgacaacgccgcggccctgcgcgcctttgccctcgacggcctgggtatcgccgtgctgccggactggctggtgcaggccgacttgcgctgcggcgcgctgcaacgcctgctggcggaccacgggtttccgctccagggcgtgcatgccgtttatccgccgacccgccacttgccgtcgaaggtccgcgcgttcatcgacttcctcaagactcgcctggggcacccggacgccggttag

SEQ ID NO: 321623 - DNA, 1359 bp, Pseudomonas aeruginosa
atgaatcaaccgtcccgcctggccactttgtacctgctggggttcgccctggacctggtgaacatcttcatcgccagcgtcgcctacccggacatcgggcgttcccttggcgcttcggtggcgaccctggcgtggatcggcaacacctacctgctcggcttgaccctggtgattccgttgagcgtctggctcgcttcgcgcctgggagaacggcgactgatgctgctggcactggccggtttcgccagcgcttcgctgggttgcggcctggctggatcggcggcgacgttgatcgtctggcgcctgtgccaggggttggccggcgggttactgatccccctcggccaggccatggcctatcggaatgtcccggcgtcggcacgggccggcctgaccgcacgggtgatgctggtggcgctgatcgttcccgccgtggcgcctgccctcggcggctggctggtggacagcctgtcctggcgtgggatcttcttcgccagcgtggcgccggcgctgctggtgctggccctggcgatgcgctggctgcccaggcacaagcatgcggcgcagcgcctggacctgcgcggcctgctgctcggctcggcggcgctggccacgctgctggtggcgctcgcctggctgggatcgcccggcggcggcgggcgtggcctgctcctggcgctgctggcctgcgtgctgggctgctgctactggcgtgacgggcgcgctcgtaccgacgcgctgctcgaccttggcttgctggaggcgccattgctgcgtacggcgatgctggtctatctctgcgtgccgggagccttcatgggcgccaacctggtcgccatgctctatctgcaaggccccctcggcctcagcgcgagccgtgccggtgcgctgatgctgccctgggcgctggcggccggcctggccatcggcctgacccggcgacgcttcaatcgctgggggccgaaatccttgctgctggcgggcattgcgatacaggccggcggcctgctgtggctggctcgaagcggggaggggagcggcttctggcaactggcgggggcctacgcgaccatgggattcggcggcagcctgtgtagcagcgcggcacagggcatggccttgctcgacgtcccggcggcgcgcatgggccatgccagcgccttgtggaacatcaatcggcaactggcgttctgcctgggcatggccgtgctcggtgggttgctcaacctgttgcaggcgcgggccgaccccgcggccttcgtccactgcttcctgttcgccgccgctttcacgctattgcctctgccgtgggtgaggcgtatcgattccgccggggttcgcgccctggtccagacctga

SEQ ID NO: 321624 - DNA, 387 bp, Pseudomonas aeruginosa
atgacttgtgcctaccgccgggaaatccaccatgcccacgtggcgatccgcgactggctggccggcgactcacgggctgacgcgctggatgcgttgatggcgcgtttcgccgaggacttctcgatggtcacgccgcatggcgtggtcctggacaagactgctctgggcgagctgttccgcagcaagggcggcacccgtcctgggctgcgcatcgagatcgactgcgagagtctgctggcttcaggcgtggatggcgcgaccctggcctatcgggaaatccagtccgacgcggcgggtcgcagcgagcgcctgtccaccgtagtcctgcaccgtgacgacgaagggcggctgtactggcgccacctgcaggaaaccttctgcggctga

SEQ ID NO: 321625 - DNA, 615 bp, Pseudomonas aeruginosa
atgcccgatcgccacgccgaacagcctgcccgccaaccgcgcaccaagcctgcggaggttcgtctcgaggaactgatggcggcggcgcagcaactgttcctagacaagggtgtggacgccaccaccatcagcgacatcgtcgctgccgcgggggtcgccaagggtaccttctatcactacttccaagccaagaccgacatcctcctggccctgcgcgagcgcttcacccaggctttccagcagcgcatcgcgaatgccgtcgaggcctgtccggcgaacgaccatcccggccgcctgcgcgcctggaccgagagcggcctggcgggctacctggagggctaccggctgcacgatgtggtctacagcgagcaccatcaccaccagcgcggcaaccaggagcgcgaccgcgtgctggagcaattggcggagctactggagaacggcgcggcggccggcgcctggccgctgcgcaacccacggctgaacgccctgctgctctactccgggctgcatggcgccgccgacgacgccatcgccggcggccgcctggatacccagccgctggccggcgaactcgccgatgccttcctgcgcctgctcggtgccagcgactga

SEQ ID NO: 321626 - DNA, 1542 bp, Pseudomonas aeruginosa
atgaacccttcgcgtcgtgtcgccctggtcgccgccatttacctgggaaccttcatcgcctcgctcgacatcagcatcgtcaacctcgccctgccgacgctgcagtacgccctggataccgacctggccggcctgcagtgggtggtcgacgcctatgcgctgtgcctgagcgccttcatgctgtcttccggaccgctgagcgaccgctacggtcgcaagctcacctggctgctcggggtcggcctgttcagcttcggttcgctgctctgcgcgctggccacctcgctgccgctgctgctgttcggacgcgcggtccagggcatcgccggggcgctgttgatacccggcgcgctgtcgatccttacccaggctttccacgatcccggccagcgcgcccaggtgatcggcggctggacctccttcagcgcgctgtcgctgatcctcggcccgctgctcggcggcctgctggtggagcacgccggctggcagagcatcttcctgatcaacctgccgctcggcctgctggcgctcgccctgggcctgtggggcatcgaggaaaccgcgcaccccgagcacgccgccttcgatcccctggggcagttgctcagcgtggtctggctgggagcgttgacctacgccctgatcgccgcgggagagggcggctggttgtctcccacggcctggccggcgctgctcctggccggggtcggcctgcttggcttcctcttcgtcgagcggcggaccgcccgaccgctgctgcccctggggttgttccaccaggccgggttcgccgtctgcaacctggcctcgttcgtcctcggtttttccggctacgccagcctgttcttcctctccctgttcttccagcaggtgcagggtgcctcggcgcagcaggccggcttctacctggcgccgcagttcctcgccatgggcgcactgtccatgctgttcggccggttgcagcggcacgtaccgctgcgacgcctgctggtgctgggctacctggtgatcggcctggccatgctggcgctggccgcttgcggtacgggaaccgcgtatccctgggtcggcctgttgctggtggcgctcggcctgggcatgggcctggccgttcccggcaccggtctggcggtcatggcgagcgtggcccgcgagcgttccgggatggcctcggcgaccatgaataccctgcgccaggccggcatggccgtcggcatcgcgttgctgggagcgctgctgagcgggcgggcgatcgtcgtcctgggcgatcggctggaggggctggggattgccgatgcgcaacggctcgccacccaggcggtcacgtcccatcgcttgcctggttccctggcggggctcgacgccgagctgccggccgcgctggccgagggcttccgtctggctatgctggtggccggagccagcgccctgctggccgccgcgctgctctggcgcctgcgcgttagcgccggcccggcggcggatacagttggcgcatctggacgaacggcaggggtacagttgcaggccgatagacactga

SEQ ID NO: 321627 - DNA, 996 bp, Pseudomonas aeruginosa
atgaccaaagcaaacccgtttgccgcattgaaatggctttccctggcgcccgcgctgctgctcggcggctgcgacatgaccctgttcaacccgaaagggcaggtgggcatggacgagcgcaccctgatcattaccgcgaccctgctgatgctgatcgtggtcatcccggtgatcgtgatgaccctggcgttcgcctggaagtaccgcgcctcgaacacccaggccgagtacaagccggactggcaccactccaaccgcatcgaggcggtggtctggctggtgccctgcgtgatcatcgcgatcctcggctggatcacctgggaaagcacccacaagctcgacccgtaccgtccgctggactccgaggtcaagccggtcaccatccaggccgtttcgctggactggaagtggttgttcatctacccggagcagggtatcgccacggtcaacgagatcgccttcccgaaagacaccccggtgaatttccagatcacctcggattcggtgatgaactcgttcttcatcccgcagctgggcagccagatctactcgatggccgggatgatgaccaagctgcacctgatcgccaacgaagaaggcgtgttcgacggtatctccgcgaactacagcggcggcggtttctccggcatgcgcttcaaggccatcgccacctccgagcagggcttccaggactgggtcgccaaggtcaaggcggcaccggccagcctgtcgatcggcacctatccggaactggtcaagccgagcgagaacgttccgccgacctacttctcttcggtcagcccggaactgtttggccacatcctcaccaagtacgagcaccacggcgacgccaagggtgccgcgcacggcgagcacgccggggctgagcacgaagccgccatgaccggtcacgacatgcaggacatggacatgcaagccatgcagggcatgaaagacatgaaggacatgcacatgcaaccgagtacccaggagtaa

SEQ ID NO: 321628 - DNA, 1977 bp, Pseudomonas aeruginosa
atgttcgggaaactgacactctcggccgtgccttaccacgagcccatcgtcatggtcacactggccgtcgtcgccctgctgggcctcggcgtggtcggtgcgatcacctactaccgcaagtggacctacctgtggaccgagtggctgacctcggtcgaccacaagaagatcggcgtgatgtacatcgtcgtcgccctggtcatgctggtccgcggcttcgccgacgcgatcatgatgcgcggccagttggccctggccgaaggcgccaaccacggctacctgccgccggagcactacgaccagatcttcaccgcgcatggcgtgatcatgatcatcttcatggccatgccgttcatgaccggcctgatgaacctggccgtgccgctgcagatcggcgcgcgcgacgtggcgttccccttcctcaactcgctgagcttctggctgctcgtggtcagcgccatgctggtcaacgtgtcgctgggcctgggcgaattcgcccgtaccggctgggtggcctatccgccgctgtcggagctggcctatagccccggggtaggggtggactactacatctgggcgctacagatatccgggatgggcacgttgctcacggggatcaacttcctggtcaccgtgttcaagatgcgtgccccgggcatgaagctgatgcagatgccgatcttcacctggacctgcaccttcgccaacatcctgatcgtcgcctcgttcccgatcctcactgctgcgctgggcctgctgtcgctcgaccgctacctggacatgcacttcttcaccaacgagctcggcggcaacgccatgatgtacatcaacctcttctgggcctggggccatcccgaggtgtacatcctgatcctgccggccttcggtatcttctccgaggtcaccgcgaccttcgccggcaagcgcatgttcggctacaagtcgatggtctgggccagcgccgcgatcaccttcctcggcttcaccgtgtggctgcaccacttcttcaccatgggttcgggcggtgacgtcaacggcttcttcggcgtggccaccatgctgatctcgatccccaccggggtgaagctgttcaactggctgttcaccatctacaagggccgcctgcgcttcagcacgccgatcctgtggaccctgggcttcatggtgaccttcaccatcggcggcatgaccggcgtcctgctggccatcccgggcgcggacttcctgctgcacaacagcctgttcctgatcgcccacttccacaacaccatcatcggcggcgcggtattcggctacctggccggcttcgccttctggttcccgaaagcgttcggcttcaccctcgacgagaagtggggcaagcgttccttctggtgctggctggtgggcttctacatggccttcatgccgctctacatcctcggcttcatgggcatgacccgtcgcctgaaccactacgacaacccgctgtggaagccctacctggtggtcgcgttcttcggcgccgtgctgatcttctgcggcatcgcctgccaactgatccagctgttcgtctcggtccgcaaccgcaagcaactggccgacgtcaatggcgacccgtgggaaggccgcaccttggaatgggccacttcctcgccgccgccgttctacaacttcgccgagctgccgaaggtacaggacgtggatgccttccacgacatgaagaaggccggcaccgcctaccgcaagctgccggcctaccagccgatccacatgccgaagaacaccgccgcgggcttctccatcgccgtgttcgccttcgtcttcggcttcgccgccatctggcatatctggtggctcatggcggtcggcttcgtcggcatgatcggctccttcatcgtgcgcagctacaaccaggacgtcgactactacgtccagcccgaagagatcgagaagatcgaaagcgcccgtttccagcaactcgccaagcaggtctga

SEQ ID NO: 321629 - DNA, 630 bp, Pseudomonas aeruginosa
atgtcgacggcagtattgaacaagcatctggccgacgcccacgaagtgggccacgaccacgatcatgcacacgatagcggcggcaacaccgtattcggtttctggctctacctgatgaccgactgcgtgctgttcgccagcgtcttcgccacctacgcggtgctggttcaccacaccgccggcggccccagcggcaaggacatcttcgagctgccctacgtgctggtggaaaccgccatcctgctggtttccagctgcacctacggcctggccatgctctctgcgcacaagggcgccaagggccaggcgatcgcctggctcggggtcaccttcctgctcggcgccgcgttcatcgggatggagatcaacgagttccaccacctgatcgccgaaggtttcggcccgagccgaagcgccttcctgtcgtccttcttcaccctggtcggcatgcacggcctgcacgtcagcgccggtctgctgtggatgctggtgctgatggcgcagatctggacccgcggcctcaccgcgcagaacaacacccggatgatgtgcctgagcctgttctggcacttcctcgacatcgtctggatctgcgtcttcaccgtcgtctacctgatgggggccctgtaa

SEQ ID NO: 321630 - DNA, 336 bp, Pseudomonas aeruginosa
atgagcagcgctgcacacgacaaccacggcgccggccacggcagcctgggttcctacgcgatcggcttcgtgctctcggtgatcctcaccgcgatcccgttctacatggtcatggacggcggcttctcgcgccacgcgaccatcctcaccatggtcgtcctcggcctggtgcaggtggtggtgcacctgatctgcttcctgcacatgaacatgtcgtcggaagggcgctggaacgtgatggcgttcatcttcacggtgatcgtcatcctgctggtggtcggtctctcgctgtggatcatcttcagcgccgacatgctgatgatgccgatgccctga

SEQ ID NO: 321631 - DNA, 891 bp, Pseudomonas aeruginosa
gtgaagctgaaacgctatctcctggtggccaagccgggaatcatcttcggcaacctgatcgcggtggcggggggatacttcctcgccgcccgcggcagcgtcgagccgatgctgttgctggccacggtcatcggcctgtcgctggtggtcgccagtgggtgcgtgctgaacaactgcatcgaccgcgacatcgaccggcacatggagcggacccgcgggcgggtcaccgtgaccgggcagatctcgctgaaggctgccctggcccacggcctggtcctcggggtcgccggcttcggcctgctgtggtggcggaccaacccgctgaccaccgcgctggccggcttcggctacttcgtctacgtcggcctgtacagcctgtggttcaagcgtcgttcgcagtacggcacgctggtcggcagcctctccggggcgatgccgccggtggtcggctactgcgcggtgagcggccagttcgacgccggcgccgcctcgctgctggcgatcttctgcctgtggcagatgccgcactcctatgccatcgccatcttccgcctgaaggactacgaggcggctggcatcccggtgctgccggtggcgcgcggcatcgcggtgaccaagatccacatcgtgctctacatcctcgccttcatggcggcgaccctcgccttgtgcctgggcggctacgccggctacggctacctgctggtggcggtggcggtgagcctgtggtggctggccatcgccctgaccggctactggaccgccgacgaccgggtctgggcgcgcaagctgttcgccttctccatcgtcgccatcaccgcgctgagcgtgatgatgtccatcgacttccaggtggcgcccgccacccatctggtcgcctcgctgttctga

SEQ ID NO: 321632 - DNA, 2199 bp, Pseudomonas aeruginosa
atggatcgtcgcaacgagccgtcccccttgcccaccaaacgcccgctggcgccgctgatgctgttgatggccgcctgctcctcgccggccctggccgaggacgcggcgcgcaaggacgatcccctggaactgggagccgacacggtcaccggcgagcaggcctcgtccagggtcgaacgctcggcctcggccaagtacgccgtgccgctgctggataccccgcagaccgtcacggtggtgccgcaaaaggtgatccaggagcagaacgccctgagcctgcgccaggtgctgtccaacgtctccggcatcaccttcaacgccggcgagggcggcggcggttccggcgacagcatcaacatccgcggcttcagcgccaacgccaacatgcaggtggacgggctgcgcgacagcgcccagaccagccgcagcgacctgttcaacctggaggcggtggaagtgatcaagggaccgaactcggtgttcggcggcgccggcaccagcggcggcagcatcaacatggtcagcaagcagcccaaggccgaagccttcacccacctgggcgccgggctgggcacggaccgctaccggcgcctgaccctggacaccaaccagccgctggaagggcttggcgaatcgaccgccttccgcctcaacctcatggcccgccacaacgacgtcgccgggcgcgaacagatcgacaagcagcgctggggcatcgcgccatccctgaccttcggcctggacaccccgacccgcctgaccctgagctacttccaccagcgcgacgacaaccttcccgactatggcgtgccggcgctgaacgggcgcaagctggacggcgtcagccgccacgattatttcggctggcgcaacctggacgaggaacggatcgacaacgacgtcgccaccctcaagctcgaacacgatttcagcgacgacttccagttgcagaacctcatccgctattcccacctgcatcgggacacggtgatctccgcctcccacgtcaaccagaagggcctgccgccgggtcgctacctgccggcgggaccgcaagcctacgggcgcgattcgaagacgcggatgtggatcaaccagaccaacctcaccggccgcttcgataccttcggcctggcgcatacgctgatcggcggcttcgagctgtcccgcgagacctacgaccgcaccacctactcctacaacctgggcaagttctacccggccaacggcttcgacctgcacaacccgccgggctactggaacggccccaccgacaagcgcgacagcgcgcgcaaccggaccgaactggaggtcaaggcgctgtacgccttcgacaccatcgccctggacgagcgctgggacctcagcctgggcctgcgctacgactggatcgacggcacctcgcggagcacgccctcaggcaagccgacggtgcgcgccgacagttccgacggcaagctgagcacacgggcggggctggtattcaagccgctggagaacgggcgggtgtacttctcctacggcacctccttcaacccctcggcggaacacctggtcactaccggctcgggcgtgaccgaggcgaccggaggcctggcgccggagaagaacagtacctacgagctgggcaccaagtgggagttcctcggacggcgcctggagctggacgcggcgctgttccaggtgaagaaggaggacgctcgcgaacgcctggccgacggcagctacgtgcttgccggcgaacagcgcgtgcgtggcctggagctgagcgccagcggcaagctgaacgagcactgggacctcttcgccacctacacctacctcgacagcgaaaccctgaaatccagcaacccgcagcgtgagggacaggccctgggcaataccccgccgcgctcgttgagcctctggagcacctacgaactgcccgagggcgtgaccctgggctatggcgcacgctacgtcagccagcgcaacgtcacctcggtggacaacggcaagctggatgcctactgggtgcacaacatgatgctcggctaccaggcgacgcgcgacctgaaactgcaactcaacctcgacaacctgttcgacaaggcctacgtcgagcgggtgcgccaggtgtacggcaaccagtcgcgctcctcggccatcgagtatggcgacgatcgcacggcgattctttcggcgatctacgcgttctga

SEQ ID NO: 321633 - DNA, 333 bp, Pseudomonas aeruginosa
atggcacgcaaaaacgcagtgaaagacaacctcgagcagatccagcaccagagctacagcgagctgcaggaactgctctccgaagccaacagcatgctcgccgacagcgccgccttcgccggcgacaaggccgatagcgcccgtgcgcggatcggcgcgctgctggagaaggccaacgacgccctcggcaagggcggtagcgccgtggccgaacgcagccgccacgcggtggatgcgacggaaagctacatcggcgccaatccctggcagacggtggccatcaccaccgcggtgggcctgctcgccggcttcctgctcggtcgccgctcctga

SEQ ID NO: 321634 - DNA, 513 bp, Pseudomonas aeruginosa
atgctttcgatcaagaagaacctcggcctcctggccatgaccgcggccctggcggcctgcgcctccaaccccaacgacctgccggatttcccggagcatgaatacgcggcgacccagcaggtgggcgagggcgtgatcaacggcgacctgtacctgaccagcgcgtcgggtgcgatccagaaggggaccaacaccaaggtcaccctggagcctgcgaccagctacatgaaggcctactacgcgaagttcggcaacctcgatgccgccaagcgcgatcccgacgtgcaaccgccggtgctcgacccgcgacgcgccacctacgtgcgcgaggcgaccaccgaccagaacggtcgcttcgacttcgaccacatccccaacggcacctactacatttccagcgagctgacctggagcgcccagagcgatggcaagaccatcaccgagggcggcaccgtcaccaagctggtcaccgtgagcggctcgcagccgcagaaggtgctgctgacccgctga

SEQ ID NO: 321635 - DNA, 408 bp, Pseudomonas aeruginosa
atgcagcaccagaccctccagaacctcgttggccgggccgacgccctgatcaatgccgggcagttcgatgccctgatggatttctactgcgacgacgccaccctggtggtcaagccgggcctcaacgcctgcggcaaggcgcagatccgccaggcgttcgacgccatcgcccggcacttcgagcacagcctgcgagtgcgccagcacgacctgcgggtgatcgaggcgggagatacggcgctggtcatggccgaggcggtgatcgagtcgaaggccggacgcctgcaacgtcgggccacctacgtgttccgccaggaggccgatggccagtggcgctgcgcggtggacaactcctacggcaccgacctgctggcctcggtggcggcgagcgcggaggccagccgatga

SEQ ID NO: 321636 - DNA, 1548 bp, Pseudomonas aeruginosa
atgagcgcctcgaccctcagcgcaagcaaacccctgctggccggctacgtggaaagcatcctggccgcgccggtgtacgacgtcgccgtggaaacccccttgcaggtcgcgccgcagttgtcccagcgcctgggcaaccgggtgctgctcaagcgcgaggacctgcagccggtgttctccttcaagatccgcggcgcctacacccgtgtcgcgcgcctgagcgacgagcagaaggcccgcggggtgatcaccgcctccgccggcaaccatgcccagggcctggccctggcggcgcagcgcctgggcgtgcgggcggtgatcgtgatgccgcgcaccactcccgaactcaaggtcaagggcgtgctggcgcgcggcggcgaggcgttgctgcacggcgacgccttccccgatgcgctggcccatgccctgcaactggccgagcgcgaaggcatgaccttcgtcccaccctacgacgatccggacgtgatcgccggacagggcacggtggcgatggagatcctccgccagcatagcggccgcctcgacgcgatcttcgtgccggtcggcggcggcagcctgatcgccgggatcgccgcctacgtcaagcacctgcgtccggatattcgcgtgatcggcgtcgagccggaggattccaactgcctgcaggcggcgctggccgccggcgaacgggtggtgctgggccaggtcgggctgttcgccgacggggtggcggtggcgcagatcggcgcttgcaacttcgaggtctgcaaggaccatgtcgacgaggtgatcaccgtcggcagcgacgaaatctgcgcggcgatcaaggacatctacgacgacacccgttcgatcaccgagccggccggcgccctggccgtagcggggatcaagaagtacgtggcccgcgaacgcaccgaggggcagaccctggtggccatcgactccggtgccaacatcaacttcgaccgcctgcgccacgttgccgagcgcgccgaactgggcgaacagcgcgaagcgatcatcgccgtcaccgtggccgagcggccgggcagcttcaaggccttctgcgcggcgctgggccggcgccagatcaccgagttcaactaccgctaccacagcgaccgccaggcccacctgttcgtcggcgtgcagacccatccgctcaccgacagccgcgccgacctgctcgccggcctgcgcgagcagggcttcccggtactcgacctgaccgacaacgagatggccaagctgcacatccgccacatggtcggcggccacggtaccgaggtgcgccgcgagcggctgttccgcttcgagtttcccgaacgccccggggccttgctgaacttcctcgacaagctcggctcgcgctggaacatcagcctgttccactaccgcaaccacggcgccgccgacggtcgggtgctggccggattgcaggtgccggacgaggagcgcggcgagctggaggcggcgttgcaagccatcggctatccgtactgggaggaaacccacaacccggcctaccggctgttcgccggttga

SEQ ID NO: 321637 - DNA, 1929 bp, Pseudomonas aeruginosa
atgcgcaagcgcaacccccggcgggccacgccggaagaactgcgggtctgctcggtactgaaggaaaagggcacccgcgaggaactcgcccacctcgccgcccgcggtgagtggagcaacgtgccggcgtacaacgccagccgcgagcagatcgccgaccacctgggcaagagcgtgtcgccggaatccgacgcctcgttcttcgactcgcggcgcttcagcgaggcgatcgtcctgctcaagagccggccggtgctgctggtgaagaacggtatcttcgacgaagcgccgctggccggcctggagcagcgcctgaagaagcatcgcgccgcgctggccacgccgatccgctcggtcggtcggctggaattgatcgaccacgacagcatggactggtgcggtaccggctggcgcatcgaggacgacctgatcgtcaccaaccggcatgtcgccagcctgttcgccgaacgccagggcagcctgttccgcttccgtctcaaccaggccggcaagcaggtgcgcacccgcgtggacttccgcgaggaataccgccagccggaaagcgacgagcatgtgatcgcgcgggtcctgtggattgccccggacgtctccgaggcgccggacatggcgatcctccaggtagtgaagggcgacctgctgccgccgccgctggtcctcgcgcgccaggatgccgagccgcgccaggcggtggcggtggtcggctatccggcgcgcgacagccgcaacgacgccggggcgatggaagatatcttcggcaacatctacgacgtcaagcgcttcgctcccggcgaagtcgtgggattgccccatgacgcctggtacctgacccacgactgctcgaccctgggcggcaattccggctcggcggtgctttcgatcgacggcggcgaggtggtcggcctgcacttcggcggccagttccgcaagaccaactatgcggtgaaggccagcgtgatccgcagcctgctggcgcgtcgcgcctgggtgccggtggccggggcggagctgaagcgcggcgtgccgcgcttccaggaaaagcagcgcagcgtcgccgacctggccgagcgcaagggtttcgacgaggccttcctcgggccgaaggcggccttgcccaagccgggcaagagccaccaggtgctgccggtgggcaagggcacgcgcctggactatctgcatttctcggtggtgatgagcgccagccggcgcttgccgatcctcaccgcggtgaatatcgacggcgcgctcaagcgttcgctcaagcgcaaggattcctggggcttcgacccgcgcatcgaggcggccgcgcaggtcggacacaaggacttctacggcccggcttcgttcgacaagggccacatggtgcgtcgcgaggatcccggctggggcgacagcgatgccgtcgcccggcaggctgaggacgacaccttcgtctacaccaacgcggtgccccaggtggcgcagctcaaccagcgcagctggctgtcgctggaggactacgtgctgcagaacgccaggagcgagggcttccacatctcggtgttcaccggcccggtgttccgcgacgacgatccgctctaccagggcgtgcaggtgccgctggagttctggaaggtggtggcgatgatcgacgccgacagcggcgaactgggagtgtccgcctacctgctggggcaggaagggatgatgcccagcgaaggcttccgctacggtgcgttcaagacctaccaggtgccgttggcgaaggtcgaggccagcgccgacctgcgtttctccagcgccctgcgcaaggccgacgtgctcgccggcacgccgctggaggaggcgctggaaagcggtcgcttcatcgagatcgacggaccggacgacctcctgctgagccggccggggccggccggcaagggccgctga

SEQ ID NO: 321638 - DNA, 909 bp, Pseudomonas aeruginosa
atgaatcgacgcgatcccctcgccggcctgcatgtcttcaggcaggtcgccgacaccggcagcttcacccgcgccgccgccctgctcggggtgacgccggcagcggtgagccaggcgatcaaccaactggaagccgagctgcgtctcaagctgttccaccgcaccacccgcggggtcagcctgagcgaggccgggcagcgctaccacgaacagaccgaacagccctaccgcgacctggtgcgcgcccgcgaagcgctcggcgaaagcctcgcggaaccctccgggcagctgcgcatcagcgccctgcacctggcgaagaacctggtgatcgcaccgatgctcaacgagttcgtgcgacgctacccgaaggtacaactggagatccgctacgaggaccagttggtggatatcgtcagggaacgactggatgccggcatccgcctggccgacgccctgcagccgggcatggtcggggtgcaactgacagcgccgctggcgtgcctgctggtggccactccggcctacctcgccgagtacggtacgccgaccagcgtcgccgacctcgatgggcatgccgccgtgcgcttccgtttcccgcgcagcggccgcctgcacaagtggcgcttgcgggaagacgggcgggaactggaagtggacctgccggcacgcttcgtcagcaccgacaccgaggcgatcatcgaggcggcccgcgccggcgcagggatcgcccaggcattcatccgcgagcgggtcgccgcggacctcgccgccgggcgcctggtggaagtgctgcctggcagttgcctgccgctgccgccgatgtggctgtattacctgaaccgccgccacgtaccggccaagctgcgcgccttcatcgaactgctacgcgagtggcggcagccggcctga

SEQ ID NO: 321639 - DNA, 417 bp, Pseudomonas aeruginosa
atgtctacccacctatctctgcaacatgcccaacgctgcatcgcggcggccattgccgaagcgcagcggcagcgcctggcggtctgcgtcgcggtggtcgacgcccatgccaacctgctggcgttcgtacggatggacgacagcgttcccggtgccatcgacctggcccagcgcaaggcgcgcagcgccgcgctgttccgcctgcccagcggcgagctgggccgactcgccgggccgggccagccgttgtggagcatcgagcagagcaacggcgggctggcctgcttcgccggcggcatgccgctgggcgatgccggcggttcctgcctgggtggcgtcggcgtctccggcgccagcgcggcccaggaccaatccatcgccgaggccgccgtggccatggcaacaatccagaggtaa

SEQ ID NO: 321640 - DNA, 780 bp, Pseudomonas aeruginosa
atgaaacagaagcgaatcctggtgaccggggccggcagcggcttcggtcgggaagtggcgttgcgcctggccgcccgcggccatcggacgatcgccggcgtgcgcggcgccgggcaggccgccgacctgcgcgaagaggccgggcggcgtggcgttccgctgcgggtggaaaccctcgacatcaccgtcgccgccgatcgcgaacgcgcctgggaatgggatatcgacgtgctgctgaacaacgccggcagcgccgaggccggggccagcgcggagatcccgctggaactggtgcgcgcgctgttcgagaccaacgtgttcgccaacctggaactgacccagggtttcgtccggcgcatggtcgagcagaagcgtggcggcaaggtgctcttcgtgtcgtccatcgccggcctgatcaccggaccctataccggcccctactgcgcctccaagcatgccctggaggccttcgccgaggccctgcatgccgaactgaagccgttcggcatccaggttggcaccatcaatcccggcccgtaccagaccggcttcaacgatcgcatgatggaaacctggaaacgctggtacgacccgcagcgccacttcaccgaccacagcggcgtgcgctttcccttcgagcagtacgatccggaggaaatgatcgcgcggatggtcgagctggccgaggctgacgaaggcccgttccgcaccctgttgccgcaagctttcgtcgaggtggtgaaggacgagcaagcgcaggcctggcagcgccgcctgtag

SEQ ID NO: 321641 - DNA, 1548 bp, Pseudomonas aeruginosa
atggaatggatagctgacccgactgcctggctcggcctggcgaccctgatcgtgctggagatcgtcctcggcatcgacaacctggtgttcatcgcgatcctcgccgacaagctgccgccgcacctgcgcgaccgcgcccgggtcctcggcctgtcgctggcgctgctgatgcgcctgggcctgctggcgagcatctcgtggatggtgaccctcaccgagccgctgttcgaggtattcggcaagagcttctccggccgcgacctgatcatgctgttcggtggcgtgttcctgctgttcaaggccaccatggagctgcacgaacgcctcgaaggccatgtcgcccagcacgccggcaacaagacctacgcgctgttctggccgatcgtcgcgcagatcgtggtgctcgacgcggtgttctcgctcgacgcggtgatcaccgcggtgggcatggtcgagcacctggaagtgatgatgatcgcggtgatcgtctccatcggcctgatgatcgtcgccagcaagccgctgacccgcttcgtcaatcgtcacccgacggtgatcatgctgtgcctgggcttcctgatgatgatcggcttcagcctgaccgccgagggcctgggcttccatatcccgaaaggctacctgtacgcggccatcggcttctcgatcctcatcgaggtgttcaaccaggtcgcccgcaagcgccgcaagaagagcctgcagggccaccgcccgctgcgcgcgcgtaccgcccatgcggtgctgcgcctgctcggcggccagcgcctggaggccgacgaggtcggcgaggaagtcgccgacctgttcgaggagggcgacgaccaggtggtcttcgaccgccgcgagcgggtgatgatcagcggcgtgctgcaattggccgagaagcccatccgcagcctgatgacggtacgcgccgaggtcgactgcatcgacctcgacagcggccgcgaggcgatccgcgcggcgctgctcgaatcgtcctactcgcgcctgccgctggtgcgcgacgggcgcgtcgaggagccgctgggctacgtgcacaagaaggaactgctcaaggagctgctcgccggcgcccagccggacctggaaagcctggcccgccagccgctcaacctgttgcaggactgctcgatcctcaacgccctggagcagatgcgcgaggcctcgacccacgtggccttcgtggtcaacgagttcggcgagttcatcggcctgctgaccctgaccgacattctcgaatccatcgccggcgagctgcccgacgccagtgagatcgacggtccggacgtggtcgaggagaacgacggctatctggtcagcggtgccatgaacctcagccaggtgcgtcgacgcgtggggttcgacgcgcgcgccacggaggactaccagaccctcgccgggctggtgatgagcctgctcgaccgcctgccggtgatcggcgaccgcctgcagtggcaggactgggaactgcgggtggtggaagtggaagaacgccgggtgacccgggtcctgctgcgcaggggctga

SEQ ID NO: 321642 - DNA, 624 bp, Pseudomonas aeruginosa
atgagcaccgaggatttcgacgcgatcaccgccaccaccctggccgactaccagcgcaacgccgaaggcttccgcgagggcacccgcggccacgacgtgagccagaacgtcgaggcgctgctgcgccaaatcgacgggccgccgccgtaccggatcctcgatttcggctgcggtcccgggcgcgacctggccaccttccgccgcctcggccaccaaccggtgggactcgaaggcacgccgcgcttcgtcgagatggccagggccgacagcggttgcgaggtatggcaacagaatttcctggcgctgcgactgccggctgggcacttcgacggcatcttcgccaacgccagcctgttccatgtgcccggcagcgccttgccgcgggtgctcggcgaactcttcgaagcgctgcgaccgggcggcgtgctgttcagctctaacccgcgcggcgacaaccgcgagggctggaatggccaacgctacggtgcctaccacgattacccggcctggaaacgcctgctggaggaagccggtttcgtcgagctggagcactactaccggccgccgggcctgccgcgcgagcagcagccctggctggcgagcgtctggcggcgccccgtctga

SEQ ID NO: 321643 - DNA, 207 bp, Pseudomonas aeruginosa
atgagcaagtccctgatcgtctccctggccgccagcctggtcgtcctgaccggttgcgccaacccgccgcgcagcgtcgaacgcccctacagcgacgccgaaatcaagtcctacgccctcgacagcctggaacgcagcgacctctcgccgaagcgcctcgaccagtaccgcagcgtgctcggcacgccgcaccggcagaccctgtag

SEQ ID NO: 321644 - DNA, 1113 bp, Pseudomonas aeruginosa
atgctgttcagcccctatgcccttggccacctgaccctccccaatcgcatcgtcatgccgccgatgacccgttcccgcgccgccagtggcgaagtcgccaccgcgctgatggccgagtactacagccagcgcgccggcgccggcctgatcgtttccgaaggcacccagatcagccggcagggccagggctacgcctggacgccgggcatccacagcgccgagcaggtcgccggctggcgccaggtcaccgacgcggtgcacgccgccggcgggcgcatcttcgcccagctctggcacgtcggcagggtctcgcacacctcgctgcaaccgggcaacgccgccccggtgtcctcctcggcgctggtggccgaaggcgtgaaggtcttcgtcgatccccagggccgcggagcgcaggccggcggcggcgagatggtccagcactcggcgccgcgcgcactggccgtggaggaaatccgggagatcgtcgccgactatgcccaggccgcacgcaacgccctcgacgccggcttcgacggggtcgaactgcacggcgccaacggctacctgatcaaccagttcatcgactcccaggccaatgcgcgcaacgaccaatacggcggctcgctggagaaccgcctgcgcttcctccgcgaggtcgccgaggcggtcaccgcggtggtcggcagggagcgcatcggcgtgcgcctggcgccgctgaccaccctgcagggcgcggtcgacgacaccccgcaagccacctacctggccgcggcgcggctactggacgagatcggcgtggcctacatccacatcgccgaggccgactgggaagacgccccggccatgccggcggcgttcaaggaagcgttgcgcatcgtctaccgtggcagcctgatctactccggcatgtacaccaaggcgcgcgccgaggaagccctggccaggggctgggccgacctcatcggcttcggccggccgttcatcgccaaccctgacctgccctaccgcctggagcacgacctggcgctggccgacggcgaccgctcgacctacttcggtggcggcgccgccggctacaccgactacccgagcctgccgcaggcggccggttga

SEQ ID NO: 321645 - DNA, 1326 bp, Pseudomonas aeruginosa
atgaacgagccgctttccgtcctgatcgtcgaagacgatccgcatgtcttgctcggctgccagcaggcgctggagctggaggacatcccctgcatcggcgtcggcagcgccgaggaggcgctgcaacgggtcgaccgcgacttcgccggcatcgtcgtcagcgacatccgcctgcccggcatcgacggcctgaccctgctggagcgtctcaaggccctcgacccgagcctgccggtggtgctgatcaccggtcacggcgacatctccatggcggtacaggcgatgcacgccggcgcctacgacttcatggagaagcccttctctccggaacgcctggtcgaggtcgcccgccgcgccctggagcagcgcgggctggcccgcgaggtcagcgcgctgcgtcgccagttggccggccgccaggacctggcgcaacggatcatcggccgctcgccggcgatccaggcgttgcgcgagctgatcgccaacgtcggcgacacctcggccaacgtgctgatcctcggcgagaccggcaccggcaaggaactggtggcgcgttgcctccacgactatagccggcgccaccagcatgccttcgtcgcgctgaactgcggcggcctgccggagaacctgttcgacagcgagatattcggccacgaggcgcacgccttcaccggtgccaacaagcggcggatcggcaagatcgagcatgccaacggcggcacgctgttcctcgacgagatcgagagcatgccggtcaacctgcagatcaagctgctgcgggtgttgcaggaacacaccctggaacgcctcggctcgaaccagtcgatcccggtggactgccgggtgatcgcggcgaccaaggcagacctcgccgccatgggcaagagcggccagttccgcagcgacctctactaccggctcaacgtggtgagcctggaactgccggcgctgcgcgaccgccgcgaggacatcctgctgctcttcgaacacttcctccagcagtcctcgctgcgcttcgaccgccccgcgccagaactcgaccgtgccaccgtggccagcctgatggcccacgactggccgggcaatgtacgcgaactgcgcaacgtcgccgaacgcttcgccctcggcctgccggtgttcaacaagggcggccaggccgtacagaccggcggcccgcgcttcgccgaagcggtggaggcattcgagaaggccctgctcggcgacgccctggctcgccaccacggcaacctgacccaggccagccaggacctgggcatggccaagaccacactgttcgacaaggtgaagaagtacggcctgcaatag

SEQ ID NO: 321646 - DNA, 1902 bp, Pseudomonas aeruginosa
atggaattccccgacccgccctgcagcgtacctccgtcactgaccgtgaagccccgcctcgtccgccagttgctgctccccattcccctgctcctgctgatgctcggcttcggctacggcggctaccggatcagcgagagcgccggcatccgtgccctcgccgagaatggcgaacgccagctggagctgcatgcgcggacggtcgagagcgagatcagcaagtacacctacctgcccagcctgctggagctggagcgcagcgtcagtcacctgctcaccgacccgacgccataccggcgcaaccaggtcaacgcctacctcgaaggcctcaaccgccgcgccggcagccgcgcggtgtacctgctggacaccaacggccgggtcctggccaccagcaactggagcgacccggacagctacctcggcgaggacctgtcgttccgcgcctactggcaggacgcgatgaagggcaagccgggccgcttctacggcatcggcagcacccgcggcgagccgggctactacctggcccacggcctggtccacggcggccggatcatcggcgtggcggtagtcaaggtgaagatggacgccctcgaggaacgctgggagaaggcgcgcctggaagccttcgtcagcgacgagaacggcatcatcatcctctccagcaaccccgccctgcgcctgaaggcggtgcgctccctgagcgccgacgacaaggagcgcctggcgcgcagcatgcagtactactggtgggcgctgaacgagtggcaaccgctgcagcgcgagccgctggccgccggtgtggagaagctcagcttccccgccgatgagcagcatccgcgcggcgaagcggtcacctacctggcgcagacccgcgcgctgaatgacacaccgtggaacctgaccctgctcagcccgctggaagacctgcgccgcgacgcggtacgcaacggcatgctggccgccatcggtttcgccctcctggcattcctgctgatcgcctggaacgagcggcgcaaggtactcgccacccgcctcgccgcgcgcgaggcgctgcaacgggccaacggcgagctggaagtgaagatcgccgaacgtaccgccgacctgcaggccagcaacgcacgcctgaccgccgagatccacgagcgccagctggccgaggacaccctgcgcaaggcccaggacgaactggtccaggccggcaagctggcggtgatcgggcagatgtccaccagcatcgcccacgaactcaaccaaccgctggcggcgctgcgtacgctgtccggcaacaccgtgcgcttcctccagcgcggcaagctggagaccgccagcaccaacctcgccaccatcaacgaactggtcgaccgcatgggccgcatcaccgccagcctgcgtgccttcgcccggcgcagcgacgacgccggccaggccagcctggccaaggcggtggacgcggcgctgctgatcctgcacgggcgcctggagcaggacccgccgaccctgcaccggcatttcgacgacgtgcgcctgggcatcgaccagacccgcctggaacagatcctggtcaacctgctggccaacgccctcgacgccatgagcgggcaggccgaccgccagctctggctggaaggccggcgcgaggaggagcgctacgtcctgcgcgtgcgcgacaacggccccggtatcccgccggcggcgcgcgtccacctgttcgaacccttcttcaccaccaagcccggcgaacatggcctgggcctcggcctgaccctctcggccagcctggccaccgccgccggcggcagcctcagcgtgcagcaccccgaaagcggcggaaccgccttcgagctgagcctgtccctggttcccgattccccgactgcgagtcccgcccgatga

SEQ ID NO: 321647 - DNA, 1089 bp, Pseudomonas aeruginosa
atgaagccattgctccacgcgttcgcccccggtgttatggccctgatgctcctgctgccgcaggccgcccaggccaaggaagtcgcaccgcaacagaaactgtccaacgtggtcatcctggccaccggcggcaccatcgccggcgccggcgccagcgccgccaacagcgccacctacaccgccgccaaggtgccggtcgaccagttgctggccagcgtgccgcagctcaaggacatcgccaacgtccgcggcgaacaggtgttccagatcgcctcggaaagcttcaccaacgagaacctgctggaactgggcaagaccgtcgccaagctggccgatagcgacgacgtcgacggcatcgtgatcacccacggtaccgacaccctggaagagaccgcctacttcctgaccctggtcgagcacaccgagaagcctatcgtggtggtcggctcgatgcgcccgggcaccgcgatgtccgccgacggcatgctcaacctgtacaacgccgtggcggtggccggcgacaagtcggcacgcggcaagggcgtgctgatcaccatgaacgacgagatcctctccggccgcgacgcgagcaagatggtcaacatcaagaccgaagcgttcaagagcccgtggggcccgctgggcatggtggtcgagggcaagagctactggttccgcgcaccggtgaagcggcacacggtgaactccgagttcgacatcaagcagatctccgcgctggctccggtggaaatcgcctacagctacggcaacgtcagcgacaccgcctacaaggccctggcccaggcgggcgccaaggcgatcatccatgccggcaccggcaacggctcggtgcccgcgcgcgtggtgccgaccctgcaggaactgcgcaagcagggcgtgcagatcatccgctcctcgcacgtcaatgccggcggcttcgtcctgcgcaacgccgagcagccggacgacaagaacgactggatcgtcgcccacgacctgaacccgcagaaggcgcgcatcctggccgcggtcgcgatgaccaagacccaggacagcaaggagctgcaacggatcttctgggaatactga

SEQ ID NO: 321648 - DNA, 1674 bp, Pseudomonas aeruginosa
atgcaacctgtgctcttcagaaccctgtccctcggcgtcgccattgccgccgcatcctcctcggccttcgccgccacgctcgacggcggcgccgtcgccgcgcccgacgagtacggcgccaaggtcgccgcgcagatcctcaaggccggcggcaacgcggtggacgccgcggtggccaccgccttcaccctggcggtcacctaccccgaggccggcaacatcggcggcggcggcttcatgaccctgtacatggacggcaagccgtacttcctcgactaccgcgaggtggcgccgaaggccgcgagcaagaccatgtacctggacgacaagggcgaggtgatcgagaacctcagcctggtcggcgccaaggccgctggcgtgccgggcaccgtgatgggcctctgggaagcccacaagcggttcggcaagctgccctggagcgagctgctgaccccggccatcggctacgcgcaaaagggcttcaaggtcgccgacaagcagttccagtaccgccaggacgccgtcgccctgttcaacggcaagaccaacttcggcgactacttcggccacatgaaggccggcgaggcgttcctccagccggacctggcgaagaccctggagcgtatcgccgacaagggcccggacgagttctataaaggccataccgccgacctgctggtggcacagatgcagcaggacaagggactgatcacccaccaggacctcgccgactacaaggtcaggtggcgcgaaccgatgcgcgtcgactggcagggcaacacgctctataccgcgccgctgccaagctccggcgggatcgccctggcccagttgctgggcatcaaggaaaaccgtgccgccgacttcaagggcgtcgagctgaactccgcgcgctacatccacctgctggcggagatcgagaaacgcgtgttcgccgaccgcgccgactacctcggcgacccggacttctccaaggtcccggaggcgcgcctgaccgatccggcatacctgaagcagcgtgccgccgaggtcaatccgacggcgatctcgccgaccgagaaggtccgtcccggcctggagccgcaccagaccacgcacttctccatcgtcgacgccgacggcaacgcggtgagcaacacctacaccctcaactgggacttcggcagcggcgtggtggtcaagggcgctggcttcctgctcaacgacgagatggacgacttcagcgccaaaccgggcgtggccaacgccttcggcgtggtcggcagcgacgccaacgccatcgagccgggcaagcgcatgctctcctcgatgagcccgagcatcgtcacccgcgacggcaaggtcagcctggtggtcggcactcccggcggctcgcggatcttcacctcgatcttccaggtgctgaacaacatctacgacttccacctgccgctggagaaggccgtggccgcgcagcgcgtgcaccaccagttgctgcccaaggacacgatctactacgacgcctacgcgccgctcgccggcaaggtcgccgaggagctgaaggcgatgggctacaccctggaggaccagggctggaacatgggcgatatccaggccatccgcgtcgacggcaaagccctggagaccgcctccgatccccgtggccgcggcgtcggcctggtggtgaaaccctga

SEQ ID NO: 321649 - DNA, 735 bp, Pseudomonas aeruginosa
atgatttccatcaagaatgtcagcaagtggtatggcgacttccaggtcctgaccgactgctccaccgaggttgcgaaaggcgaagtggtggtggtctgcgggccgtcgggctcgggcaagtcgaccctgatcaagtgcgtcaacgcactggaacccttccagaagggcgacatcgtcgtcgacggcacctccatcgccgatccgaagaccaacctgcccaagctgcgctcgcgggtcggcatggtgttccagcatttcgagctgtttccccacctgagcatcaccgagaacctgaccatcgcgcagatcaaggtgctcggccgcagcaaggaagaagccaccaagaagggcctggccctgctcgagcgcgtcggtctcaaggagcacgcgcacaagcaccccggccagctctccggcggccagcagcagcgcgtggcgatcgcccgcgcgctggcgatggacccggtggtgatgctgttcgacgagccgacctcggcgctcgacccggaaatggtcaacgaagtgctcgacgtgatggtccagctggcccacgaaggcatgaccatgatgtgcgtgacccacgagatgggcttcgcgcgcaaggtcgccaaccgggtgatcttcatggaccgcgggcagatcgtggaagactgcgagaaggaggagttcttcggcgacgtcagcgcccgctccgaacgcgcccagcagttcctcgccaagatcctcccgcactga

SEQ ID NO: 321650 - DNA, 666 bp, Pseudomonas aeruginosa
atggacttcagtggaatcgttcccgccctgccgagcctctgggaaggcatgctgatgaccctcaagctgatggtcctcggcgtcctcggcggcgtcgcgctgggtaccgtgctggcgctgatgcggctgtcgcacagcaagttgctgtcgaacatcgccggcttctacgtcaactacttccgctcgatcccgctgctgctggtgatcacctggttctacttcgcggtgcccttcatcctgcgctggatcaccggcgaggacaccccggtgggggcgttcacctcctgcctggtggccttcatgatgttcgaggcggcctactactgcgagatcgtccgcgccggcatccaggccatcccgaaaggccagatgggcgccgcccaggcactgggcatgacctacgggcagaccatgcgcctggtgatcctgccgcaggcgttccgcaagatgaccccgctgctgctgcaacagagcatcatcctgttccaggacacctcgctggtctataccgtcggcctgatggacttcctcaattcggcccgttcgcgcggcgacatcatcggccaggccaacgagttcctgattttcgccggcctggtctacttcgtcgtaagcttcaccgcctcgttcgccgtcaaacgtctgcagaaaaggttaaccgtatga

SEQ ID NO: 321651 - DNA, 747 bp, Pseudomonas aeruginosa
atgaattacaactgggactggggcgtgttcttcaagtccaccgggatcggcagcgaaacctacctcgactggtacatcgccggtctgggctggaccatcgccatcgccctggtcggctggatcatcgccctggcgctgggctcgctgctcggcgtcatgcgcaccgtgccgaaccgcctggtatcggggatcgccaccacctacgtggaaatcttccgcaacgtgccgctgctggtgcagctgttcatctggtacttcctggtacccgacctgctgcccgagggcctgcagacctggttcaagcaggacctcaacccgactacctcggcctacctcagcgtggtcgtctgcctcggcctgttcaccgccgcgcgggtctgcgagcaggtgcgcaccggcatccaggcgctgccctacgggcagacctcggcggcccgcgcgatgggcttccgcctgccgcagatctaccgccacgtgctgctgccgcaggccttccggatcatcatcccgccgctgacctcggagttcctcaacatcttcaagaactcctcggtggcgtcgctgatcggcctgatggagctgctggcgcagaccaagcagaccgccgagttctccgccaacctgttcgaggccttcaccctggccacgctgatctacttcacgctgaacatgagcctgatgctgatcatgcgcctggtggagagaaaggtcgccgtaccgggcctgatctccgtaggaggtaaatga

SEQ ID NO: 321652 - DNA, 909 bp, Pseudomonas aeruginosa
atgcgtatcgctcccagtctgctgagcaccgccatcgtggccgctctgttgtccgctccggtcgtcgctgacgagctcaccggcacgctgaagaagatcaaggaaaccggcaccatcaccctcggtcaccgtgacgcttcgattcccttctcctacctcggcaccgagccgggcaagccgatcggctactcccacgacctgcaactgaaagtggtcgaggcggtgaagaaggaactcaacctccccgagctgaaggtccgctataacctggtcacctcgcagacccgcatcccgctggtgcagaacggcaccgtggacatcgagtgcggctccaccaccaacaacgaagagcgccagaagcaggtcgacttctccgtcggcatcttcgaggtcggcacccgcctgctgtcgaagaagaccgccaacatcaaggacttcgacgacctcaagggcaagaacgtggtgaccaccgccggcaccacctccgagcgcctgctcaaggccatgaacgcggacaagaagatgggcatgaacatcatctccgccaaggaccacggcgagtccttcatgatgctcgaatccggccgcgcggtggccttcatgatggacgacgcgctgctctacggcgaaatggccaaggccaagaagccggacgactgggtcgtcggcggcaccccgcagtccttcgagatctacggctgcatggtgcgcaagggcgacgcggcgttcaagaaagtggtcgacaaggccatcaccgatacctacgcctccggcgaggtcaacaagatctacgacaagtggttcacccagccgatcccgccgaagggcctgaacctcaacttccccatgagcgaagagctgaagaagctgatcgccagcccgaccgacaaggccgccgagcagatgtaa

SEQ ID NO: 321653 - DNA, 459 bp, Pseudomonas aeruginosa
atgcgctatctcatcctcagcctgctggccgtgctcgccgcacctgcctgggctgccgacgacggcgacttctggtacctgcagaccagcgtctacacccggcatttcaacccggaccctgaacacaacaatcaccaggacctgctcggcctcgaatacaaccgcgccgatggcgtgctggccggcggtgcgaccttccgcaactcgttcagccagcgctccaactacgcctacctgggcaagcgtttcgacagtgacagctacccggtctacctgaagctcaccggcggcctgttgcagggctatcgcggcgaataccgcgacaagatcccgctgaaccgcttcggcgtcgcgccggcgatcatcccctcggtgggcgttcgcttcggcccgctgggcagcgagctggtgctgctcggcaattcggcggcgatgatcaacctcggcctgcgtctctga

SEQ ID NO: 321654 - DNA, 795 bp, Pseudomonas aeruginosa
atgcagatcgatctgagcgacaaactggcaatcgtcagcggttccaccgccggcatcggcttcgccatcgccagcggcctcgccgccgccggcgccaccgtggtggtcaacggacgcagccaggcggcggtggaccgtgcgatcgcggcgatccggaacggccagccggatgccaggatacgcggcgtcgccggcgacctgggcacggcggaaggctgcgcggccttcgtcgcggccgagccgaaggcggacatcctggtcaacaacctgggcatcttcgagctgaaggacttcttcgacatcgaggacgccgagtggagccgcttcttcgaggtcaacgtgatgtccggggtacgcctggcccgcgcctacgtcccgggaatggtcgagcggggttgggggcgagtggtgttcctgtcttcggaatcggcgttgaacatcccggcggacatgatccactacggcttcagcaagaccgccaacctctcggtgtcgcgcggcctggccaagcgcctggccggcaccggggtgacggtgaatgcggtgctgcccggaccgaccctcaccgaaggcgtcgccgagatgctccgcgaggatgcgcagaaggccgggcagagcatagaagaggccggcaccgcctttgtccggcagcaccgttccagttcgatcatccagcgcctggcgacgcccgaggaagtcgccaacctggtggtctacacctgctcgacccaggcctcggcgaccaccggcgcggccctgcgggtcgacggcggggtgctcgacagcctggcctga

SEQ ID NO: 321655 - DNA, 1590 bp, Pseudomonas aeruginosa
atgtcagcagcctcgttagccaccctcgacgggtcgctccgcatgacccccgtcgagcaaccccgaccgccggctctcgccgacctcggcagccgcctgatgatcgtcgtcgagcgacgcgaggactgggcctcctacctgcccagcgaggaagtactcaccgcccaggaatacctcgagcaatcggcgcgcggccacggcggccgccgcgtgcaggtgatcaacctgtgccgcggctacaagtacctcggcctcggctactactgttcgctgctggccgaggcccgtggccaccgggtgatcccgtcgctgcgctgcatcagcgaactggctcgcaagtcggtgtacgggctggccctgggtggcctcgacaaggccctggacaaggcgctgtgccgtacgccctatggcgccaccgacggcttcaccctgaccctgtatttcggccataccgagttcgagccactggccgacctcgcccgccagttgttcgaagcctttccctgtccgatcctgctggtggagttccgtcgccagcagggctggcatatcgagggcgtgcgccctggcgtgctgaaccgcctgcgcagcgaccaggaggacgttttcgccgatgccctcgacggtttcagccggcgcgcctggcgcatgccgcgttcgcggcgggtggcgcgctacgacatggcgatcctccacgatcccgacgaagcgctgccgccgtccaacccgcaggcgctggccaacttcgtacgggtcggcgccagcctcggcatcgacgtcgaactgatcggacgcaaggactacgcgcgcctggccgagttcgacgccctgctgatccgcgagaccacccgggtcgaccaccatacctatcgcttcgccgagaaggccgagcgcgaaggcctggtggtgatggacgacccggcatcgatcctgcgctgcaccaacaaggtctacctggccgacctgcttggttgccggcaactgggcatgccgctcaccgagatcctctacaaggaacgcccgcaggactggcagcgggtggcccggcgcctgggcttcccgctggtgctgaagattcccgatggctgcttctcccgtggcgtggtcaaggtcaacgacgacagcgaactgctggcggcggcgagcgagctgttcgagcgctcggtcctgttgctggcccaggagttcttctacaccgagtacgactggcgcatcggcgtgctcgaccgccaaccgctgtacgcctgccagtacttcatgtcgcgcggccactggcagatctacaaccacaaggccgacggccaggacgtcaacggcgagtgccgcgccgtgccgctggagcaggtgccgccggcggtgctggagctggccctggaggccgccgggcggatcggcgacggcctctacggggtggacctgaagcaggccggcgacaaggtgctggtcatcgaggtcaacgacaacccgaatatcgatgccggcgtcgaggacggccagctcggcgacgaactctaccggcgcatcctccaggccttcgtccagcgcctggaactcaagcaccgtggccagttcagcaaggcgctgcgctga

SEQ ID NO: 321656 - DNA, 1566 bp, Pseudomonas aeruginosa
atggacaaggacaacagcatgtctcgaaacaatccttcgcgtcattcaatactcgtcacttccaacataaacgcggccaatgatgcgaatcgtctttccgagctttgtcgacaactggaaatacgcggctatcggctcttccaggcgccaagccgcaaggtcgccctggattttctcggcaacgccgcgcaccccgccggcatcctcctgctcgtcgcggagccgacaggcgagaacgaggccgcacaattggcggccctcgatgaactccgccaggtcgcgccgtccatcccgctgttcctgttgtttcgtcaactgcgcatcgagcagttgtccagccagctactggacgaggtccagggatgcttcaacctggccgccggccccgcacgcttcatcgccgagcgcatcgacagcgacctgcgcgaatggcgcgccccggcaggccccaggcggctgcgcgactatgccccgccggtcccgcgcacgccggtgagcgcccgctacaacggccgcgcacgcctcgacctggcgccggccaagcagtggcggatcggctcggggagcaccgcggagcgcctggcgacaccgctgaacgacctctccacggcctaccgcaagacgtccgcaggagccccggcggcgcacgccggcgacatcgccgaggcctttcgccgggcgctctgggaagccgctgcgcggctcgccagggaggatggcgatacgtggttcttcgagatactgcggggcaacccggggcctggcatcgaggccggccgggagacgccggcgaagcgctggcacgggctcgccgagacactcgacagcagtcctcggctggacccgctgcgcgtcgccctgagcgcccccggcctcgattcgcgcggtcgcccggccagcttcggagtacccgccgcggtggtctgccgctacctgcgccggcacggcatcgccccgttgcgcaccggcgactatcgcttcctgctgctgtttccccagggcgccagggcggaacacgcgcagccgctggtggacaggctgtgcgaattcaaacgccggcacgacgacgatgcgccgctgaagcaggtgttgccggagttgctcgacagctcgccgctgtaccgctacatcggcctgcgcgaactctgcgcgatgatccacgaagccagcctgcggctgcacctgaccgccctcgccgacgccgccgccagggctgccggccacgccgcgctggcgccggccacggtctatgggcacctggtcagggacgaaaccgaagcggtggcgatcgacaggctcggcggccgtgtggtcgccagcctggtcggcgtccatccggcggccacgccgctgctgttgcccggcgaacgggtggccgaggaatcaccggcgctgatcgactacctgctggccttgcaggccttcggcgagcactttcccggtttcgctcccgagttgcagggcatcgagatcgatgagcgcggccgctaccgggtccgttgcgtcaggccggcagccctcgcccgcggctccggcctgcgcctggccacgcgccggccggactga

SEQ ID NO: 321657 - DNA, 693 bp, Pseudomonas aeruginosa
atgacgctattggatatcgaaaagctgctggacatgactcaccacatgtcggtgcacattcccatcgaactgatcatttcctgggagcagagcgaagaggcctggagtgtgaaagacaactgtctcaacttcgtctatgtcaatcgtcgctataccgaactgatcaccccgcggttcggccagaagaactccctgctgtcccccttcagtgccagcatcgaagagcacgacaagctggtcatccagaccggcaagcgcatcgaggccctggcgctgctcaggccggacgaccatccggcgccctgctgcctgtacttcgagcgcatgccgctgtatgaccggcgcggcaaccgcaccggggtgatcgcccatgccaagaccctgacctcggtcgccccgcgcggcttcatcgccaccgacggcatcggtaccttcaccttcacgcccccctcggagttgttcacctcgcgcgaatgggacgtgatctacctgctgctttccggtctctcggaaaaagaaatagccgaacagatcagccgctccctgagtaccgtcaagtttcacaagagcaacatcttccagaaggtcggttgcagttgcatcggcgccttcaaggcactcgcccggcaaaagaagtggaacttctatatcccgccgaccttcgccagcgccaagtacatcatcaatcactag

SEQ ID NO: 321658 - DNA, 339 bp, Pseudomonas aeruginosa
atgtcgcgtgtgcttttcttgctcctggccatggtgctcgccggcctgggccaaccgaccctcgccgcgcccctgccggacgagctgccggcagcgttgcccgccgcgccgccggtcgcgccgttgcccatgggcagcgcgccacagccgcaaccggaggccgccgagccggacctgccgggcagcgacgcggccagcgccgacggggaggcgacgaccaaggacggcttgaagatcggcaacggcagtctccgcctgcgccaggacgatcccgggccgacccgggaaagcccgctgcgcgatccccgcctgaatccctacgcaccgcgccagccctga

SEQ ID NO: 321659 - DNA, 351 bp, Pseudomonas aeruginosa
atgaaatacctctgcctgatctatttcgacgaagcgaagctggccgccgtgccggccgaggagcttgccgccatcgtcgacgagtgcatgacctactccgaccagttgggcaaggccggccactacatcgcctcgcacgccctgcagtcggtgcaaaccgccaccaccctgcgccaccagggcgggcggctggcgatgaccgacgggccgttcgccgagaccaaggagcaactcggcggcttctacctgatcgaggcgcgcgacctcaaccaggccctgcagatcgccgcgaagattccgccgggacggctcggctgcgtcgaggtgcgaccggtcaaggaatgggagtga

SEQ ID NO: 321660 - DNA, 153 bp, Pseudomonas aeruginosa
atgtgccccctgtgcatcgcatccctgtccctgctgtgcgccggcggcgcttcgctggccggcttcgccctggcgaccgggcgccggcgccgctggcggaacgaccccgggcaggctggaaaaccgagaatttccgtggagaatcggcaatga

SEQ ID NO: 321661 - DNA, 750 bp, Pseudomonas aeruginosa
atgaatccttctttgcaggaccacccggtgagcagccgggaacaatggctggacgcccgtcgccgcctgctggcgcgggaaaagcaactcacccgcctgcgcgaccaggtcgccgccgaacgacgcgagctgccctgggtcagggtggacaaggactaccgcttccagggcgagcgcggtgagcgttcgctggccgagttgttcggcggcaatagccagctaatcgtctaccacttcatgttcgcgccgggctggagcgaaggctgcgtcggctgttcgttcctcgccgaccacatcgacggcgccaaccggcacctggcgcaccacgacgtcagcctggtggcggtatcgcgcgcgcccctggaagagttccaggcgttccgccggcgcatgggctggcgtttcgactggtactcctcgtacggcagcgatttcaaccgtgacttcggggtgtccttcgacaaggcgcaactggccgccggcagcgtcgactacaactaccagccgacccccgacgccggcgaggaaatgccgggtgccagcgtgttcctgcgcaatccggcgggcgaggtgttccacacctattcggcctatgcgcgcggcctcgacatcctgctcaccacctacaccttcctcgacctgacgcccaaggggcgcaacgaggacgcgatcatggactggctgcgtcaccacgaccgctacgacgaggcgccgaaaagcgcctgctgccacgcgcaggccagccattga

SEQ ID NO: 321662 - DNA, 1245 bp, Pseudomonas aeruginosa
ttgagggagcacggcgagccgttgcgcagccgcatcgaggcgctgtaccgcgaggagtcgcggcgcgtgctggcgaccctgatccgcctgctcggcgatttcgagctggccgaggaggccttgcacgacgccttcatcgccgccgtcgagcagtggccgcgcgacggtatcccgcgcaacccgcgcgcctggctggtttccgctgggcgcttcaaggccatcgacaacctgcgccggcgagcgcgcttcgacgcctcgcagcgactgctcgccgagcaactggaagagcaggccgaggcgccggcggaggagggcgatgcggtggaagacgaccggctacgcctgatcttcacctgctgccacccggcgctgacccccgaggcacaggtggcgctgaccctgcgcgaggtctgcgacctgcgcaccgaggagatcgcccgcgccttcctcgccgcgcccagcgccatcgcccaacgcatcgtgcgggccaagaacaagatccgcgaggcccggattccctaccaggtaccgaccctggaggaactccccgagcggctgggcaacgtcctgcaagtgatctacctggtgttcaacgagggctactcggcctccaccggcgccagcctgacccgcgccgatctcagcggcgaggcgatccgcgtcggccgcctgctggtcgagctgctgcccgaccccgaggccctcggcctgctcgccctgatgttgctgcacgactcgcggcgccaggcgcggatctcggccagcggcgaactggtgcggctcgacgagcaggaccgcgctctgtgggatcgtggactgatcgtcgaggggctcggcctggtcgagcgggccctggccagccgccgcgtcgggccctacaccctgcaggcggcgatcgttgcggtgcatgcccaggcgccgcgcgccgaggacaccgactgggcacggatcgtcgccctctacgacgcgctgctgtacctggcgccgtcgccggtggtcgaactcaaccgcgccgtggccttggccatgcgcgatggcgtcgaggtcgggctggccgtggtcgatgcgttgctggcgcgaggtgaactggccgattaccacctggcgcactcggcgcgtgccgacttctgccgccgtctcggtcgccgccgcgaggcccgcgaggcctaccgcgcggcgctggccctggcgcgccaggagccggagcggcgcttcatcgagcagcgcctgcgcgaactcgattga

SEQ ID NO: 321663 - DNA, 1212 bp, Pseudomonas aeruginosa
atgccatcctcgccatcctccctcccctccgcgctggtgctgctgttcgccgtcgcctgcggtctcagcgtggccaacgtctattacgcccagccgctgctggacgtcctcggtgccgagttcgccatcggccaggccggggtcggcctgctgttcggcgcgacccaggccggttgcgccctggcgctgctgctggtggtgccgctgggcgacctgctggagcggcgccggctgatgttcgtccagctcctgctgctggtgctgtcgctgctgctggtgggcttcgccggcgataccctcggcctggcgctggggctgctcggactgggcctgctcggcaccgccatgacccagggactgctggcctacgccgcggcgctggcggcgcctggcgagcgcgggcgggtggtcggcgcggcgcagggcggcgtggtgatcggcctgctgctggcgcgcagcctggccgggctgctcgccgacctcggcggctggcgcagcgtctacctggtctcggcagcgagcatgggcgggctcggcctgctgctctggcgggtactgccggcggcgccgagcaacgaactggggctgacctaccggcaactgctcggctcgatgttcgacctgctggcgagccagcgcgtgctgcaggtgcgcggcctgctcgggctgttgatgttcgccgccttcggggtgttctggagcagcctggtattgctgctcggcgcgccgccgcattcgctgtcgcacagcgccatcggcgccttcggcctggtcggcgcgctcggcgcgctgggcgcggcgcgggccggcagcctggccgatcgcggccacgcccaggcgctcagcggcggcgccctgctgctgttgctgctgtcctggctgccgctcgccctcggcgcgcattcgctggcggcgctgattctcggcgtgctgctgctcgatctcgccggccaggcgatccatgtgctcaaccagagcctggtcttcgccatcgacccgcgcgcccacagccgcctggtgggttgctacatgctgttctacgccgccggcagcggcctcggcgccagcgccggcaccgccatgtacgcctgggccggctgggacgcggtgagcctgctcggcgcggcgatcagcctggcggccctggcgttctggtggttcacccgtggcgttggcggcgaagcgcgtacggcctgcgccaacggcgcctga

SEQ ID NO: 321664 - DNA, 414 bp, Pseudomonas aeruginosa
atgcaaatcgtcccctacctgatcttcaacggtaattgccgggaggccttcagctgctaccaccagcacctgggcggcaccctggaggccatgctgccgttcggcgacagccccgagtgcggcgacatcccggccgactggaaggacaagatcatgcacgcacggctggtggtcggcagcttcgccctgatggcctcggacaatcacccggcctatccctacgaaggcatcaagggctgttccatcagcctcaacgtcgacagcaaggccgaggccgagcgcctgttcaacgccctcgccgagggcggctcggtccagatgccgctgggcccgaccttctgggcggcgagcttcggcatgttcaccgaccgcttcggcgtggcctggatggtcaactgcgagcaggaccggtag

SEQ ID NO: 321665 - DNA, 426 bp, Pseudomonas aeruginosa
atgagattcatggtgatcgtcaaggccacccaggcttccgaagccggcgagatgcccagcgaggaactgctcgcggcgatgggccgctacaacgaggaactggtcaaggccggggtgatgctcgccggcgaagggctacagcccagcgccaagggcgcccgggtgcgtttctccggcaacgcgcggacggtgatcgacggccccttcgccgagacccgcgagctgatcgccggtttctggatgttccaggtggcctccctggaagaggccatcgagtgggtcaagcgatgcccgaacccattcgacggcgaatccgagatcgagatccgccaggtcttcgaggccgaggacttcggcgaggagttcaccccggaactgcgcgagcgcgaggagcgcctgcgcgccgagctggaaaaacgcaactga

SEQ ID NO: 321666 - DNA, 270 bp, Pseudomonas aeruginosa
atgccccgtatcgtcttcgccccggccatccagcggcacgtcgccatgcccgcgctggatgtcggcgccgccaccgtcgccgccgccttgcaggcggccttcgcccgcgagccgcgcttgcgcggctacctgctcgacgaccagggcagtctgcgccggcatgtggcgctgttcgtcgatggcgtgcaggtccgcgatcgccggggattgggcgatccgctccaagacgatagcgagatctacgtggtgcaggcgctgagcggcggttga

SEQ ID NO: 321667 - DNA, 1107 bp, Pseudomonas aeruginosa
gtgagcgagcgactctatgtcggcacccgcaagggcctgttcgagctgcggcgcaacgcggcgggccagtggctgccgatggccagccacttcctcggcgagccgctgagcatgctcctcgccgacccgcgcgacggcgcgctctacgcggcgctgaatctcggccatttcggcgtcaagctgtggcgtcgcgacgccggcgcgacggactggatggaatgcgcggtgccggtctatccgccgcagccgccagcggccgaaccgctggaaggccaggcggcggagccaccctggtcgctacagcagttgtggatcctcgagccaggcggcgccgaccggcccggcacgctgtgggccgggaccatccccggcggcctgttccgttccgacgaccgtggcgccagctggcgcctcaaccgcgaactctgggaacgacccgaacgcgcccagtggttcggcggcggctacgaccatcccggcatccattccatctgcgtcgacccacgcgatagtcgccacctcaccgtcgcggtgtcttgcggcggcgtctggcagagccacgacgacggccgcagctggacctgcaccaccagaggcatgcgcgccgactacatgccgccggagcagagcgaggaggcggcgatccaggacccgcaccgcctggtgcagtgccaggcgcgcccggagttcctctgggtgcagcaccacaacggcatcttccgttcccgcgacggcggcttgcattggcagggcgtggtcgccgagccgtccagcttcggcttcgccgtcgccgtgcatccgcggcagccggacacggcctggttcgtcccggcgaccaaggacgaatgccgcattcccagggacgcccgtttcgtggtcacccgcacccgcgacggtggccacagcttcgagaccctcgagcgcggcctgcccgatggcccggcctacgacctggtctaccgccacggcctggacatcgaccccagcggcgagcgcctggccatgggctcgaccaccggcggcctgtggctcagcgagaacggcggggaggactggcagcagctctccgccaacctgccgccgatctactgcgtgcgcttcgcctga

SEQ ID NO: 321668 - DNA, 477 bp, Pseudomonas aeruginosa
atgagcctcgaatccgtccggcggttcttcgccgagaaagccccggacctgcgcatcatcgagctggaaaccagcaccgccaccgtcgccctggccgccgaggcccatggcgtggagccggggcggatcgccaagaccctgtcgctgcgggtcggcgagcgcaccgtactggtagtggcgcgcggcgacgcgcggctggataaccgcaagatcaaggccgccttcggcggcaaggcgaagatgctcggcgccgaggacgtggtcgagctgaccgggcacccggtcggcggagtctgcccgttcggcctggcgacgccgctggcggtgtactgcgacgtctcgctgcaagccttcgacgaagtgcttccggccgccggggcggtgcacagcgcggtccgcatcgccccgcaacggatggccgagctggtggatgcgcagtgggtcgatgtgtgccaggaagtcctccaggaagcctga

SEQ ID NO: 321669 - DNA, 399 bp, Pseudomonas aeruginosa
atgagcgcacgcgtacgacccttcctgatgttccagggggtccaggccgaggcggccatgaacttctacctgtcactgttcgacgacgccgagatcctccagatccaacgctacggcgccgaggggccgggcccggagggctcggtgctgaaggcgctgttccgcctcggcgaccagagcgtgcattgcatcgacagccatgtgcggcacgccttcgatttcaccccggcgttctccttcttcgtcgactgcgagagcaacgcgcagatcgagcgcctggccgaggccctgagcgacggcggcaaggccctgatgccgctcggcgactacggcttcagccagcgtttcgcctggctggccgaccgcttcggggtgtcctggcagctcaatctggcctga

SEQ ID NO: 321670 - DNA, 600 bp, Pseudomonas aeruginosa
atgtgcactataatgcgcaaaaccgcgacagtgagcaatatattgcccaaccctaccgaacgccccagcgtcctcgaacatgtctccggcaacgtccgccgcctgcgcctgcaagccggcctcagccaggaagcgctggcccgcgcggccagtgtcagccggcggatgctggtgggcatcgagagcggcgacgtcaatgtcagcctgtcgaccctcgaccgtatcgccgccgccctcggcgtgctgttccccgacctggtccaggcaccggccaccgaccgctcgcggatcaatgcggtggcctgggtcggccaccaccccgagagccgcgccaccctcctcgccagcgcaccggcgcggcgcgaggtggaactctgggcctggtcgctgggaccgggcgagcgctacgtatcggaacccgacgccgccggctggcgggagatggttctggtcatcaaaggtcgcctgcgcctggaactggccgacggcgaacggcgcatcgaggccggcgacttccatgccttcgccagcgaccagccgtacgcctacgtcaacgacggcgacgaggtggtgcgtttcacccgcaacgtggtgagctag

SEQ ID NO: 321671 - DNA, 894 bp, Pseudomonas aeruginosa
atgacctccacctcccgcggcctcgccggaacgctgttgccggtcggcctgctattgatcgccatggcctcgatccagagcggcgcctccctggcgaaaagcatgttccccctggtcggcgcccagggcaccacggccctaaggctgttcttcgccgcgctgatcctgctgctgctcctgcgtccctggcgcaagcgcctgagcctgcaatcgctgcgctcggtggtggtctacggcatcgccctgggcggcatgaacctgctgttctatctctcggtgcgcaccgtgccgctgggcatcgcggtggccctggagttcaccgggccgctgctggtggcgatcctctcctcgcggcgcctgctggacttcctctggatcggcctggcggtgttcggcatctggctgttgctgccgctgggcaacagcgccgagccgctcgacctggtcggcgccgcctatgccctcggtgccggcgtgtgctgggcgctgtacatcctcttcggccagcgcgccggcgccgaccatggcgcccagggcgccgcgctgggggtgctggtggcggcgatcctggttgtgccgatcggcgtcgcccacgccggcgccgacctcctcgacccggcgctgatcccgttggcgctgggcgtcgcggtgctctccacggccttgccctacaccctggaaatggtcgcgctgacccgcctgccggcgcgcaccttcggcaccctgatgagcatcgagccggccttcggcgcgctctccgggctgctgttcctcggcgagcggctgagcccgacccaatggctggccatcggcgcgatcatcctcgcctcggtcggcactaccctcagcgtcaagtcgcgtggcgccgccccggcgctaccggccaaggactga

SEQ ID NO: 321672 - DNA, 1434 bp, Pseudomonas aeruginosa
gtgaacagccccgccctgcccctttcccgtggcttgcgcatccgcgccgaactcaaggaactgctgaccctcgccgcgccgatcatgatcgcgcaactggcgaccaccgccatgggcttcgtcgatgcggtgatggccgggcgcgccagtccgcacgacctggcagcggtggcgctgggcaactcgatctggatcccgatgttcctgctgatgaccggcaccctgctcgccaccacggccaaggtcgcccagcgccatggcgccggcgaccagcccggcaccgggccgctggtgcgccaggcgctgtggctggcgctgctgatcggaccgctgtcgggggcggtgctgtggtggttgtcggagccgattctcggcttgatgaaagtgcgcccggaactgatcgggccgagcctgctgtacctcaagggcatcgccctgggcttcccggcggcggcgctgtaccacgtactgcgctgctacaccaacggcctgggacggacccggccgagcatggtgctggggatcggcgggctgctgctgaacatcccgatcaactacgcgctgatctacggccacttcggcatgccgaagatgggtggccccggctgcggctgggccaccggctcggtgatgtggttcatgttcctcggcatgctgttctgggtgaacaaggcctcgatctaccgcgccagccagttgttctcgcgctgggagtggccggatcgcgcgaccatcggcccgctggtggcggtcggcctgccgatcggcatcgcggtgttcgccgagtcgagcatcttctcggtgatcgccctgctgatcggcgggctcgacgagaacgtggtggccggccaccagatcgccctgaacttcagcgcgctggtgttcatgattccctattcgctggggatggcggtgaccgtgcgggtcggccacaacctcggcgccggcctgccgcgcgacgcgcgcttcgccgccggcgtggggatggccgcggcgctgggctacgcctgcgtctcggcgagcctgatgttgttgctgcgcgagcagatcgccgcgatgtattcgccggacccggcggtgatcgccatcgccgcctcgctgatcgtgttctccgcgctgttccagttctccgacgccctgcaggtcaccgccgccggggccctgcgcggctaccaggacacccgggtgacgatgatcatgaccctgttcgcctactggggcatcggcctgccggtgggctacagcctcggcctcaccgactggttccaggaacccaccggaccgcgcggcctgtggcaaggcctggtggtgggcctgaccggcgcggcgatcatgctctgcatccgcctggcgcgcagcgcgcggcgcttcatccgccagcacgagcgcctgcagcgggaggacgcggaggccgcctcagtccttggccggtag

SEQ ID NO: 321673 - DNA, 324 bp, Pseudomonas aeruginosa
atggctaaggccgatgatacgtcgaatcccgcaataaccgcacagtccccttccaccttcatccccctgcgacgcacctcgcaatgcaaccagcaccccggttgcgccaccctctacctggacagcagcgcagccagcgaagacctgttcgacaccgcccgccgccggctggagtcggcgatcggaacgctgagcgtcctcgacctgctcgacgaaaccgaagagcccggcgaaagcatctgccgcatcaccggttccctgctgtcgttgctcagcgacgccctgtcgctgttcgaggcggaatacgcacgcagacaccgataa

SEQ ID NO: 321674 - DNA, 525 bp, Pseudomonas aeruginosa
gtgccgttcgatcccgccaagccgacgctgttgtccacattggttcgtcactacgaggaactggtcgaccatgttcgccggcgcttcggcgaccggggcatggcgcgcgaagtggtgcacgacgtgtgcgtgcagttgctcgaacgcgacgagaaggaggacgtgcacacgcccctggccctgctgcggaaaatctcccacgacaccgccgtgagccgctatcgtagcgaccgtcgtcgaaccgcctgggtagaagccgtcgccgagcttccggaagtcgcctgcatggcggcgacgcccatgggtcgccatgaggccgagcgcgagttccaggcactggtcgacgccatcgccacgcttcctcctcgctgccaggccgttttcgtcatgcacaagatccacgaaattccccaggcgcaagtcgccgaccgcctcggcatctccgtcaagaccgtggaaaagcacctgcgcctcggactggcggcctgctgggaacggctcggccgcggcgaggcacggccatga

SEQ ID NO: 321675 - DNA, 843 bp, Pseudomonas aeruginosa
atgacccagccctcgaaacggaatgggcaggttccgctggacgacgccctggagcgccatcgcgacgcgctgaaggacctgttcccgctgccgccctcccggccgaaatcgcgcaaggcaagcaaggcggccggcgtcgcgctattgctggcgctggccatcggcgccctggcctggctggacccggcctacaagcgcgagcgcttcgccaccgccatcggtgagcggcgcgacgtgaccctggccgacggcagccagctcctgctcgacagcggcagccagatcgaggtcagttggcacccgctcagccgccgggtcgcgttgcgcgcggggcaggtgcttttcgaggtatccccggcgcgctatcggcccttcgtggtgtccgcgggttcgaccgacatccgcgtgctcggcacccggttcaatgtgcgccgcctggacgacgacgtccgcgtgaccctggagcgtggccgggtggaggtcggcacctcggctacggcgcaagcgccagtcgtgctcctgccgggtcagcaggtcgatgccattggcgggcaactgatgccgctggccaaggtcgatgccgccacggcgatggcctggaaagacgaccgcctggtcttcgagcgcacgcccctgggcgaagccgtcgcgctgctgcgccattaccgcaaggcgcccattctcctggacgaccccagcctggcctccctccggctgaccggcgtcttcgccgcgcacaacgtcgaccggctgctcgacctgctgccgagcatccttcccgtggccgtgtcgcggcaggaggacggcagcgtcgagatccaacgcaaatcgacgcgaaaataa

SEQ ID NO: 321676 - DNA, 2442 bp, Pseudomonas aeruginosa
gtgcatttttccctccgcagtcgccacctgcgtccttcattgctcgccagcagcctgctcctggcggtgtcggcccagggccaggaaaagctcgacgtggatctgcccgccgcgccgctcggccaggcgatcaacgccctcgcgcaacaatcctcggtacagatcctcttcgccggcgatctcggcgccggccgccaggcgcccgcgctgaaggggcgtttcacccccgaagaggcattgcgccagttgctcagggacagcggcctgaaggcgcaggccagggacgaacataccttcatcgtcgttccggccagcgaagccgccgtgcccgctacgcatgcccgcagcgaaccgctggacatggagcagatggaaatcaccgcctcgcgcaccagcagcgacctggtctccgccacgcgccagtccaccgtcatcgagcatgcccaactggaggagctgcgccagggctccgacagcctggccaccgtgctggccaaggcggtgccggggatgtccgattccagccgcaccatcaccgaatacggccagaccctgcgcgggcgcagcatgctggtgatggtcgatggcgtgccgctgaacaccaaccgcgactcctcgcgcaacctggccaacatcgacccggcgctgatcgagcggatcgaggtgatccgtggcagcagcgccatctacggcagcggcgccaccggcgggatcatctccatcaccacccgtccggccggcggcgagaaccgcgcggaaacccgcctcagcgccacctcgccgctgacccggctgggcagcgatggcctcggcggccagttccagcaatacttcgccggctccctgggggcgctcgactattcgttcgacttcggcacccgtcacgtcggcgcttcctacgacgcccatggcgaccgcatcgccccggaacccagccagggcgacctgttcgactcgaacgtctacaacatcggcggcaagctcggcctgcgcatcgacgagaaccagcgcgtgcagctcgccctcagccactacgacgcccgccaggacaccgactacgccaccgacccgagggtcgccaggctgccgccgggctcggtcccggccaacgcgatcaaaggcctggagctggacgagcagaaccgcatccgcaacaccctggcgaacctcgagtacgagaacctcgacatcctcggcagccggctctccgcgcagctctactaccgcgactatttcacccgcttcactccgttcgacgcccgcgccgtctccacccgcggcggcaatgtcgaccagatcatgcagaacagcgaagtgttcggcagccgcctgaccctgcgcacgccgctgggcgaaagcggcaataccgaactggtctggggcggcgactacaaccaggaacgcagcgacatgccgctcgacgtgttcgacccggcggcctacgacgccagcggcgggctggtcttcgacaagatcggcaagctcacctacatgccgccgctacgcacccgcagcgccggcgcgttcgcccagttgcagcatcgcttcgacgaacactggtcgatcgacggcggcctgcgctacgaatactccaccgccgaattcgacgacttcatcccgctctccgagtccaaggccgcctcgccggtgaccgtcaagggcggcgacctcgactacgacgcggtgctgtcgaacctcggcatcgtctattcgccggtggctggccaggaaatctatgcctccttcagccagggcttccagttgcccgacgtcggcatccagctgcgcaacgcccgccgtggcttcgatatcggctcctcgaacctcgaaccggtgaagaccaacaactacgaactcggctggcgcggcgccatcggcggcaacaccctgggcagcctggcgctgttctacaccacctccaagctgggcgacgtgcagagcttcaacaacggcctgatcctcacccgcaccaaggagcgcatctacggcgtcgaggccagcgccgactggctcagcgacgacgaagtctggggcgcgggcggcagcgccacctggatgcgcggacgcgagaagccggacggcaaggactggcaggacatgactggctaccgcgtgccgccgctgaagctgaccgcctacctgcaatacaagccggatgccgactggaacaaccgcctgcaggccaccttcttcgactccaaggactaccgtctcgacggcgtggaaagcttcggccggcgccaggtcagcacctacaccacggtcgacctggtcagccagtaccgcatcacccccgacgaccagttgagcctgggcatccagaacctgttcaaccgcgactactacccgctctacagccagttgctgcgcaacaacaacaacaccagccacctgccggcgccgggcacggtgctgacggcgagctatacgcacaactggtga

SEQ ID NO: 321677 - DNA, 837 bp, Pseudomonas aeruginosa
atgccggtttcgttacccttcgagcaagtcgatgtcttctccgaacagcccttcaaaggcaacgccgttgccgtggtgattggcgccgaccgcctgagcagccagcagatgctggagttcgctgcctggacccagttgagcgagacgaccttcctgctgcggccgaccgttgccgaagccgactatcgcgtgaggatcttcaccccgttgcgggagttgccctttgccgggcatccgacgctggggagctgccaggtctggctgaaccaggggggcggcgatgctgctgacgagatcgtccaggagtgcctggcgggcctgatccgtatccgccgcaagggcgccttgctgtcgttcgcggcgcctcccctgcttcgtggcggagcggtcgaagacgaggtgttgcgacggatcgagagcgggcttggcctgtccccggggcaggtactcggcagccaatgggtggacaacggacccggctgggtcgccgttcggctggccacgcgtgacgaggtcctggccattcgcccggactacgcgaagctcgacgggctcaacgtgggcgtggtcgcgccctggcaaggtccccaggcggaggcggatgtggaagtgcgcgccttcatgggcgaggaactcaatgaagaccccgttaccggtagcctcaacgcgagcctggcgcaatggctgatcggcacgggagtcatgcccgggcgctacacggcgagccagggcacggccttgggtcgccgggggcggataagcgtcgagcagatcggcggcgatatctggatcggcggtgaggtgcagccgggcatgtcggggcaggtcgtgttctga

SEQ ID NO: 321678 - DNA, 918 bp, Pseudomonas aeruginosa
atgagagttaaaaatgtatttatattcacggttggactcaagggctgcagcccaatacctagcgtacttggcatttaccacaagtatgcatcaagaagcgaagtcaaattcattggttggtaccacctttctgcgaagcgctcgcagagcgatatccaggaagtcttctcgaataatagcgatgagcctttgaaaggtttcgaagtgttggaggccgaagccgttacaaggcatgccactgaagacattcacactccagacttgtcaacacttcaaggagatgcgggcgcaataattcttgctcacggtggaggggctcaggcgggaagcagcagtgccgaggccgtggcgaaagcggtcgctgacttcagaaagaaaacaaaactgcctatgcaatttagaaaaatagtatttgacgtatgcaacatggcctcccccatcaagacggtcactgccgaccagggcaagttctccggaataggtttttacgacagcgaaggaaatgcaatcaccaagtcaaaagaatttcagttaaacttcctacaggcattcaccgccatctatggagcactgacacacgatgccggatcagtaaaagttgcgggatgggactctggaatttcggtctttcatccagccaacgaatatgtcatgggcacacctgcgccagctaatggctggactgcaaccgtcagcaatcgcgagctcgtcgcgacactcaagcatgggcagaaattcctcagcaatagaatcagtgacgaggagaattcaaaaaccacctacacgctcaaattgattgacaatggcgtcagggcctcgcttaaaaaaacctatcagtatgtatcagttcagaatgaaggcgaaaagggcaaagtaatccagacaaaactggaaggctggtcggacaaagaactgtag

SEQ ID NO: 321679 - DNA, 1269 bp, Pseudomonas aeruginosa
atgagcaaacgtatcgtcgtcaccggcatgggcgcggtcagcccgctgggctgcggagtcgaacccatatggcaacgcctgctggccgggcaatcgggcatcgccacgctcccggcggagctgatcggcgacctgcccatcagcatcggcggccaggtccccgaccgtgtccaggacccgcaggccggcttcgatcccgacctgctgctggccgccaaggaacaacgcaagatggaccgcttcatcctcttcgccctggccgccgcgcaagaggccctggcccaggccggctgggcgccgcagagcgccgaggcgcagcagcgcacggcgaccgtcatcgcctccggggtgggcggcttccatgccatcgccgaagcggtgcggaccacagacggcaagggaccgcgacgcctgtcgcccttcaccatcccgtcctttctctgcaacatggcggccgcccatgtgtcgatccgccatggcttcaagggaccgctgggcgccccggtgaccgcctgcgcggcgggcgtgcaagccatcggcgacgcggcgcggatgatccgcgcgggagaggtcgacgtggcgctctgcggcggcgcggaagcgaccatccaccgggtcagcctggccggcttcgccgccgcgcgcgccctgtccagcgatttcaacgacagccccgaacgcgcctcgcgccccttcgaccaggcccgcgacggcttcgtcatgggcgaaggcgccggcctactggtcatcgaggaactggagcacgccctggcgcgcggcgccaggcccatcgccgagctggtgggctacggcaccagcgccgacgcctaccacatgaccgccgggccggaagatggcagcggagcccgccgggccatgcagcaggcgctgcgccaggccggcgtggaagcggccgcggtgcagcacctgaatgcccacgccacctccacccaggtaggcgacaagggcgaactggccgccatcaaggccgtgttcggcaccggcagcgggctcgccatcagcgcgaccaaatctgccaccggccacctcctgggcgccgccggcggcatcgaggcgatcttcacggtcctggcactgcgcgaccagctcgcccccgccacactcaacctggaaacgcccgacaccgacgccgagggcctcgacctggttcgcggcgaagcccggcgctggccgatggaacacgcgctgtccaatggcttcggcttcggcggggtgaatgccagcctgttgttccggcgctgggtgtag

SEQ ID NO: 321680 - DNA, 507 bp, Pseudomonas aeruginosa
atgcaacgcaagaccttcgccgatgccgaatgccccatcgcccgcagcctggaacgggtcggcgaatggtggagcatcctgatcatgcgcgatgcgctacagggcctgcgccgcttcgacgaattttcccgcagcctggatatcgcgccgaacatgctcacccggcgcctgaacgcgctggtggaggcgggcctgctcgaacgccagccctacagccagcgcccgctgcgctatcagtacgtgcccacggccaagggcgaggattttcgcgtcgtgctcatggctttcgtcgcctggggcaatcgccactacgcagaggaagggcagagcgtgcagctcgtcgagcgaacaagcgggcggccggtgcgctcgttcatggcggctctcgccgatggccgaacggtaccgctggagcaatgcaccgtgcaggccgggcctgccgccagcgaggaaatgcgccagcgcctggcggccatgccggagcggagcgagctaccggctcgatga

SEQ ID NO: 321681 - DNA, 1143 bp, Pseudomonas aeruginosa
atgcgtattctcgccgatgaaaacattcccgtggtcgacgccttcttcgccgaccagggctccattcgccgcttgcccgggcgcgccatcgaccgcgcggcgctggccgaggtcgacgtgctgctggtgcgctcggtcaccgaggtcagccgcgccgagctggccggctcgccggtgcgcttcgtcggcacctgcaccatcggcaccgaccacctcgacctcgactacttcgccgaggccggcatcgcctggtccagcgcgcccggctgcaacgcccgcggggtggtggactacgtgctcggctgcctgctggcgatggccgaggtgcgcggcgccgacctggccgaacgcacctatggggtggtcggcgctgggcaggtcggtgggcggctggtggaggtgctgcgcgggctgggctggaaagtgctggtctgcgatccgccgcgccaggcacgcgagccggacggcgaattcgtctcgctggaacggctgctggccgaggccgacgtgatcagcctgcacactccgctgaaccgcgacggcgaacacccgacccgccacctgctggatgaaccccgcctgaccgccctgcgtcccggcacctggctggtcaacgccagccgtggcgcggtggtcgacaaccaggccctgcgccgcctgctcgaaggcggcgccgacctggaagtggcgctggacgtctgggaaggcgaaccgcaggccgaccccgagctggccgcgcgctgcctgatcgccacgccgcacatcgccggctacagcctggaaggcaagctgcgcggcaccgcgcagatctaccaggcctactgcgcctggcgcggcatcgccgaacgcgtgagcctgcaagacgtgctgccggaaacctggctcgccggcctgcaactcaaccccggctgcgacccggcctgggcgctggccacgctgtgccgcgcggtatacgacccgcgcagcgaccacgccgccttccgccgcagcctgaccggcgacagcgccacccgccgcgccgccttcgacgccctgcgcaaacactacccgccgcgccgcgagatcaccggcctgcgcgtcgccaccggtgggcaggcggagttgcagcgggtggtgcgggcgctgggggcgcagttggtctag

SEQ ID NO: 321682 - DNA, 1734 bp, Pseudomonas aeruginosa
atggtccagagcgccccagccagcgaaatcgccgccctcatcctgcgcggtttcgacgattaccgagagcagttccgcgagatcaccgacggcgcccgtgcccgcttcgagcaggcgcagtggcaggaagcgcagcgcgcctcggcgcagcggatcaacctctacgaggaaaaggtcgccgagacggtggccgggctgcgcgcggggctggccgacagcgagctgctggacgtggagcgctggccgatcatcaagagcgcctacatcgcgcagatcgacctgcggctggacgacgagctggccgagacctggttcaactcgatcttctgcgggctgttcagccacgacaacatcagcgacggcacgatgttcgtgcacaccacccggccctcgctgcgcgcccacgcccgcgcgccctacacccgcacctaccggccgggcggcgacctgcgccaggcgctggagaagatcttcgacgactaccgcttcgacgtgccctacgacgaccgcgagcgcgacctcgaacggatcgacgcactgctgcacagcaacctgccggactgggtgtgcaaggacccggacctggccatcgagctgatcggctcggtgttctatcgcaacaagggcgcctacctggtgggccgcctgttcaccccggacgagcagtggccgctggtgttcccgctgctgcaccgcgagggccacggtatccagttcgacacggtgatcaccgacgaggcggaagtctcgatcatcttctccttcacccgctcctacttcatggtcgacgtgccggtgccggccgagctggtggccttcctcaagcgcctgctgccgggcaagcacctggccgagctgtacacctcgatcggcttctacaagcagggcaagagcgagttctaccgcgccctgatcaaccacctggcgaccaccgacgaccgcttcgtcatggcccccggcgtgcgcggcatggtgatgagcgtgttcaccctgcccggcttcaacacggtgttcaagatcatcaaggaccgcttcaacccgtcgaagagcgtcgaccacgccacggtgatccagaagtaccagttggtgaagaaccacgaccgggtcggacgcctggccgacacccagcagttcgccgacttccgcttcccggtgagcaagttcgagccggagtgcctggcagaactgctggaagtggcgccgtcgacggtggtggtggaaggcgacgtggtgctgatccgccactgctggaccgagcggcgcatgaccccgctgaacatctacctggagaacgccagcgaggcacagacccgcgaggcgctgaacgactacgggctggcgatcaagcaactggcggcggcgaacatcttccccggcgacatgctgctgaagaacttcggcgtgacccgccatggccgggtggtgttctacgactacgacgagatctgctacctcaccgaggtgaacttccgctacatccccgagccgcgcttccccgaggacgagatgtcgtccgagccctggtattcggtggggcccaacgacgtgttcccggaagaattcccgcgcttcctgttcgtcgacctcaaccagcgccggctattcgccaagctgcacggcaacctctacgacgccaaatactggcagggcctgcaggagcagatccgcgagggcaaggtgatcgacgtgtttccctatcggcggcaggagacgcctgagcagttgctcaagtag

SEQ ID NO: 321683 - DNA, 852 bp, Pseudomonas aeruginosa
atgcttgagcatccgctgcagcgtttctttcattccatgcgggccaagcgaccgttcgactgggtacgcttccaacgtcgcgatctgctgttgatcgaccatccgctgtgccaggccgtattcagtcggcaaggggcgcagctcctgcatttccagccgcagggcgaacgcccgttgctgtggtgcgccagcgaatggccggccctcagcagcgcgccggtgcgcggcggcatcccggtctgctggccgtggttcggcagccatccgaacggcagcgaatggccgcagcagggctgggcgcggcaacgcgaatggcgcctgctggatgcctacgccgacgaaagcaaggtggtggtgagctggcaactggacctggaggactggcacgtgcgcctcgatgcgcgccttggccagcgcctggagctggagctgtgcagctaccatgaggaagacgacgattgcctgttcagcttcgccctgcagccctactggcgggtcggcgcgctgagccgggtggtggtgcacggcatggagctggagtcggctcgcggccagcgcggcgcttcgcggattccgggaacctggataccgcgcggcgcggtcaagcaggtgctctaccatcccggatcgctggtgctggaggacggcggctggaaccgccgcttgcggatcgacaagaacgtcagcgccggcagcgtgatctggcaccccggcagccgcccggtggagcaggtcgagccgggcgaagcggaacgcttcctctgtatcggcgccgctggctaccgcccgggcgggctgatcctggcgcccggcgaacgcatgcgcctgagtctcgccgccggcctgcaatag

SEQ ID NO: 321684 - DNA, 858 bp, Pseudomonas aeruginosa
atgaaaaacctgctggagcagatccagagccgcctggacgaactgaacaaggcggagcgcaaagtcgccgaggtcatcctgcagaacccgcagcaggccacccgcttcagcatcgccgccctggcccaggcggcagcggtcagcgaaccgacggtgaaccgcttctgtcgctccttcggcatgagcggctatccggaactgaagatccagctggcccagagcctggccagcggcgctgccttcgtgacccaggcggtagccgaggacgacgggccggaagcctatacgcggaagatcttcagcaacaccatcgcctccctcgacagcgcccacaagctgctcgacccacgcgtcatcgaccgcgccgtggacctgttgatccaggcccggcagatccacttcttcggtcttggcgcctcggcctcggtagcgctcgacgcgcagcacaagttcttccgcttcaacctggcggtgagcgcccaggccgacgtgctgatgcaacggatgatcgcctcggtggcgcataccggcgacctgttcgtggtgatttcctataccggacgcacccgcgagctggtggaggtggcgcacctggcgcgggagaacggcgcctcggtgctcggcctgaccgccgccggctcgccgctggccagggccagcaccctgtgcctggacatcccgttgccggaagacaccgacatctacatgccgatgacttcgcggatcgtccagctcaccgtgctcgacgtactggccaccggagtgaccctgcgccgcggcgtggacttccagccgcacctgcggcggatcaaggaaagcctggtgccaacccgctatcccctcgacgaggacaactga

SEQ ID NO: 321685 - DNA, 1470 bp, Pseudomonas aeruginosa
atgcctgatgtccgcgttctgccttgcacgttagcgctgttcggtgcgctgggcgatctcgccttgcgcaagctgttcccggcgctctaccaactcgatcgtgagaacctgctgcaccgcgatacccgcgtcctggccctggcccgtgacgaaggcgctcccgccgaacacctggcgacgctggagcagcgcctgcgcctggcagtgccggcgaaggagtgggacgacgtggtctggcagcgtttccgcgaacgcctcgactacctgagcatggacttcctcgacccgcaggcctatgtcggcttgcgcgaggcggtggatgacgaactgccgctggtcgcctacttcgccacgccggcctcggtgttcggcggcatctgcgagaacctcgccgccgccggtctcgccgagcgcacccgggtggtgctggagaagcctatcggtcatgacctggagtcgtcccgcgaggtcaacgaggcagtcgcccggttcttcccggaaagccgcatctaccggatcgaccattacctgggcaaggagacagtgcagaacctgatcgccctgcgcttcgccaacagcctcttcgagacccagtggaaccagaaccacatctcccacgtggagatcaccgtggccgagaaggtcggcatcgaaggccgctggggctacttcgaccaggccgggcaactgcgcgacatggtgcagaaccacctgctgcaactgctttgcctgatcgccatggatccgcccagcgacctttcggcggacagcattcgcgacgagaaggtcaaggtcctccgcgccctcgagccgattcccgcagaacaactggcttcgcgcgtggtgcgtgggcagtacaccgccggtttcagcgacggcaaggcagtgccgggctacctggaggaggaacatgcgaatcgcgacagcgacgcggaaaccttcgtcgccctgcgcgtggacatccgcaactggcgctggtcgggcgtgccgttctacctgcgcaccggcaagcgcatgccgcagaagctgtcgcagatcgtcatccacttcaaggagccgccgcactacatcttcgctcccgagcagcgttcgctgatcagcaaccggctgatcatccgcctgcagccggacgaaggtatctccctgcaagtgatgaccaaggaccagggcctgggcaagggcatgcaattgcgtaccggcccgctgcaactgagtttttccgagacctaccacgcggcgcggattcccgatgcctacgagcgtctgctgctggaggtcacccagggcaaccagtacctgttcgtgcgcaaggacgaggtggagttcgcctggaagtggtgcgaccagctgatcgctggctgggaacgcctgagcgaagcgcccaagccgtatccggcggggagttgggggccggtggcctcggtggccctggtggcccgcgatgggaggagttggtatggcgatttctga

SEQ ID NO: 321686 - DNA, 717 bp, Pseudomonas aeruginosa
atggcgatttctgagttgaagctgccggccggcgtcggcctgcaggtctggggcagcgccgccgagcaggcccgcggcctggccgccgaggtcgccggccggttgcgctcggcgctggccgagcagggccaggcgctgctggtggtgtccggtgggcgcagtccggtggccttcctcgaagccttgagcgaggagccgctggactggtcgcggatcaccgtcagcctggccgacgagcgctgggtgccggagtcgcatgccgatagcaacgccggcctggttcgccgccacctgctccgtggcgaggcggcgaaggcgcgcttcatcggcctctaccagccggcggcgagcctggaggaagcggccgagctggccgaccatcacctgcacgagctgccattgccgatcgacgtgctggtcctcggcatgggcgacgacggccataccgcctcgctgttcccgaacagccctggcctggacctggcgatggatccccaggggacgcgccgttgtctgccgatgtgggcgccgagcgtgccgcaccagcgcctgaccctgccgcgcgccgtgctggcggcggcgaaggtgcagctgctggcgatccagggccagtccaagctggccaccctgaacgccgcgctggcggtcgaggacgaacggcggatgccggttcgcgccttcctccgcgcgccgctgacgatccattggtacccctga

SEQ ID NO: 321687 - DNA, 663 bp, Pseudomonas aeruginosa
atgcacaaccttgaacagaagaccgcccgcatcgacacgctgtgccgggaggcgcgcatcctcccggtgatcaccatcgaccgcgaggcggacatcctgccgatggccgatgccctcgccgccggcggcctgaccgccctggagatcaccctgcgcacggcgcacgggctgaccgccatccggcgcctcagcgaggagcgcccgcacctgcgcatcggcgccggcaccgtgctcgacccgcggaccttcgccgctgcggaaaaggccggggcgagcttcgtggtcaccccgggttgcaccgacgagttgctgcgcttcgccctggacagcgaagtcccgctgttgcccggcgtggccagcgcttccgagatcatgctcgcctaccgccatggctaccgccgcttcaagctgtttcccgccgaagtcagcggcggcccggcggcgctgaaggcgttctcgggaccattccccgatatccgcttctgccccaccggaggcgtcagcctgaacaatctcgccgactacctggcggtacccaacgtgatgtgcgtcggcggcacctggatgctgcccaaggccgtggtcgaccgcggcgactgggcccaggtcgagcgcctcagccgcgaagccctggagcgcttcgccgagcaccgcagacactga

SEQ ID NO: 321688 - DNA, 438 bp, Pseudomonas aeruginosa
gtgcacgatgtccctcccttcagcggcgccaagctggcgctgttctatggcgaccacctggtcgtctacaaacgcgacgaaaaacccggcattcccttccccggctactgggactttcccggcggcggccgtgagggcctggagacgcctgccgaatgcgccctgcgcgaactcgaggaagagttctccatccgcctggaagaacctcgtatcgaatggcagcgacagtatccgagcaccagcggcagcgcgcccttcgcctacttcctggtggcgcgcctggaggaccgcgagttcgaggccatccgcttcggcgacgaaggacaatactggcgattgatggaggtggacgcctacctcgcgcatgccatggccgtaccctacctgcagagccggctcggcgactatctgcgggaacgccggcgcatcggcgaataa

SEQ ID NO: 321689 - DNA, 1143 bp, Pseudomonas aeruginosa
atgaacgataccccagagaatccccacgtaccggtcggggaaaaattgcagaaagtcctcgcccgtctcggcgtcggttcccggcgcgacgtagaagtgtggatcgccgaaggccgggtcaacgtcaatggcagcgtggccagcctcggccagcgggtcgacagccacgatgcgatcaccgtcgatggccacctgatccgtcgcgaagaggccgccgagagtgtccgtcgcgtgctgatctacaacaagccggaaggcgaggtctgcacccgcgacgatccggaaggccgcccgaccatcttcgaccgcctgccgcgcctgcgcaccggtcgctggatcaatgtcggtcgcctggacatcaataccaccggcctgctgctgttcaccaccgatggcgaactggccaaccgcctgatgcatccttcctatgagatggaccgtgaatacgcggtacgggtgcgcggcgaggtcaccgaagagatgatcgagcgcctgctcaacggcgtgatgctcgaggacggcccggccaagttcagcgatatccagcaggcgccgggcggcgaaggcttcaaccactggtaccactgcgtagtgatggagggccgcaaccgcgaggtgcgccggttgtgggaatcccaggggttggtggtcagccgcctcaagcgggtgcgtttcggcccggtgttcctgacctccgagctgaccatgggccgctaccgcgaaatggaccagcgcgagatcgatatcctcagcgaggaagtcggcctcaagccggtggccctgccgggcatgaccaccaaggcgcgcgagaaggccgaacgccagcagcgcaagcaggcccgtccgctggcgcgcagcgagcgtccggaagccgggcgcaagcgtgcgccgcggcgcgaggacggcgaaaatgccgctcgtcgcgcgccggcttcgcgtcccgcgcgcggtccgcagccgagcgccgagcgcaaggggcgcgagcagggcactccggttgccgagcggccccgcgagagcaaccgcaagccgcgcccgagcaagccgcgcgacgagcgtccggccagcgcgccgggcgacaaggaaagcgccctggaaaggccccttcgggggcctttttcatgcctgggaatcggtgtctaa

SEQ ID NO: 321690 - DNA, 378 bp, Pseudomonas aeruginosa
atgcacaggatcctggctatcgcgctctgcatgctatggagcgtcgccgggctggccgcggatgcggcgatgccggcgcagagctgcgcaagccttggcgaggcgacggccggccccgaggacaacttccgtccgccgctggagggcgaggtgatcgacaaggggcgcgcctatttccacagcgcgccgcgtgccgactgtgtcaccggggtcttcgtgattcccggcgacttcatcactgtctacaagccgagcggcgagtggctgaacgtcatgtacgtggctcgagacggcaaggaaaccagcggctggctgctggagaagcgcgtccgcttgcgccaggcctatggcggcccggacgagccggcgcagccataa

SEQ ID NO: 321691 - DNA, 924 bp, Pseudomonas aeruginosa
atggctcctcccaagcagtccaataccatcgatttcgacgccgccaagcagaagcgcggcccccagcccggtggcaacgccagcgggccgcgcgccagcaacctgaaggagttgcgccagcaactgaccctacagttgcagagcagcctggaggcggagcggattctcggcctgttcttcgaggaagtccgccaactgatcccgctggatgcccttggctaccgccatccgggctccgacctgcgcctggagttcggcagcagcgccaagcattcggtgagctatcgcctgagccatgacagcgactacctcggcgaactgatcttccgtcgccgccagcgcctcggcgaagacgaacaacggcaactggagagcctgctcggcaccctgctgttcccgctgcgcaacgccctgctctatcgcgccgcgatccagaccgccctgcgcgacgccctgaccggcaccggcaaccgcatagccatggaccaggcgctcggccgcgaactggaactggcccggcgcaacctgcaaccgctctcggtgctgatgctcgatatcgaccacttcaagcgggtcaacgaccactacggtcacgccgtcggcgacgaagccctcaaggccgtggcggaaaccatcaaggaccacctgcgcaatgtcgacatggtgttccgcttcggcggcgaggaattcctcgtcctgctgtccagcacgccactgcaggctgcctgcatggtcggcgaacgcctgcgccaggcggtggaggaactggactaccggcacgccggcgaaccgctgaagctgtcgatcagcctcggttgcgccgacctgcggcccggcgaaggcagcgacgacctgctgcgacgggtcgacgaggcgctctacgaagccaagcgcgacggccgcaaccgcctgcgctgcgcctga

SEQ ID NO: 321692 - DNA, 1215 bp, Pseudomonas aeruginosa
atgccgacattgcacctggacgccctgtccaccaccgccctcgccctgctcctgctcgccctcggcagccaattgaagaagcgcagccgctggctgacacgtctgtgcgtaccgtcgccggtgatcgccggcttcggcttcgccttcctggtctggctgctcagggatcgcggctggctcgacatcggcctcgacaccagcctgcagacacccctgatggtggcgttcttcaccaccgtcggcctcggtggcagcctcggcctgctgcgcaagggcggcaagaccctgctggtctacctgtcggcctgctgggcgctggcgatactgcagaacctgatcggcgtcggcagcgccggactgctcggcctcgacccgttgctcgggatcatggccggcgcggtctcgctggaaggcggcttcggcgcggcggcggccttcggcccggttgcggaagggctcggcgcccagggcgcgaccaccgtggcgctggcctcggccaccttcggcatggtcgctggcgggctgctcggcagcccggtggcgcgctggctgatcgaacgcaaccgcctgccggtgcaggcggaaagcgacaatcggctggaagccctcggccagcaggagcgacgccagcatgcggcggccacgctggacggcaatctcctgctgcgcctgctgacctgcgtgctgctggtgatggtgctcggcttctggctcggcgacgcgctcgaggaacgcctgggcctggtgctgcccagttatgtcggggcgatgttcatcgccatcgtcctgcgcaacctcgacgaccgtctcggctggctgcgcattccggaccacgccgtcggcaccctgggcgacgtctgcctgggcatcttcctgaccatggcgatgatgagcctgaagttctgggagctggagaacctcggcctgccgctgctcggcgtactgttcatccaggtcgcggtgctgttgctgctgacgatcttcgtgctgttccgcctgctcggccgcaactacgacgccgcggtgctctgcgccggcttcctcggccacggcctgggcgccacgcccaacgcggtggccaacatgggcgcggtctgcgagcactatcgggtgttctcgcacaaggccttcatcatcgtgcccctgtgcggcgcggtactgatcgatctcgtcgccatcccggcgatcacctggttcatcaacgccttcagttga

SEQ ID NO: 321693 - DNA, 936 bp, Pseudomonas aeruginosa
atgtaccccgcccccgacatgagcctctggcaaggccggatcgatagccaggaaggcgccgacgcgcggcgctggcaccaatggatgcgtccctacgcagacgacgccgaagcggccagcgtgctgctcgggttcgccagcgacgaaggcgtgcgccgcaaccagggtcgccagggcgcgcgccacggaccgccagccttgcgtcgcgcgctggccaacctggcctggcacggcgagcaagcgatctacgatgccggcgacatcgtcgccggcgacgatctggaagccgcccaggaatgctacgcgcaacgcgtcgccgacctgctcgcgcgcggccaccgggtggtcggactgggcggcggccacgaaatcgcctacgccagcttcgccggcctcgcccgccacttgagtcggcatgagcgcctgccgcgcatcggtatcctcaatttcgacgcgcatttcgacctgcgccacgccgaacgggccagctccggcacgccgttccgccagatcgccgaactctgccaggctagcgactggccgttcgcctactgctgcctgggcatcagccgcctgagcaacaccgcggcgctgttcgaccaggcccagcgcctgggtgtgcgctacctgctggaccgccagttgcagccatggaacctggaacgcagcgaagccttcctcgacagcttcctgcaatccgtcgaccacctctacctgaccgtttgcctcgacgtgctcccggccgcccaggcgcccggcgtcagcgcgccctcggcgcacggcgtggaaatgccggtggtggagcacctggtccgccgcgccaaggccagcggcaagctgcgcctggccgacatcgccgaactcaacccgcaactcgatagcgaccagcgcaccgcccggatcgccgcgcgcctggtcgacagcctggtcaactga

SEQ ID NO: 321694 - DNA, 729 bp, Pseudomonas aeruginosa
atgtcgaagcattcccccaccgatcgcctgctgcagatcctcattgccctcggccaggctcccgaagccctgtctgccaaggagctgtcgctgaccctggagcagccgctgagcagcacctaccggcacctgaagaccctgttgcgctggggcctggccgaagaacaggccggccagggccgctacctgcccggcccggcctgcctgcaactggcgaagaaattcgatcgcgaggcctcgctgatcggtctcgccaaaccggaactcaagcgcctggccgacctgagccaggagagcgtggcgctgatggtggccagcaaccagcaggcgatctgcctggaactgttcgacagtccgcagccgctgcgctgctgctaccagaaagggctggcgcagccgctgttgcatggcgcctcggccaaagccctgctggcgcacctggaggacgaacggcgcgaggagctgtacctcgcccaggaactctccgccgagcgtatcgacaagctggagcaggaactccggctgatccgcgaacagggctacgccgtcagccagggcgagatcgacgaaggcgtctggggcatcagcgtaccgctgctggacagccgccagcgcctgcacggcgccctcagcctgatggcccccgccttgcgcgcccagtcgcgcagcgaacgcttgcggcaatggaccctcgacgccgccgcgcgactttccgcgcggctggactga

SEQ ID NO: 321695 - DNA, 741 bp, Pseudomonas aeruginosa
atgttccagtactccgcccgccccgacctgctgaaagaccgcgtgatcctggtcaccggcgccggccgcggcatcggcgccgccgccgccaagaccttcgccgcccacggcgccaccgtgctgctgctgggcaagaccgaggagtacctgaacgaggtctacgacgccatcgaggccgccggccatccgcaggccgccgtgatcccgttcaacctggagaccgcccagccgcaccagttcgaggaactggcggcaaccctggagaacgagttcggccgcatcgacggcctgctgcacaacgcttcgatcctcggtccgcgctcgccgatgcagcagatttccggggagaacttcatgcgcgtgatgcaggtgaacgtcaatgccatgttcatgctgaccaccgccatgctgccgctgatgaagctctccagcgacgcctcgatcatctttacctcgagcagcgtgggccggaagggccgcgcctactggggcgcctattcggtatcgaagttcgccaccgagggcctgatgcagacccttgccgacgaactcgacggtaccagcgcgatccgcgccaacagcgtcaaccccggcgccacccgcaccagtatgcgcgccctcgcctaccctggggaaaacccgctgaacaaccccaccggcgaggagatcatgccggtctacctgtacctcatggggccggacagcgccggcgtcaacggccaggccttcgacgcccagtga

SEQ ID NO: 321696 - DNA, 672 bp, Pseudomonas aeruginosa
atgcggctcaaagcggtactgttcgacatggatggcaccctgctcgacacggcgccggacttcatcgccatcacccaggccatgcgtgccgcccacggcctgccgccggtggacgagcaacgggtgcgcgacgtggtctccggcggcgcgcgcgcgatggttgccgcggccttcggcctgtcgctggacagcccggaactggaacccctgcgccaggagttcctcgaccgctaccagaagcattgcgcggttctcagccggccctacgacggcatccccgaactgctcgcggcgatcgagaaagccgggttgatctggggcgtggtgaccaacaagccggtgcgcttcgccgaaccgatcatgcagcgcctgggctacgccgagcgttccagggtgctggtctgtccggaccacgtgacccgcagcaagcccgatcccgagccgctgctactggcctgtagccagctcggcatcgatccgtcgagggtgctgttcatcggcgacgacctgcgcgacatcgaatccggccgcgacgccgggaccaagaccgcggcggtgcgctacggctacatccaccccgaagacaaccccgcgcactggggcgccgacgtgatcgtcgaccacccgcgcgaactcattgacgttctcgaccgcgcgctctgcgactgctga

SEQ ID NO: 321697 - DNA, 699 bp, Pseudomonas aeruginosa
atgagcaacgtcgaccacgccgagatcgccaaattcgaggcactggcccatcgctggtgggaccgcgagagcgagttcaagccgctccacgacatcaacccgctgcgcgtcaactggatcgacgagcgcgccggcctggccggcaagaaggtgctcgacatcggttgcggcggcggcatcctcagcgaagccatggcccagcgcggcgccagcgtcaccggcatcgacatgggcgaagcgccgctcgcggtggcgcgcctgcaccagctggaatccggcgtcgccgtcgactaccggcagatcaccgccgagcagatggccgaggaaatgcccgggcaattcgacgtggtcacctgcctggagatgctcgaacacgtgccggacccggcctcggtgatccgcgcctgccaccgcctggtcaagccgggcggacaggtattcctctcgaccatcaaccgcaatcccaaggcctacctgttcgcggtgatcggcgcggaatacatcctccagttgctgccgcgcgggacccacgatttccgcaagttcatccgtccgtcggaactcggcgcctggtcgcgcgaggccggtctcgaggtcaaggacatcatcggcctgacctacaacccgctgaccaagcactacaagctggccaacgacgtcgacgtcaactacatggtccagacccagcgggaggcgtga

SEQ ID NO: 321698 - DNA, 1335 bp, Pseudomonas aeruginosa
atgcccaacgtccgtaaccccttcgacctcctcctgctgccgacctggatcgtccccgtggagcccgccggggtggtgctgcgcgaccacgcgctgggcatccgcgacggccagatagccctggtcgcgccgcgcgagcaggccatgcgccatggcgccacggaaatccgcgaattgccgggcatgctgctcgcccccggtctggtcaacgcccacggccattcggcgatgagtctgttccgcggtctcgccgacgacctgccgctgatgacctggctgcaggaccacatctggccggccgaaggccaatgggtcagcgaggatttcatccgcgacggcacggagctggccatcgccgaacaggtaaagggcggcatcacctgtttctccgacatgtacttctatccacaggccatctgcggcgtggtccatgacagcggggtccgcgcccaggtggcgatcccggtactggacttcccgatccccggcgcccgcgacagcgccgaggcgatccgccagggcatggcgctgttcgacgacctcaagcaccacccgcgcatccgcatcgccttcggcccgcacgctccttatacggtgagcgacgacaagctggagcagatcctggtgctcaccgaggaactcgacgccagcatccagatgcacgtccacgagaccgccttcgaggtggagcaggccacggagcgcaacggcgagcgcccgctggcccgcctgcaccgcctcggcctgctcggcccacgcttccaggcggtgcacatgacccaggtggacgacgacgacctggcgatgctggtggaaaccaacagctcggtgatccactgcccggaatccaacctcaagctggccagcggcttctgcccggtggagaagctctggcaggccggggtcaacgtggccatcggcaccgacggcgcggccagcaacaacgatctcgacctgctcggcgagacccgcaccgcggcgctgctggccaaggccgtgtacggccaggccaccgccctcgacgcccaccgcgcgctgcgcatggccaccctgaacggcgcccgcgcgcttggtctggagcgcctgatcggctccctggaagccggcaaggccgccgacctggtggccttcgatctgtccggcctggcccagcaaccggtctacgacccggtttcgcaacttatctatgccagcggccgctactgcgtgcggcacgtctgggtcggcggcaggcaactcctcgacgacggccgcctgctccgtcacgacgaacagcgcctgatcgccagggcccgcgaatggggggcgaagatcgccgccagcgacaggtcctga

SEQ ID NO: 321699 - DNA, 1077 bp, Pseudomonas aeruginosa
atgcgagagcgactgctggcggccgagcgggtcaaggcgatcgagtggcgggacggtacgctgcggttgctggatcagcgcctgctgccccaggaggaggtctggctcgaacacgagtcggcggccgaggtggccaaggccattcgcgatatggttgtgcgcggcgcgccggccatcggcatcagcgccgcctacggcatcgtccttggcgcccgcgcgcgcctggcgcagggcggcgactggcgcgccgcgctggaggaggacttccgcctgctggccgactcgcgacccacggcggtcaacctgttctgggcgctgaaccgcatgcgcgaccgtctggagcgaatgaaagagggcgaccagccgctggcggtgctggaagccgaggcgatctccatccatgaaagcgaccgcgaggccaacctgaccatggcccagttgggcatggagctgatccgcaagcagcagggcagcccgcagaacatcctcacccactgcaataccggcgccctggcgaccggcgggttcggcaccgcgctgggggtgatccgcgccgcgcacctggaaggcctggtcaatcgcatctacgccgacgaaacccggccctggctccagggctcgcgactgaccgcctgggagctggccaacgaaggcatcccggtcagcctgaacgtggattcggccgccgcgcacctgatgaagaccgaaaacatcacctgggtcatcgtcggcgccgaccgcatcaccgccaatggcgatgtcgccaacaagatcggcacctaccagctggcggtcaacgccatgcaccacggcgtgcgcttcatggtggtggcgccgagttcgaccatcgacatgaacctggagagcggcgaggacatcccgatcgaagagcgcgacggtcgcgaactgctggaaatcggcgggcgacgggtggcggccgaggtcgatgcctacaatccggtattcgacgtgaccccggcggaccttatcgatgccatcgtgaccgagcgtggcgtcgtcgagcgtcccgacgccgagcgcatggccgccctgatgagccgcaagcgcctgcattga

SEQ ID NO: 321700 - DNA, 2772 bp, Pseudomonas aeruginosa
atgggcgaactggccaaagaaattctcccggtcaatatcgaagacgagctgaaacagtcctatctcgactacgcgatgagcgtgatcgtcgggcgggccctgccggatgcacgtgacggcctgaagccggtgcaccgccgtgtgctttatgccatgagcgagctgggcaacgactggaacaagccctacaagaaatccgcccgtgtggtcggcgacgtgatcggtaagtaccacccgcacggcgacatcgcggtctacgacaccatcgtgcgcatggcgcagccgttctcgctgcgctacatgctggtagacggccagggcaacttcggttcggtggacggcgacaacgccgcagccatgcgatacaccgaagtgcgcatggccaagctggcccatgaactgctggcggatctggaaaaggaaaccgtcgactgggtgcccaactacgatggcaccgagcagatcccggcggtcatgccgaccaagattcccaacctgctggtcaacggttccagcggtatcgccgtgggtatggcgaccaacatcccgccgcacaacctcggcgaagtgatcgacggctgcctggcgctgatggacaaccccgacctgaccgtcgatgagctgatgcagtacatccccggtccggacttccccaccgccggcatcatcaacggccgcgccgggatcatcgaggcctaccgcaccggtcgcgggcgcatctacatccgtgcccgcgccgtcgtcgaggagatggagaagggcggcggtcgcgagcagatcatcatcaccgagctgccgtaccagttgaacaaggcgcggttgatcgaaaagatcgccgagctggtgaaagagaagaagatcgagggtatttccgagctgcgcgacgagtccgacaaggacggcatgcgcgtggtcatcgagctgcgtcgcggcgaggtgggcgaggtggtcctcaacaacctctatgcccagacccagctgcagagcgtgttcggcatcaacgtggtggccctggtcgacggccagccgcgcacgctgaacctgaaggacatgctcgaggtgttcgtccgccaccgccgcgaagtggtgacccggcgtaccgtctacgagctgcgcaaggcccgcgagcgcgggcacatcctggaaggccaggcggtcgctctgtcgaacatcgacccggtgatcgagctgatcaagagttcgccgaccccggccgaggccaaggaacgcctgatcgccactgcctgggagtccagcgcggtggaagcgatggtcgagcgtgccggcgccgacgcctgtcgcccggaagacctggatccgcagtacggcctgcgcgacggcaagtactacctgtcgccggaacaggcccaggcgatcctcgagctgcgcctgcatcgcctgaccggcctggagcacgagaagctgctctccgaataccaggaaatcctcaacctgatcggcgagttgatccgcatcctgaccaacccggcgcgcctgatggaggtgatccgtgaggagctggaagcggtcaaggccgaattcggcgatgctcgccgcaccgagatcgtggcttcccaggtcgacctgaccatcgccgacctgatcaccgaggaagaccgcgtggtgaccatctcccacggcggctacgccaagtcccagccgctggccgcctaccaggcgcagcgtcgcggcggcaaaggcaagtccgccaccgggatgaaggacgaggactacatcgaacacctgctggtggccaacagccatgcgaccctcctgctgttctccagcaagggcaaggtctactggctgcgtaccttcgagattccggaagcctcgcgtaccgcgcgtggccggccgttggtgaacctgctgccgctggacgagggcgagcggatcaccgcgatgttgcagatcgacctggaggcgctgcagcagaacggcggcgccgatgacgacctcgacgaagccgaaggagcggtgctcgagggcgaggtggtcgaggccgccgaggtcgaggaagtcgagggcgagaccgccgagctggtggccgagccgaccggcgcctacatcttcatggccaccgccttcggtaccgtgaagaagaccccgctggtgcagttcagccgtccgcgcagcagcggcctgatcgcgctcaagctggaagagggcgacaccctgatcgccgccgcgatcaccgatggcgccaaggaagtcatgctgttctccagcgccggcaaggtgatccgcttcgccgagagcgtggtgcgcatcatgggccgcaacgcccgcggcgtacgtggcatgcgcctgggcaaggggcagcagctgatctccatgctgattccggagtccggggcgcagatcctcaccgcctccgagcgcggcttcggcaagcgtaccccgctgagcaagttcccgcgtcgcggccgcggcggccagggggtgatcgccatggtcaccaacgagcgcaacggcgcgctgatcgccgcggtacaggtccaggaaggcgaggagatcatgctgatttccgaccagggcaccctggtgcggacgcgtgtcgacgaagtctccctgtccggccgcaatacccagggcgtaaccctgatcaagctcgccagcgacgaggtactggtcggtctggagcgtgtccaggagccgtcgggcggagatgacgaggacctgcccgagggcgaggaagctgccgaatctctgggcgagtcggccgagtccgagtccgagcccgcggcggaagcggaaggcaacgaagagtaa

SEQ ID NO: 321701 - DNA, 1086 bp, Pseudomonas aeruginosa
gtgagcaagcgagccttcaatttctgcgccggtcccgcggcgcttcccgacgcagttctgcaacgtgcccaggccgagcttctcgactggcggggcaagggcctttcggtcatggaaatgagccaccgtagtgatgactacgtggccatcgccagcaaggccgagcaggacctgcgcgacctgctcgacattccctcggactacaaggtgctgttcctgcagggcggcgccagccagcagttcgccgagattccgctgaacctgctgcccgaagatggcgtcgccgactatatcgataccggtatctggtcgaagaaggccatcgaggaggctcgtcgctatggcaccgtgaatgtcgcggccagcgccaaggagtacgactacttcgccattccgggtcagaacgagtggacgctgaccaaggacgcggcctatgtgcactacgcctccaacgagaccatcggcggcctcgagttcgactggattcccgagaccggcgacgtgccgctggtcaccgacatgtcctccgacatcctctcgcgcccgctcgacgtgtgccgcttcggcctgatctatgccggggcgcagaagaacatcggcccgtccggcctggtggtggtgatcgttcgcgaagacctgctcggccgcgcccgcagcgtctgtccgaccatgctcaactacaagatcgccgcggacaacggttccatgtacaacaccccggcgacttactcctggtacctgtccggcctggtcttcgaatggctgaaggagcagggcggggtgaccgcgatggagcagcgcaaccgcgccaagaaggacctgctgtacaagaccatcgatgccagcgacttctacaccaacccgatccagccgagcgcccgctcctggatgaacgtgccgttccgcctggccgacgagcgtctcgacaagccgttcctggaaggcgccgaggcgcgcgggctgctcaacctgaaaggccaccgctcggtcggcggcatgcgcgcttccatctacaacgcccttggcctggacgcggtcgaggcgctggtcgcatacatggcggagttcgagaaggagcacggctga

SEQ ID NO: 321702 - DNA, 1098 bp, Pseudomonas aeruginosa
atggcggaccaggaccagctcaaggccttgcgcctgcgcatcgacagcctcgacgagaagttgctcgagctgatcagcgagcgtgcccattgcgcccaggacgtggcgcgagtcaagacccagaccctgggcgagggcgaggcgccggtgttctaccgtcccgagcgcgaagcctgggtgctcaagcacatcatgcaattgaacaaggggccgctggacaacgaagaggtcgcgcggctgttccgcgagatcatgtcgtcctgcctggcgctcgagcagccgctgaaagtggcctatctcggacccgagggcacctttacccaggccgcggcactcaagcatttcggcaacgcggtgatcagcacgccgatggcggcgatcgacgaggtgttccgcgaggtcgccgccggcgcggtgaacttcggcgtggtgcctgtggaaaactccaccgagggggcggtcaaccataccctcgacagcttcctcgagcacgacatggtgatctgcggcgaagtcgagttgcgtatccaccatcacctgctggtcggcgaaaccaccaagaccgacaacatcacccggatctattcccatgcccaatccctcgcgcaatgtcgcaagtggctggactcgcactacccgagcgtcgagcgggtggcggtgtcgagcaacgccgacgcggccaagcgggtgaagagcgagtggaattcggcggcgatcgccggcgacatggcggccagcctgtacgacctgagcaagctgcacgagaagatcgaggaccgcccggacaactccacgcgcttcctgatcatcggcaaccaggaggtgccgccgaccggcgacgacaagacctcgatcatcgtttccatgcgcaacaagccgggggccctgcacgagctgctggtaccgttccacaacaatggtatcgacctgacccgcatcgaaacccgcccgtcgcgcagcggcaaatggacctacgtgttcttcatcgatttcgtcggccaccataaagaaccgctgatcaaggacgtcctggagaagatcggccaggaagccgtcgccctgaaggtcctgggctcctatccgaaagcggtgctctga

SEQ ID NO: 321703 - DNA, 1110 bp, Pseudomonas aeruginosa
atgtccgatttccttgccctggcccagccgggggtgcaaaagctgtcgccctacgtccctggcaagccggtggacgaactggcccgcgagctgggcatcgaccctgcggcgatcgtcaagctcgccagcaacgagaacccgctgggtgcgagcccaaaggcgctggaggctatccgcgccgaactggcggaactgacccgttatcctgacggcaacggtttcgaactcaagcgcaagctggccgagcgttgcgcggtggatgcggcgcaggtgaccctgggcaacggctccaacgacattctcgacctggtcgcccgtgcctacctcgcgcctggtctgaacgccgtgttcagcgaacatgccttcgccgtctacccgatcgccacccaggccgtgggcgccgaggggcgggcggtcaaggcgcgcgcctgggggcatgacctggaagcgatgctcgccgccatcgatgggcaaactcgcgtggtgttcgtcgccaacccgaacaacccgaccgggacctggttcggtgcggacgccctggagcggttcctcgcccaggtgccggcggaggtgctggtggtgctggacgaggcctatatcgaatacgccgagggcgacgagctgcccgatggcctggactacctggcgcggcaccccaacctgctggtctcgcggaccttctccaaggcctatggcctggcttcgctgcgggtcggctacgcgctttcgagcaaggcggtggccgatgtgctcaaccgcgtgcgccagccgttcaatgtcaatagcctggccctggcggctgcctgcgcggcgctggacgaccatgactacctggcgcagagtcgccgcctaaacgatttcggcatggcgcagctggaggatggcttccacgcgttgggcctgtcctggattccctcgaagggcaacttcatcgccgtggatctggctcgcgatgccggtccggtctaccaggcgctgctgcgcgaaggtgtgatcgtgcgtccggtggctggctacgggatgccgaccttcctgcgcgtctccatcgggctgccggaagagaacgatcgtttcctccaggcgctgggcaaggtgctggcgcatgactga

SEQ ID NO: 321704 - DNA, 2241 bp, Pseudomonas aeruginosa
atgactgaggtcacgccgctgcaacagtcgacccctaagctgggccgcctggtggtggtggggctgggcctgattggcggctccttcgccaaggggttgcggagcaaagggttgttccgggaagtggtcggcgtggatcgggatgccgagtcttgccgcctggcggtggagctcggcgtggtcgaccgttgcgaggaggatcttggccgcgcctgcgtcggcgccgacgtgatccagttggcggtgccgatcctggcgatggagcgggtgctggccgacctggcgaagctcgacctgggcaaggctgtattgaccgacgttggcagcgccaagggcaatatcgtgcgtgccgcgcgtgtcgcgttcggcgggatgccgcggtacctggtaccggggcatccgatcgcgggttccgagcagagcggagtgaccgcggcgaaggcgaccctgttccgccggcacaaggtgattctcacgccctccgcggagaccgatgccgacgcgctggcgctggtcgacagcctgtggcgcgcgctgggcgcggacgtcgagcacatggaggtcgagcatcacgacgaggttctggcggccaccagccacctgcctcacctgctggccttcaccctggtcgactccctggccaagcgcagcgagaacctggagatcttccgctatgccgccggcggtttccgtgatttcacgcggatcgccggcagcgacccggtgatgtggcacgacatctttctcgccaatcgcgaggcggtgctgcgtacactggatgtttttcgtgacgacctcgacgcgctgcgcgaggccgtcgacactggggacgggcaccagttgttgggcgttttcacgcgcgcccgggtagcccgtgagcatttcagcaaaatcctggcccgtcgggcctatgtggacgccatgcacaacaacgacctgatttatctggcccagccgggcggcagcctgtccggaaccatccgggtaccgggcgacaagtcgatttcccatcgctcgatcatgctcggctccctggccgaaggcaccaccgaagtggagggcttcctcgagggcgaggacgcactggcaaccatccaggcgttccgcgacatgggagtggtgatcgaggggccgcagaacggccgcgtcaccgtccatggcgttggcctgcacggcctcaaggcgccgcctgggccgatctacctgggtaactccggtacttccatgcgtctgctcagcggtctgctggcggcccagccgttcgacagcaccctgaccggcgacgcttccctttccaagcggccgatgaatcgcgtagccaagccgctgcgcgagatgggcgcggtaatcgagacggggccggaaggccgtccgccgatgaccattcgcggcggccagcgcctcaccggtatgcattacgacatgccgatggccagcgcccaggtgaagtcctgcctgttgctcgccgggctctacgccgcgggtgagacctcggtcaccgagccggcgccgacccgcgaccacaccgagcgcatgctgcgcggcttcggctatccggtggtggtcgagggcagcaccgccaaggtcgaatccgggcacaagttgagcgccacccatatcgaggtcccggccgacatttcctcggcagccttcttcctggttgccgccagtatcgccgagggttcggaactggtcctgcagcacgtcggcatcaacccgacgcgcgtcggcgtcatcgagatcctgcgcctgatgggtggtgacctgagcctggaaaaccagcgcgaggtcggcggcgagccggtcgccgacatccgcgtgcgctccgcgcggctcaagggcatcgacattcccgaggacctggtgccactggccatcgacgagttcccggtactcttcgtggctgccgcctgcgccgaggggcgcacggtcctgcgtggcgccgaagagctgcgggtcaaggagtcggaccgtatccaggtcatggccgacggcctgaaggccctgggcgtgaaggccgagccgaccccggatggcatcgtcatcgagggtggtgcgttcggtggcggcgaagtctgggcgcacggcgaccaccgtatcgccatgtccttcagcgtcgcttcgctgcgtgccagcgggccgatccgcatccacgactgcgccaacgtcgccacctccttccccaacttcctcgccctgtgtgcccagaccggtatccgggtcgccgtggagaacaattga

SEQ ID NO: 321705 - DNA, 690 bp, Pseudomonas aeruginosa
atgaacggcgctgtaccgatgctcgccatcgatggccccagtggcgccggcaagggcacggtcgccgggctgctcgcccggcgcctgggctggaacctgctggattccggggcgctttatcggctgttggcgttcgccgcggtcaaccatggtgtcgacctgaccaatgaagaggcgctgaaggtcctggctgcgcacctcgatgtgcagttcgtcgccgccgatggcagccatgggcagcgcatcattctcgaaggcgaggaagtgaccgatgtgatccgaaccgagcaggtcggtgccggcgcttcccaggtcgcggcgctgccggccgtgcgcgatgcgctgctgcagcgccagcgggcgtttcgcgaggctccgggactggtggccgacggccgcgacatgggcaccgtggtatttcccgatgcgcctctgaagatcttcctcaccgcctcggcggaggagcgtgcgcgtcgacgctacctgcagttgaaggcgaagggcgcggatgtcgaccagtctgccttgctggaagaaatccgcgagcgcgacgagcgcgacagccagcgcgcggtcgcgccgctgaaaccggccgatgacgcgatcctgctggactccaccgaaatgagcatcgaggcggtggtcgagacgatcatccggcactgcgagcggcagggctgggacgtctga

SEQ ID NO: 321706 - DNA, 1680 bp, Pseudomonas aeruginosa
atgagcgaaagcttcgcagaactctttgaagaaagtctgaaatccctcgacatgcagccgggtgccatcatcaccggcatcgtggtcgacatcgatggtgactgggtcaccgtccatgccggtctgaaatccgagggcgtcatcccggtcgagcagttctacaacgaacagggcgagctgaccatcaaggtgggtgacgaagtccacgtcgcactggacgcggtagaagacggctttggcgagaccaagctgtcccgcgagaaagccaagcgcgccgagagctggattgttctggaagcggctttcgctgccgacgaagtggtcaagggcgtcatcaacggcaaggtcaagggcggtttcaccgtcgacgtcaacggcatccgcgcgttcctgccgggttcgctggtcgacgttcgtccggttcgcgacaccacccacctggaaggcaaagagctcgagttcaaggtcatcaagctcgaccagaagcgcaacaacgttgtcgtttcccgccgcagcgtcctggaagccgagaacagcgccgagcgtgaagctctgctggaatcgctgcaggaaggccagcaggtcaagggtatcgtcaagaacctcaccgactacggcgcattcgtggacctgggcggcgtagacggcctgctgcacatcaccgacatggcctggaagcgcatcaagcatccgtccgagatcgtcaacgttggcgacgagatcgacgtcaaggtcctgaagttcgaccgcgagcgcaaccgtgtatccctgggcctgaagcaactgggcgaagacccgtgggttgccatcaaggcgcgttacccggaaggtacccgcgtcatggcccgcgtcaccaacctcaccgactacggctgcttcgccgagctggaagagggcgtggaaggcctggtacacgtctccgaaatggactggaccaacaagaacatccatccgtcgaaagtcgtccaggttggcgatgaagtggaagttcaggttctggacatcgacgaagagcgtcgtcgtatctccctgggtatcaagcagtgcaaatccaacccgtgggaagacttctccagccagttcaacaagggtgaccgtatctccggtaccatcaagtcgatcaccgacttcggtatcttcatcggtctggacggcggcatcgacggcctggtccacctgtccgacatctcctggaacgaagtcggcgaagaagccgtacgtcgcttcaagaagggcgacgagctggaaaccgtcatcctgtcggtcgatccggagcgcgagcgcatctccctgggcatcaagcagctggaagacgatccgttctccaactacgcgtccctgcacgagaaaggcagcatcgtccgcggtaccgtgaaggaagtcgacgccaagggcgctgtcatcagcctgggcgacgacatcgaaggtatcctgaaggcttccgaaatcagccgtgaccgcgtcgaagacgcgcgcaacgtcctgaaggaaggcgaggaagtcgaagccaagatcatcagcatcgaccgcaagagccgcgtcatcagcctctccgtcaagtccaaggacgtcgacgacgagaaggacgcaatgaaagaactgcgtaagcaggaagtagaaagcgctggtccgaccaccatcggtgatctgatccgtgctcagatggagaatcagggctaa

SEQ ID NO: 321707 - DNA, 285 bp, Pseudomonas aeruginosa
atgaccaagtcggagttgatcgaacggatcgttacccatcaggggcaactgtccgcgaaggatgtcgagttggcaatcaagaccatgctggagcaaatgtcccaggccctggcgaccggggaccggatcgagatccgtggtttcggcagcttttccttgcactaccgcgccccgcgcgtcggtcgcaaccccaagaccggggagtcggtacgactcgacggcaagttcgtgccgcacttcaagccgggcaaggagttgcgggatcgggtcaacgagccggagtga

SEQ ID NO: 321708 - DNA, 1065 bp, Pseudomonas aeruginosa
gtgacagaaaaaaattttccctcctataaagccaagagcggcgagttcgatctgatagagattatgagtgggttgtggtccctgagatggctgattgctttgctggcagtgttgcccgtgttgttggctattgtttatctattcatcaccaagcccgtctatgaggctcgtgtctcgacgctgcctccttcactcagcgatatagctggtttcaacttgggaagatcggaaaacgggcttcccgcgttttcggcaaatggtgtctattcaatcttcgtgcgaaatctccagtccgaagagactcgccgtcagttctttcgagatgtatatattccttccttggaggagggggcttctgttggttcgcgggatcagctttatgcgcttctcatgaattcggtaactattcagaagcctagcaaagaggatagcgagcgctacactgtcgtcatcgagcggcatgatccttcgcaggcggcggagtggggcgaaaaatatataggaattgcagtcaagcgttccatgcaggaaatgcaagaaggagtacgccgcgagtttcaagtgaagaatcgcaatatacagcaacagatcgacatcttgcgtgaaactgcgaaggctcgccgtgaagatcgtatctctcgactgaaagaggcgttgcgcgttgcggaggccttgaagctggaaaatcctccgttgatagaagggcaggttgatcaacagctttcctccatcatggaaggcggactgatgtacatgcgtggtgccaaggctattcgggcagaaataaaaacgctgcaagatcgtgtctccgatgatcctttcattcccgcattacgaggcttgcaggagaagtatgctcttctggaggggctgacgctgaatctcgataaagtcgctgtttttcgtcaggatggtacgatagaggtgccagatgatcccgtccgtccaagaaaaggcatagtgcttatcctaagcatgcttgccggtggttttttgggggttgcggtggctctagccatccttatggtgagaggtgggtttaggcgcacggtcgatgctgcatga

SEQ ID NO: 321709 - DNA, 1281 bp, Pseudomonas aeruginosa
  misc_feature (431)..(440): n is a, c, g, or t
atgaaggatctgaaggttgcagttgttgggctaggctatgttggtcttccgcttgctgttgaatttggtaaaaaacgaaccgttgtcggtttcgatatcaatcaggggcgaatcgctgaactgcggcaaggcattgactctactcttgaagtagatgcggctgagttgaaagaagcgtccgaactgagctttacttccaatcttcaggacttgcaaaagtgcaatgttttcattgtgacggttcctacacctattgatgaacataagcaacccgacctcacccctcttgtaaaggcctcggagagcatcggaaaggttctgaagaagggcgatattgtaatttatgagtctaccgtttacccgggagcgacggaagaagactgcgtacctgttctggaaaaattttccgggctgaggtttaacgaggactnnnnnnnnnncttcttcgccggttatagccccgagcgcatcaatcccggcgataaggaacatcgggtctcttcgatcaagaaggtcacttccggctctacgccggagatcgcggagttggttgactccctgtatagagaaatcatcactgccggtactcacaaggcgagcagcattaaagtcgctgaggctgccaaggtgatcgaaaatacgcagcgagatctcaatattgctctgatcaacgaactcgccatcattttcaatcgaatgggtatcgataccgaggcggtcctcaaggctgccggcacgaaatggaatttcatgccgttccgcccgggcctagtcggcggtcattgcatcggagtcgatccatattatctgactcataaagcccagagtattggctatcatccagagatcatcctggctggccgccgtttgaatgacggtatgggtgcctacgtcgtttcgcaactggtcaaggctatgctcaagcgtcgtatccacgtggacggtgctcgcgttctgcttatggggcttacattcaaggaaaattgtccagacctccgcaataccaaagtcgtcgatattgtccgtgagttggcggaatacaacatacaggttgatgtttttgatccttgggtgagcgccgaagatgccatgcatgagtatgggattactccagtcggtacgccatcccatggcgcttatgatggaattatccttgcggtcgcgcacagtgaattcaaaaatatgggcgcagaaaatatacgaaagttagggaaggctgagcatgttctctatgatctgaaatatctgctcgatgaagatcagtctgatctacgcctgtaa

SEQ ID NO: 321710 - DNA, 1023 bp, Pseudomonas aeruginosa
atgagtcgttatgaagagctaagaaaggaattgccggcgcagccgaaagtctggctgattacaggtgtggcgggctttattggctctaatcttcttgaaactttgctaaaacttgatcagaaggttgtcggcctggataattttgctactggtcatcagcggaacctggacgaagtgcggtccttggttagcgagaagcaatggtcaaattttaaacttattcaaggtgatattcgcaatctggatgattgcaataacgcctgtgcaggtgttgattacgttttacatcaagctgccttgggttcggtgccgcgttctattaacgatccgatcacctccaatgcaacgaacatcgatggtttcttgaatatgctgattgcagccagagatgccaaggtgcagagtttcacttatgcggcaagtagctctacctatggagatcatcccggtttaccgaaggtggaggatactataggtaagcctctttccccttatgcggttaccaaatatgtgaatgagctttatgccgatgtgttttcgcgctgctacggcttttcgaccattgggcttcgttatttcaatgtgttcggtcgtcgacaggatcccaatggtgcctatgcggcagtcataccaaaatggacctcttcgatgatccagggtgatgacgtctatattaacggtgatggcgagaccagtcgggatttttgttatattgaaaacaccgttcaggccaatctgcttgctgcaaccgcggggcttgatgctcgtaatcaagtttacaatattgctgttggcgggcggacgagtttgaatcagttgttctttgcgcttcgcgacggccttgccgaaaacggtgtgtcctatcaccgggaacctgtttatcgtgattttagggagggggatgtacgtcactctctcgctgatatcagcaaggctgccaaactgctggggtatgcgccgaaatatgatgtgtctgcaggtgtggcgttggccatgccttggtacatcatgtttttgaaatga

SEQ ID NO: 321711 - DNA, 1425 bp, Pseudomonas aeruginosa
atgctgggaaaacatagtctggtttattttttgttcaagtcttttccggcaatattgactcttgtcggtctttccgtttttactcgtctgttgagtccgggtgagtatggagtctattcgctgacaattatagttgttggcttcctcaatacggttttcttgcaatgggtggcgctgggggttggtcgttatctgcctgagtgtagtgatgaccaagctcgggcgaggcttcttggcacggctagggccattagcttccttgtttcactcgttatcatattcgtcacgttcctgctttgggagtggcgtgaagagataggtttctctattctttattatatggtcggttttctttgcctggcacaggcttggcatgatttgaatctgaagattcaaaatgcgatcttgcagccgctgacctacgggaaaatgttgttgatcaaaggggctggaagcttctttatcggtgttctccttgtttatttcgggtttggcgttgatggtttgctgctgggtacgcttgtgtctctggtactggcgaccattttcttccaagatgcgtggcggggagtcagttgggcgttggtagacaaggagcagttaaccaggttgtttgcctatggtgcaccactgacgcttactttcctttttgcattcatagtcaatgcgtctgatcgcttctttattggggcatttctgggggatgccgcggtgggtgtctactcggtgtcatatgacctagcgcaatatagtgttggtacagtggcttctatcgttcacctggcggcttttccgctggtaatggagaaactttccaagagcggcttgccacagacacaggaccaactgcggaagacctttatttttatctttgcagtagtctcgcctgctgcctgtggtctggccatggtggctccggaaatttcaggatctattatgggcgaagagtttcgtgagggtgccctaaagataattccgttgatatccctttcggcttttctgggggccttgaaatctttttactttgactactctttccaattggctagtgctacacgagtgcaggttgtgacagtggcggtgtcggcagtggttgatgttgtgtttaatttaatccttattccggagtttgggatagttggcgcggcggtatcttctgttatggcgttttcctctgcaatactaattagtatcttcttggggcgacgtgttttcccaatgcccgcccttccggggaaagatgctatgaaaattgcgttgtctgtgctgttgatggcggtgtcagttgcatccttcagtttggagagtgctttttttggcctggttgtgaaagttgtcttggggggaggggtctatttggcggcaatgattgctcttgatgtatctggcatgcgtactttcctgaagagcaagctaattcgatga

SEQ ID NO: 321712 - DNA, 1047 bp, Pseudomonas aeruginosa
atgatagcggagctcccagcagtgcgggttcgggcttttacccaaggtagatccgttcccagttcgagatttcgcgtgaaggctctgctcgaagggcttggcacgcgaggtatcgacatgcatatgtcggaagcgctggtctctgcctatcctccgcctcgtcgactggatcgcccgctttggttgctgagagaactgcttcaccgccttcctcaggtaatcggctcttacggaagtgacgttgtgatccttcaacgagagcttctctcgacaattccaactcttgagtttcttaccaaggcgcccagaattctggatgtcgatgatgcaatatggctgcatcgtagggggatcgccgcgaattcgattgctcgtcgtgtcgaccatatcgtgtgtggcaatcaatacctggccgattacttcggtcagttcggtaggccgactacgatcattccgacgggcgtcgatactcttcgtttttcacccagaagggaacgcagggagaatagagtgatcggctggtccggcacgtcgggtggctaccgctttctttatgacatagaaatcccgctgtcccacctgttcagagatcaccccgaatggaaattgaggatcgtttcggaccgtcctcccgagttcaaggtcattccagccgaaaaggttgagttcattcgctggacagagaccaatgaggtcgaaacgattgccggaatggatatcggtataatgcctcttgccgatgatctatggtcgagggggaagtgtagctacaaaatgttgctttatatggcctgtggcttgccggtagtggtttccgagtatggtatgaaccgcgatgttctagcccgaggcttcatcggatatggtgcggtggacgacgagggctggtatgagtcacttgcggctttggtcaaagatccggaagcccgtgtgcgtgcagggcaaaatggaagagatattatcgaaaggcactattctctcgatgtcgtttgtgacctgtgggcaatggtcattggctcggtagcgcctggaaagggaacgaggtga

SEQ ID NO: 321713 - DNA, 1884 bp, Pseudomonas aeruginosa
atgtgtggtatcgctggcttctggaatattacgggaactctcctaggggataatgcacgtgtggcccggcagatggctgccgccatacatcatcgtggaccggatgagtcggggatttggtacgaggctccgcgcgccccgatacttgtccatgcgcgtcttgcggttctggagctttcccccgcaggcagccagcccatgcactccgactgtggtcggtatgtgctgatttacaatggcgagatatacaaccatctggctcttagggctcgcctgagcgaggcaggtgtaacacattcctggcgtggcggatcggacaccgaaaccttattggcatgctttgcccaatggggcgtggagagtaccctcaagctcaccgtgggtatgttcgctctggccttgtgggatcgacaggagaaaacaattactctggctcgtgatcgaatgggcgaaaagcctctctattggggctggcagaatggcgtgcttttttttgcatccgaactgaaggccctgaaagaacatccgctttttaggggggatattgatagagatgccttggccctatttctacgatatggatatgtcccggctccctatagtatttataaaggtatcgggaagctaagggcagggagctatttggtcctatcggaacgttcattgaacgagacctgcgaacctgctgcctattggagtgcgaacgccgcgatagaagaggctctctccaatccattccagggaacggatgccgaggcagttgatcttctggaaagccagttgagaactagcatatcggatcagatggtctccgatgttcctttgggagcttttctgagcggtggggtggatagtagtacggtcgtggcgctgatgcagcagcagtcctcacgccctatacggacattctctattggctttgatgagcctgggtatgatgaggctgtttacgcaaaggcggttgcagaacatatcggtaccgatcatacagagctctatgtcaattcaaaagatgctctagatgtaattccatctttgccaaagatctactgtgagccatttggtgacagttcgcagataccaaccttgattgtcagtggattggccaggcagcaagttactgttgcgctgagtggagatggtggtgatgaactgtttggcggctacaatccctatcagtttactccccgtgtctggcgcatgctggagcgatttcctcattccatgcggcgtttcgcatcggcttttgctcaggatttacctttacctgacaagttggggaagctgcgtgacgtatttgcttcgaggacggccgaggagcttttctatcgattgaacagtcactggagaaatcacgaatacccggtcataggtgcacaaggtcacacggcactattggatactccagaaagatggccaagggtggactcgttccagcactggatgatggccatggatgttcagggctacatgcctgacgacattctggtgaaggtagacagagcagcgatggctaacagcctggaaacccgggttccactgatagaccatcgcgtgttcgaactggcttggcgcatgccgttgcatatgaagattcgcaatggaaaaggaaagtggttgcttcgtgaagtcttgtataggcatgtttcgcgagagctcatagagcggcccaagaaggggttttccgttcctgtctccgattggctgagaggccctctgaaagagtgggctgaatcgctgcttgatgagcgacgccttcagcaagaaggttatttggatagtaggttgatacgcaggatctggaacgaccacttggcgggaaggcgggaccactcaagacgcctctggagtgttctcatgttccaagcgtggttggagtcatga

SEQ ID NO: 321714 - DNA, 1152 bp, Pseudomonas aeruginosa
atgaccacagtaaaagttatccacgtgatagccggcctgaagaaagtcggcggtgctgagctaatgctcaagcggttgatcgagactcaaaatggcggcagtgaattcgaacattcgattatttcactgtctgatcttggtgagtttgggcagggtctgattgaggctggtatatctgttgatgtgcttggcatgacctcgatgagggatatgcctcgagtgctccttcgtctgatagggatatttcgtgaaaggaggcccgatatagtccaaacatggatgtatcattccgatcttcttggtggattggctgccagaatggccggtattggcgggattatatggggagtccgcacgaccgaccttcaagagggcggcaagagtacgactgttctggtacggaaggtgtgtgcctggctatccggattcttgccaaaatatattgtttgcgccgccgaggcctcaaggcgctcacacattgctgttggctacaacgcaagcaggatgctggtcattcccaacggtttcgatctcactcgcctgcaggcgaccgacgaacagcggtccgctatcaggagtggagctggcatagaggccagcgatatcgtgattggcagtctaggcagattccacccggtaaaggatcatgcttcctttgtcgcagctgccggtctgctggctccacgttattcgcgcttgaagtttcttttggtgggacgggagctgctgtcttccaatgctgaattgcagcgcctcatcgaagctaccgggtatgcggagcgcttcatcctgcttggagagcggcaagatgtagcttcgtgtctgaaagccatggatatcttctgtctgcattctcgcacggagggattccccaatgttcttggtgaagccatggccatgggattgccttgtattaccactgatgtgggggatgcggcttatttgctaggtaacgacggtgtcgtcgttccggccttggatccgaatgcgctcggcaaaggtatcgaggatctcattgcgttggatgtcgagggtcgtcgggcacttggtgaggctgcaagacagaggatttactcgaacttcacgatggccagtgcctctcagcgtttcatgagtctgtatcgcgacattcttgtaaaaagaaaagcttga

SEQ ID NO: 321715 - DNA, 1131 bp, Pseudomonas aeruginosa
atgaagccggtattgttgatgatagtgaacgacccggctttcttcatgtctcaccgtttaccggtcgctgtcggagcccagcaggctggtttccaggtacatatcgccacacgccctggtgacgcggtgaaaaagatcgtctcccaaggttttctgcatcatgaattgccactgtccagaagcggaaaaaatcctttttcagagctgtatctgctgacttatgtctggcgccttttgtggagattgcggcctgatgttttacacttggttaccatcaagccggtaatctatggcggtatcgccgcacgcttggcgccggtgaagggggtcgtggcggccgtttccggacttggtttcgttttcatggccaagggtctgaaggcctgcgcgtttcgtgcctgtgtcgcctggctttatcggcgggctttgggcaagaaaaagttgcgtgtcatctttcaaaatcccgatgatcgggacgcgctgatcggcctgggtgcgatcacttttgaaaagtccgtcctgattcgcggttcgggggtcgacctgacgcagtaccagccggccccggaaagccccgaaacgccggtggtcacattggcggctcggttgctcagggacaagggtgtgctggaattcgtcgaagcggcaaatatccttaggcagcgcagcgtaccggcacattttcaactggtcggagacctggatcctgggaaccccaccagtatcgagccgtccgaactagagcgttggcgtagcgagggcacgatcgagtgtcttggttatcgccaggatatcgcgtctgtcttcgcccgttcgcatatagtcgttctgccttcttatcgtgaagggcttcctaaggtcctggtcgaggcgtcggcgtgcgggcgtgcggttgtgacgaccgatgtaccgggttgccgggatgcaatccaggctgatgttacgggcctgctcgtgccggtgcgtgattctgctgctctggcggatgccattcagcgtcttatcgagtcgccagagttgcgcaagaagatgggagctgctgggcgagcgttggcagagcgtgattttgcgatcgaaagtatcgtccaacagcacctggatatttatcgggcactagggagcggagcttga

SEQ ID NO: 321716 - DNA, 963 bp, Pseudomonas aeruginosa
ttgacgcgacataatgtattggtaacgggggcaaccggattcatcggggccgcgctggtcaatagtctctgttcttccgggcagtacaaggtttgggccgggtgccgccgaagaggtggggcctggcctcgaggggttactcccttgcttctgggtgaactgggcagttctgttgtctgggatgcggagtcggccatcgatacggtggttcattgcgctgcccgcgtgcatgtcatgagcgagacggcctccgatccgctcgtcgagttccgcaaggccaacgttcaggggacacttgatctggcccgggaggccgtatcccggggagtgcggcgtttcatctttatcagctcgataaaggtcaatggcgagggaactgagcccggtcggccctatactgcggacagtccgcccaatcctgtcgatccctatggcgtttccaaacgggaagcggagcaagcgctattggatctggcggaagagaccggactggaggttgtgatcatccgaccggtcctggtttatggtccaggggtcaaggccaacgtacagaccatgatgcgctggctgaagcgcggcgtgcccctccctctaggggctattcataatcggcgtagtctggtgtcgctggataatcttgtcgacctcatcatcacctgcatcgagcatccggctgcggtcgggcaagttttcctcgtaagcgacggtgaggatctttccaccaccgagttgctgcggagaatgggacgcgccttgggcgctcccgctcgcctgctgcctgttcccgccagttggatcggtgcagcggcgaaagttctgaacaggcaggcatttgctcgccgcctgtgcggctcattgcaagtcgatatcatgaaaacccgccaagtgcttggctggactccgccggtaggggtggaccaggcattggagaaaaccgcccgctctttcctggatcgccaatga

SEQ ID NO: 321717 - DNA, 1041 bp, Pseudomonas aeruginosa
atgatgaatctatggttgttgttgccggcggttgccgctctttccctgctgttgaccgccggcttgcgccgttacgcgattgcccgcagcttgatcgatgtacccaatgctcgaagttctcaccaggtgccgacgcctagggggggcggtgtcgctatcgtgctctccttcctgctggcagtgctgcttgcggcgatattgggcgcggtgaaaccggatctggccactggtatcctgggggcgggtattgggatcgcattgctgggcttcctcgacgatcatggccatatcgctgcccgttggcgtttgctcggccatttcgccggtgcttgctggctgctgtactggcttggaggtttgcctgcattggcctttttcggccttgtggtcgatctggggtgggttggacacatagctgcggcgttctatctggtatggatgctcaatctctacaatttcatggacggtatcgatgggattgccagcgttgaggctgtgtgtgtgtgcgttggcgctgccctgcttgtcgtggtcagtggtgtaggttccgatgaggcatcccagggcgtttggttggcggcgctgctggcagccgcggtgacggggttccttttctggaatttccctcctgcgcggatcttcatgggggatgctggtagcggtttcttgggggttatcattggtggcctttccctgcaagccgcatgggtctcgccgcaactcttctggggttggctcatcctgctgggggtattcattgttgatgccaccctgaccttgttgcgccggttgctgcggggagacaaggtttatgaggcgcatcgcagtcacgcataccagtatgcttctcgtcattacgggcgtcatcttcctgttaccctggcagtgggaggcatcaacatcttctggttgttgccactggcactgcttgtcgcagcggggaagatcgacggcatgcttgctttgttgattggctacctgcctctggcgttcctggcgctccgttttaaggccggagtcctggaatcacgcgctgcttga

SEQ ID NO: 321718 - DNA, 1998 bp, Pseudomonas aeruginosa
atgttggataacttgcgtggacgcctcctgggattgccgcgccgccagaagcgcattcttcaggttgcgacggacatcggcctggtgtggctttcattgtggctggctttcctggtgcgtctcggcaccgaagacatgatcgatccgttcggggatcacgcctggctgttcatagcggcgcctctaaccgccatcccgctcttcatccgcttcggcatgtaccgggcggtgatgcgctacctgggcaacgacgcccttatcgcgatcgccaaggccgtcaccatttccgcgctggtcctgtcgttgctggtctactggtaccgctccccgccggcggtggtgccccgttccctggtgttcaactactggtggttgagcatgctgctgatcggcggcttgcgtctggccatgcgccagtatttcatgggcgactggtactctgctgtgcagtcggtaccatttctcaatcgccaggatggcctgcccagggtggccatctatggcgcgggggcggccggcaaccagttggttgcggcattgcgtctcggtcgggcgatgcgtccggtggcgttcatcgatgacgacaagcagatcgccaaccgggtcatcgccggtctgcgggtctataccgccaagcatatccgccagatgatcgacgagacgggcgcgcaggaggttctcctggcgattccttccgccactcgggcccggcgccgagagattctcgagtccctggagccgttcccgctgcacgtgcgcagcatgcctggcttcatggacctggccagcggtcgggtcaaggtggacgacctgcaggaggtggacatcgctgacctgctggggcgcgacagcgtcgcaccgcgcaaggagctgctggaacggtgcatccgcggtcaggtggtgatggtgaccggggcgggcggttctatcggttcggaactctgtcggcagatcatgagttgttcgcctagcgtgctgatcctgttcgagcacagcgaatacaacctctacagcatccatcaggaactggagcgtcggatcaagcgcgagtcgctttcggtgaacctgttgccgatcctcggttcggtgcgcaatcccgagcgcctggtggacgtgatgcgtacctggaaggtcaataccgtctaccatgcggcggcctacaagcatgtgccgatcgtcgagcacaacatcgccgagggcgttctcaacaacgtgataggcaccttgcatgcggtgcaggccgcggtgcaggtcggcgtgcagaacttcgtgctgatttccaccgacaaggcggtgcggccgaccaatgtgatgggcagcaccaagcgcctggcggagatggtccttcaggcgctcagcaacgaatcggcaccggtgctgttcggcgaccggaaggacgtgcatcacgtcaacaagacccgtttcaccatggtccgcttcggcaacgtcctcggttcgtccggctcggtcattccgctgttccgcgagcagatcaagcgcggcggcccggtgacggtcacccacccgagcatcacccgttacttcatgaccattcccgaggcggcgcagttggtcatccaggccggttcgatggggcagggcggagatgtattcgtgctggacatggggccgccggtgaagatcctggagctcgccgagaagatgatccacctgtccggcctgagcgtgcgttccgagcgttcgccccatggtgacatcgccatcgagttcagtggcctgcgtcctggcgagaagctctacgaagagctgctgatcggtgacaacgtgaatcccaccgaccatccgatgatcatgcgggccaacgaggaacacctgagctgggaggccttcaaggtcgtgctggagcagttgctggccgccgtggagaaggacgactactcgcgggttcgccagttgctgcgggaaaccgtcagcggctatgcgcctgacggtgaaatcgtcgactggatctatcgccagaggcggcgagaaccctga

SEQ ID NO: 321719 - DNA, 330 bp, Pseudomonas aeruginosa
atgcacctaatcaaatccgctctgcttctcatcctgttcgcctgtcttccgttttcggcttccgccgcaccggtcgccgtcgccaagaatccgctggccgcaacgacacctgcgacgaccgtgtcgccgggggagcaggtcaatatcaatacggtcgacgaggccgccctgatacgggggctcaacggtgtcggcgaggccaaggccagggcgatcctcgagtatcgtgcggcccatggtccgttcgtctcggtggatcaactgctggaagtgaaaggggtaggcccggcgttgctggagaagaaccgggcgcggatcgtcatcgagtga

SEQ ID NO: 321720 - DNA, 1197 bp, Pseudomonas aeruginosa
atgagtctgttttctgccgtcgaaatggcaccgcgtgatcccatccttggcctgaacgaagccttcaacgccgatacccgtccgggcaagatcaacctgggcgtgggcgtgtactacaacgaggaggggcgcattccgctgttgcgtgccgtgcaggctgccgagaaggcccgcatcgaggcccacgcgccgcgcggctacctgccgatcgaagggatcgccgcctacgaccagggcgtacagaaactgctgttcggtaacgaatccgagctgctggccgccggccgcgtggtcacgacccaggccgtcggcggcaccggcgccctcaagctcggcgccgacttcctcaagcgcctgctgcccgacgccaccgtggccatcagcgacccgagctgggaaaaccaccgcgcactgttcgaagccgccggcttcccggtgcagaactaccgctattacgacgccgccagcaatggcgtgaaccgcgccggcctgctggaagacctgaatgccctgccggcccgctcgatcgtggtcctgcacgcctgctgccataatccgaccggcgtcgatctcgagctggacgactggaaacaggtgctggacgtgctcaaggccaagggccacgtgccgttcctcgacatcgcctaccagggcttcggcaacggcatcgaggaagacgccgccgcggtgcgcctgttcgcccagtcgggcctgagcttcttcgtttccagctcgttctccaaatccttctcgctctatggcgaacgcgtcggcgccctctcgatcgtgaccgaaagccgcgatgaatcggcccgcgtgctgtcccaggtgaagcgggtgatccgcaccaactattcgaacccaccgacccacggcgccagcgtcgtctcctccgtgctcaacagcccggaactgcgggccctctgggagcaggaactgggcgagatgcgcgaccgcatccgcgacatgcgcctggcgatggtcgagcaactggcagcccacggcgccaagcgcgacttcagcttcgtcggtcgccagcgtggcatgttctcctattccggcctgaccgccgaccaggtcgagcgcctgaagaccgagttcggtatctacgccgtcagcaccggccgtatctgcgtcgccgcgctgaacaaatcgaacctggagaccatcaccaaggccatcgtccaggtcctgtag

SEQ ID NO: 321721 - DNA, 2013 bp, Pseudomonas aeruginosa
atggatacgttccaactcgactcgcgcttcaagcccgccggcgaccagccggaagccatccggcagatggtcgaggggctggaggcggggctttcgcaccagaccctgctgggggtgacgggctctggcaagactttcagcatcgccaacgtgattgcccaggtgcagcgcccgaccctggtcctggcgccgaacaagaccctggcggcccagctctacggggagttcaagacgttcttcccgcacaattccgtggagtacttcgtttcctactacgactactaccagccggaggcctacgtcccgtcttccgatacctatatcgagaaggactcctcgatcaacgaccatatcgagcagatgcgcctgtcggcgaccaaggcgctgctcgagcgtccggatgcgatcatcgtcgccaccgtgtcgtccatctacggcctcggtgatcccgcgtcctacctgaagatggtcctgcacctggaccgcggcgaccgcatcgaccagcgcgaactgctgcggcgactgaccagcctgcagtacacccgcaacgacatggatttcgcccgtgcgactttccgtgtgcgtggcgatgtgatcgacatcttcccggccgaatccgatctcgaggcgattcgtgtcgagttgttcgacgacgaggtggaaagcctctcggccttcgatccgctcaccggcgaggtgatccgcaagctgccgcgcttcaccttctaccccaagagccactacgtgaccccgcgcgagacgctgctggaggcggtcgaccagatcaaggccgaactcaaggaacgcctggactacctgcgcaacaacaacaagctggtggaagcgcagcgcctggagcagcgcacgcgtttcgacctggagatgatcctcgagctgggctactgcaacggcatcgagaactactcgcgctatctttccgggcgggcccccggcgagccgccgccgacgctctacgactacctgccggccaactcgctgctggttatcgacgaatcgcacgtcagcgttccgcaggtcggtgcgatgttcaagggcgaccgctcgcgcaaggagaccctggtggaatacggtttccgcctgccttcggcgctggacaaccggccgctgcgcttcgaagagtgggaggcggtgagtccgcagaccatcttcgtctccgccaccccgggcccctacgaggcggagcatgccgggcgggtcatcgagcaggtggtgcgtcccaccgggctggtcgatccggagatcgaggtacgtccggcgatgacccaggtggacgacctgctctcgcagatccgccagcgtgtggccaaggacgagcgggtgctggtgactaccctgaccaagcgcatggccgaggacctcaccgattatctcggcgatcacgacgtgcgggtgcgctacttgcactcggacatcgataccgtcgagcgagtggagatcatccgcgacctgcgcgccggtgcgttcgacgtgctggtggggatcaacctgctgcgcgaaggcctggacatgcccgaggtgtcgctggtggcgatcctcgacgcggacaaggaaggcttcctgcgctcggagcgctcgctgatccagaccatcggtcgtgccgcgcgcaacctgcacggcaaggcgatcctctacgccgacaacgtcaccggctcgatgcagcgtgcgatcgacgagaccgagcggcgtcgggccaagcagatcgccttcaacgaagcccatggcatcgtgcccaagggggtgcgcaaggacatcaaggacattctcgaaggcgccgtggtgcccggcgcgcgcggcaagcgcaagggcgtggccaaggtggcggaggagagcgggcgctacgagaacgaactgcgctcgccgagcgagatcagcaagcgcatccgccaactggaggaaaagatgtaccagttggcccgcgacctggagttcgaggcggcggcgcaactgcgcgacgagatccagacgctgcgcgagcgcctggtcaacgtctga

SEQ ID NO: 321722 - DNA, 1560 bp, Pseudomonas aeruginosa
gtgaccgctgaggcgctggcccggccgcttggcgaaccgacccggcgcgactggatcgcggtgctcagcgccatgctcggcgcattcatggcggtgctcgacatccagatcaccaactcctcgctgaaggacatccagggcgcgctggcggcaaccctcgaggaaggctcgtggatctccacctcctacctggtggcggagatcatcatgatcccgatgaccgcctggctggtgcaactgctctcggcacgccgcctggcggtgatgatctcggtgggcttcctggtgtcctcgctgctctgctcgttcgcctggaacctggaaagcatgatcgtgttccgcgccatgcagggtttcaccggcggcgcgctgattccgctggcgttcaccctggccctggtcaagttgccggaacaccaccgtccgaagggcatggcgctgttcgccatcaccgccaccttcgcgccctccatcggaccgaccctgggaggctggctgacggaaaacttcggctgggaatacatcttctatatcaacgtgccgccgggcctgttgatgatcgccgggctgctctacggcctggagaaaaaggcgccgcattgggaactgctgaagagtaccgactacgccggcattgtcaccctcggcatcggcctgggctgcctgcaggtcttcctcgaggaaggtcaccgcaaggactggctggagtcgcaactgatcgtcagcctcggcagcgtcgccctgttcagcctggtcctgttcgtcatcctgcaactgtcgcggccgaacccgctgatcgacctgggcatcctgcgcaaccgcaacttcggcctcgcgagcatttccagcatcggtctgggcatgggtctgtacggctcgatctacgtactgccgctgtacctggcacaaatccagggctacaacgccatgcagatcggcgaggtgatcatgtggatgggcattccccagctgttcctgatcccgctggtcccgaagttgatgaggctggtctcgccgcgcctgctctgcgccgccggcttcggcctgttcggccttgccagcttcttctccggggtgctcaacccggacttcgccggaccgcagttcaaccagatccagctactgcgcgccctcggccagccgatgatcatggtgaccatttcgctgatcgccaccgcctacctgcagccacaggatgccggctcggcctcgagcctgttcaacatcctgcgcaacctcggcggcgccatcggcatcgccctgctcgcgaccctgctcgacagtcgcgccaaggtgtacttcgactatctgcgcgaagccctggtgccgaccaacccgcaggtcgacgaacgcctcgcgcaactcgccgcgcaactgggcagccagcaggcggcgctgggcaaactcagcgagatcacccaccagcaggcgatgatcatggcctacaacgatgctttccatgtcatcggcatggtgctcgcagtgagcatgctcgcggtgctgctgacccgctcgctgccggccggcatcggcgcccgcgccgacgccggggctcactga

SEQ ID NO: 321723 - DNA, 1035 bp, Pseudomonas aeruginosa
atgcccgcccaactcaaacgtcgcctgaccgtcttcctggtggccgtcggcctgatcgccctggccttcttcctgcactggtggttcatcggccgccacgtggaaagcaccgacaacgcctacgtccagggcgagatcacgcgggtggccagccagttgggcgcgcgggtcgaggaagtcctggtgcgcgacaaccagcacgtggacaaggggcagctactggtacgcctggaagacgccgacttcaagctcgccgtcgagcgcgcccaggccgcgctggccacccgcgaggcggaactggcccaggcgcgcagcaagctggtgcagcagggcagcctgatcgccgccagcgccgccgacgtcaacgccagccaggcaaccctcggtcgcgcacagatcgacctgaaccgcgccgaagccctgcgcaagcccggctacgtttccgaggaacgggtcaccaccctcaccgccgacaaccatgtggctcgctcgcaactggccaaggcccgcgccgacctcgaggcacaacgcgtccagcgcgacaccctgggcgccgagatcaagcgcctggaagcgcagatcgccagcgcccgcaccgaactggcgcaagccgaaatcaacctgtcacgcaccctgatccattcgccgatcagcggcctggtcggccagcgcagcgcacgcaacggccagtacgtgcaggtcggcacccatttgctgtcgctggtgccggacgaagacatctgggtccaggccaacttcaaggagacccaggtaggccgcatgcgcgacgggcagaaggcgcgcctgaccttcgacgccttccccgacacgcctatcgacggccgcatcgatagcctgttcgccgcttccggcgcgcagttcagcctgctgccaccggacaacgccaccggaaacttcaccaaggtggtgcaacgcatcccggtgaagatcgtgttcgaggccgacaacccgctgcatggccgcatccgccccggcatgtccgtcgaagccgaggtcgagctccgtgaccgctga

SEQ ID NO: 321724 - DNA, 921 bp, Pseudomonas aeruginosa
atggggcttgatgatgcgctgatcttcacccgcgtggtggagtaccacagcttcacccaggccgcgcagagcctgggcatgcagaagtccacggtgagccggcgcatcgccctgctggaggagcgcctgggcgtgcgcctgctcaatcgcactacccgcaagttgcgcctgaccgaagtagggcaggcctactacgagcgctgccggcagatcatgcacgatttcgccgaggccgagcaggcggtcatgcagttgcaacaggcgccgtcgggattgctgcggatcacctcgccgatagagttcggccagatgttcctcgccagcctgctgggcgacttcatgcgccagtacccgcagatcaccgccgaggtcgagctggcctcgcgcagcgtcgatccgctgcaggagggcgtcgacatcgtgatcatggtcggccagccggaggattccaccctggtggcccgtcgcctgctctctaccagccgctggctctgcgccagccccgactacctggcggcgcacggcacgccgacatcggtggccgagcttgccgggcatcgcgcggtccttctgtccaccgactcccagcgctactggccgctttccggagacagcctgccctgccagcgggtgctgtcctgcaacaacatcaccttcgcccgcgaggcggtggtcgccggtgccggcattgccgcgctaccggcgctgatctgtgcggagagcgtgcacagcgggcgtctggtgcgtttgctggcggacgtgccgttgccggtcggcgaactgtatgcggtctatccttcgcggcgtttccaggcgatgaaggtcaaggccttcctcgatttcctgatcagccgcctgccggccgacaccggtcgtttactggagccggaggcggcccgcctgataacatcgcgcccctga

SEQ ID NO: 321725 - DNA, 1485 bp, Pseudomonas aeruginosa
atgaccactgttcgtactcgcatcgccccgtcgccgacgggcgacccgcacgtcggtaccgcatacatcgcgctgttcaacctgtgcttcgcgcgtcagcacggcggtcagttcatcctgcgcatcgaggacaccgaccagctgcgttcgacgcgggagtccgagcagcagatctacgacgccctgcgctggctcggcatcgaatgggacgagggcccggacgtcggcggcccgcatggcccgtaccggcagagcgagcgcgggcatatctacaagaagtattcggacgaactggtcgagaagggccatgccttcacctgcttctgcacgcccgagcgcctcgatgcggttcgcgccgagcagatggcgcgcaaggaaaccccgcgctacgacggccactgcatgcacctgccgaaggatgaggtgcagcgccgcctcgccgccggcgagtcccacgtcacccgcatgaaggtgccgaccgagggcgtctgcgtggtgccggacatgctccgcggcgatgtcgagattccgtgggatcgcatggacatgcaggtgctgatgaaggccgacggcctgcccacctacttcctcgccaacgtggtcgacgaccacctgatgggcatcacccacgtcctgcgcggcgaagagtggctgccgtcggcgcccaagctgatcaagctctacgagtatttcggctgggagcagccgcagctgtgctacatgccactgctgcgcaacccggacaagagcaagctgtccaagcgcaagaatccgacctctatcaccttctacgagcgcatgggctacctgccgcaggcgctgctcaactacctcgggcggatgggctggtcgatgccggacgagcgcgagaaattcaccctcgccgagatgatcgagcatttcgacctgtcgcgcgtctccctgggcggaccgatcttcgacctggagaagctctcctggctgaacgggcagtggatccgcgagcagtccgtggaggagttcgcccgtgaggtgcagaagtgggcgttgaatcccgaatacctgatgaagatcgctccgcacgtgcagggacgggtggagaacttcagccagatcgcgccgctggccggattcttcttcagcggcggggtgccgctggacgcttcgctgttcgaacacaagaagctcgatccgacccaggtccgccaggtcctgcaactggtgctgtggaaactcgaatccctgcgccagtgggagaaggaacgcatcaccggctgcatccaggctgtcgccgaacacctccagctcaagctgcgcgacgtgatgccgctgatgttcccggccatcaccgggcatgccagctcggtttcggtgctggacgccatggagatccttggcgccgacctgtcgcgctatcgcttgcgccaggccctggagctgctgggcggggcgtcgaaaaaggaaaccaaggaatgggagaagatccgcgacgccattcccggctga

SEQ ID NO: 321726 - DNA, 543 bp, Pseudomonas aeruginosa
atgagcgacaagaaaacccagacccgtgcccgcatcctcggtgccgccacccaggccctgctcgagcggggcgccgtcgaacctagcgtcggggaagtgatgggcgcggcggggctcaccgtcggcggcttctatgcccacttccagagcaaggatgcgctgatgctcgaggcgttcgagcaattgctcggcaagcgccgcgaactgctcggcgaactcgatcccggattgtcgggaaaggagcgtcgtgccttggcggccgccttctacctgtcgcgcaagcatcgggacgcacaggtcgacgccggttgtccgctgccggcgaccctagccgaggtggcgcgcctgccggaggggtttcgcgaggtcttgagcagacatgtcgagatcatggtcgccagcctggcggaaagtcccgaggaaaccgacgtcgccctggccgacctggtgttgatgattggcggtttggcgctggcccgggcattggggccgggggagctgtccgaccgggttctgcgtgccgccaagcaggcggtgaactga

SEQ ID NO: 321727 - DNA, 858 bp, Pseudomonas aeruginosa
atgagcagcctgacctggattcgcggtttcaacgggacgatcggccgcatcgcgccgcgttggacggccgagcgtatgcgtcggacgttcatggtgcctggcgagtggccgccgaaggattgggagctgccgctactggccagttcggagcgcgtcactctgcgcttcgggctgtcggtgttgcgctggggcgaggggccggcagtcctgctgctgcatggctgggccggcaggccgacacagttcgcccatctgatcgagcaactggtcggcgcgggttattcggtgtatgccctcgatgcgccggcccatggccgctcgccgggcagggaggcgaacgtggtgctgttcgcccatgccttgctggaggccgctggcgagttgccgccgctgcgtgcggtggtcggtcattccctgggtggcgcggcggcgttgctggcggcccagatggggctgcgcagcgaagcgctggtgacggtctcggcgccgtcgcggattctcgaacagttgcgcctgttcgctcgtttcgtcggtttgccggccctggctcgctcgcatttcatccgcctggtcgagcgtcaggctggcatatccgcggcgtgcctggatgtggcgcgctaccgtctggaaatgcccggactggtggtgcatgccgacgacgacacgcgcgtagcggtggaaaatgccgagcgcatccatgccgcctggccggccagtcgcttgctgcgcctgccgggcggcggccaccaccgactgctcggcgagcgcaggctgagcgagtcgctgctggcgctgctcgaggagcgcccggcgatgcgcgcttgccggcgcgtggaaaagacggcgagcgcttcctga

SEQ ID NO: 321728 - DNA, 648 bp, Pseudomonas aeruginosa
atgacattgccgctggatcgggtcctgcagcaggccagcccggtattgccggtgctggtgatcgaggacgtggcgctggcgcccgacctggcgcgcgcgttgtatgcgggcggcgtcacggtgctggaagtgacgctgcgcacgccgcaggcgctggacgcgatcgccgccatccatcgcgaggtgcccgaggtcctgctgggggcgggtaccctgatccacaccgagcagtttctcgaggcgcgcgacgcaggcgcacagttcgccgtcagccccggatgcacgccgcgccttgccgccgccgcggaggatgccggcctgccatacctgcccggggtgatgacgccttcggaagtgttgctggcgctggagtacggttatcgctcgctgaagctgttcccggccgatggcactgccagcgtgaaaatgctgaaaagcctgaaggggccgttcaccggcatccgcttctgcccgaccggcggggtcaacctggacaacctgctgaatttcctccgcctgcccaatgtcgcctgtgtcggcggcacctggctggcgccgccgagcctgatccgggcgcgggcctgggatcagatcacacaactggccagggaagcgcgcgaactggccggcagcctggagcagcattga

SEQ ID NO: 321729 - DNA, 438 bp, Pseudomonas aeruginosa
atgaattgggactacgccgatccgttcgtgatcgacctcagggtcctcgccgaggacatcgacgggctcggccacgcgaacaacgccgtctacgtcagttggctggagcgctgcgcctggcgtcactcgcagcggctgggcctggacctggccgagtaccgccggctggaccgggcgatggcggtgctgcgccacgagatcgactacctggccgcggcttacgagggcgacgaactgcaactggcgacctggatcgtcgagtccgaccagcgcctgcggatgaaccggcgcttccagttggtacgcccggcggatggcgccacgctgctgcgggcgcagaccaccttcgtctgcatcgaactgtccagcggcaagccgaagcggatgccggcggagttcatcgacggctacggccaggctctgctcgccggggcctga

SEQ ID NO: 321730 - DNA, 960 bp, Pseudomonas aeruginosa
gtgcaaatcgccctggcgccgatggaaggtctggtggatgaaatcctccgcgacgtgctgacccgcgtcggcggcatcgattggtgcgtcaccgaattcatccgcatcaccgatcgcctgctgccggccacggctttccacaagctggcgccggagctgcgcgacggcagccggacccgcgccgggacgccgatgcgtgtgcagttgctcggctccgatcctgcgtgcctggcggataacgccgcgttcgcctgtgagctgggtgccccggtgatcgacctgaacttcggttgtccggccaagaccgtgaaccgctcgcgcggcggcgcggtattgctcaaggagccggagctgatgcacgacatcgtcgccgccgtgcgtcgcgcggtgccgagcgagattgcggtgacctcgaagatgcgcctgggctacgacagtcccgacggtgccctggattgtgcgcgggccctggccgacggcggctcggcccatgtagtggtgcatgcccggaccaaggtcgatggctacaggccgccggcgcactgggaatgggtggcgcgggtggccgaggcggtgcgcgtgccggtgttcgccaatggcgaagtgtggacgctcgacgactacctgcgttgtcgcgaggtcagcggggtggaggacatcatgctcggtcgcggcctggtctcgcgtcctggcctggctcggcagatcgccgcctggcgcgatggcggcgaaatccgcgagatgccctggagcgagctgttgccgctgctgcgcgacttctggctgcaggcccggcgcaagctcgccccgcgctatgccccgggccgtctcaagcagtggctgggcatgctcacccgcacctatcccgaagccgtcgagctgttcgcacggattcgccgggaaagcgattgcgaaaccatcgaccggctgttgcaggtgtcgttcagccaggcggcctag

SEQ ID NO: 321731 - DNA, 747 bp, Pseudomonas aeruginosa
atgcgcaacgtcatgctgatcaccggagccagccgcggcatcggcgccgccaccgctctgctcgccgccgagcgcggctatgcggtcgtcctcaactatctgcgcaaccgcgaggccgccgaagcgctgcgccagcgcatcgagcgccagggcggcgaagccctggcggtggcggccgacgtagccgaggaaggcgatgtcgagcggctgttcgccgccatcgacgaacgtttcggccgcctcgacgtgctggtcaacaacgccggcatgctggaagcgcagacgcgcctggaaaacatcgacgcggcgcgcctgcacagggtattcgcgaccaacgtgaccggcagcttcctctgcgcccgcgaggcagtgaagcgcctgtcgacccgccacggcgggcgcggcggcagcatcgtcaacgtatcctcgatggcctcgcggctgggatcgcccaacgaatacatcgactatgccgccgccaagggcgccatcgacagcatgaccatcgggctggccagggaagtggcggcggagggtatccgggtcaacgcggtgcggcccggactgatcgataccgagatccacgccagcggcggcgagccaggccgtatcgaacgcctgaagggcggcataccgctaggacgcggcggtacggcggaggaagtcgcgcgggcgattctctggctggcgtcggacgaagccagctacagcaccggcaccttcatcgatgtcagcggcggccgctag

SEQ ID NO: 321732 - DNA, 804 bp, Pseudomonas aeruginosa
atggaacgcgcaatcccgaccttcccctgccgcgatctggacagcgccagcgccttctaccagtccctcggcttccaccttggcgctcgctatccgacctacgccatcctccagcgcggcgccctggagctgcacctgtcgctgttcgaagcgctcgaaccgaagaccaattgcagcgctgcctacctgcgcctggaggacgcccaggcgctgcatcgccaggccgcggccctcggcctgggcggccaggggattccacgcatcacggtcctggaagaccaaccctggggcatgcgcgaattcgccctgatcgatcccgatggcaacctgctgcgggtcggccaggagctcgatgcgacgccagagcagcaccgggttcgcctggccagcgccgacgacgtccccgcggtggccgcgctctggcaagccaatgtccgcgaagccggggaaaccctggatgccggcgaccaacaggcgatccaggcactgctcctggccgcctcgcgcaaccgcttgctctggctggcggaggcccagcagcatccccgcggtttcgtcctcgcccacttgtggcagatcgaggacggtcaggcacgggtgggagagatcgcagagctctacgtactgccgcaggcccgccgccagggcctggcccgggaactggtgggcagtgccgaggaggccctgcgctcgcgcggcgccggcctgatccgcgcgcaatcggcccttgacgcgccgctgtccaacctgttctggcagggcctgggctgggacgccgactacctgaccttcactcgctactga

SEQ ID NO: 321733 - DNA, 450 bp, Pseudomonas aeruginosa
atgagtaacgctttttccctcgccccgctgttccgtcattccgtaggcttcgatcgcttcaacgatctgttcgagtcggccctgcgcaatgaggccgggagtacctacccgccctacaacgtcgaaaagcacggtgacgacgagtatcgcatcgtcatcgccgccgccggcttccaggaagaagacctggacctgcaggtcgagcgcggcgtgctgaccgtcagtggcggcaagcgcgagaagtccacggacaacgtgacctacctgcaccagggcatcgcccagcgcgccttcaagctgtcgttccgcctcgccgaccatatcgaggtcaaggcggcttcgctggccaacggcctgctgaacatcgacctggtccggctggttccggaagaagccaagccgaagcgtatcgccatcaatggccagcgcccggcactggacaaccagtaa

SEQ ID NO: 321734 - DNA, 1329 bp, Pseudomonas aeruginosa
atgaaacgacccatcgaaagacttcccgccgcgacctccagcgcaacccgggccttcgcgctcgcgacgagcctgttgtacgcctgcgccgcgccggccgcttcctggaccgccagctggcaggccagcccgcagccggtctgggctgaggacttcctgtttcccagcaacgtgccggccgaactgcacgaccagacggtgcggcaattggcgcgaatcagcctgggaggaacgcgcgtgcgcatcgtcatggcaaatacctatggaaggcgcccgatccggatcggccgggccaccctggccaaaccgggttccgagcgcgccgcggtcgccaccggcagcctgcatgacgtgacctttggcggacgccggacggcgaccatcgcgcccggcgccacgctactcagcgatccggtggcgatgccggtggccgcgctctcgcaggtgctggtgagtctctacctgccggccgccacgcccatggaaaccttccactgggacggccgccagacgggctggatcgtcgccggcgagcagacccaaagccacgcattgcagctggacgcggcggacagccagagcaccaccgcgcgcctgctgttgacaggtatcctggttgaaaccgaagcggcaacgcggacgctggtgacgctcggcgactcgatcaccgacggagccagcgccagcctcgaccggaacagccgttggccggacttcctcgccgaacgcctggccccgcatggcgtcgccgtggtcaatgcggggatttccggcgcccgtctcctgagcgacggcatgggcgcgagcgcgctggcacgtctggaccgcgacgtactggcccagccaggcgcaagcagcatggtggtgatgctcggcatcaacgacattgcctggcccggtaccgctttcgcccggaatgccgcaccgcccaccctggaagcgctgatcgccggctaccggcaattgatcgaacgggcgcacaaccggggtatccgggtcgtcggcgcgaccctcacgccgttcgagggcgcactgcccggcacgccgttgagcgattattaccatcccgccaaggaagccctgcgcaggcaggttaacgagtggatccgtcatgccggcgccttcgatgcggtgatcgacttcgacgcggcattgcgcgatccggagcagccgtcgcggctcgccgcgcgctacgactccggcgaccatctgcaccccagcgacgaaggcaaccgggcgatggcggccgccgtcgacctcgacgtcctgctggacgaggtgcctgacggcacaccggcagagccccgggccgatagcgcaacgaaatga

SEQ ID NO: 321735 - DNA, 912 bp, Pseudomonas aeruginosa
atggcccggcttgaagtcaaccgttccggcgaactggaggtgtttgcccgggtcgtcgagtcggggggcttttccgccgccgctcgacgttgcggcatgacgccctcggcagtcagcaagctgatcacccggctcgaacagcgcctgggaacccgcttgctgaaccgctccacccgaaaattgcaactgacacccgagggatgcgcgttctacgagcgcggggtgcgtatcctggccgacctggaggaggccgagcggtgtgcgagcgaaaacgcggcgccgcgtgggcgcttgcgagtcaacgccaacgtgcctttcgggcatcacttcctgctgccgctgctgcccgagttcctcgcgcagcatcccgaggtgacgctggatatcgtgctgaccgatgaggtcgtcgacatcctcgagcagcgcaccgacgtggccgtgcgcgcggggccgctgaaaagctcgagcctggtggcgcgcaagctggggagcacgcgcatgctgatcgtcggtgcgccggcctatctggcccggcatggcatgccggccacgccgcaggcgctgctggggcacaaccgcctcggcgccaactatgtgcgaacgcgctccggctggccgctgcgggacgccggcgaggaactcgtggtgccgttgtcgggcaacgcccaggccagcgatggcgaggcgctgcgccgtctggccgtggccggcctgggcctggcgcggctggccgcgttccaggtgcgcgaggacatagccgccgggcgcctgattcccgtgctcgaggcatacaacccaggcgacctggaggaagtccacgccgtctacgtcggccagggcggctatctgccgctgcgcgtgcgggcgttcctggactttctggcggagcgcgtcgatatgagccagggttga

SEQ ID NO: 321736 - DNA, 378 bp, Pseudomonas aeruginosa
atgagcgatgacatccagcgttaccccagcagcctgccgtttcccttttcccgcgcggtgcgggccggcggcttcctgtttctttccggacaggtgccgatgagtccgaccggcgaggtggtacgtggcgatatccagacccagaccgaagcggtgatggcacgcatcggcgagaccctggagagctgtggtgcgcgtttcgaccaactggtgaaggtcaccgtctggctgtcggacatggcccacttcgccggtttcaacgaggtctaccagcgtcatgtgcagggggccttgccggtacgctcgacggtgaccgccgggctggcgctgggggtcgacgtggaggtcgaggtgcaggcgtgggtcggcgagggctga

SEQ ID NO: 321737 - DNA, 894 bp, Pseudomonas aeruginosa
atggacctgaacagcctcaacaccttcatcgccattgccgagaccggcagcttctccgaagccggcgagcgcctgcacctgacccaaccggcggtgagcaagcgcatcgccgccctcgaacagcagctcaatgcccggctgttcgaccgggtcggccgcgaggtcaacctcaccgaggccggccgcgccctgctgccgcgcgcctaccagttgctcaacgtgctcgacgacacccgccgggcgctgaacaacctcaccggcgaggtcagcggccggctggtcctggccaccagccaccacatcggcctgcatcgcctgccgccgctgctgcgcgccttcacccgggcgcatccgcaggtggcgctggatatccagttcctggattcggaagtggcctacgaggagatccttcatggtcgtgcggaactggcggtgatcaccctggccccggaaaccgccgaaccggtgcgcgcagtcccggtgtgggacgacccgctggacttcgtcgccgccccggagcacccgctggcccgacagggcacggtgttcctcgccgacgtcgccaagcaccccgcggtattccccggcggcaacaccttcacccaccacatcgtgcggcgcatgttcgaagccgaagggctgacgccgaacatcgccatgagcaccaactacctggagaccatcaagatgatggtctccatcggcctggcctggagcgtgctgccgcggaccatgctcgacgaccaggtggtgcgcctgccgctgcaggacatccagctcagccgccagctcggctatatcctgcacaccgagcggaccctgtcgaacgccgcgcgcgccttcatgcgcctgctcgacgaacaggcattcggcaacggcactccagcggcctga

SEQ ID NO: 321738 - DNA, 1425 bp, Pseudomonas aeruginosa
atggccggcaagaccctctacgacaaactctgggacatgcacctggtcaagcagcgcgacgacggttcggcgctgatctacatcgaccgccatatcctgcacgaagtgacctcgccgcaggccttcgagggtcttcgcctggccgggcgcaagccgtggcggatcgacgccaacatcgccaccccggaccacaacgtgccgaccacccgcaccgagcgcaagggcggcatcgccgccatcgccgacgaggtctcgcgcctgcaggtgcagaccctcgacgagaactgcgacgacttcggcatcaccgaattcaagatgaacgacgtgcgccagggcatcgtccatgtggtcggtccggagcagggcgcgaccctcccggggatgaccgtggtctgcggcgactcgcacacttccacccacggcgccttcggcgcgctggcccacggcatcggcacttccgaggtagagcatgtgctggcgacccaatgcctggtggcgaagaagatgaagaacatgctggtcaaggtcgaaggcaggctgccggccggcgtcacggcgaaggatatcgtcctcgcggtgatcggcaggatcggcaccgccggcggcaacggccacgccatcgagttcgccggcagcgccatccgcgacctgtccatcgaagggcggatgaccatctgcaacatgtcgatcgaggcgggcgcccgcgtcggcctggtcgccgtcgaccagaagaccatcgactacgtgaagggccggcccttcgcgccgagcgccgagcaatgggaccaggccgtcgcctgctggcaggggctggtgtcggacgccgatgcccgcttcgataccgtggtcgagctggacgccgcgcagatcaagccgcaggtcagctggggcacgtcgccggaaatggtcctggcggtggaccagaacgtgccggacccggcccgcgagagcgacccgatcaagcgcggttcgatcgagcgcgccttgaagtacatgggcctgcggccgaaccaggcgatcaccgacatccagctggaccgggtattcatcggttcctgcaccaactcgcggatcgaggacctgcgcgctgccgccgaagtggccaggggccgcaaggtcgccgcgaccatcaagcaggcgctggtggtgccgggttccgggttggtcaaggagcaggccgagaaggaaggcctggaccggatcttcatcgaggccggcttcgaatggcgcgagccgggctgttccatgtgcctggcgatgaacccggaccggctagagagcggcgaacactgcgcctcgacctccaaccgcaacttcgagggccgtcagggcgccggtggccgtacccacctggtcagcccggcgatggccgccgccgcggccgtcaacggccgcttcatcgatgtccgcgaattgctcgcctga

SEQ ID NO: 321739 - DNA, 639 bp, Pseudomonas aeruginosa
atgaaaccctatacccagacgaccggtctcgtcgctccgctggatcgcgccaacgtcgataccgatcagatcattcccaagcaattcctcaagtcgatcaagcgcaccggcttcggccccaacctgttcgacgaatggcgctacctggatgtcgggcagccgggacaggacaactcgaagcgtccgctgaacccggacttcgtcctcaaccagccgcgctaccagggtgccagcgtactgctggcgcgggagaacttcggctgcggctcgtcccgcgagcacgcgccctgggcgctggacgagtacggtttccgcacggtgatcgcaccgagctatgccgacatcttcttcaacaacagtttcaagaacggcttgctgccgatcatcctgcccgaggccgaggtggacgaactgttccgccaggtcgaggcgaacgaaggctaccagttgtccatcgacctggcggcgcagaccgttacccgtcctgatggcaaggtgctgggtttcgaggtcgacccgttccgcaagcattgcctgctcaacggcctcgacgacatcggcctgacgctgcaggacgccgatgcgatccgtgccttcgaggacggctaccgccagcagcagccctggctgttccgctga

SEQ ID NO: 321740 - DNA, 762 bp, Pseudomonas aeruginosa
atgagcgaccacgatgacgttgtccagcgccagttcggcgcccaggcttcggcctacctgagcagcgccgtgcatgcccagggcgaggaattcgccttgctgcgcgacgccctggccgggcgcccggaagcgcgggtcctcgacctgggctgcggcgccggccacgtgagcttccaggtcgccgccctggcaggggaggtggtggcctacgatctttccgccgagatgctcgccgtggtggcgcagagcgccgcggaacggggcatggcgaacatccgtaccgaacagggcaaggcggagagcctgcccttcgccgacggcgagttcgatttcgtcttcagtcgctattccacccatcactggcgcgatgtcggcctggccctgcgcgaggtgcggcgggtgctcaagcccggcggggtggcgatcttcgtcgacgtggcggcgcccgggcaggccttgccggacaccttcctgcagaccgtcgagctgctccgcgacaccagccatgtgcgcaactactcgccggccgagtgggcgcgcctgagcggcgaggcgggcttgctggtaaccggaagccggcgccagcgcctgcgcctggagttccagtcgtgggtcgagcggatgcgtacgccggaggtgttccgccaggcgatccgcagcctgcagctggcggtgggcgaggaagtcagggagtatttcgagattgccgacgacggctcgttcagcaccgacgtgctggtgctgtggctgcgtcgggagtga

SEQ ID NO: 321741 - DNA, 1083 bp, Pseudomonas aeruginosa
atgagcaagcagatcctggttctccccggtgacggtatcggcccggaaatcatggcggaagcggtcaaggtgctggaactggccaacgacaggttccagctcggcttcgaactggccgaggacgtcatcggtggcgcggccatcgacaagcacggcgtgccgctggccgaccagaccctgcagcgcgcgcgccaggccgatgcggtgctgctgggcgcggtaggggggccgaaatgggacaggatcgaacgcgatatccgtcccgagcgcggtctgctgaagattcgctcgcaactgggcctgttcgccaacctgcgtccggccatcctctatccgcaactggccgcggcctccagcctgaagccggaagtggtcgccgggctggacatcctcatcgtccgcgaactgaccggcggcatctacttcggccagccccgcgagcagcgcgtgctggagaacggcgagcgccaggcctacgacaccctgccgtacagcgagagcgaaatccgtcgtatcgcccgcgtcggtttcgacatggcccgcgtacgcaacaacaggctctgctcggtggacaaggccaacgtcctcgcctccagccagctgtggcgggaagtggtggaagaggtggcgaaggactacccggacgtcgagctttcccatatgtacgtggacaacgccgccatgcagctggtgcgcgcgcccaagcagttcgacgtgatggtcaccgacaacatgttcggcgacatcctgtcggatgaggcttccatgctgaccggttccatcggcatgctgccttctgcctcgctcgacgcgaacaacaagggcatgtacgaaccctgccacggttccgccccggacatcgccggtcagggcatcgccaacccgttggcgaccatcctctcggtctcgatgatgttgcgctacagcttcagccaggcgaccgccgccgacgccatcgagcaggcggtgagcaaggtcctcgatcaggggctgcgcaccggcgacatctggtccgaaggctgccgcaaggtcggcacccgggaaatgggcgatgccgtagtcgcggcactcaagaatctgtaa

SEQ ID NO: 321742 - DNA, 1113 bp, Pseudomonas aeruginosa
atgaagcgtgtaggtctgatcggttggcgcgggatggtgggttccgtactcatgcagcggatgctggaagagcgggacttcgacctgatcgagccggtgttcttcaccacgtcgaacgtcggtggccagggcccggaagtgggcaaggacatcgctccgctgaaggacgcctacagcatcgacgagctgaagaccctcgacgtgatcctgacctgccagggcggcgactacaccagcgaagtattccccaagctgcgcgaggccggctggcagggctactggatcgatgccgcctccagcctgcgcatggaagacgacgcggtgatcgtcctcgacccggtcaaccgcaaggtcatcgaccaggctctggacgccggcacccgcaactacatcggcggcaactgcaccgtcagcctgatgctgatggccctgggcgggctgttcgacgccggcctggtcgagtggatgagtgccatgacctaccaggccgcctccggcgccggcgcgcagaacatgcgtgaactgctcaagcagatgggcgccgcccatgcatcggtggcggatgacctggccaacccggccagcgcgatcctcgacatcgaccgcaaggtggcggagaccctgcgcagcgaagccttccccaccgagcatttcggcgcgccgctgggcggcagcctgatcccttggatcgacaaggaactgcccaacgggcagagccgcgaagagtggaaggcccaggcggagaccaacaagatcctcgctcgcttcaagaacccgatcccggtcgacggtatctgcgtgcgcgtcggcgccatgcgttgccacagccaggcgctgaccatcaagttgaacaaggatgtgccgctgaccgacatcgagggcctgatcagccagcacaatccctgggtcaagctggtgccgaaccaccgcgaggtaagcgtgcgcgagctgaccccggccgccgtcaccggcaccctgagcgttccggtcgggcgcctgcgcaagctgaacatgggctcccagtatctcggcgccttcaccgtcggcgaccagttgctgtggggcgctgccgagccgctgcggcgcatgctgcgcatcctgctggagcgctga

SEQ ID NO: 321743 - DNA, 1011 bp, Pseudomonas aeruginosa
atgtcccagcccctcaatgtcgcagtcgtaggcgccaccggatcggttggcgaggctctggtcggtctcctcgacgaacgcgacttcccgcttcatcgtctgcacctgctggccagcgccgagtcggccgggcagcgcatgggtttcgccgaaagcagcctgcgcgtcggcgatgtcgatagcttcgatttttccagtgtcggcctggccttcttcgccgcggcagccgaggtgtcgcgtgcccatgccgagcgcgcccgcgcggcgggttgttcggtgatcgacctgagcggcgccctggaaccgagcgtcgcaccgccggtcatggtttcggtgaatgccgaacgcctggcctcgcaagcggcgccgttccttttgtccagtccttgcgccgtagccgccgaactgtgcgaagtgctggcgccactcctggccacgctggattgccggcaactgaacctgacagcctgcctctccgtctccagcctggggcgcgaaggggtcaaggaactcgcccggcagaccgccgaactgctcaatgcgcgccccctggagccgcgtctcttcgaccgccagatcgccttcaacctgctcgcgcaggtcggcgcggtggatgccgaggggcacagcgcgatcgagcggcgcatcttcgcggaggtgcaggccttgcttggcgagcgtatcggaccgttgaacgttacctgcatccaggcgccggtattcttcggcgatagcctcagcgtgaccctgcagtgcgcggagccggtggacctggccgcggtgacgcgggtcctcgatgcgacgaaaggtatcgaatgggtcggcgagggcgattatccgacggtggtcggcgatgccctcggccaggacgagacctatgtcggccgggtgagggcggggcaggctgatccctgtcaggtcaatttgtggattgtgtctgataatgtgcgaaaaggtgccgcgctgaatgccgtgctcctgggtgagttgttgataaaacactatctgtaa

SEQ ID NO: 321744 - DNA, 2652 bp, Pseudomonas aeruginosa
atggttcggcttcgtacactggttcgggcaatcgcggcggcctcggtcctgacttccggcatggcgcatggattgggactgggggaaatcaccctgaagtcggcgttgaaccaaccgttggatgccgagatcgagctgctcgaagttcgtgacctgggttcgggcgaggtgatcccgagcctggcgtcgccggaagagttcagcaaggcgggcgtcgatcgcctgtactacctcaccgacctgaagttcacgccggtggtgaagcccaacggcaagagcgtcattcgcgtgacctcgtcgaagccggtgcaggagccctacctgaacttcctggtccaggtgctctggccgaatggccgcctgctgcgcgagtacaccgtcctgctggatccgccgctgtactccccgcaggccgcggcaagcgctccgcaagcgccggtcagcgcgccgcgcgcgaccggcgccccgcgagccccgcaggctccggctccggtgcgtaccaccgcgccggcaggcagcgacacctatcgcaccgtttccaacgacacgctctgggagatcgcccagcgcaaccgtaccgatcgcgtttccgtaccccaggcgatgctcgcgttccaggaactgaatccgggcgccttcgtcgatggcaacatcaaccggctgaagagcggccaggtcctgcgcattcccaccgaacagcagatgctggagcgctcgccgcgcgaggcgctgtcccaggtgcaggcgcagaaccagagctggcgcggcagccgcaatccggccgcgggcagcgctggcgccaggcagttggatgcgacccagcgcaatgccgccgggtcggcgccatccaaggtcgacgccacggacaacctgcgcctggtgtctggcgagggcaaggccagcaagggggccgacaagggcgggaagggcgacagcaaggcgctcgccgataccctggcggtgaccaaggaaagcctcgatagcactcgccgcgagaacgaggaactgcagagccgcatgcaggatctgcagagccagctggacaagctgcagaagttgatccagttgaaggacgcccagttggccaagctgcaagggcagttgggcgccgaaggccagggcgcagcccagccgaacgcagccctgccggatgcgtcccagcccaatgcagccgcgcaggcgccggctcagcccgggactcccgctgcggcagcgccgactccggtacaggcggcagaacagccggcaccgagcttcctcgacgaactgctggccaacccgctgtggttggcggtgatcggcggtagcgcactgctggcgttgctggtgctgctgatgatcctgtcgcggcgcaatgcgcagaaagagaaggaagaagcccaggctttcgccgcggatgccggcgaggaacaggaggatgcgctggacctgggaaaggacggcttcgacgacctgaccctcgacgagcctgaaccgcaggtcgcagccgctgcgccgcaggtcgagaagaccactgcgcagacttccgatgcgctgggcgaggccgacatctatatcgcctacgggcgtttcaaccaggccgccgaactgttgcagaacgccatctacgacgagccgcagcgcaccgacctgcgcctcaagctgatggaagtctatgccgagatgggcgatcgcgaaggtttcgctcgccaggaaaacgagctgcgcgaaatcggcggcgcacagccgcaggtcgagcagctcaagtcgcgctacccggcaatggtcgcggtcgccgcggttgccggcctggccggcgccaagctggcgcaggacgagctggatagtttcagcctcgacgatctgtcgctcgacgacagcggtcacgcggccaagccggatgcggcaggacaggatctcgacgacgccttcgacctgagcctggacgacctgggcagcgacgacgtgcaggccgatctcaagtccgacagcggggcgctggacgacctgaccctggacagcgatctggacctggcggcctcgaccgcggcggacaagcctgtcgacgatctcgacttcggcctggatttcgcggagttggcagagactccgagccaacccaagcatgacgacctgggcgatttctccctggatctcgatgcgccggaagacaagctttcggacgacgacttcctgctttcgctgaacgacgaggtgcccgccgcggcgccagccgacaacgaattcaccctcgataccgaggctgccgaagagccggcgttgtccctgccggacgacttcgacctgtcgctggccgacgagccgacggagccggccgctccggagaagggcgaggacagtttcgccgcccagttggacgaggtgagcgcgcagttggacgagttggccagcaaccttgacgagccgaagagcgcggcgccgagtttctccgccgaggatgcagcggtcgcctccgccctggacggagacgccgacgatgacttcgacttcctctccggtgccgacgaagcggcgacaaagctggatctggctcgcgcctatatcgacatgggcgatagcgaaggcgcgcgcgatatcctcgacgaagtcctggccgaaggtaacgacagccagcaggcggaagcccgcgagttgctggagcgcctggcctga

SEQ ID NO: 321745 - DNA, 858 bp, Pseudomonas aeruginosa
atgaacgatgttgttccgccagcggcagccgaatcggctgccgctggcgtttccagaatcgccctcggcatcgagtacaagggctcccgctatcgtggctggcagcgccaggaagccggcgtgccttccgtgcaggaagcgctggagcgcgccttgtcgaaggttgccgccgagccggtcggggtgatctgcgccggccgtaccgacgctgccgttcatgccagcggccaggtggtgcatttcgacaccgtggtggagcgcccgttgaaagcatgggtgatgggcaccaacgccaacctgcccgcggatatcagtgtgacctgggcgagagtgatgccggcgcatttccacgcgcgcttctcggccatggcccggcgctatcggtacgccatctacaacgatccgatccgcccggcgcacctggccgaggaggtcacctggaaccatcggccgctggatatcgggcggatgcgcgaggcggcccaggtactggtcggcacccatgacttcacctcgttccgggcggtgcagtgccaggccaagtcgccggtcaagaccatgcatcacgtgcgcttgctggagcatggtcggttgatcgtgctggacatccgcggtaacgctttccttcaccatatggtgcgcaacatcgctggcgtcctgatgaccatcggtgccggcgagcggccgatcgaatgggcgaaggaggtgctcgaggcgcgcgaccggcgcgccggtggggtcaccgctcacccctacggactctatctggtgcgggtggagtaccccggggagttcgagttgcccgagcgctacctggggccgcatttcctttccggattgcccgatatcgtcggctga

SEQ ID NO: 321746 - DNA, 636 bp, Pseudomonas aeruginosa
ttgccagccgttcgcatcaagatctgcggtatcacccgagtcgaggacgccctggccgccgccgcggcgggcgccgatgccatcggcctggtgttctatgcgaagagcccgcgggcggtggatatccatcgggcgcgggaaatcgttcgtgccctgccgccgttcgtgaccagcgtcggcctgttcgtcaacgccagccgctgcgaactgggcgagattctcgatgcggtgccgctggacctgctgcaattccatggcgacgagcgcgccgaggactgcgaggggcatcggcgaccctacctgaaagccctgcggatgaagcccggcgacgacatcgtcgggcgcgcggcggcatatccgggagctgccgggattctcctggatacctatgtggaaggcgtgcccggcggcacgggggcggcgttcgactggtcgctggtgccgaccgacctgggcaaacccctggtgctggccggcggtctgacgccggataacgtcggcagggcagtcgagcaggtcaagccctacgcggtggacgtcagtggtggcgtcgaggcgagcaagggaatcaaggatgcggcgagggtccgcgcgttcgtggacgcggtgcgttcgcggcgccgcgacgagacatga

SEQ ID NO: 321747 - DNA, 873 bp, Pseudomonas aeruginosa
atgagcaactggctggtagacaagctgatcccttccatcatgcgttccgagtcccagaagagttcggtaccggaaggcctgtggcacaaatgcccgtcctgcgaagccgtgctgtaccgtccggagctggaaaagaccttggatgtctgcccgaagtgcgaccaccacatgcgcatcaacgcgcgtacccgcctggacatcttcctcgacgaggacggtcgcgaggagttgggtgccgacctcgagccggtggaccgtctgaaattccgcgacagcaagaagtacaaggatcgcctcgccgcggcacagaaggacaccggcgagaaggacgcgctgatcgccatgagcggcaagctgcagggtatgccggtggtcgcctgcgccttcgagttctccttcatgggcggttcgatgggcgccatcgtcggcgagcgcttcgttcgcgcagccaacgtcgccctggagaagcgctgcccgctgatctgcttctccgcctccggcggcgcgcgcatgcaggaagcgctgatctcgctgatgcagatggccaagacctcggcggtcctggcgcgcctgcgcgaagaaggcatcccgttcgtctcggtattgaccgacccggtctacggcggcgtttccgccagcctggcgatgctcggcgacgtgatcgtcggcgaacccaaggcgctgatcggcttcgccggtccccgcgtgatcgagcagaccgtccgcgagaagctgccggaaggcttccagcgtagcgagttcctccttgagcatggcgccatcgacatgatcgtgcatcgtgccgagttgcggccgcgcctggccaatctgctgtcggccttcactcattcgccgagccccgtatccgcatga

SEQ ID NO: 321748 - DNA, 1290 bp, Pseudomonas aeruginosa
atgacccagcgttccctggccgattggctgagctatctcgaacaactccatccgacggccatcgacatgggcctggagcgttcccgcgaggtagcgcgccggctcggcctgggaaggccggcgaaacgcgtggtcaccgttaccgggaccaacggcaagggctccacctgcgccctgctcgccgaactgctgcgtgagcaggggttgtcggtcggggtctacagctcgccgcacctgctgcgctacaacgagcgggtgcggatcgatggcgtcgaggccggcgatgcgcaactgtgcgacgccttctccgcggtggaggccgcacgtggcgagatttccctgacctatttcgaaatgggcactctggccgccttctggctgttcgagcgcgccgggctggacttcgcggtgctggaagtcggccttggcgggcgcctggatgcggtcaacctgatcgacgccgacctggcgctgatcaccagcatcggcctggaccatgcggactggctgggcgatacccgcgaaagcgtggctttcgagaaagccggtatcctgcgcgccggcaaaccggccctgtgcggcgatctcgatcccccgcagccattgctggagcaggtggctgcgctgggggcaccgctttacctgcgcggtcgcgactacgacctggcgctcgccgatcatggctggcactggcgcgggctggccgcggacggccaggcgctggcgctgcacgatctgccgttgctcgggttgcccatggaaaacgccgcgctggccctgcaggcctacgcgttgctcgagttgccctggcaggcggagcgcctggccgaggcgctgcggcggacccgggtgaccggtcgcctcgatcgccgcgacctgtcctggaacggccagccacgccagctcctgctggacgtcgggcacaatccccaggccgcccagtacctggcgcaacgcctgcgtgccgcagcgccacgaggacgctacctggcggtcttcggcctgctggcggacaaagacctggatggcgtactggaacccttgaccggcttggtgcaggattgggccgttgcaccgttgccgaccccgcgttcgcggccggccgcggagctggaggcggcgctgatcctgcgccaggttccggcgagcagccatgcggatatcgccgccgccctggacgcgcagtgcgccaaggctaccgcggatgatgtcattctgctgttcggatcgttctatagcgtggccgaaggcctggaatggctggcccgtagaacggataagggggagtaa

SEQ ID NO: 321749 - DNA, 480 bp, Pseudomonas aeruginosa
atgactggaaatgtctggaaattcgcggtggacgtctatgcccagccgggcgtggaaacggcttgcctcgcgcttcaggagcaaggtgcggacgtctgcctgttgctggtcgccgcctggcttggcaggcgcggtgtgagctgctcgaaagaacgcgcccagatcctggagaacgccgcgcgtccctggcgcgaaacggtcatcgaacccctgcgcagattgcgttgcgcctggcgcgaagcggcaacccacgacgcctgcctggccgaactccgcgaggaaatgaaggcccaggaactacgagcggaacgggaacacctgcaacgcctggccgacctggccacagcctggctggagggccaggaagcgaatcgcagtgcggatgcctggctgcaagcctgcagccgggacatctgcacggaagcagagcgccgggctttgctggtgcttggctcggcggctttgcagacagcgccttag

SEQ ID NO: 321750 - DNA, 1917 bp, Pseudomonas aeruginosa
atgatccgactcctcaatcttacgctacagcgcgggccgcagcgcctcctggaagctgctgaactgaccctgcacgccggccagaaagccggtttcatcggggccaatggcgctggcaagtccagcttgttcgcgctgttgcgcggccagctcggccaggatgccggcgactgcctgttgcccgccgactggcgcatcgcgcgcatgcgccaggaggtcgataccctggatcgcctggcggtggattacgtgctcgacggcgacagtcgcctgcgcgagatccaggcggcactggccgccgccgaagcggcgcacgacggttctgccctggcgcgcctgcataccgaactggacaacgccgacggttacaccgccgatgcacgggcgcgcaagctgctggccggactcggcttcagcagcgagcagatggagcgccgggtcggtgatttctccggcggttggaggatgcgcctgaacctggcgcaggcgctgatgtgcccgtccgacctgctgttgctcgacgagccgaccaaccacctcgacctggacgccatcctctggctggaagagtggctcaagggttatcccggcactctggtgctgatctcccacgaccgcgacttcctcgatgcggtggtggaccatgtggtgcatctggaaaaccgcaagctgaccctctatcgcggcggctattccgctttcgagcggacccgcgccgagcggctggctcagcaacagcaggcctacgagaaacagcaggcgcagcgtgcgcacatggaaatcttcatcgcccgcttcaaggccaaggccaccaaggcgcgccaggcgcagagccggatcaaggcgctggagcgtctcgaggaactggcgccggcacatgtcgattcgccgttcaatttcagtttccgcgagtcggacaagatctcccggccgttgctggatctcggcgaaggccgtctcggctatggcgacaaggcggtgctggagaaggtcaagctgcaactggtgcccggtgcgcggatcggcctgctcggtcccaacggtgccggcaagtcgaccctgatcaagaccctggccggggacctgcccgaattgggcggccgcctgctgcgcggcgagaacctggccatcggatacttcgcccagcaccagctcgattcgctggacccacaggccagcccgttgctgcatctgcagcgtatcgcccccggcgagcgcgaacagaccctcaaggacttccttggcggcttcgacttccgcggcgttcgggtggacgagccggtattgaacttctccggtggtgagaaagcgcgcctggccctggcgctgatcgcctggcagaagcccaacctgctgctgctcgacgagccgaccaaccacctcgacctggaaatgcgcctggccctgaccttggctctacaggagttttccggggcggtcctggtggtttcccacgaccggcacctgctcaaaagcaccaccgacgaattcctcctggtcgccgatgggcgcgtggtgccgttcgatggcgatctcgacgattacgcccgctggctggtcgactatcgcgcgcgcaaggcgccgcaggccgagaccgcgccgggcgcgccgtccgaacgcaccgacaagcgcgcccagcgccaggcagcggccgcgctgcgccagcagctggcgccgcacaagcgcgaggccgacaagctggagcgcgaactcggcggcctgcacgaaaagctagccgctatcgaggcgcggctgggcgacagcgccctgtacgacgtatcgcgaaaggacgaattgcgcgagttgctgtccgaacaatcgagcctgaaggttcgcgaaggcgagctggaggaacgttggctggaggccctggaaaccctcgaaaccttgcagaaagaactggaggccagtgagtga

SEQ ID NO: 321751 - DNA, 579 bp, Pseudomonas aeruginosa
atggataacctgcagatgttgacgcagacctggagcgggccgctggtggtggcgctgcagatcctgctcatcctgctggtcgcctggctgctccagcgcctggtccgacgcacggtgacccgtatcggcgagcgttatccggtgccgccggagctgctcctgccgctgcgtggcggcctgcgctggctgatcatggtcagcgcactgatcatggtgctggagcgcctgggcgtgtccgccgaagtgctgtggaccgcgctgaccggtttcgccgcggtggcggcggtagccttcttcgccatctggagcgtgctctccaacctgttctgtgcgttgctgatcttcaccgtcggaccgttccgcatcggcgaccgcgtggagctgatcgatagcgccgacaaaccgggcgtcaccggacgcgtggttgccatcaatctcttgtatacgacactggaagaaaccctcgaggatggctcgccgggcccgctgctgcaggttcccaacagcctgttcttccagaaagccgtgcgtcgctggcgtgggccaggtttttcaactccaacaaaaaacgggaaataa

SEQ ID NO: 321752 - DNA, 759 bp, Pseudomonas aeruginosa
atggaatggctcgccagtcctgaaatctgggtcgcgttcctgaccctgaccgccctggaaatcgtcctcggcatcgacaacatcatcttcatctcgatcctggtcgggcgcctgccgccggcccagcaaccgaaggcgcgcttcttcggcctggccctggccatgggcacgcggatcctgctgttgctctcgatcacctgggtcatgcgcctgaccaccgacctgttccacctgttcggccagggcatctccgggcgtgacctgatcctcttcttcggcggcctgttcctgctgttcaagagcaccatggagatctaccacagcctggaaggcgcggaagaagagcagaagagcggcggcaaggcccacggcttcatgggcatcatcgtccagatcgcgatcatcgacatcatcttctccctggactcggtgatcaccgccgtcggtctggtgcagaacgtgccggtgatggtcgcggcgatcgtcatctcggtcggcgtgatgatgctggcggcaggcaccatcagcgacttcatcgagaaacacccctcgctgaagatgctcgccctgtcgttcctcatcgtggtcggaaccgtgctggtggccgagtccttcgaagtgcacgtgccgaaaggctacgtctacttcgccatggccttctccctggcggtggaggcgctgaacatccgcttgcgcggagccctggcgcgcaagcgcggcgaagagccggtgaagctgcgcaagggttcgccggactga

SEQ ID NO: 321753 - DNA, 630 bp, Pseudomonas aeruginosa
atgctcgtcagtacctggttcgccttcttcctcgcctgctgggccatcagcctgtcgccgggcgccggagccatcgcctcgatgtcctgcgggttgcagtacggctttgcgcgaggctactggaacgcgctgggcctgcagatcggcctggccctgcagatcgccattgtcgccgccggcgtcggtgcgttgctggcgacctcggcactggctttcagcctgatcaagtggttcggcgtggcctacctggtgtacctggcggtgcgccagtggcaggcgccgccacaggccttgagcaccgatggcgaacggcctctggggcgaccgttgaccctggtgctgcgtggtttcctggtcaacgccagcaatcccaaggcggtgatcttcatgctcgcggtgctgccgcagttcatcgacccgcaccagccgctgctggcgcaatacctgatcatgggcggcaccatgatcgtcgtcgacctgatcgtcatggccggctacaccgggctggctgcgcgcgtgctacgcgtactgcgttcgccgcgccagcagaagctggtgaaccgtaccttcgccagcctgttcgtcggtgccgcggggctgctggcgacggtacgccgagcgccgctctga

SEQ ID NO: 321754 - DNA, 1959 bp, Pseudomonas aeruginosa
atgggcgggaaggcgaagggacaatttaatctcttccattctcacttcgtcttcgccatgcaccctccgaaaatcctgctgtggctgctgccgctggtctgcgcgttcagccttggagctcttgccgacacggccgtcgacccctcccaagccttgcatctgttgagttacctggcggccgactatccgccgaccgtggctgacggcaagatcgtcgaccccagcgaataccaggaacaggtggagttcgtcggcaacctgcaggcattggtcctgaccctgccgatgcgccccgagcgcgccgagctggagaggggcgtcgccagcctgcgccaggccatcgagcagcgcttgccgggaagggacgtggccctccaggcgcgcaacctcgaggcacgggtggcggatatctaccaggtggtgcagacccccgcgatcacccccgacccgagccgcgcggcgccgatctatgcccagcagtgcgcgatctgccatggcgatgcgggcaagggcgacggccccgccggcatcggcctggaaccgccgccagcgaacctcaccgatcgccagcgcctcgaccacctgagcctctacgacctgcgtaacgtcatcggcctgggcgtggccggcaccgacatgccggcgttcgccgaccagctcgacgaacgccagcgctgggacctggccagctatgtggccggcctgagcgccggcagtgcgcagccggacaaggcccatgcctacccgctggcgaccctggccacgcagactccggccgaagtcgccgagcacgacggcgaggccgctgcggagagcttccgcgccctgcgtgcgcatccgccgctggagcagcgcggtcctgggcagttgatcgactataccgccgccaccctggacaagagcttcgcggtctatcgcgaaggcgaccgcgaccaggcctacgacctgtcggtggcggcctacctggagggcttcgagctggtggaaagctcgctggacaacgtcgacgccgatttgcgccgctccaccgagaagcagctgatggcctaccgccaggcgttgcgcgatggcctcccggaaacccaggtggcgcaacagctggagctggccaagggcaagctggcagaggccgccaagcagcttggcggcgactcgctgagtttctccatcagtttcgtttccgccttgttgatcctgttgcgcgaaggggtagaggcaatcctggtgcttgccgccatcctcgccttcctgcgcaataccgggcaggaaagtgccgtgcgtggcgtgcacgtcggctgggggctggccttcgtcgccggcttcgccacctgggcgttggccgcctatgtgatcgatatcggcggtgcccagcgcgagctgatggagggcttcacctctctgttcgcctgcgtgatggtgctctggctcggcgtctggatgcacgaccgccgccacgcggcagcctggcaggactacatccgcagcagcctggtgggcggtggcggacgcttcggcttcgcagtgctggcgttcttctcggtctaccgcgagttgttcgaggtcatcctgttctacgaaaccctctggttgcaggccggaccggccgggcacaatgccgtgatcggcggcgcggcgaccgccgtggtcctgctgatcggcctggcctgggtgatcctgcgtggttcggcgaaactgccgctggggttgttcttcagcatcaacgcggcgttgctctgtgcgctctcggtggtgttcgccggacatggcgtcatcgccttgcaggaagccggggtgatcggcacccgtccggtgccgttcttcgacttcgactggctggggatcaaggccgacgcctattcgctgtcggcccaggccatggcgctggtggccatcgcgctgctctacggacgtagccggatcgtcgagcgccggcgtgcggcggccaacgcggccgactga

SEQ ID NO: 321755 - DNA, 483 bp, Pseudomonas aeruginosa
atgcgtatctggatcgatgccgacgcctgccccaaggcggccaaggaactggtctgcaagttcgccctcaagcgcaagctggaagtctggatggtcgccggccagccgcaggtcaagccgccgttcgcctgcgtgcgtctggtggtggtggaaagcgggatggatgcggctgacgattacctggtggagcaggctgagccgggcgacctggcgatctgcagcgacgtaccgctggccgatcggctgatcaagaaacaggttgccgccctcgatcctcgcggccgcgagttcgacgcgcggaacatgggcgataagctggccatgcgcaacctgatggccgacctgcgtgaccaggggcagatgggcggcggccaggcgccctacggtgagcgtgaccgccaggcgttcgccaacgccctggaccgcctgctcacccgcctgcagcgggaagccgatctacgcgcgagtcagccgcacagatag

SEQ ID NO: 321756 - DNA, 474 bp, Pseudomonas aeruginosa
atgcgcgaaacgccctcccccgccctgcctgacgacgtccaccaactggtggcggatttcttccagcgcatccccttcaaccgcatgctcggcatccgcgtggtgagcctcggccgcgagcgggtagtcctcgacctgccgatgaaggacgaactgatcggcaacttcgttcagggcattctccacggcggggtgatctccagcctgctcgacgtcaccggcggagcgatggccctgatcggcgccctcgaacggcatcgcgaactgccaggccacgagcgcatggcgcggctgtcgaaactcggcaccatcgacttgcgcgtcgactacctgcgcccgggacgcggccggacgttcaccgcccatgcggtgccgcttcgctcgggcaacaaggtcgcagtggtgcgctcggaactgcatagcgacgacggcacgctggtcgccgtcggtaccggtacctatctgtgcggctga

SEQ ID NO: 321757 - DNA, 669 bp, Pseudomonas aeruginosa
atgcacaagaaagttgccgtcatcctctccggttgtggcgtctacgatggcgcggaaatccacgaaagcgtgatcaccctgctccgcctcagccagcgtggcgccgaggcacaatgcttcgcgccgaacatcgcccagcaccatgtggtcaaccacctgaccggcgaggaaatgccggaaagccgcaatgtcctggtcgagtccgcgcgtatcgcccgcggcgaagtcaaggacctgcgcgaagcccgcgccgaggactacgacgcgctgatcgtgcccggtggcttcggcgctgcgaagaacctcagcgactttgccatcaacggcgcgcaatgccaggtgcagccggacgtgctggcgctggccaaggctttcgccgaagccggcaagccagtcgggctgatctgcatcgctccggcgatggcggcgaagatctacggcgccggcgtccaatgcaccatcggcaacgacgccgacaccgccgacgcgctgaagcagatgggtgccgagcacatcgacgcgccggtggacgagatcgtcgaagacagcgcgcgcaagctggtgaccaccccggcctacatgctcgcccagtcgatagccgaagccgcttccgggatcaacaagctggtcgaccgggtgctcgaactggtggaccaggacaaggcctga

SEQ ID NO: 321758 - DNA, 591 bp, Pseudomonas aeruginosa
atgatgctccaacaattcctgcaggacttcggctatttcgccctttttctcggtactttcttcgagggcgaaaccattctcgtgctggccgggttccttgccttccgcggctacatgcagctggataccgtgattctcaccgccttcctcggcagctacgccggcgaccaactctggtacttcctcggacgccgccacggccgccggttgctggcgcgcaagccgcgctggcagaagctcggcgacaaggcgctggaccatgtgcgccgccatcccgacctgtgggtgctgagtttccgcttcgtctacggcctgcgtacggtgatgccggtggccatcggcctgtccggctatccaccggcccgctatcttcttctcaacggcatcggcgccatcgtctgggccgccgcgctgggctccgccgcctactatttcggcagcgtactggaaggcatgctcggcaacatcaagaaatacgaactcatggtcctcggcggcctgatcgtgctgggcctgctgctctggctatggcggcgtttcaagacaccgcgcggcaacggcgcgggcggcaacgccgacaaatccgagtga

SEQ ID NO: 321759 - DNA, 1014 bp, Pseudomonas aeruginosa
gtgagcttcactcccgccaaccgcgcctatccctacacccgcctgcggcgcaatcgccgcgatgacttctcccgccgcctggtccgcgagaatgtcctcaccgtcgacgacctgatcctgccggtgttcgtcctcgatggggtcaaccagcgtgaaagcattccgtcgatgcccggcgtcgagcgcctgtccatcgaccagttgctgatcgaggcggaagagtgggtggccctgggcattccggcgctggcgctgttcccggtgaccccggtggagaagaagtccctggacgccgccgaggcatacaacccggaaggcatcgcccagcgcgccacccgcgccctgcgcgagcgctttccggagctgggcatcatcaccgacgtggcgctcgacccgttcaccacccatggccaggacggcatcctggatgacgatggctacgtcctcaacgacgtcagcatcgacgtgctggtacggcaggcgctgtcccacgccgaggcaggcgcccaggtggtagcgccctcggacatgatggacggtcgcatcggtgcgatccgcgaggccctggagtctgccggccacaccaatgtgcggatcatggcctactcggccaagtacgccagcgcctactacggtccgttccgcgatgcggtcggctcggcttcgaacctcggcaagggcaacaaggccacctaccagatggatccggcgaacagcgacgaggcacttcacgaagtggccgccgacctggccgaaggcgccgacatggtgatggtcaagccgggcatgccctacctcgacatcgtgcgtcgggtgaaggatgaattccgcgccccgacctttgtctaccaggtcagcggcgagtatgcgatgcacatgggcgccatccagaacggctggctggccgaatcggtgatcctcgagtcccttaccgccttcaaacgtgccggcgccgatggcattctgacctacttcgccaagcaggccgcagaacaattaagacgggggcgttga

SEQ ID NO: 321760 - DNA, 2211 bp, Pseudomonas aeruginosa
atgaatacgcagcaaggacttgatgagatcgaacgtatcgccgccgacgaaaccgtagtggcgaacgtggaaagcgaagcagaagtgaagatggccgaaacgatcccggtggaaacgccacctgcggtggttcccagcgtggatgacagcagcctgtacattcatcgcgagctctcccagttgcagttcaacatccgcgtgctggaacaggcgctggacgagtcctacccgctcctggagcggctgaagttcctcctcatcttctcgagcaacctcgacgagttcttcgagatccgcatcgccggcctgaagaagcagatcaccttcgcccgcgagcaggccggcgccgacggcctgctgccgcaccaggcactggcgcggatcagcgagctggtccacgagcaggtgtcgcggcagtaccggatcctcaacgagaccctgttgccggagctggccaagcaccagatccgcttcatccgccggcgtcactggacgctgaagatcaagacctgggtgcggcgcttcttccgcgacgagatcgcgccgatcatcaccccgatcggcctcgacccgacccacccgttcccgctgctggtgaacaagagcctcaacttcatcgtcgagctggaggggatggatgccttcggccgcgactccggcctggcgatcatcccggcgccgcgcctgctgccacggatcatcaggctgccggaagacgttggcggcgagggcgacaactacgtgttcctgtcgtcgatgatccatgcccacgccgacgacctgttccccggcatgaaggtgaagggctgctaccagttccgcctgacccgcaacgccgacctgtcggtggacaccgaggatgtcgaggacctggcccgcgcgctgcgcggcgagctgttctcgcgtcgctacggggatgcggtacgcctggaggtggtggatacctgcccgcagaacctgaccaactacctgctcaagcagttcggcctgtccgaaagcgagttgtacaaggtcagcggcccggtcaacctgacccgcctgttcagcgtcaccggcctggaaagccatccggagctgcagtacccgcccttcaccccggcgatcccgcgtcttttgcagaagaaggaaaacctcttcaacgtcctcagcaagctcgacgtgttgctgatgcacccgttcgagtccttcaccccggtgatcgacctgctgcgccaggccgccaaggatccgaacgtgctggcgatcaagcaaaccctgtaccgcagcggcgccaactctgagatcgtcgacgccctggtcgaggcggcacgcaacggcaaggaggtcaccgcggtgatcgagctgcgcgcccgcttcgacgaagagtccaacctgcaactggccagccgcctgcaacaggccggcgcggtagtgatctacggcgtggtcggcttcaagacccacgccaagatgatgctgatcctccgtcgcgaggacggcgaactgcgccgctacgcgcacctgggcaccggcaactaccatgccggcaacgctcgcctgtacaccgactacagcctgctgaccgccgacgtggcgctctgcgaggacctgcacaagctgttcaaccaactgatcgggatgggcaagacgctgcgcatgaagaagctgttacatgcgccgttcaccctgaagaagaacctgctggaaatgatcaaccgcgaggcggcccaggcggcgctcggccagcctgcgcacatcatggccaaggtcaactcgctgaccgatccgaaggtcatccgcgccctgtacaaggccagccaggccggggtcaggatcgacctggtggtgcgtggcatgtgctgcctgcggccgggcatcccgggggtctcgcacaatatccacgtgcgctcgattatcgggcgcttcctcgagcacagccgcatctactacttcctcaacggcggcgacgagaagctctatctctccagcgccgactggatggagcgcaacctcgacatgcgcgtcgagacctgcttcccggtggaaggcaagaagctggtgcagcgggtcaagaaggaactggaaacgtacctgaccgacaacacccaggcctgggtgttgcaggccgacggtagctaccagcggctcagtcccaccggtaaccagaacccccgcaatacccaggcgaccctgctggagaagctggccgcgccggtgcttaccgcacgttga

SEQ ID NO: 321761 - DNA, 1506 bp, Pseudomonas aeruginosa
atgccgcaaaaacctgccgaggcattcccgctgattgccgccctggacctgggctccaacagtttccacctctgtctggccaaggccaatatccacggcgaagtccgcatcctcgaacggctgggcgagaaggtccaactggccgccggcctcgacgaggagcgcaatctcagcgaagaggccacccagcgcggcctcgactgcctgcgccgcttcgcccagttcatcagcggcatgccccagggttccgtacgcgtggtcgcgaccaacgccttgcgcgaggcgcgcaaccgcagcgatttcatccgtcgtgcggaagaggttctcggccatcccgtggaagtcatctccggccgcgaggaagcccgcctgatctacctcggcgtcgccaacagcatgcccgacagcggcggtcgccggctggtaagcgacatcggcggcggcagcaccgagttcatcatcggccagggtttcgagtccgagctgcgggaaagcctgcagatgggttgcgtcagctacacccaacgctacttccgcgacggcaagatcaccccggcccgctacgcccaggcgtacactgctgcacgcctggaactgatgggcatcgagaacagcctgcggcgcctcggctggcaacaggcggtcggcgcctccggcaccatccgcgcagtggcgctggcgatcaaggccggcggccacggcaacggcgagatcagcccggacggactggcctggctgaagcgcaaggtgctcaagctcggcgacgtggagaagctcgatctggaagggatcaagccggaccgccggaccatcttcccggccggactggccattctcgaagcgatcttcgacgcgctggaactggaacagatggttcactccgagggcgccctgcgcgaaggcgttctctacgacctggtcggccgtcaccagcacgaggacgtgcgcgaacgcaccatcagctcgctgatgcagcgctaccacgtcgatccggagcaggcttcgcgggtggaggccaaggccctcaaggtgcttgccgaagtcggcgacgcctgggagctgaacggcgaactgcaccgcgacctgctgagctggggcgcacgggtccacgagatcggcctggacatcgcccattaccactaccacaagcacggcgcctacctgatcgagcactccgacctggctggcttctcgcgccaggaccagcagatgctgtcgctactggtacgcggccaccgccgcaacattccggcggacaagctggcggagttcgccgaggaaggcgacaagctggtacgcctgtgcatcgtgctgcgcttcgcgatcctcttccaccacattcgcggcacccaggaaatgccctcggtgcgtctgaaggcagagcccaagagcctttcggtgaccttccccgagggctggctggaagccaacccgctgacccaggccgacttcgcccaggaagccgaatggctcaagcgggtcggctacagcctcaacgtgcggtaa

SEQ ID NO: 321762 - DNA, 327 bp, Pseudomonas aeruginosa
atgagcgaacatatcgtcaacgttactgatgccagcttcgagcaggacgtgctgaaggccgacggccctgtgctggtggactactgggccgagtggtgcggtccgtgcaagatgatcgcgccggtgctggacgaagtcgccagggactatcagggcaagctgaaggtctgcaagctgaacatcgacgagaaccaggataccccgccgaaatacggcgtgcgtggcatccctaccctgatgctgttcaaggacggcaatgtcgaggcgaccaaggtcggcgcactgtccaagtcgcagctggcggccttcctcgacgccaatatctga

SEQ ID NO: 321763 - DNA, 1260 bp, Pseudomonas aeruginosa
atgaatctgaccgaactcaagcaaaagccgattgccgaactgctggaaatgtccgatgccatgggcctggaaaacatggcccgttcgcgcaagcaggacatcatcttcgccctgctgaagaagcacgcgaaaagtggtgaagagatctccggcgatggcgtgctggagattcttcaggacggcttcggcttcctgcgctccgccgactcttcctacctggccggccccgacgacatctatgtctcaccgagccagatccggcgcttcaacctgcgcacgggcgacaccatcatcggcaagatccggccgccgaaagagggcgaacgctacttcgccctgctcaaggtcgactcgatcaacttcgatcgtccggagaatgcgaagaacaagattctcttcgagaacctgacgccgctgttccccaacgagcggatgaagatggaagccggcaacggctccaccgaagacctgaccggccgcgtcatcgacctctgcgcgccgatcggcaagggccagcgcggcctgatcgtggcgccgccgaaggcgggcaagaccatcatgctgcagaacatcgccagcaacatcacccgcaacaaccccgaatgccacctgatcgtcctgctgatcgacgagcgccctgaggaagtgaccgaaatgcagcgcaccgtgcgcggcgaagtggtcgcctcgacctttgacgaaccgccgacccgtcacgtacaggtcgccgagatggtgatcgagaaggccaagcgcctggtcgagcacaagaaggacgtggtcatcctgctcgactccatcacccgtctggcgcgggcctacaacaccgtgatccccagctccggcaaggtgctcaccggcggtgtcgacgcccatgccctggagaagccgaagcgcttcttcggcgccgcgcggaacatcgaagagggcggttctcttacgattctcgccacggcgttggtggaaaccggctcgaagatggacgaggtgatctacgaggaattcaagggtaccggcaacatggaactcccattggatcgcaagatcgccgagaagcgcgtgttcccggccatcaacatcaaccgttcgggtacccgccgcgaagagctgctgaccagcgaggacgagctccagcgcatgtggatcctgcgcaagatcctgcacccgatggacgagatctccgcgatcgaattcctcatcgacaagctcaagcagaccaagaccaacgatgagttcttcgattcgatgaaacgaaagtag

SEQ ID NO: 321764 - DNA, 1989 bp, Pseudomonas aeruginosa
atgtcgagcctggcctatcgaagggacatcgatggtttgcgagcgttggccattctgccggtggtgttctaccaccttggcttggggggcatcaccggcggctatgtgggcgtcgatgttttcctggtcatttccggctacctgatcacttcgatcatccggcgcgagcagcaggccggacgtttcagcttcgtcgacttctgggcgcgccgggcacgccgcattctccccgcgctgttcgtgatgatggcggcgagcctggtgatcggctggttcctcatggcgccgcgcgactacgaagagttagggcgttcggttcgctaccagacgatgttcgcctcgaacatcctgttctggaagcaggatggctatttcgacgccgcgtccgaattcaagccgctattgcatacctggtcattgtcggtggaagagcagttctacattctcttccctctactgctggccgcggtctccgggcgtctgctgcgctggcggctcgccatcctcctcgcggtcctggcgctatcgctggcggccagcgtctgggcggttagccagcgacctggcagtgcattcttcctcctgccgatgcgcgcctgggaactcctggcgggtgccgtgctggcgttgctgccgggcggtagccgcggtcattcgcagtggtccctgcaactggcggccaccctcgggatagcggcgattctcctgccggtgttcttctacgacagcgacactcctttccccggcctcgcggcgctgccggcggtgcttggcaccgcactgctgatctgggccaacggcgccggcgacacctgggttcgccgcctgctgggctggcaaccgctggtctggttcggtctgatctcctattcgctgtacctctggcactggccgctgtacgtcttcgtccagtaccacgcactggaaaccctgggcctgccggcacgcctggggttgctggcggcgagcatcggcctggcggcactgtcgctgtactacgtcgaggcaccgttccgcgagcgcaagctgttcgccgggcgccggcagatgcttggcgcggcgctgtgcagcttgctgctgctgggagtcatcggccagttggtgcggcattacgacggcgtgccgtcgcgtctttccgaggaagccttgcgttatgccaaggcgtccaaatggcgcgatgggcagaccgactgcatgttcgacaagaaggcgctcagtcaggaaagcatctgccgcttcccggcggaactggctgccgaacgaccgctgctggtcagttggggcgacagccattccgcggcgttgagcccgctgctgcgcgaactggctaccagtcgccgactgccgatctggcaggcttcgctggcgggctgtccgccgttgctggggatgctggaaaaggacacttgcctgcgtttcaaccagcagatgctcgagttcgtcgaacagcagcggccgggcggggtgatcctcgccgggcgctgggacatgtatatatacggcgactcgcaggacggtacccgcaacattctccgcgagccggacgacacgccggacagctcgatcgccgaggcgctgctgcggcaacgcctgagcgggatgatcgaaaggctgaacgcggccgacgtacatgtctggctggtcaaggacgtaccgctgctgccattcaaggcaccggcgcggctggtgcggctgagtctgagcggggaggatgtcgggcgcgcacgttttcccttcgctgagcacgccgcgcgcgtcgcctacgtgaatgcgctgttcgatgcgttggccgaaggcaacccgcgggtgagcgtgctcgacccctccagcgtgctctgcgatggcctggattgtttcgccgaacgtgatggctggtcgctgtacatggataacaaccacctttcgacccagggggcccatgaactcgggtctttgttcgagccgatgctacagagcctcgacgactcgaggatcgccagccagcagtga

SEQ ID NO: 321765 - DNA, 1467 bp, Pseudomonas aeruginosa
atgacgttcaaggatctccgcgatttcatcgcccagctggagcagcgcggtgcgttgaagcgcatccaggtgccgatttcccccgtgctcgagatgaccgaggtgtgcgaccgcacgttgcgcgccaagggcccggcattgctgttcgaaaagccgaccggcttcgacatgccggtgctcggcaacctgttcggtacgccggagcgcgtggcgctgggcatgggcgccgaggacgtcggcgcactgcgcgagatcggcaagctgctggcgcaactcaaggagcccgagccgccgaagggcctcaaggacgcctgggccaagctgccgatgtacaggaaggtcctgtccatggcgccgaaggtgctcaaggatgccccctgccaggaagtggtcgaggagggcgaggacgtcgacctcggccggctgccggtccagacctgctggccgggcgatgtcgggccgctgatcacctggggcctgaccgttacccgcgggccgaacaaggaacggcagaacctgggcatctaccgccagcaggtgatcggccgcaacaaggtgatcatgcgctggctcagccatcgcggcggcgcactggactaccgcgagtggtgccagaagcatccgggccagccctatccggtagccgtggcgctgggcgccgatccggcgaccatcctcggtgcggtgacgccggtgccggacaccctttccgaatacgctttcgccggcctgttgcgcgggcatcgtaccgagctggtcaagtgtcgcgggagcgacttgcaggtgccggccagcgccgagatcgtcctcgaaggggtgatccaccccggcgagatggccgacgaaggtccctatggcgatcacaccggctactacaacgaggtcgatcgcttcccggtgttcaccgtcgagcgcgtcacccgccggcagaaaccgatctaccacagcacctacaccgggcgtccgccggacgagccggcgatcctcggggtggcgctgaacgaagtgttcgtgccgatcctgcagaagcagttcccggaaatcgtcgatttctacctgccgccggaaggttgttcctaccggatggcggtggtgaccatgaagaagcagtacccagggcacgccaagcgcgtgatgctcggggtctggtcgttcctgcggcagttcatgtacaccaagttcgtcatcgtcaccgacgatgacatcgatgcgcgcgactggaacgatgtgatctgggccatcaccacgcggatggaccccaagcgcgacacggtgatgatcgacaacacgcccatcgactacctcgacttcgcctcgccggtctccggcctcggctcgaagatggggcttgatgccacccacaagtggccgggcgagaccagccgcgaatgggggcgcgccatcgtcaaggacgaagcggtgacacggcgcatcgacgcgctctggtcgagcctcgggatcgactga

SEQ ID NO: 321766 - DNA, 969 bp, Pseudomonas aeruginosa
atgcgtatcgtcctgcaaccgtccggcgcctgcctcgagctgctgccgggggaacgcatcctcgatggcgcccggcggctcggctacgactgtccgcagagctgccgcaacggcaactgccatatctgcgcggcgctgctggtggaggggcgggtacgccagaacggcgaggtacgcgatcatggcgaactcttcacctgcctcgctgagccgctggaagactgcgtgctgcattgggacggggtgctggcgccgggtgaactgcctctgcgcaagctgacctgccagttgagcttctgcgaagaggtcggcggcgacgtctaccgggtcggcctgcgcgcgccggccggcaagccgccacgctatcacgccgggcagtacctgttgctggagcgtgacggcggcgacagcgcggcgttttccctggcctccgcgccgcatgcgggacgcgaccttgagttgcacatcctggccaaggaagacagtgccgtcgcgctgatcgcgcaattgcagcgcgagcgcctggcacggatccagctgccgttcggcgacgcgcacctggcggaactgcccgacggtccgctggtgctgatcgctgcgggaaccggcatgtcgcagatgcacagcctgatcgagcactgccgcgccgccggcttcgcccatcctgtacatctctactggggcgttcggcgtccggaggatttctaccgactgccgcactggacggagtgggaaggcctgccgaacctgttcctgcaccgggtggtcagcgacctctgtggctgggaggggcgctgcggcttgctgcacgaggcggtgcgcgaggatttcgccgacctgtcgagcctgcatgtgtatgccagcggctcgccggcgatggtctacgcgaccctggatgccctggtcgaagcagggatggacgcgcaccagatgcgcgccgacgtgttcgcctacgcgccgcgggactga

SEQ ID NO: 321767 - DNA, 1347 bp, Pseudomonas aeruginosa
atgttcggaatctttcgtcccgcgccacaccaggcgccactgcccgatgccgaggtggacagcacctaccggcgcctgcgctggcagatcttcgccggtatcttcatcggctacgcgggttactacctgctgcgcaagaacttctccctggccatgccctacctcatcgaggacggctacagccgcggtcaactgggcgtcgcgatgtcggccatcgccatcgcctacggcctgtcgaaattcatcatgggcctggtctcggaccgttccaacccacgggtcttcctgccgttcggcctgttggtgtcggcggcggtgatgttcattttcggattcgcgcactgggctacctccagcgtcgccatcatgttcgtcctgctcttcatcaacggctgggcccagggcatgggctggccgccgagcggacggaccatggtccactggtggtcgcagaaggagcgcggcagcgtggtctcagtgtggaacgtcgcccacaatgtcggcggcggcctgatcggcccgctgttcctgctcggcctggcgctgttcggcgactggcgctcggccttctacgtgccggccatcgtcgccgtgggcgtagccgtgttcgcctatttcgccatgcgcgacaccccgcaatcctgcggcctgccgccgatcgagaagcataaggacgactaccccgaaggctacgacgaacaccacgagcgcgagctgtcgaccaaggagatcttcgtcacctacgtgctgcgcaacaagctgctctggtacatcgccctggccaacgtgttcgtctacctgctgcgctacggtgtgctcgactgggcgccgacctacctcaaggaggccaagcacttcaacgtcgacaagtcgtcctgggcgtacttcttctacgaatgggcggggattcccggcaccctgctctgcggctggctgtcggacaagctgttcaagggcaatcgcggcgccaccggcgtggtgttcatgatcctggtgaccgtcggcaccctgatctactggctgaacccggccggcaacccggcgatcgacatggccgcgctgatcatgatcggcttcctgatctacggcccggtgatgctgatcggcttgcaggccctggagctggcgccgaagaaagcggccggcaccgccgccggcttcaccggtctgttcggctacctcggcggctcggtggcggccaacgccctggtcggctacacggtggatcacttcggctgggacggtggcttcaagctgctgatcggcgcctgcctgctggccatcctgttcctctgcctgaccctgcgcaaacccgcggtccaggccgcgccgcagcaagccggctga

SEQ ID NO: 321768 - DNA, 978 bp, Pseudomonas aeruginosa
atgaaagccgtcctctgcaaagccttcggcccggccagcagcctggtcctggaagaaatcgccagcccgagcccggcgaagaacgaaatcctcctcgatgtgcacgccgccggggtcaacttcccagacaccctgatcatcgagggcaagtaccagttcaagccacccttccccttctccccgggcggcgaggcggccggggtggtcgccgcggtcggtgaaaaggtcgcccacgtcaggcccggcgaccgggtcatggccctgaccggctggggcagcttcgccgagcaggtcaaggtgcccggctataacgtgatgccgattcccgaaggcatggacttcgccagcgccgccgccttcggcatgacctacggcacctcgatgcacgccctgaaacagcgcgccaacctgcaacccggcgagaccctgctggtgctcggcgcttccggcggggtcgggctggctgccgtggagatcggcaaggccatgggcgcccgggtgatcgctgccgccagtacccccgacaagctcgccgtggccaaggccgccggcgccgacgaactgatcaactacagcgaaggtagcctgcgcgagcagctcaaggccttgaccggcggccagggcgtcgatgtgatctacgatccggtgggcggcgaactgttcgaggaggccttccgcagcatcgcctggaacggacggatgctggtggtcggcttcgccagcggcagcatcccttcgctgccggccaacctgaccctgctcaagggcgcctcgctggtcggcgtgttctggggatcgttcgcccaacgccagccgcaggacaacgctgacaacttccgccagctgttcgcctggcacgccgaaggcaaactgaagccgctggtgtcgcagcgcttcccgctggaacgggccggcgacgctatcgacgccctcggccagcgcagggcggtcggcaaggtggtggtggaggttcgctga

SEQ ID NO: 321769 - DNA, 420 bp, Pseudomonas aeruginosa
gtgagaccccccattgccctgtcgctggccctgtgcctgagtctgttcccgtcgttcgcctcggccgaggaggccgcgccggaaggcgagggcgcgaacaagccggtctacgtcgacctgaccccggcgctggtcggcaactacggcagcgggccgcgcctgcagtactacaaggccgacatcgccctgcaggtggccgacaaggacgcggcgaccaaggtcgagcatcacgagcccttgatccgcaaccagttgatcatgctgttcgcccagcagaccgaccagagcctgggtacggtcgaggccaaggaaagcctgcgccaggaggcgctgaagcaggtccagcagaccctcgagcaggaagagggcaagccgctggtgaccgacctgctgttcaacaacctcatcgtccagccctga

SEQ ID NO: 321770 - DNA, 1074 bp, Pseudomonas aeruginosa
atgaaacaggaaagcaaacggtggctgagccgtgccttgatcgtggcggcgctgctcggcgtaggcgtgctggtctggcaggtatcgcgaccgaccggcctgggcgagggattcgccagcggcaacggacgcatcgaggccaccgaggtggacgtggcggccaagcttcccgggcgggtcgccgagatcaaggtcgacgagggcgatttcgtcaaggccggcgaaatcgtcgcgcggatggatacccaggtgctcgaggcgcagttggcccaggcccaggcccaggtgcgccaggcggagaacgccaagctcaccgcggcctcgctggtggcccagcgcgagagcgagaagagcaccgcccaggccgtggtggcgcagcgccaggccgagctgacagcggcgcagaagcgcttcacccgtaccgaggcgctggtcaagcgcaatgccctgccgcaacagcaactcgacgacgatcgggcgaccctgcagagcgcccaggcggcgttgtccgcggcacgctcgcaagtgatttcggcgcaggcggcgatcgaggccgggcgttcccaggtaatcgaggcgcagtcggccatcgaggcggccaaggccagcgtcgcccggctccaggcggatatcgacgacagcctgctcaaggcgccgcgcaacggccgcgtgcagtaccgcgtggcacagccgggggaagtgctgccggccggtggcaagctgctcaacatggtcgacctggccgacgtctacatgactttcttcctgccatccatgcaggccggcagggtcggactgggccaggaagtgcgcttggtgatcgacgcggtgccggactacgtgatcccggccaaggtttcctatgtcgccagcgtcgcccagttcaccccgaaaacggtggaaaccgccaacgagcgggagaaactgatgttccgggtcaaggcgcggctcgatccggcgctgctggaaaaatacatcacctacgtcaagaccggcgtgcccggaatggcctacctgcgactggaccctgaggtcgagtggccggccaacctgcagatcaaggttccgcaatga

SEQ ID NO: 321771 - DNA, 2751 bp, Pseudomonas aeruginosa
atgaccgctggcgggagcggcgtggcgagcctccggggcgtttcgctgcgctacggcgagacgcgcgcggtggacgacgtcagcctggagatcccggccaaccgcatggtcggcctgatcggtccggacggggtcggcaagtccagcctgctggcgctgctggccggcgcacggaagatgcaggatggcgagatccgcgtgctcgatggcgacatgcgcgaccgccgccaccgccgggcggtctgcccgcgcatcgcctacatgccccaggggctgggcaagaacctctacccgacgctctcggtgttcgagaacgtcgacttcttcggtcggctgttcggccacgacaaggccgagcgcgagcggcgcatcgccgatctgctgcaaagcaccggattggcgccgttcgccgagcgtcctgcgggcaagctgtccggcggcatgaagcagaagctcgggctgtgctgcgcgctgatccacgatcccgacctgctgatcctcgacgagccgaccaccggcgtcgacccgctgtcgcgcaaccagttctgggagctgatcggccgtatccgcgcgggccgcgaaggcacgagcgtgctggtcgccaccgcctacatggaggaagccgagcgcttcgactggctggtggcgatggacgacggaaaggtcctggccaccggtacgccgcaggagctgcgcgagcgtaccgggacgcagagcctcgagtcggcgttcatcgccctgctgccggaaagcaagcgcgccggccaccatcgattggtgatcccgccgcgaccgcagagcgaaggcgcgccgcggatcgccatcgaggccgagggcctgacctgtcgtttcggcgacttcgtcgcggtcgatcacgtcagcttccgtatcgagcgtggggaaatcttcggcttcctcggctccaacggctgcggcaagtccaccaccatgaagatgctcaccggcctgctgccggccagcgaaggcacgtgcgcgctgttcggccaggcggtggacgccagcgacatggcgacccgtcgccgggtcggctacatgtcccaggccttttccctgtatgccgagctgagcgtgcggcagaacctggtgttgcacgcccggctgttccacctaccggcggatggtatcccggcacgggtcggcgaaatgctccggcgcttcgacctggagaaggtggccgacgagctgcccgacgacctgccgctgggcatccgccagcgtctgtcgctggcggtggcggtgatccacaagccggagatcctgatcctcgacgagcccacttcgggggtcgacccggtggctcgcgacggcttctgggaactgatggtcgagctgtcgcgccgcgacggggtgaccatcttcatttccacccacttcatgaacgaggcccagcgctgcgatcgcatctcgctgatgcatgccggcaaggtactggccagcgatactcccgatgagctggtgcgccagcgtggcctgccgaccctggaagcgaccttcatcgcgtacctggaagaagccgccggtgccgccgcgccagcgcaaccggccgaggcgccggccgtcgcggagcagcccggcgatggccaggggcgccaggcgcaacgcgaacgcttcagccccctgcggctgttcagctatgcgcgccgcgaagccatggaactgcgccgcgacccgatccgcctgaccctggccctgctcggcaccgcgctgctgatgttcatcatcggctacggcatcaacatggacgtcgaggacctctcctgggcggtcctcgaccgtgaccagaccaccaccagccaggcctacgcgctgaatatcgccggctcgcgctatttcgtcgaacatgcgccgatcaccgacccggacgacctcgaccggcgcctgcgcagcggcgagctgagcctggcggtggagatcccgccgaacttcgggcgcgatctcaagcgtggctccgatccggccatcggcgtgtggatcgacggagcgatgccgacccgtgccaacaccgtgctcggctacgtgcagggcctgcacaccagctacctggcggacctctcgcggcaggcgggtggggccgaggccagcgcggcggccagcaccgaggtgcgctatcgctacaaccccgacgtggaaagcctgaaggcgatggtgccggcggtgatcccgctgctgctgatcatgatcccggccatgctcaccgccctcggcgtggtgcgcgaaaaggaactgggttcgatcaccaacctctatgtcaccccggtgacgcgcctggagttcctggtcggcaagcagctgccctacgtcgccatgggcatgatcaacttcctgctgatgctggtcctggccatcgtggtatttcgcgtgccgctcaagggcagcttcctggcgttgaccatcggcgctttcctctatgtggtcaccagcactggcctagggctgttcctctcgacgttcatgcgcagccagatcgccgctgtattcggcgtggcgatcgccaccatgatcccggcgatccagttctccgggctgatccacccggtgtcctcgctggagggtgcggcggcctggatcggcaagctctatccgacctcgcatttcctggtggtcagccgcggcgccttttccaaatcgctgggcctgtccgatctctgggcctactacctgccgcttgccgcttccatcgtggtgctgaccctgctcagcgtggcctgcctgaagaagcaggaggactga

SEQ ID NO: 321772 - DNA, 1125 bp, Pseudomonas aeruginosa
atgcgcagcctggccaacatcttcaacctgggcatcaaggagttccgcagtctcggccgcgactacgcgatgctggcactgatcgtctgggccttcaccctgggcgtctacagttccgccaccggtattccggaaaccttgcatcacgcgccgatcgcggtggtcgacgaggaccgctcgcagctctcgtcgcgtatcgtcaatgccttccagcccccatacttccggccgccggaaatgatcggacatgccgagatggatcgcggcatggacgtcggcctgtataccttcaccctcgatatcccgccggacttccagcgcgacgtgctcgccgggcgcaagccctcgatccaggtcaacgtcgacgcgacccagaccgggcaggccttctctggcgcgggctacatccagaacatcgtcgccaccgaggtgcgcgaattcgtcagccgctaccgcgcggagccgagcatgccggcgcagatcgaggtgcgcatggaattcaacccgaacctgacccaggcctggttcggtggggtgatggaagtgatcaaccagatcaccatgctgtcgatcatcctcaccggcgccgcgctgatccgcgagcgcgagcacggcaccgtcgagcacctgctggtgatgccgctgtcggccttcgagatcatgatggccaaggtctggtcgatggggctggtggtgctggtggcggcggggctctcgttgcagtgggtggtgcgtggctggctggacgtgccgatcagcggctcggtgggactgttcctgctcggcgccggattgcatctgttcgccaccacctccatgggcatattcctcggcacggtggcgcgttcgatgccgcagctcggactgttgaccatcctcgtgctgctgccgctgaacattctttcgggcggcaccacgccacgggaaagcatgccggaactggtgcagaacatcatgctggcggcgccgaccacgcatttcgtcagcctggcccaggcgatcctgttccgcggcgccggtttcgacatcgtctggccgcagttcgccggtatcgtggtgatcggttcggcgttcttcttcggcgcgctctggcgtttccgccggaccatctcgcagatggcctga

SEQ ID NO: 321773 - DNA, 459 bp, Pseudomonas aeruginosa
atgcctgcctactggctgatgaaatccgagccggacgaactctcgatccgcgacctgcaacgcctcggaaccgcccgctgggatggcgtgcgcaactatcaggcgcgcaacttcatccgcagcatgaaccccggcgacctgttcttcttctaccactccagttgcccgcagcccggcatcgccggtatcgcccgcatcgaaggcgaagcctaccccgatcccacggccctggatcccgccagcccctaccacgaccccaaggccagcgccgggaagaacccctggagcgcccgcgacgtcagcttcgtcgaagccttcgccgaggtcgttccactggcccggctgaaggcccaggacgccctggccaacctcgccctggtgcagaagggcagccgcctctcggtaatgccggtcagcgccgaggaatggcaggcgatcctgccgctggcgaaacgctga

SEQ ID NO: 321774 - DNA, 132 bp, Pseudomonas aeruginosa
atgaagcgcaagccagacttgctgtgggttttggtcatcatcttcggacttggggtcgtcaccaccggttatacccagagcctctgggaacgacaggccagtacgcccgcccaggtgacgcaacagccgtaa

SEQ ID NO: 321775 - DNA, 612 bp, Pseudomonas aeruginosa
atgatcgaatcgcaagacctcagccgcccggccctgcgccgcaagctccgccaggcgcgccgcgcgctctcccccctgcagcaacgcctcgccgcccgcgccctctatcgacaactggcgcagcatccccttttccgccgtgcccgccatatcgccctgtacctgcccaacgacggcgagatcgacccgcgtccgctgctgcgtgcggcgcagaagcgcggcaaggccacctacctgccggtgctggcgccctggccgcggacgcgcatggtattccagcgggtcggcagcggcgaacgctggacccgcaaccgcttccgcatcagcgaaccgctggccgacgccggccgccagcgcaaggcctgggcgctggacctggtactgctgccgctggtggggttcgacgaacagggcgggcgcctgggcatgggcggcggcttctacgaccgcagcctggcctacctggcgaggcgcaaaaatggtcacaaaccgacgctgatcggcctggcccatgaatgtcagaaggtggatcgactggcgctggccagctgggacattcccctggcgggaacggtgaccgatgcgggctggtacgtggcagggaaacgctag

SEQ ID NO: 321776 - DNA, 315 bp, Pseudomonas aeruginosa
atgagccagtcgaataccctcaccgtgcagattctcgacaaggaatactgcatcaattgcccggacgacgagcgcgccaacctggaaagcgccgcccgttacctggacggcaagatgcgcgagatccgctccagcggcaaagtcatcggcgccgaccgggttgccgtgatggccgccctcaacatcacccacgacctgctgcaccgcaaggagcgcctggaccaggaaagcagctcgacccgcgagcgcgtgcgcgaactgctcgatcgcgtcgaccgcgccctggcgaatccggccgatgccggcgaagcctga

SEQ ID NO: 321777 - DNA, 210 bp, Pseudomonas aeruginosa
atggaagacgccgatctgcaattgttgacggccaagttcgaccagctgctccagaagctggaacagctcaaggcggagaaccggctgctgcgggcgaacgaaaagtcctggcgcgaagagcgcgctcatctgatcgaaaagaacgaaatggcgagacacaaggtcgaagcgatgattttgcgtctgaaagccttggagcaggacacatga

SEQ ID NO: 321778 - DNA, 498 bp, Pseudomonas aeruginosa
atgccggtctcgccggccgaactgcacggccatctgctgggtcgggtctgcgccggcgccggcttcgacgaggccgcctggcaacacgctgccgccgaactgctcggcggcgcgccgggcgaacgactcaaggccgcgttgtccggcctgctcggcatggtccggcaggacttttccgccggcgaggtcgccgtcgtcatgctcctgcccgacgacgaaaccccgctcgcccagcgcaccgaggcgctcggccaatggtgccagggtttcctcgccggtttcggcctcaccgcccgcgaaggcagcctgaccggcgaagccgaggaagtgctgcaggacatggccgccatcgcccaggtccagggccagctggaagacagcgaggacggcgagacggactatatggaagtcatggaatacctgcgggtcgctccgctgctgctgttcgccgagtgcggcaagccgctggagcccgctcccaagccttcactgcactga

SEQ ID NO: 321779 - DNA, 1335 bp, Pseudomonas aeruginosa
atgatccgtatccccaagtcggagtacgcccgtcggcgcaaggcgctgatggcgcagatggaacccaacagcatcgccatcctgccggcggcgccgatgtacatccgcaatcgcgacgtcgagcatgtctaccgccaggacagcgacttccagtacctcaccggcttccccgagccggaggcggtgatggcgctgattcccggccgtgcccacggcgaatacgtgctgttctgccgcgagcgggatccggagcgtgaactgtgggacggcctgcgcgccggccaggacggtgcgatcggccagtacggcgccgacgacgcctttcccatcggcgatatcgacgacatcctgcccggcctgatcgaaggccgcgaccgggtctactacgcccttggcgccaatcccgacttcgaccgccggctgatggactggatcaacgtgatccgctccaaggcccgccagggcgcgcagccgccgaacgagttcgttgccctcgaccacctgctgcacgaccagcggctgtacaagagcgccaacgaagtgaaggtcatgcgctacgccgccgaggtctccgcccgggcgcacatccgggcgatggaggtgtgccggccggggctgttcgagtaccacctggaagccgaactggaatacgagttccgcaagggcggggcgaagatgccggcctacggctcgatcgtcgccgccggacgcaacgcctgcatcctgcactaccgcgagaacgatgcggcgatcaaggacggcgacctgatcctgatcgatgccggctgcgagatcgactgctacgccagcgacatcacccgtaccttccccgccaatggccgcttcagtcccgagcagaaggcgatctacgaactggtgctggaagccaacatggcggcgttcgactacatcgcccccggtcgccactggaacgaggcccatgaggccaccgtacgggtcatcaccgccgggctggtgcgcctgggcctgctggagggcgacgtcgacgagctgatcgcccacgaggcctacaaggctttctacatgcaccgcgccggccactggctggggatggacgtgcacgacgtcggcgagtaccgcgtcggcggcgaatggcgggtgctcgaaccgggcatggcgatgaccgtcgagccgggcatctacatcgccccggacaatacctcggtggcgaagaagtggcgcggtatcggcgtacgcatcgaggacgacgtggtggtcacccgcaatggctgcgaagtgctgaccaacggcgtgccgaagaccgtcgccgagatcgaggcgctgatggccgcggccaagagcgaggcagcctga

SEQ ID NO: 321780 - DNA, 1185 bp, Pseudomonas aeruginosa
atgagcaaggtcaacctggcgatcatcggcgggggcctggtcggcgcctcgctggcgctggccctgcaggccggcgctcgggagcgcggctggtcgatcgtgctgatcgaacccttcgcccccggcaatgcctaccagcccagctacgacgcccgctcttcggcgctgtcctacggcagccggcagatctacgagcgactcggcctgtggccggcgatcgccgagcgcgccgagccgatcctgcatatccatgtttccgaccgcggccgcttcggcgccacccgcctgaccgccatcgaggaaggcgtgccggcgctgggctacgtggtggagaacgcctggctcggccagtgcctgtggaaggcgctcgaccccgaggtggtgcgctggcactgcccggccgaagtgaagaccctggaagcccgggagggcggttaccggcttaccctcgacgacgagacgcaactcgattgcgagctggcgatcctcgccgatggcggtcgttccgggctgcgcgaacaacttggcatcgccgtggagcagacgccgtaccggcagactgcgctgatcgccaacgtatcgccctccgaggcgcacctcgggcaggccttcgagcgcttcacccccagcggtccgatggccctcctgccgttgccggataaccgttgcgcgctgatctggacccgcccaggcaaggacgccgaacgcctgcgtggcctcgatgacgcggccttcctcggcgagctgcaggctgccttcggctaccgcctcggcgccttccgccaggtcggcgcacggcactgctaccccttgcacctggttgaggcccgcgagcaggtgcgtccgcacctggtggtgctgggcaacgctgcgcacagtctgcaccccatcgccggccagggcttcaacctgtcgttgcgcgacaccctggcgctggtcgacgccctgctccacgacgacgcgccgctgggcgagttcgccgtgctgcagcgctacctcgatgggcagcgcctggaccagcagatgaccgtcggcttctccgaccgggtgacccggctgttctccaacgaccgcgcgctgctcggcgccgggcgcaacctcggcctgctcgggctcgacctgctgccgccggccaagcgctggttcgcccgccaggccatgggcctcggcgcgcggccgctgtag

SEQ ID NO: 321781 - DNA, 483 bp, Pseudomonas aeruginosa
atgccggtctggtcgagggcgcgcaaggcccgcctgctgcgcttcgccatgaatctctacccgcccttcctgggggcgggcatccgtgtgcggcacatcgctggcgatttccgcgaggttcgggtgcgcatgggcctgaaccggctcaatcgcaactatgtaggcacccagttcggcggcagcctctacgcgatgaccgacccgttcttcatgctgatgctgatggagaacctgggccgcgactacgtggtctgggacaaggcggccaacatcgagttcgtcagcccgggcaagggcccggtgcatgcgcatttcagcatcgaccagaagctgctcgacgaggtccgcgagcggaccgccggcggcgagaagtacctgccccggctgcacgccgaagtgcgcgacgatgccggcaccctggtggcgcgggttcagaaaaccctgtacgtgcggctcaagccgcgcctgcggaacgcggcctga

SEQ ID NO: 321782 - DNA, 1218 bp, Pseudomonas aeruginosa
atgcacgcggatctggtcatcgtcggcgccggcatggtcggtagcgccctggccctggccctggagggcagcggcctggaggtgctgctggtggacggcggctcgctcgacgtggcgccgttcaagccggaggcgccctacgagccgcgggtcagcgcgctgtccgaagccagccggcggattctccagcgcctgcatgcctgggacggcatcgtcgcgcgccgcgccgagccctatcgcgagatgcaggtgtgggatggctccggcaccgggcggatcggcttcagcgccgccagcgtgcacgccgaggtactcggccatatcgtcgagaaccgggtggtgcaggacgccctgctggaacgcctgcacgattccaccaccggcctgctggccaatgcgcgcctggaacagatgcgccactccggcgacgactggctgctgaccctggccgacggtcgccagctgcgtgcgccgctggtggtcgccgccgacggcgccaactcggcggtacgccgcctggccggctgcgccacccgcgaatgggattacctgcaccacgccatcgtcaccagcgtgcgctgcgagaacgtgcaccgcgcaaccgcctggcagcgcttcaccgacgacggtccgctggccttcctgcccctgccggaccgcggcgacgagcactggtgctcgatcgtctggtcgaccaccccggaacaggcagaacgcctgatggcgttggacgaggatggcttccgcgccgccctcggcgaagccttcgaacagcgcctgggcgccatcctgcatgccgaccggcgcctgtgcatcccgctgcgccagcggcacgccaagcgttacgtcgagccgggcctggcgctggtcggcgacgctgcgcacaccatccacccgctggccggacagggcgtgaacctgggcttcctcgatgcggcggtgctgtccgaggtcctgttgcacgccctggagcgcggcgaacggcttgccgacgaacgcgtgctgagtcgcttcgagcggcggcggatgccgcacaacctgggcatgatgacggcgatggaaggcttcgagcgcctgttccaggccgaccggttgccgctgcgctggctgcgcaacgccggcctgcgcctggtcgacggccatcacgaggcgaaggcgctgttcgtccgccaggcgcttggcctcagcggcgacctgccgtcgctggcacgagtctga

SEQ ID NO: 321783 - DNA, 822 bp, Pseudomonas aeruginosa
atgaaccatgtcatcaccccccacagcaagctgctcggcgtcatcgagccggtcctcaacgacatgcccgccggaaccctgcgccacgcactgttccgggccttctgggacgagacggcgtcgttgctggacatcgaggacgccttcgcccgggtcaccgcccggcgccaggcggtcgagccgctgcgcaagttcttcgccagctggtcgaagaccaacaactcggcggccagcgtttccggactggccaatcgcctgaccctgctggcccgttcggaacagggttcggcagcggcagaccagctctatcgagcctgcggcagcctgcaacggatcaccgacgaagacctcggcgccctcggcaacaccgtgcatgccgatcttttctacaccatggccaccaccctttgcggcgacgaccgctggctgctgcgcgagaactgcctgccttcggcgcaggcgttcaaggactggaccgaccgccagcgcctgcgtgagcgcgacctgatgcagggactgctgaccacgctggtacacgaggtctatacccacggcgaggtggagtacatccacccgctgtacaaggaatggttcagccgcgacatgggcgtacccgccgaacgcgcccgcgccaccgtggcctgggtaacggtgcacaccggcggcaccgagagcaatcacttcgcccacgccacggcggcggtgaacgccttcgtcgaggcgatggaaatcgaggtgaacgaagaagccgcgcgcaacctgttcgggctctacctgcgcaacaaggcgcaggtcatgcgtgactgcgcggcgctgttctga

SEQ ID NO: 321784 - DNA, 1194 bp, Pseudomonas aeruginosa
atgaattcttcccagggtttcccccgcctcgcgctgtttctctgcggttgcgctgcgttcctcaatctctataccacccagggcatcttcgacgaactggcggcgagcttccacatcagcgcccatcaatcgaactggagcatcaccgccaccaccctggcggtggctctcgccgcgcccttcgtcggccgactcagcggcggccgcgagcgcagccgggtgatcgccttcgccgccagcctgctctgcgtgcccatgctgctggccgcccatgccggcagcttcgccgccttcctgctctggcgcttcgccgaagggatgctgattcccctgctgttcgccagcagcgtggcctacatcggcgagcgctggagcggcggcgcggtcatcgagctgaccagcctctatgtcgccgggaccatcctcggcggcttcgccggacgcttcctcaccggcctgctgaccgaggagtgggattggcgcgtcgccttccggatcctcgccgggctgaccctgctcatcgccgtcgccatccgcgcgctgctccctgccaattctggcaggcactcgcccgcacccgggaaacgccccttagtatcccgtgaactgttccgggctccgctgctgtcgtcctacgcggtggggttctgtgtcctcttttcccaggtcgccatgttcacctatatcggcatccatctcagccgtccgccgtacagcctggacaccgctcagctcggctcgatctacgcggtgttcctcctcgccctgctggtgattcccgccagcggccgcctggcccgcacccgcccgcaccgccagttgctgctgggcgcatcgctactgggcgtgtgcggctcgctgctgaccctggcgccgggcctgccgacgattctcgtcggcctggccctcagcgccaccggcgtgttcctcgcacagtccacggtcaacgccttcaccgccagcaatgccgggaccgacaaggccggtgccgtcggcctctacctgacctgctactacgccggcggcagcctcggcgcggtactgccggcgccattctgggagcgctggggctggccgggctacctgggcctgatcctcctggcccagttgctgccgttgcttctgacccgctacggctggtccgcaccacaggccgaacgcgcggccctgcgcgcgtcgcaaggaagaccgtaa

SEQ ID NO: 321785 - DNA, 915 bp, Pseudomonas aeruginosa
atgctcgacctacgccgcctgcgctgcttcgcagccgttgccgaaaccctgcatttcggccgcgccgcccagcgcctgcacatggcgcagccgcccttgacccggcagatatccgcgctggaggaagagctgggctttcgcctgttcgaccgctccagccgggcggtgaccctcaccgccgagggcagcctgttcctgccttacgcacgcgccctgctggaccaactggagcgcaccgccggcttcgcccgcaagctggcgcaggggctggccggccacctgaccctcggctacgccagctccatcgccctgtcggacctgttcaccgaggcgatccgactgttccgcgagcgccatccggaggtgcaactggagctgctcgaaggcgcttcggcggcgcaatgggcgcagatcgccgaaggcggcatcgatgtggggctggggcgcctgccgccgccggaaggccaggtcggcatcgaggtgctggccctgggcggcgagccgctggtggtggccgtgcccaacggcgatccgctggcgcggcaagagcggatcgacctgtacgatctgcgtgatcggccgctgatcctgtttccactggactacggctccggcctcaacgaactgatcgagcgcctctaccggaaggccgggctggcgctgacgaggggaccggccggacgccagatcacctcgatcatcgccctggtcgcggccggccagggcgttgccctggtgccgcgttgcagcaccgcgctggcccgggccggagtcgtctatcgcccgctggccgagcccgaggcgctggccgatttcctcgtcttcacccgccgccatggccgcagcgccgcggtggaggcgttcctcgccatcctcggtggcctggacgcaggcgaaacaccccgacacatttag

SEQ ID NO: 321786 - DNA, 999 bp, Pseudomonas aeruginosa
atgcaggcaagcaaagctctactcgccgccctggccctgggcatcaccggcctggcccaggccgccgacgaagtggtggtgtattcctcgcgcatcgacgagctgatcaagccggtgttcgatgcctacaccagcaagaccggcgtgaaggtcaagttcatcaccgacaaggaagcgccgctgatggcgcggatcaaggccgaaggcgctaacaccccggccgacctgctgctcaccgtggacgccggcaacctctggcaggccgagcagatgggcctgctgcaaccgttcaagtcggccaccatcgaacggaacattccctcgcagtatcgttccagcaccgatagctggaccggactgtcgctgcgcgcgcggaccatcgtctactccaccgagcgggtcaagccggaagagctgagcacctacgaagccctggccgacaagcaatgggaaggccgcctgtgcctgcgcacggcgaagaaggtctacaaccagtcgctgaccgggaccctgatcgagacccacggggcgcagaagaccgaggaaatcctccagggctgggtgaacaacctggccaccgacgtattcgccgacgacaacgcggtgatccaggcggtggacgccggccagtgcgacgtcggcatcgtcaatacctactactacggacgcctgcacaagcagaacccgaacctgcgggtcaagctgttctggccgaaccaggccgaccgcggcgtccacgtcaacctgtcgggcatcggcctgactcgccacgcaccgcatcccgaggcagccaaggcgctggtggaatggatgaccgggcccgacgcccaggcgctgttcgccgggatcaaccaggaattcccggccaacccgcaggtcgcgccgtcagccgaagtcgccagctggggcagcttcaaggccgacagcatcccggtggaagtcgccggcaagcgccaggccgaggcgattcgcctgatggaccgcgccggctggaactga

SEQ ID NO: 321787 - DNA, 1620 bp, Pseudomonas aeruginosa
gtggcccatcccgctccccgccgctggtaccccatcaccttcaccgttgccgcgctggtgctgctgccgctcagcgtgctgctgctgagctggctggagatcgaccgggaaatctggagccacctgtgggatacccagttgccgcgcctgctcggcaacaccctgaccctggtgctcggcgtcggcatcggcgtgactctgctcggggtcagcctggcctggctcaccagcctctgcgaattccccgggcggcgctggctggactgggcgctgatgttgccgttcgcgatcccggcctacgtcctggcgttcgtcttcgtcggcctgctggatttcgccggaccggtgcagagcctgctgcgcgagtggttcggcagcggcctgcggttgccgcgcgtacgctccaccggcggggtgatcctggtcctggtgctggtgttctatccctatgtctacctgctcgcgcgcagcgccttcatcgcccagggcaagggcctgatggaagccgcgcgggttctcggcctgtcgccctggcaggcgttcctgcgggtcgccctgccgatggcgcggccggcgatcggcgccggcctggcgctggcggtgatggaaaccctggccgacttcggcgcggtatcggtgttcaacttcgacaccttcaccaccgccatctacaagacctggtacggcttctacagcctctccagcgccgcccagctggccagcctattgttgctcggggtatgcctggtgctgctcggcgagcgccacacgcgaggccgagccaaggccgccagcgagcgtccgcgcggcgcgccgctgtaccgcctgcgcggcgccagggcgctggcggcgagcgcctggtgcgggctggtgttcctctgcgccttcgtgattcccgtggcgcaactggttgtctggttctggcgccagggccgtttcgacctcgacgagcgctactgggacctgatcggccataccctgacgctgggcggcatcgccgcgctggcgacggtcgccgtggccctgctgctggccttcgccgtgcgcctggcgccgacccgcgctatccgcggcgcggtgggcctgggcaacctcggttatgcgctgccgggctcggtcctggcggtttcgatcatgctggccttcagctggctggacaatcactgggtgatcccgctttccagcgccctcggcggcgccggcaagccgctgctgctgggtagtctgttcgccctgctgctggcctacctgatccgtttcatggcggtggcctacgggccgctggaaagcgggctggcgcggatccgcccgtcgctgccggaagcttcgcgcagcctcggcgtgggcggcccgctgctgttcctgcgggtctacctgccgctgttgctgccggcctcgctgagcgccgcgctgctggtcttcgtcgacgtgctcaaggagatgccggcgaccctgctgatgcgtcccttcggttgggacaccctggccgtacggatcttcgagatgaccagcgagggcgaatgggcgcgcgcctcgctgccggccctgaccctggtgctggtcggcctgctaccggtggtcgggttgattcgtcgttctgcccatcattcagatcgctga

SEQ ID NO: 321788 - DNA, 1083 bp, Pseudomonas aeruginosa
atgggattgcgcaccccgctttacgagctgcacgtcgcgctcggcgccaagatggtcgatttcggcggttgggacatgccgctgcactacggttcgcaggtcgaggagcaccatcaggttcggcgtgactgcggcgtcttcgacgtgtcccacatgaccgtggtcgacgtcgccggcgagcaggccacggcctatctgcagcatctcctgtcgaacgacgtggcgcgtctcggcgaaaccggcaaggcgctctacagcgcgatgctcaacgaagagggcggggtggtcgacgacctgatcgtctacctgaccgagcacggctaccgggtggtggtcaatgcttccacccgcgacaaggacatcgcctggatgcaggcgcaggccgccggcttcaaggtcgacctgcaggaacgcggcgacctggcgatgctcgccatccagggccccaacgcccgcgtgcacagctccgaactggtatccccggcacgcgccgcgctgatacgcgaactcaagccgttccagggccgtgccgagggcgattggttcatcgcccgcactggctacaccggcgaggacggcctggaaatcatgctgccggccgccgaggcgccgggtttcctcaacgagctggttggcgccgggatctccccggcgggcctgggtgcgcgcgatacgctgcgcctggaggccgggctcaatctctacggccaggacatggacgaaagcgtttccccgcttgccgccaacatgggctggaccgtagcctgggagccggttgcgcgggacttcgtcggccgccgcgcgctggaagcgcagaaggccgccggcgaccagccgaagctggtcggcctggtactggaggagcgcggcgtgctgcgcgcccaccaggtggtgcgggtagctggcattggtgagggggagatcaccagcggcagcttttcgcctaccctgaacaagtccatcgcgctggcccgcgtgccggccgccaccggcgaccgcgccgaggtggaaatccgcggcaagtggtacccggtacgggtggtccagcccagtttcgtgcgtcacggcaagcccctgatctaa

SEQ ID NO: 321789 - DNA, 429 bp, Pseudomonas aeruginosa
atggcgaccgccgtcgcccccgacttcgaggaaaacaagatgagcaatattcccgccgaactgcgttacgcccagagccacgaatgggctcgcctggaagccgacggcagcgttaccgtgggcatttccgaccatgcccaggaagcccttggcgatgtggtcttcatcgagctgccggagctgggcaagaccctcgccgccggccaggaagcgggcgtggtcgagtcggtgaaggccgcctccgacatctattcgccgatcggcggcgaagtcatcgccatcaacgaagccctggccgacaccccggaagacgtcaacaacgacccgtacgcgtcctggttcttcaagctcaagccgagcaatccggccgagctggacaagctgctcgatgccgctggctaccaggccgccgtcgacgcggaaggctga

SEQ ID NO: 321790 - DNA, 2877 bp, Pseudomonas aeruginosa
atgtcgcagacgccgtccctcgcccagctccagcccgccgatgccttcctgcgccgccacctcggccccgatcctgcggaacagcaggccatgctggacttcctcggagtttccactcgcgccgaactgatcgtgcagacggtgccgccggcgatccgcctcaaccggccgctggaactgcccgccgcgctcgacgaacaggccgccctggcgcgcctgcgcggctacgccgggctcaaccagcgctggaccagcctgatcggcatgggctactacggcaccgtgacgccgtcggtgatcctccgcaacgtgctggagaatcccggctggtacaccgcctatacgccctaccagccggaaatcgcccagggccgcctggaagcgctgctgaatttccagcaactgaccatcgacctcaccggactcgacctggccagcgcctcgctgctcgacgaagccaccgccgccgccgaggccatggccctggccaggcgggtggcgaaggccaggagcaaccggttcttcgtcgatgcgcattgccatccgcagaccgtttcggtgttgcgtacccgcgccgaggcgttcggtttcgagctggtcgtcgacgagccggacaatcttgccgcccacgcggtgttcggcgccttgctgcaatacccggacagtcgcggcgagatccgcgacctgcgcccgcttatcgaggcgttgcacggccaacaggcgctggcttgcgtcgccagcgacctgctcgccctgttgttgctgaccccgccgggggaactcggtgccgacgtggtgctcggcagcgcccagcgctttggcgtaccgatgggctacggcgggccgcacgcggcgttcttcgccacccgcgaagggtacaagcgggcaatgccggggcggatcatcggcgtttcccgcgacgcccgcggcaacccggcgttgcgcatggccctgcaaacccgcgagcagcacatccgtcgggaaaaggccaactcgaacatctgcaccgcccaggtgttgctggccaacattgcttcgctgtatgccgtctaccatgggccgcaggagctgaaacgcatcgcccaacgcgtccagcgcctgaccgcgctgctggcggtgggcctggaaagcaagggactgcggcggctcaaccggcacttcttcgacaccctgacctacgaggtcggcgagtgtcaggcggcgatcctcgaacgggcgcgggcggcacgggtcaacctgcgcgtggtcgacgaccggcggctggccctgagcctcgacgaaacctgtgacgcggcgaccctggcgaccctgttcgagatcttcctcggcgccggccacgggctggatgtcgcgcacctggatggcggggcggtggccgacggcatcccggcggtcctgcaacgcacttcggcctacctgcagcatccggtgttcaacgcccaccacagcgagaccgagatgcttcgctacctgcgccagctggaaggcaaggacctggcgctgaaccaggcgatgatcccgctcggctcctgcaccatgaagctcaacgccagcagcgaaatgatccccatcacctggccggaattcgccgaactgcatccgttcgtgccgcgcgagcaggccgagggctatcgccggatgatcgacgaactggaagcctggctgcgggcgatcaccggcttcgacgccatctgcatgcagccgaactcgggagcacagggcgaatatgccgggttgctggcgatccgccgctaccaccagagccgcggcgatagccagcgcgacatctgcctgatccccgcatcggcgcatggcaccaacccggcctcggcgatcatggccagcatgcgggtggtgatcgttgagtgcgatccccgcggcaacgtcgacctcgacgacctgcgcctcaaggcggccgaggcgggcgaccggctgtcctgcctgatgatcacctatccctcgacccacggcgtctacgaggaggggataggcgagatctgcgaagtggtccaccgccacggcggccaggtctacatggacggcgccaacctcaacgcccaggtcggcctggcgcgaccggcggacatcggcgcggacgtctcgcacatgaacctgcacaagaccttctgcatcccccatggtggtggcgggccgggcatggggccgatcggggtcaagcggcacctggcgccgttcgtcgccaaccatccggtgatccgcgtcgaagggccgaacccgctgaacgacgcggtcagcgcggcgccctggggcagcgccagcatcctgccgatcagttggatgtacattgccatgatgggcccgcagctggccgacgccagcgaggtggcgatcctctccgccaactacctggcgaaccgcctggacggggcgttcccggtgctctaccgcgggcgcaacgagcgcgtcgcccacgaatgcatcctcgacctgcgaccgctcaaggcgcagaccgggataaccgaggaagacgtggccaagcgcctgatggactacggcttccacgccccgaccatgtccttcccggtaccgggcacgctgatggtggagccgaccgagagcgagtcgaaggcggagctggatcgtttcgtcgaggcgatgctgagcatcagggccgagatcggcaaggtggagagcggcgcctggccggcggaggacaacccgctgaaacgggcgccgcataccctggccgacgtcaccgggatctggcagagaccctacgagatcgccgaggcggtgaccccgagcgaacatgcgcgggcgttcaagtactggccggcggttaaccgggtggacaacgtctacggtgaccgcaacctgttctgcgcctgcgtgccgctggacgactaccgcgagtga

SEQ ID NO: 321791 - DNA, 330 bp, Pseudomonas aeruginosa
atgcgttccgtcaaactcgccgccgccaccctggtcatcgccgccctgccgctgggctcggccatggccgataccttctggcgcaacatcatttcctcgggtgccaccacggcctccacctacctgaccttccgccacgaccacaagctgatcgtcgccgcgcaggacgacgccggcagctacatcgccagcgacggcgcgatccgcgggccgtacctggaagccgccctgcagaagctgcgcaacgacaacccggacctgcaggccagcgacatggaactggccagcgcgatcctcgccggcggcgagcagtccgccgtccagcagtag

SEQ ID NO: 321792 - DNA, 453 bp, Pseudomonas aeruginosa
atggaaatcctgctgctacgcctggacttctgggactggctggccttcggtaccgtcctcctgctcctggaaatcttcggtgccggcggctatctgctgcgggtcggcctcaccgccgcttgtgtcggtgcgctcggcgcgctcctgccgggactggcctggccctggcaggtagggctgttcgtcctgctctccgggctggtcgccgccttgcatcgacgccgtcgccgcaaggccggtagcgtcgaggaaacgccagggttgcagcgacgcggcgacgacctgttcggccgcacctttcccttgcaccgggcgatcgtcggcgggctcggcgagctgcgcgtcgaggacgcgtcgtggctggtcagcggtcccgacctgccgcgcggcgccctggtccgggtcaccggccaggacggcgccctgctgcacgtcgagcctgctgcgccttga

SEQ ID NO: 321793 - DNA, 1785 bp, Pseudomonas aeruginosa
atgtccgtgttcgccaccgccgcccaggaccgcctgctggacctcggcgacctgctccgcgagctggtcgctcagggccgggtcgggcaggagcaggccgaacagtgcctggcgatccgccgcagcgcggtgcgcaaccagcagcatccgctggagttcctcgccgcgcagcaggtcgaggatctcaagcgccccggacgcaagctcgacctggagaccctcacccagtggctggccgagtacgccggccagccctacctgcgcatcgacccgctgaagatcgacgtcgccgcggtgactccgctgatgtcctacgccttcgcccagcgccatggcatcctcgccgtcgcgctgagtccggaggaagtcaccatcgccagcgcccagcccttcgtacagggctgggaaagcaacctggtgcatgtgctcaagcgaccgatcaagcgggtggtggcgaacccggcggacatccagcgctacaccgtcgagttcttccgcctggcccgctcggtcagcggcgccacctcgccggaccagaagatcagcggcgtcggcaacttcgaacagttgctcaacctcggcgccgccgaccaggagccggacgccaacgacgcgcacatcgtcaccatcgtcgactggctgttccagtacgccttccagcagcgcgccagcgacatccacatcgagccgcgccgcgagcagggcaccgtgcgcttccgtatcgacggcgtgctgcacaacgtctaccagttcccgccgcaggtgaccatggcggtggtcagccgcctgaagtcgctgggacggatgaacgtggcggagaaacgcaagccgcaggacggccgggtcaagaccaagaccccggacggcgccgaggtggagctgcgcctgtcgaccctgcccaccgccttcggcgagaagatggtgatgcgcatcttcgaccccgaggtgctgctcaagagcttcgaccagctcggcttctccgccgacgacctgcgccgctggcagagcatgaccagccagcccaacggcatcatcctggtcaccggccccaccggctcgggcaagaccaccacgctctacaccacgctcaagcaactggccaccgacgaggtgaacgtctgcaccatcgaggacccgatcgagatgatcgagccctcgttcaaccagatgcaggtccagcacaacatcgacctgaccttcgccagcggcgtacgcgccctgctgcggcaggacccggacatcatcatggtcggcgagatccgcgacctggagaccgccgagatggcgatccaggcggcgctcaccgggcacctggtgctctccaccctgcacaccaacgactcccccacggcgatcacccgcctgctcgaactgggcgtaccctactacctgatccgcgccacggtgctaggggtcatggcccagcgcctggtgcgcacgctctgcccgcactgcaaggcgccgatgcaactggcggacagcgactggcacgaactgacccgcccctggagcgccccgccgcccagcggcgcgcaccaggccgtgggttgcctggagtgccgcgacaccggctatcgcgggcgcgccggcgtctatgaaatcatgctgctcagcgatagcctgaaagaactgatcaccgccgacaccgacctggtcgccctgcgccgccaggcgtacaaggaaggcacccgcagcctgcgcctgtccggcgcgcagaaggtcgccgcaggtatcagtacgctggaggaagtactgcgggtgaccccgcagagcgaacagaagtag

SEQ ID NO: 321794 - DNA, 1365 bp, Pseudomonas aeruginosa
atgcagaaagaaaccgaaatcaaactccgcgtcagccgcgccaccctggaagccttgcaggagcacccgttgctgaagaagcgcaacaaatcgggctgggagcgccgcgaactgtacaaccagtactacgacacccccggccgcgagctggcccgggccaaggtcgcgctgcgcatgcgccgcgacggcgagcagtacatccagacgctgaaaagccgcgggcagagcgtggccgggttgtccgaacgcaacgagtgggactggtacctggaaaagaacaagctcgacctgaagaaactcgacgacaagtgctggccggcggccctcaaggacctcgacaagaagcagctcaagccgatcttcagcaccgacttcgtccgccagcgcgccgagatcgcctggggccgcggcaaggccagggtagtcgtggaggcggcgctcgacctgggcaaggtggtcgccggcgacaaccaggaggaaatctgcgaactggagctggaactgcgccagggcgatgccgccgcgctgctggagctggccgcggaactggccgccgacctgccgctgatgccctgcgacatcagcaaggccgagcgcggctaccgcctgttcgatccgaacagctacgaggtcgatcccccggcccagaaactgctggcggaaaccccgctggacggtgccttcgccgccatcgcctggtacctgctcggcagcagccagcgactggccgaacagtatcgcttcaacggccactggcgcctgctggaggactggctgcaacacctgcaggacctgcgtaccctgctcggcagcctcggccaggcggtgccacgcgccagcagtcgcgagctgcgcgaagcgctggacgctctcctcgccgactgggcgccgcgcatcgagcgcggccgtgacgacgagacgctacgccagcaggcgccgcaactgttccgcggcgaactcgacgagacccgctggggcctgttctccctgaatgcctcgcgctggctgctggccaaggcctggaccgagtcgcgcaacgagcgcggcaaccgccagggctctgccgcgctgggcaagtggctgctgcgcagccttgccgaagaagcccaggccacgccgctggcgcgcgcccaccagcatcccgagctgctccccgaccaagcgccgcgcctgcagcgcatgcttacctggttgcgcctggcgcgcggcgtgctcgacctgccggaagccgaccgcctctacggcgaactggccaagttgctggagctgctgcggcaacctgtcgatgccgagcgcctggctgcccgcgccacgcaggcccatactgtgctgacgctcaaaccctggaaggcgctgatgaaataa

SEQ ID NO: 321795 - DNA, 678 bp, Pseudomonas aeruginosa
atgccgaccaatccgttcatcagcctgttcggccgttcgccgatcgggccgatgcagcagcacatcgccaaggcccacgaatgcgcggccggcctgttgccgttcttccgcgcggtgatcgccgaggactgggcgcaggtcgaacaggttcagcaggacatggtgcgattggagcaggaagccgatcggctgaagaagaacgtccggatgcacctgcccaagagcctgttccttccggtgccgcgctccgatctgttggagctgctcagtgtacaggacaaagtcgccaatcgcgccaaggacatcgtcgggctgatgctgggccggcgcatgcgcatcccgttgccgctacagggccagatgctcgcctatgtgcagcgctcggtggacgccagcgcccaggcgttgcgggtggtcaacgaactcaacgaactgctcgagaccggcttcggcgggcgcgagaccagcctggtggagagcatggtggaggaactcgaggcgatcgagaacgataccgaccgcatccaggtcgaggtacgccgcgagctgttccgtctggaaagcgagctgccgccggtggacgtgatgttcctctaccagatcatcgaatggatcggcgatgtcgccgaccgtgcccagcgggtcggcaaccgcctggagcaattgctggcgcggtga

SEQ ID NO: 321796 - DNA, 1269 bp, Pseudomonas aeruginosa
atgtccctgatcgccgaccacggcttcgccttcctcgtactcgcctgcctgttcggtttcttcatggcctggggcgtcggcgccaacgacgtcgccaacgccatgggcacttcggtgggctcgcgcgctctgaccatccgccaggcgatcctggtggccatggtcttcgagttctgcggtgcctatttcgctggtggcgaagtcaccgaaacgatcaggagcggcatcgtcgacccgcagtacatgacccccgacctgctggtcttcggcatgctctcggccttgctggccgccggggtctggctgttgctggcgacgatcaagggctggccggtgtcgaccacccactccatcgtcggcgcgatcatcggcttcgcctcggtcggtgtctcggtgcacgcggtgcactggggcgcgatcggcccgatcgtcgccagttgggtggtgacgccggtgctgtccgggctgctcgccttcgccctgttcaggagcgtgcagtggctggtactgcatgccgaggacccgttccgcagcgcgcgccgctacgtgccgctgtacatgttcctggcgggcttcatggtcgcgctgatgaccgtcggcaagggcctgaagcatgtcggcctggagctttccggcctccagacgctgggcctggcgttgctcgccggcggcctggtgatgggcctgggcatcgtcctgctgttgcgcatccgacccactggcggagccgatccgcgtggcggcttcgccagcgtcgagcgggtcttcgcggtgctgatgatcttcaccgcctgctccatggctttcgcccatggtgccaacgacgtggccaacgccatcggcccggtggcggcggtcgtcgcggtggtccaggccggcggcgacctggatctggtgagccgttcgccggtgccgtcctgggtactgctgctgggcgcggtgggcatcgtcatcggcctggctacctatggctaccgggtgatcgccaccatcggccgggagatcaccgagctgacccccagccgcggcttcgccgccgagctggcgaccgcctccacggtggttggcgcctcggccatcggcctgccggtatccaccacccataccctggtcggcgcggtgctcggcatcggcatggcgcgcggcatcggcgcgctcaacctgcgggtgatcggctcgatcttcctgtcctgggtagtgaccctgccggccggcgcggtgctggcgatcctgttcttcctggtcctgcgcgcgctgttcggcgcctga

SEQ ID NO: 321797 - DNA, 1155 bp, Pseudomonas aeruginosa
atgccgttgccgtctctgaaagaccagttcggcgcgctgatcgccgcgtcttccgtcagttgcacccagcccgagctggaccagaccaaccgcccggtggtcgacctgctggcctcctggctgggcgatctaggcttccgctgcgagatccgggaagtctcgccgggcaagttcaacctgctggccagctacggcagcggtcccggcgggctggtgctggccggccacaccgataccgtgccctacgacgaagcgctgtggagcagcgatccgctgcgcctggacgagcgcgacggccgctggtacggcctcggcagttgcgacatgaagggcttcttcccgctggccatcgaggccttgctgccgctgctcgaccagccgttccgccagccgctgatgatcctcgccacctgcgacgaggaaagctcgatggccggcgcccgtgccctcgccgaaagcgggcgaccgctgggtcgcgccacggtgatcggcgagccgaccaacctgcggccgatccgcctgcacaagggggtgatgatggagcgcatcgagattctcgggcagagcggccattcgtccgatccgaacctcggccgtagcgccctggaggccatgcacgcgaccatcggcgagctgatggcgctgcgcggggaatggcagcgggcctggaacaacccgcagttcagcgtgccccagccgaccctgaacttcggttgcatccacggtggcgacaatcccaaccgcatctgcggccagtgttcgctggaattcgacctgcgcccgctacccggcatgcagcctgagcagttgcgcgaggcgatccgccagcgcctgcggccgctggccgaacggcaccaggtgagcatcgactaccagccgctgttccctgccgtgccgccgttcgaacaggcgcaggacagcgaactggtacgcgtcgccgaacgcctgaccgggcatcgcgccgaggccgtggcgttcggtaccgaggcgccgtacttccagcgcctgggcagcgagaccctggtcctcggtgccggcgacatcgcctgtgcccaccagcccgacgagcacctcgaactggcgcgtatcgaaccgatggtcggcgtgctgcgccggctgatccagcattactgcctgacgcccgccgccgactga

SEQ ID NO: 321798 - DNA, 702 bp, Pseudomonas aeruginosa
atgagcgaatacttccatcacgtcctgatcggactgctcgccgtgcttccggtggccaacccgctgaccagcgtctcgctactgctcggcctcggcggcagcctgccgccggcggagcgcaaccggcagatattcaaggccagcctctacgtggcgctgatcatgctggtcagcttctacggcggcagcctggtgatgcaggtgttcggcatctccattcccggcctgcgcatcgccggcgggctgatcgtcgcctatatcggtttcaccatgctgttccccgccaccacgccggacgagaccgaagtccagcacgacctgctgtcggacgaggaaaagatcaccccgcacttccgcgacctgtccttcgttccgctggccctgccgggtaccgcggggccggggaccatcgccctggtggtcagctcggcgtcgacgctgcaatccacctacggaagcattccgctgttcatccacctcgcggcgatcaccgtcaccctgctcaccgcgctgatcttctggatcgccctgcaaagctccgggcgcatcatgaagttcctcggcgaatccgggatcgacgccatctcgcgagtggtcggcttcctgctggtggcgatgggcgtgcagttcgtcatcaacggcggcttcgagctggtcgccggccacgccgcgcttcagtcggcggcgggcgtcaggcagtaa

SEQ ID NO: 321799 - DNA, 1299 bp, Pseudomonas aeruginosa
atgcccgactacgtcaactggttacgtcacgcttcgccctacatcaactcgcaccgggaccgcaccttcgtggtcatgctccccggcgaaggggtggagcatcccaatttcggcaatatcgtccacgacctggtccttctccacagcctcggcgcgcgcctggtgctggtgcacggttcgcgcccgcagatcgaggcgcgcctggccgcgcgcggcctggctccgcgctatcaccgcgacctgcgagtgaccgatgcgccgaccctggaatgcgtcatcgacgccgtgggtagcctgcgcatcgccatcgaggcgcggctgtcgatggacatggccgcctcgccgatgcagggcgcgcgcctgcgggtcgctggcggcaacctggtcaccgcgcggccgatcggcgtggtcgagggtgtcgactaccaccataccggcgaggtccgtcgcatcgaccgcaagggcattggccgccttctcgacgagcgcagcatcgtcctgctctcgccgctgggctactcgccgaccggggaaatcttcaacctggcctgcgaagacgtggccatgcgcgccgccatcgacctggaagcggaaaagctgattctctacggcgccgaacagggcttgctggacgcatccggcaagctggtccgcgaactgcgcccgcagcaggtgcccgcgcacctgcaacggctgggcaacagctaccaggccgagctgctggacgccgcggcgcaggcctgccgggccggggtcaagcgcagccatatcgtcagctacaccgaggacggcgcgctgctcagcgagctgttcacccgcaccggcaacggcaccctggtcgcccaggagcagttcgagcagttgcgcgaggcgggcatcgaggacgttggcgggctgatcgagctgatccgcccactggaagagcagggcatcctggtacgccgttcccgcgaggtgctggaacgcgagatcgaacagttcagcatcgtcgagcgcgaagggctgatcatcgcctgcgccgcgctctatccgatcgccgattccgaggcgggcgagctggcctgtctggcggtcaacccggagtaccgccacggcgggcgtggcgacgaactgctggagcggatcgaagagcgcgcgcgcggactcggcctgaagaccctgttcgtgctcaccacgcggaccgcgcactggttccgcgagcgcggcttccagcccagcagcgtcgaacggctaccggcggcgcgggcctcgctgtacaacttccagcgcaattcgcaggtattcgagaagagcctgtga

SEQ ID NO: 321800 - DNA, 1584 bp, Pseudomonas aeruginosa
ttgagcgatcttctctcccgccgcctggctctgctcggcgccgcagccaacctgcccctgctgaccgagtgcctgcatggcatcgagcgcgaatgcctgcgagtcgatagcgacggcaagctggcgctcaccccccacccccgggccctgggttcgaccctgacccatccacagatcactaccgactactccgaggccttgctggagttcatcacgcccacggaaaccgacgtcgccgacactctgggcgatctcgagcgcatccaccgcttcgccagttcgaaactggacggagagtacctgtggagtccatcgatgccctgcgagctgccggacgaggagagcatcccgatcgcccgctacggcagctcgctgatcggccgcctgaagtacgtctaccgcaagggcctggcgctgcgctacggcaagaccatgcagtgcatcgccggcatccactacaacttctccctgccggagaggctctggccgctgctgcgccaggccgaaggcagcgagctatcggaacgcgactaccagtccgccgcctacatcgccctgattcgcaatttccgccgctacagctggctgctgatgtacctgttcggcgcctcgccggccctcgacgccggcttcctgcgtggccgcccgagccagttggagcgcctcgacgaacacacgctctacctgccctacgccaccagcctgcggatgagcgacctgggctaccagaacaacgcccaggccggcctgacgccctgctacaacgacctgcagagctacatcgacagcctgcgccaggcggtcagcacgccctacccgccctacgagaaggtcggcaccaagcaggatggcgaatgggtgcagctgaacaccaacatcctgcagatcgagaacgagtactactcgagcatccggccaaagcgcgtcacctacaccggcgagcgtccggtgcaggccctggccgctcgcggcgtgcagtacgtggaagtgcgctgcctggacatcaacccgttcctgccgctgggcatcgacctggacgaggcgcgcttcctcgacgccttcctgctgttctgcgcgttcagcgacagcccgctgctgaacggcgagtgcagcgacgccaccgacaacttcctcgccgtggtcaaggaaggcaggcggccgggcctgcaattgcaacgccgcggccagccggtggaattgcaggtctgggcgaacgagctgctcgaacgaatcgccgacaccgcggcactgctcgaccgcgcgcgcggcggcgaagcccacgcggcggcgctggcagcgcagcgggcgaaggtggccgatgcggaactgacgccttcggcgcaggtgctgaaggtcatgcgcgagcgcggcgagagcttcgaagcgttctccctgcgccagagccgcgaacacgcggagtatttccgccagcatccgctggccgccgaagagcaggcgcgcttcgagaagatggccagcgactccctggccgaacagacggagctggaacgcgaccaggatggcgacttcgataccttcgtcgccgcctaccaggcgagcatcctcggcctgatcagcaactga

SEQ ID NO: 321801 - DNA, 390 bp, Pseudomonas aeruginosa
atgagcgagatgcccgcccgcgagcagatgatcagcgcctacagcgaactggtcggcctggacccggtcagcctcggcgacggcgtcgccgaggtacgcctgccgatggccgcgcacctgcgcaaccgcggcggggtcatgcacggcggcgcgctgttctcgctgatggacgtgaccatggggctggcctgctccagttcccatggtttcgaccgccagagcgtcaccctggaatgcaagatcaactacatccgcgccgtcgccgacggcgaggtacgctgcgtcgcccgcgtactccatgccgggcgccgcagcctggtggtggaagccgaggtgcggcaaggcgacaagctggtcgcgaaaggacaaggcaccttcgcccagctgtaa

SEQ ID NO: 321802 - DNA, 2340 bp, Pseudomonas aeruginosa
atggacagcatcaacacccgtatcgccgaagagctctccgcactgccctccggccgcgttcaaccgcagcaagtcgccgctgccgtcgccctgctcgacgaaggctccaccgttcccttcatcgcccgctaccgcaaagaggtcaccggcagcctcgacgatacccagttgcgcatgctggaagagcgcctgcgctacctgcgcgaactggaagaacgccgcggcgcgatcctcgccagcatcgaggaacagggcaagctgacccccgaactggcccgcgacatcaagctcgccgacaccaagacccgtctcgaagacctctacctgccttataagcagaagcgccgcaccaagggccagatcgccctggaagccggcctcggcgcgctggccgacgcactgttcgacgacccgaccctggtcccggaaagcgaggccgcgcgtttcgtcgacgccgagaaaggcttcgccgacgtcaaggcggtgctggaaggcgccaagtacatcctcatggagcgcttcgccgaagacgccacgctgctcgacaagctgcgcgtgttcatgaagaacgaagcgaccctgaccgcccgcgtggtccccggcaaggaacaggaaggcgccaagttcagcgactacttcgaacacgatgagccgctgaaaagcgccccgtcgcaccgcgccctggcgatcttccgcggacgcaacgaaggcgtcctcagcgcctcgctgaaggtcggcgaggaagcgccgggcaccctgcacccatgcgaggtcatgatcgccgagcgcttcggcctgtccaaccagggccgcgccgccgacaagtggctggccgaggtggtgcgctggacctggaaggtcaagctctatacccacctggaaaccgacctgttcggcgagctccgcgacggcgccgaggacgaggcgatcagcgtgttcgcgcgcaacctgcacgacctgctgctggccgccccggccggcccgcgcgccaccctcggcctcgacccgggcctgcgcaccggggtcaaggtcgcggtggtcgacgccaccggcaagctgctggacaccgccaccgtctacccacatgcgccgaagaaccagtgggaccagaccctcgccgtgctcgccgcgctgtgcgccaagcaccaggtcgagctgatcgccatcggcaacggcaccgccagccgcgagaccgacaagctggccggcgaactgatcaagaagtatccgggcatgaagctgaccaagatcatggtcagcgaagccggcgcatcggtgtattccgcctccgaactggcggcgaaggagttccccgagctggacgtgtccctgcgcggcgccgtatccatcgcccgtcgcctgcaggacccgctggcggagctggtgaagatcgagcccaagtcgatcggcgtcggccagtaccagcacgacgtgtcccagctgaagctggcgcgtagcctggacgcggtggtcgaggattgcgtgaacgccgtcggcgtcgacgtcaacaccgcctccgccgccctgctggcacgcatctccggcctcaactcgacgctggcgcagaacatcgtcgcgcaccgcgacgccaacggagcgttccgcacccgcgacgagctgaagaaagtcagccgcctgggcgaaaagaccttcgagcaagccgccggcttcctccgcgtgatgaacggcgacaacccgctggacgcctcggcggtgcacccggagacctatccgctggtgcagcgcatcgccgccgacaccgagcgcgacatccgctcgctgatcggcgactcggcgttcctcaagcgcctcgacccgaagaagttcaccgacgagaccttcggcctgccgaccgtcaccgacatcctcaaggaactcgacaagcccggccgcgacccgcgtccggagttcaagaccgcagaattccaggaaggcgtcgagagcctcaaggacctcaagccgggcatggtcctggagggcgtggtgaccaacgtcaccaacttcggcgcgttcgtcgacatcggcgtccaccaggacggcctggtgcacatctcggcgctgtccgagaagttcgtcaaggatccgtacgaagtggtcaaggccggcgacatcgtcaaggtcaaggtcatggaagtggacatcccgcgcaaccgtgtcggcctgtccatgcgcatgagcgacacccccggcgagaaggtcgaaggccagcgcggcgggcgtcccaccggcagcggccagccgcgccaggagcgtggcgccccgcgcggacagagcgcgccgccggcgaacaacgccatggccgcgctgttcgccaacgccaagcaactgaagaagaagtga

SEQ ID NO: 321803 - DNA, 744 bp, Pseudomonas aeruginosa
atgtcgaaccctgccgccctggccgaaggtgaaaagatcctcgtcgtcgacgacgacgcccgcctgcgccgcctgctcgaacgtttcctcgacgagcagggctaccgcgtccgcgcggtggagaacaccgagcagatggatcgccttctatcccgcgaactgttccagctggttgtgctcgacctgatgcttcccggcgaggacggcctcactgcctgccgccgcctgcgcgaacagaacaaccaggtgccgatcatcatgctcaccgccaagggcgacgagggcagccgcatccagggcctggaactgggcgccgacgactacctggccaagccgttcaacccgcgcgaactgctggcgcggatcaaggccgtgctgcgccgccaggcgccgctggtgcccggcgcgcctgccggtgccgacgaggtggtgaccttcggcgactaccagctgttcctcgccacccgcgaactgaagaagggcgacgaggtacacatgctgaccaccggcgagttcgccgtgctcaaggccctggtgcagcacgcccgcgaaccgctgacccgggacaagctgatgaacctcgcccgtggccgcgagtgggatgccctggagcgttccatcgacgtgcagatctcgcgcctgcgccggctgatcgagccggatccgtccaagccgcgctatatccagacggtctggggcgtcggctacgtgttcgtgccggacggcaacgcgcgcaaggcctga

SEQ ID NO: 321804 - DNA, 1320 bp, Pseudomonas aeruginosa
atgaaaacgccgctctggttcccgcaaagcttcttcgcccgcaccctctggctggtgctgatcgtcgtgctgttctccaaggcgctgaccctggtctacctgctgatgaacgaggacgtgatcgtcgaccgccagtacagccacggcgcggcgctgaccatccgcgcgttctgggctgccgacgaggagtcgcgcgcggccatcgccaaggcttccggcctgcgctgggtgccgagcagcgccgaccagcccggcgagcagcactggccgtacacggaaatcttccagcggcagatgcagatggagctggggccggacaccgagacccgcctgcgtatccaccagccgtcgcagctctgggtgcgcgcaccgagcctcggcgaaggctggctggcggtgccgctgtatccgcatcccttgcgtggccaacggatctggagcgtgctcggctggttcctcggcatcggcctgctctccaccgccgccgcctggatcttcgtccgccagctcagccagccgctcaagcgcctggtggtcgccgcccgccagttcggccaggggcgcagcgtgcgcctgccgctgggaccggagacgccgagtgaaatggccgaggtgtatcgcgccttcaaccagatggccgaggacatcgagcagggcgggcgcgaacgcgaattgatgttggccggtgtctcccacgacctgcgcaccccgctgacgcgcctgcgcctgtcgctggagttgctgccggagagcgaacgggagatggtcgaggacatgatccgcgacatcgaggacatggacgcgatcctcgaccagttcctcgccttcatccgcgacggccgcgacgagccggtggaggagggcgacctgaccgacctggtgcgcgaggtcgtggcgccgttcaaccagactcgcgagcaggtgcgcatggccttgcaaccggtaccggcgatgccgttgcggcgtgtgtcgatgaagcgtctgctgggcaacctgatcgacaatgccctgaaccacggcggcggttcggtggaggtggccagctacgtggccggcgaaagcgcggcgccctacgtggtgctgagcgtgctcgatcgcggccagggcatcgatcccgcggaagtggacagcatcttcaatcccttcatccgtggcgacaaggcgcgtggcggcaagggcaccggcctcggcctggcgatcgtcaagcgcatcgccgcccagcacggcggcagcgtcgaactgcgcaaccgcgatggcggcggcctggaagcgcgggtctgcctgccgctggggttgctgctgccgcgcggcgcggcctga

SEQ ID NO: 321805 - DNA, 924 bp, Pseudomonas aeruginosa
atgacctctcgtccttcctccgaccagacctggcagcccatcgacggccgggtggcgctgatcgcgccagcctcggccatcgccaccgacgtgctggaggcgaccctgcggcaactggaagtgcacggcgtggactaccatctcggccgccacgtcgaagcccgctaccgctacctcgccgggacggtcgagcagcgcctggaagacctgcacaacgccttcgacatgccggacatcaccgcggtctggtgcctgcgcggcggctacggctgcggccagttgctgccgggcctggactgggggcgcctgcaggcggcctctccgcggccactgatcggtttctccgacatctcggtgttgctcagcgctttccaccgccacggcctgcctgcgatccacggcccggtggccaccggactcggtctgtcgccgctgagcgccccccgcgagcagcaggagcggctagcctctctggcctcggtcagccgcttgctggccggaatcgaccatgaactcccggtgcagcacctcggcggacacaagcaacgcgtcgaaggcgcgctgatcggcggcaacctcaccgccctggcctgcatggccggcacactcggcggcctgcacgccccggcggggtcgatcctggtcctggaggacgtcggcgaaccctactaccgcctggagcgcagcctctggcaattgctcgaaagcatcgacgcgcgccagctcggcgcgatctgcctgggctcgttcaccgattgcccgcgcaaggaagtcgcccacagcctggagcggatcttcggcgaatacgccgccgccatcgaggtgccgctctaccaccacctgcccagcgggcatggtgcgcagaaccgagcctggccttacgggaagaccgcggtgctcgagggaaaccggttgcgctggtag

SEQ ID NO: 321806 - DNA, 906 bp, Pseudomonas aeruginosa
atgaaaatcgccgtgctgtcgcgcaatccccggctctactcgacccgtcgcctggtggaggccgggcgggagcgcggccatgaaatggtggtcatcgatacgctgcgcgcctacatgaacatcgccagccacaagccgcagatccactaccggggacaaccgctggagggcttcgacgcggtgatcccgcgcatcggcgcctcggtgactttctacggctgcgcggtattgcgccagttcgagatgatgggcgtgttcccgctcaacgagtcggtcgccatcgctcgctcgcgggacaagctgcgctcgctgcaactgctctcgcgcaagggcatcggcctgccggtgaccggcttcgcccactccccggacgatgtcccggacctgatcgagatggtcggtggcgcaccgctggtgatcaagctgctggagggcacccagggcatcggcgtggtcctctgcgaaaccgagaaggccgccgaatcggtgctcgaggctttcatggggctcaagcacaacatcatggtccaggagtacataaaggaagccggcggcaccgacatccgctgcttcgtggtcggcgacaaggtgatcgcctcgatgaagcgccaggcagcgcccggcgagttccgctccaacctgcaccgaggcggcagcgccagcctgatcaagatcaccccggaagaacgcatgaccgccatccgcgccgcccgcgtgatgggcctgaacgtcgccggggtggacatcctgcgctccaaccatggtccgctggtaatggaggtgaactcctcgccgggcctggaaggtatcgaatccaccaccggcaaggacatcgccgggatcatcatccagtacctggaaaagaacggcggcccccacctggccaggacgaagggaaaggggtga

SEQ ID NO: 321807 - DNA, 501 bp, Pseudomonas aeruginosa
gtgaagacattcgaccagctttccgtcatcggtctgcgcgagtggatcgcctttcccgaactgggcatggtcgggctgcgcgcgaagatcgacaccggcgccagcacctccagcctgcatgcctcggacatcgttccgttcgagcgcgacggcgagaagtgggtgcgcttcaccgcccacctcggcacgctggtacagcgccggcaccgttgcgaagcgccgatggtcgcgcgcaagaccattcgcagctccaacggccaggcccagacccgctacgtgatccgcaccaccctggcgctgggcgatcgcatgtggccggtggagttcaccctggcctgccgcaagtccatgcgctatcgcgtgctgctcggctccaaggcgctgatcgccgggcaactggtggtcaacccggccctggcctacgtccaggatcgtcccgagtcgccggccgccctgcccgcggcgacgggcatcaacctgctcgacgggagtccggtttga

SEQ ID NO: 321808 - DNA, 402 bp, Pseudomonas aeruginosa
atgccagtgagcgagaaagacgacgacaaggtgcgcctggacaagtggctctgggcggcgcgcttcttcaagacccgggcgctggccaaggccgcgatagagggcggcaaggtgcattgccggggcgagcggtgcaagccgagcaaggaacccagggtaggggaggaattgaccattcgtacgggcttcgacgagcgaaccgtgaccattcgcgcgctttccgtagtccgtcgtggcgcgccggaggcccaggctctctacgaggaaaccgcggacagcgtggaaagccgcgagcgcgcggcggccatgcgcaaggccggggcgctgggcgtacagaccgaggggcggccgagcaagaagcagcggcggcagatccaccagttgcgcggcggccaggactga

SEQ ID NO: 321809 - DNA, 804 bp, Pseudomonas aeruginosa
atggataatgcctctccgttccaagcggcctggcaatggcgcaagttcgccacctgtcatcttctggcgctcctgctgctgatcctgtggctctggggccccacccgcgagctgatgaacggcttcgacttctggctcttcgacaagctcaacggctccctcgccctcaacgaaacctggctgaaactctggggcctgctcagtacccgaccgttcgacgcggtggtcggggtgatcctgctctgcctgctgattcgcggcgactggctgctgccagcgaaccaggtacggcggctgaccttcggcttcatcgtgaccctgctgatcctggtggtgatccgcgtgctctacgccaagatcgcccaccacctgcactggcagcacgccagcctgtcgatgctgatggacaaggccatccacctcagcgaccacttcccggactgggaacgcgtgtgggaaatcaaggaccgctccaagcgcagcttccccggcgaccacgcctcggtgctgctggtctgggcgctgttcatgtcgctgttcgcccgccgcgccgggcagttcctgctgatctggaccctggccgtgctcttcatgctgccgcgcctggtagccggcgcgcactggggccaggacgactacatcggcggcctgcagatggccctgctggccctcgcctggggctgctacacaccgctggcggcgaaggccagcggctggctggtgcaggtgaccgaaccgctgttccgcctgctggcgaaattgccgctaatcggccgcctcggcgtggtccgcgactcggcctga

SEQ ID NO: 321810 - DNA, 894 bp, Pseudomonas aeruginosa
atgtcccattcagatcagagccagcgtttccttttcgacgataccgacgtgcgcggcgagatggtcgatctcgagcgcagctacagcgaagtgctggccaaacatccctatccggaaccggtcgcgcagctgctcggggagatgctcgcggcggcctcgctgctctgcggcacgctcaagttcgacggcctgctggtattgcaggcgcgctccagcggcgcggttccgctgttgatggtggagtgttccagcgaccgccaggtgcgtggcctggcccgctattcggcggagtccatcggcgccgacgccggcatgcaggaactgatgcccgaaggcgtgctgaccctcaccgtggacccggacaagggccagcgctaccaggggatcgtcgccctggagggggtgaacctggcggaatgcctgtccaactacttcgccagctcggaacagctgccgacccgtttctggctcaacgccaacggccgccgcgcccgcggcctgctgctgcagcagcttcccgccgaccgcctgaaggaccccgaggcccgcgaggccagttggcagcacctgaccaccctggccgacacgctgaccgccgaagagctgctggcgctggacaacgagaccgtcctgcaccgcctctaccacgaggaaaccgtgcgcctgttcgagccgcaaccgctggtcttccattgcagttgctcgcgggaacgttcggccaacgccctggtcagtctcgggcaggccgactgcgagcggctgctcgaggaggaagaaggctcgatcagcatcgactgccagttctgcaaccagcgctacctgttcgacgcctccgacgtcgcccagttgttcgctggcgctggcagccaggggccttccgagacccgccactga

SEQ ID NO: 321811 - DNA, 1542 bp, Pseudomonas aeruginosa
atgacgcaagccaacaacgccgtgtacaccgatatcagcgccgcccaactggtagaagaagccattcgccgcggtgagggcgaactggccgccaacggctcgctggtcgtacgtaccggccatcgcaccggccgttcgccggtcgaccgtttcatcgtcgaagagccgagcaccaaggacgcgatcgcctggggcaacatcaaccgtccgttcccggccgacaagttcgatgcgctgtgggcccgcgtggaagcgttcaacaacgcccaggaccatttcgtttcccatgttcatgtaggttccgccgaggcttactacctgccggtgaagatgaccaccgctaccgcctggcagaatctgttcggccgttgcctgttcatcgagccggagcagtacaacccggccggcaaggacgagtggcaggtcctcaatgtcgccaacttcgaatgcgtgcccgagcgcgacggcaccaactccgacggttgcgtgatcctcaatttcgcccagaagaaagtgctgatcgcaggcatgcgttatgccggcgagatgaagaaagccatgttctccgtgcagaacttcctgctgcccgagcgcgacgtgctgccgatgcactgcgctgccaacatcggcgaagcgggcgatgtgaccctgttcttcggcctgtccggcaccggcaagaccaccctgtccgccgatgaaagccgttacctgatcggtgacgacgagcacggctggggcgagggcgtggtgttcaacgtcgaaggcggttgctatgccaagtgcatcgacctgtccgagaagaacgagccggtcatctggaaagccatcaagttcggcgccgtgctggagaacgtggttctcgacgaagagcgcgtgcccaactacgccgatgacagcctgacccagaacagccgcgccgcctacccgctggagcacgtcgagaagcgttcggagaagaacctcggcggcgagcccaacgcggtgatcttcctgacctgcgacctgaccggcgtactgccgccggtatcgatcctgaacaatgagcaggcggcctaccacttcctgtccggctacaccgcgctggtcggctccaccgagatgggttccggcggcggtatcaagtcgaccttctccacctgcttcggtgctcctttcttcccgcgtccggccggcgtctatgccgagctgctgatcaagcgcatcaaggccttcggctccaaggtctacctggtcaacactggctggaccggcggtggctacggcgtcggcaagcgcttcaacatcccgaccacccgtggcgtgatcgcggcgatccagagcggcgcgctgatcggcgcggaaaccgagcacctggagatcatcaacctggacgtgccgaaggccgttccgggcgtcgagaccaatctgctcaacccgcgcaacacctgggctgacaaggctgcctacgacgaggcggcgaagggcctggccaagcagttcatcgaaaacttcaagaaattcgaggtttccgatgcgatcaaggccgccggcccgcagctgtaa

SEQ ID NO: 321812 - DNA, 357 bp, Pseudomonas aeruginosa
atgaacaggatgggccaactggctttgttcggtcttcttgtaggaacttccagcaacctgttcgccgcccccggcagcatcagcggcgtcatccgcttcaccggcgccattgtcgagccaccatgctcgatgagcgctccccgccaagacgaaagcaagggcagtttccacctcagtggctgtcccatgcaggcgcgcaccgcggatgtcagcatccgttcgatgaagaccggcgaggtgcgccacttgcaacccagcgatacggtcatcggtgaacgggatttctcggcgcgctatgagctggccggaagcggtcgccgctccggcaactacctgatcaccgtcacctacccctga

SEQ ID NO: 321813 - DNA, 603 bp, Pseudomonas aeruginosa
atgcatatcgaagacgccgttcgtagtcgccgtgccatcaagggctacgactcatccttcagcctgactcgcgaagagaaggaccatctcctggacctggcgctgcatgcgccttccgccttcaacctgcaacacgtgcggctggtcgaggtcagcgatccgcaattgcgcgtgcagttgcgtgaagtggcctgggaccaggcgcaggtcaccgacgcggcgatgctggtggtggtgtgcgcccagctcgacagttgggagcgcaacgcgcagcgggtctgggacggtgctcccgaggcggtacaggcgttcatggcaggcgccatcgacacctactaccgcggcaagccccaggtacagcgcgacgaagccatgcgcagctgcggcctgctggcgcagaccctgatgctggtcgcccgcggccagggcctggattcgtgtccgatggatggtttcgacttcgatgccgtggcccggctgatcaacctgccggacaaccatgtgatcggcctgatggtcgcggtcgggaaaaaggccgttgaaccctggccgcgcagcggcaagctgccgcgggaagaactggtcattcgcgaccgcttctga

SEQ ID NO: 321814 - DNA, 909 bp, Pseudomonas aeruginosa
gtgaatatccaaaccttcgacctcaacctgctacgcgtccttgacgcgctgctgcgcgaacgcaacgtctcgcgcgcggcggagcgcctggcgctgagccagccggcagtaagcaatgcgctgaaccgcctgcgcgagctgctcgacgacccgctgctggtccgcgccggtcgtgcgatgcagccgacgccccgggcgctggcgctggaagcgccgatccgcgcggcgctgcggcagatcgaacagagcctgggcgacggcgagggcttcgatccggggcgcagccggcagcgcttcaccgtagcggtgaccgactacgtcgaactgatctgcatgcccgccctgatgcgccgcctgagtgagcgggcgccgggaatctccatcgccatccagcacctgaccccgaccttgccggccgaggcgctggacaaaggcgaactggacctggtgctaggccgcttcgaaaacgtcccggcgcgcttccagcgccgccattgggccagcgagaccctgcaactggtcgcccggcgtcagcacccgctgctggcgcaggctcccgacctggccaccttcctggagctgcagcacctgtgggtgcacggcgggcagaccaaggggatggtcgaccagtggctgggcagccaggggctcaagcggcaagtggcctacaccacgccgaactacctgcaggcagcgcacatcgccgcgtacagcgacctggtcggcgtcctgccgcgacaactggcgcactacttcgaacgattgctgcccctgcaatcgttcgacctgccgttcgacctcggcccgttccacctggaactggtgtttctggcccagcgcgaacgcgacatcgccctgcaatggctggtcgaacagatccgccaggtcggggccgccggaccggactag

SEQ ID NO: 321815 - DNA, 1236 bp, Pseudomonas aeruginosa
atgagccagaacttttccttccgccaggccgcggtgatcggcgccggcaccatgggtcgcggtatcgtcatgtgcctggccaacgccggtctcgacgtgcagtggctggacagcaacccgcagatgctcaaccaggcgctcggcgccgtggccgacacctacgcgcacaacgtgcgccaggggcgcatcggcgaagaggaagcggccgcgcgccgcgcccgcatcacgccggtccagcacctcgccgcgatgcgcgaggcggacctggtgatcgaggcggtctacgagaacctggaactcaagcaatcgatcttccgcgagctggacgcggcgctgaagccctccgcggtgctggccagcaatacctcctacctggacatcgacgccatcgccgcggtcaccgcgcgtccgggtcaggtgctcggcctgcacttcttcagcccggcgcacatcatgcggctgctggagatcgtgcgcggcgcgcagaccgcgccggcggtgctggaggcggccctggcgctgggcgagcggatgggcaaggtcagcgtggtggccggcaactgccacggcttcatcggcaaccgcatgctcgaaccctacgccaccgaggcccgcctgatgctgctggaaggcgctctgccgtaccaggtggaccgggctctccaggcattcggtttcgccatggggccgttccgcatgtacgacgtggtcggtatcgacctggagtggcgcgcccgcgagttggccggggtcggccaggaccagccggccgtgcaggtggacaaccgcctttgcgagatgggccgcttcggccagaagagcggtgccggctactaccgctacgcgccgggcagccgccaggcggagcacgataccgaggtggatgccctggtgctccgggttgccgagacgctgggctacccgcggcgcgatttcgccgacgaggaaatcctcgagcgttgcctgctggcgctggtcaacgagggcgcgaagatcctcgacgagggtatcgccgcccgtagtgccgacatcgacactgtctacctgaacggctacggcttccccgccgcggagggcggtcccatggcctgggccgatcgcctcggcgcggccgagctgctgcaacgcttgcgtttcctcgaacagcgccacggcgcgcgctggaagccggcgtccctggtcgagcgcctggccgccgagggcggagccttcgccgacctgcaggaggtgcgctga

SEQ ID NO: 321816 - DNA, 1002 bp, Pseudomonas aeruginosa
atgcgtgatctgaccgacgatgtagcgctgatgcgcccggtgatcgacgccctgcgcgccagcggctgcgatccggaccgggtcctggtccgtgtcgggctgccgccgggtggcctgccggccggccgtttcccccattccgcacagaacctgttctggaaggccgccgccgacgagtgcggcgaagagcatgtcggcctgcacctggccgagcacctgccggcgttccacggcctgctcctggaatacctgttcctctccagcgataccttcggcgccggcctgcgccattccctgcgctacgtacgcctgctgtccgacaccctgcaggcgcaactggaggtggagggcgagcgcgcggtgctgtcgctgggcgaatcgccggcgatcaaccgccacttcccggaaatgctcgccggcgcggtgatccgcctgttcggcgcgctcaccgagggcgagttcaagccgctggaagtgcaactgatgaacgaaaccggcgcgccgatggagcgctaccgtgcggtctacggctgcccgacgatcctcggcatgccgcgctacgcgctggtattcgatgccgcggtgctggacaaaccctcgcgccacgccgccccggaactgctgcgcatgcacgagtcgctggcgcgccggcaactggccgaggtggagcgcctggacctggtgcgccaggtccgcgaactgatcggcgagttgctggtggacggaggcgccaccctggagcaggtcgccgcgcgcctcggcatgccggcccgacgtctgcgcgaacgcctggcgatggccggggtgcgcttcaacgatctggtcaccgactaccgctgccgactggccaaggaactgctgctgaagaccgacgagcgcatcgaagtgatcgtcgaacgcaccgggttttccgagccgagcaccttctatcgcgcgttcaagcgctgggtcggcgagacgccggtggagttccgccggcgcgggcagcaggggcgcgggtag

SEQ ID NO: 321817 - DNA, 1356 bp, Pseudomonas aeruginosa
atgaccgatcgttacatcgccttcgccaactcccccgtcggccgccgcctggttggcgccgtcggccttccctccccgctgcgcctggagcgctggcaggccggccgggtacggccggtggacggcccgctggtgatcggcgggagcggcgcgctggccgaggccgtgctgcccttcgccggcaagctgaccgacgcggtgttcgccgccgtcgagggacagttcgagctgccgcgctggaccgccgagcacagcccgcgggccaaggcggtgctgttcgacgccagcggcctgacccgcttcgagcagttggtggcgctgcgcgacttcttccagccggtgctcaagggcctcgacacatgcccgaaggtggtggtcctcggacgcccccccgagtctctcaaggacccggtcgccgccagcgtgcaacgcagcctggaaggtttcacccgctccctgggcaaggaaatccgtcgcggcggcaacgtgcagttgctgtacgtcggcaagggcgccgaggaccaactggaaggcgcactgcgcttcttcctctcgccgaagagcgcctacgtctccggccaggtgatccgtcttgccgccaacagcgcccaggtccacgactggagcaagccgctggccggccagcgcgcactggtcaccggcgccgcccgcggcattggcgcggccatcgcggaaaccctggcgcgcgacggcgcggaagtggtgctgctcgacgtgccgccggccagggaggccctcgaaggcctcgccgcgcgcctcggcggtcgtgccgtggccctcgacatctgcgccgcggacgccgggcagcaactggtggacgcgctgccggagggcgtcgatatcgtcgtgcacaacgccgggatcacacgcgacaagaccctggcgaagatgagcagcgacttctggaactcggtgatcaacgtcaacctcaatgccccgcaggtgctgacccaggccctgctcgacggcggcaagctgcatgacaacggccgggtggtgttgctggcgtcgatcagcggcatcgccggcaacctcgggcagagcaactacgcggtgagcaaggccggcctgatcggcctggcccaggcctgggcgccggcgctgggcaagcgcggcatcaccatcaacgcggtggcgccgggcttcatcgagacgcagatgaccgccgccattccgctgaccatccgcgaggccggccggcggatgaactccatgagccagggcggcctgccgcaggacgtcgccgaaacggtggcctggttcgcccagccgtcgtccggcgcggtcagcggccaggtgctgagggtgtgcgggcagagcctgctgggggcctga

SEQ ID NO: 321818 - DNA, 1278 bp, Pseudomonas aeruginosa
atgacccagctgcgccgggtcgccattgtcggcggcaaccgtattcccttcgcccgctcgaacaccgtgtacgccacggcgagcaaccaggagatgctcacttccgccctggaaggcctggtggagcgctacaacctgcacggagagcgccttggcgaggtggtggccggcgccgtgctgaagcattcgcgcgatttcaacctgacccgcgaatgcgtgctcggttcgcgcctggccccggaaaccccggcctacgatatccagcaggcctgcggtaccggcctggaggcggcgatcctggtggccaacaagatcgccctcgggcagatcgacagcggcatcgccggcggcgtcgataccacttccgacgcgccgatcggggtcaacgagggcctgcgcaagattctcctcgaggccaaccgcggcaagagcaacctggacaagctcaagagcctgctgaagatccgcccgcgccacgtggtcccggccatcccgcgcaacggcgagccgcgcaccgggctgtcgatgggggagtcctgcgaactgatggcgcagacctggcagattccccgcgacgagcaggacaggctggccttcgagagccaccacaagctggccgcggcctatgaggagggctggcagaacgacttgatgacgccgttccgcggcctgacccgcgaccagaacctgcgcccggatatcgacctggagaagatcggcaccctcaagccggtgttcgagcgcggttcgcgcggcaccctcacggcggccaactcgacgccgctgaccgacggtgcctcggtggtactgctggccagcgaggagtgggcgaaggcgcgcggcctgccgatcctggcctatttcaaggacggcgaggcggcggcggtgaacttcgtcgatcgccaggagggcctgctgatggcgccggtctacgcggtgccgcggctgctggcacgcaacggcctgagcctgcaggacttcgactactacgagatccacgaggccttcgccgcccaggtgctctgcaccctgaaggcctgggaagaccccgagtactgcaagacccgcctcggcctcgaccagccgctgggctccatcgaccgcagcaagctcaacgtcaagggcagctcgctggccgccggccacccgttcgccgccacgggaggacggatcgtcgccaacctggccaagctgctctcgctggcggagcagggacgcgggctgatttccatctgcgctgccggtgggcagggtgtgaccgcgatcatcgagcggtaa

SEQ ID NO: 321819 - DNA, 468 bp, Pseudomonas aeruginosa
atggacaaatacgaccgtgcgctcctcgccgccctgatcgacaacggccgcctgaccttcgccgaactggcccggcgcatcaacctgtcgcccccggcggtggccgaccgggtggccaagctggaggccgaaggggtgatcaccggctaccacgcctcggtgaacctggccaagctcggcctgcccatcgagtgcgtgatcgaactgcggatcaccgagaaggattgccagtcggtgctcgacgaactggcccggatcccccaactgaccctctgccaccggatcaccggcgacgcctgcgtgctgatgaaggccgccgtggcttcgatgccggagctgcaggacctgatcgaccggctgatgaagttcggcatcagcaagacctcgatgatcctctccacccccttcgccgaccgccagccggcaagcctgcgggggcaggacggcaatggcggatgtgcggcgtga

SEQ ID NO: 321820 - DNA, 891 bp, Pseudomonas aeruginosa
atgcctgcccgtcgccttccgctgttgcttttcggtgcgttcttcgccctgtacttcatctggggctccacttacctggcgatccgcttcggcgtcgagtcctggcctccgatgctgatggccggggtgcgcttcgtcatcgccggcggcctgatgttcgcctggttgcgctggcgcggcgcgccgttgccgacctggcgtgagtggcgcggcgcgggggtcgtcggaatcctcctgctcagttgcggcaacggcggggtgacggtggccgagcactggggcgtgtcttccggggtggcggccctcgcggtggctacggtgccgctgttcaccctgctgttcagccagttgttcggccagcgcaacaccaccctggaatggggcggcatcgtgctcgggctgttcggcatcgtcctgctcaacctcggttcgaacctccaggccagccctgccggcgccggcctgatcctgttcgccgccgcgtcctgggccttcggctcggtgtggagccggcgcctgtcgctgccggccggaccgatggccagcgccgcggaaatgctggtcggcggcgcggtgctgctggtcggcagcctggccagcggcgagcgcctggagcattggccgagcaccagcggctggctggcgctggtgtacctgatcctgttcggctcgatcatcgccttcagcgcctaccagtacctgctgcgcaacgtacggccggcggcggccaccagctatgcctacgtcaatccggcggtggcggtgttgctcggcaccctgttcgccggcgagcggatcggcggtatcgaggggctggcgatggcggtgatcatcagcgccgtggtgctcatcggcctgccccagtggcgcgccagccgcgccgccgcctga

SEQ ID NO: 321821 - DNA, 246 bp, Pseudomonas aeruginosa
atgctgcggcgcagcgcccggatgggccgggctgacgggggtacgaagatgaaagcgctggtcatcggtgtggtcctggtgttccttggcggttgcgccagtcacgtgagccccggcggcaaggccatcgagtcgccgatcaaggagtatttcggccaggaccccatcgagcgccgggccttcggcgagagcgagaacggcgccgaggccgaggattcgccactgcgtttccgcctgacgccctga

SEQ ID NO: 321822 - DNA, 1182 bp, Pseudomonas aeruginosa
atggagagcatgctggacaggcccgagcaggaactcgtgctggtggtggacgacaccccggacaacctgctgctgatgcgcgagctgctcgaggagcagtaccgcgtgcgcaccgccggcagcggcccggccgggctgcgggcggccgtcgaagagccgcgcccggacctgatcctgctcgatgtgaacatgccgggcatggacggctacgaggtctgccgacggctcaaggccgatccgctgacccgcgacatcccgttgatgttcctcactgcccgcgccgatcgcgacgacgagcaacagggcctggccctgggcgcggtggattacctgggcaagccggtgagcccgccgatcgtcctggcgcgggtgcgtacccatctgcaattgaaggccaatgccgatttcctgcgcgacaagagcgaatacctggaactcgaagtgcgccgtcgcacgcgccagctgcaacagttgcaggacgccgtcatcgaagccctggcgacccttggcgatcttcgcgacaacccgcgcagccgccatcttccgcgtatcgagcgctatgtcaggctgctcgccgagcacctggcggcgcagcgggcgttcgccgacgagctgactccggaggctgtcgacctgctgagcaagtcggcgctgttgcatgacatcggcaaggtcgcggtgcccgaccgggtcctgctcaaccccgggcaactggacgccgccgacaccgccctgctacagggccatacccgcgccgggcgcgacgccctggccagcgccgagcggcggctcggccagccttccggattcctccgcttcgcccggcagatcgcctacagtcatcacgaacgctgggatggccggggctttccggaaggccttgcgggcgagcggattcccctggcggcgcggatcgtcgccctggccgaccgctacgatgaactgaccagccggcacgcctaccggccgccgctggcgcatgccgaggcggtgctgctgatccaggccggcgccggcagtgaattcgacccacggctggtggaggccttcgtcgccgtggccgacgctttcgccgaggttgcccggcgctacgccgacagcgccgaggcgctggacgtggagatgcagcggctggaacaggcggtggcggaaagcatcgaactcaccgcgccaccggcctag

SEQ ID NO: 321823 - DNA, 894 bp, Pseudomonas aeruginosa
atgaagacacccagacgcctggaaccgttgatcgaagacggtctgatcgacgaggtcgtgcgcccgctgatgagcggcaaggaagcctcggtctatgtggtgcgttgcggcgacagcctgcgttgcgccaaggtctacaaggaagccaacaagcgcagcttccgccaggccgccgagtaccaggagggccgcaaggtccgcaacagccgccaggcgcgggccatggccaagggctcgaagtatggccgccgcgaacaggaggaagcctggcagaatgccgaagtggcggccctgttccgtctcgccggggccggtgtgcgggtgccgaagccctatgatttcctcgatggcgtgttgctgatggaactggtggcggacgccgacggcgatgctgcgccgcgtctcaacgacgtgacgctggagcccgacgaggcacggcgccaccacgctttcctgatccgccagatcgtcgccatgctctgcgccggcctggtgcacggcgacctctccgagttcaacgtcctgctcggtccggacggcccggtgatcatcgacttgccgcaggcggtcgacgcggccggcaacaaccatgcgttcagcatgctcgaacgcgacgtcggcaacatggccgcctacttcggccgcttcgccccggaactcaggcagacccgctatgccaaggaaatgtgggcgctctacgaagccggcgagctgacagcggaaaccccgctcagcggcaccttcgtcgaagccgaagaggccgccgacgtgcgcgcggtgctccgcgagatcgaggccgcgcagcgcgaggaggcgcgtcgccaggcgctgcgccaggccgacgacgcgccgcgtggcgagcgcgaggaaccgccgccgccctggttgcagtga

SEQ ID NO: 321824 - DNA, 894 bp, Pseudomonas aeruginosa
atgcctgttgcacatatcctgctcgccctgctggtgaccctgatctggggtctgaacttcgtcgtgatcaaggtcggcctcggcgacttcccgccgctgctgttctgcgccctgcgcttcgccctggcggcgctgccgctgctggtcctgcgcgggccgatgccggcgccgttcggacgcatcctgctgatcggcgtgctcctcggggtggtcaagttcggcctgctgttcgtcggcatggcccagggcatgccggccgggctgtcgtcgctggtgctgcagagccaggtattcttcaccatcctcatcgccgccctgtggctgggcgagcggccgacgccgcgcgggttgttcggcctcctgctggcggcggcggggctggtcctgatcggcctggaacggccgctgggagacagcctgctggcattcctgctggtggtcgccgcagcgctggcctggtccttcgccaatatcgccaccaagcgttccggggccaccgacatgctgcgcctgatctgctgggtcagcctggtcccgccgttgccgctgctggcgctttcctatctattcgaaggtccgcaagccatcgagcgcgccgtgctgaacatgagctggggcggcttcggcgcgctgctctacatcgccttcggcgcgaccacggtgggcttcgccatctggagtttcctcctgcgccactacccggccagcctggtgaccccgttcgccctggctgtgccggtgtcgggcatgctcgccggctggctgctgctcggcgaacgcctcgacctggacagcctgctggcctgcgcgctggtgttcgtcgggctggccatcaccctgttgccggccagcctgctgcgacgcttcgcctggccggtgcggcggttgggatga

SEQ ID NO: 321825 - DNA, 567 bp, Pseudomonas aeruginosa
atgaaaacggcggaagacatcctcgcgctgatcgccgccgattcctcgcgcctgcatctgctccgcgtgctgcgcgaggtcggcccggagggcgcctggatcggcgccggcttcgtgcgcaacgcggtatgggaccatctgcatggctacggcgaagccacgccgctggcggacatcgacgtacttcatttcgccccgcgggccctcgacccgcaggccgacgccgacttcgaggccgcgttgcgccgtcgctgcgaggcaccctggtcggtgaagaaccaggcgcgcatgcacctgcgcaacggcgaccggccctaccgggattgcgccgatgcgctgtgccactgggcggaaacgtgcacggcggtggcgctgcggctcgtcggcgaacgcctggagctactggcaccgctggacgtcgacgacctgctggcgcttaaggtgcggcccaccgcgcatttcgccggcaagccggaggtctaccggcggcgcctgcgggagaagaactggacggcgcgctggccgctgctagatatcagtggcagcagccagacgccaggtccttga

SEQ ID NO: 321826 - DNA, 399 bp, Pseudomonas aeruginosa
atgaacatcggtgaagcggcgaagaaaagcggactgacgccgaagatgatccgttactacgagtccatcgagctgctccgcccagccggacgcagcgccagcggctaccgccactacaacgagaacgacctgcataccctggcgttcatccgccgttcgcgggacctcggtttctccctcgacgaagtcggcaagctgctcaccctctggcaggatcgccagcgtgccagtgccgacgtcaaggccctggcggcgcagcacgtgcgcgagctgaatcgcaagatcgaggagctcagcaccctgcgcgacaccctgcaggacctggtcgagcactgccagggcgaccaccgccccgactgcccgatcctcaaggacctggcgtctggctgctgccactga

SEQ ID NO: 321827 - DNA, 1434 bp, Pseudomonas aeruginosa
atgtcccgtgccgccgtcccctccgtccgccggcgcctgctggtcaacctgctggtcggcttcgtgctgtgctggctgagcgtggcggcgctgacctaccacctctcgctgaagcaagtgaaccgcctgttcgacgacgacatggtggacttcggcgaagccgccctgcgcctgctcgaccttgccaccgaagaccaggccggcgaggacggctccatcaccgagatcatcgaacgcagccgcgaagcgatccagggtctgcccctgctgcgccgcgaaagcgccctcggctacgccctgtggcgcgacggccagccgctgctgtcgagcctcaacctgccgccggagatcacggcccagggccccggcttcagcaccgtggaagcccagggcacccactggcgggtgctccagctgaatatcgacggcttccagatctggatcagcgaaaacctgatctaccgccagcacaccatgaacctgctgctgttctactcgctgttcccactgctgctggcgctgccgttgctcggcggcctggtctggttcggcgttgcccgcggcctggcgccgctacgcgaagtgcaggccgaggtccagcagcgctccgcgcgacacctgcagccgatcgccgtggaagcggtgccgctggagatccgcggcctcatcgacgaactcaacctcctgctggagcgtctgcgcaccgccctcgaggccgaacgccgactgaccagcgacgccgcccatgagatccgcacgccactggccagcctgcgcacccatgcccaggtcgcgctgcgttcggaagaccccaaggcccacgcccgcggcctgctgcaagtcagtcgcagcgtcgagcggatcagcaccttgatggagcagatcctgctcctcgcccgcctcgacggcgacgccctgctggagcaattccacccggtcaacctcgccaccctggccgaagacgtactctccgaactggcgcgccaggccatcgacaaggacatcgagctgtcgttgcaccaggagaccgtgcacgtgatgggcatcgacctgtggctgaaggcgatggtcggcaacctggtgggcaacgccctgcgctacacaccggccgggggccaggtcgagatccgcgtcgagaatcgcgcccagcacgccgtgctgcgggtgcgcgacaacggccccggggtcgccctggaagagcagcaggcgatcttcacccgcttctaccgcagccccgccaccagcagcggcgagggcagcggactgggcctgccgatcgtcaagcgcatcgtcgaactgcacttcggcagtatcggcctgggcaagggactggagggcaaagggctggaagtgcaggtgttcctgccgaagacccagccggacgcgacgcggccgccggccagaggtccggacagcgggcggtcacatatctga

SEQ ID NO: 321828 - DNA, 666 bp, Pseudomonas aeruginosa
atgagaatactgctggccgaggacgacctgctgctcggcgacggcatccgcgccgggctgcgcctggaaggcgataccgtggaatgggtgaccgacggcgtggccgcggagaacgcgctggtcaccgacgagttcgacctgctggtgctcgacatcggactgccgcgccgcagcggcctggacatcctgcgtaacctgcgccaccagggccggctcaccccggtgctgctgctcaccgcgcgggacaaggtggccgaccgggtcgccgggctcgacagcggtgccgacgactacctgaccaagcccttcgatctcgacgaactgcaggcacgggtgcgcgccctgacccgccgcaccaccggtcgcgccctgccgcaactggtgcacggcgagctgcgcctggacccggcgacccaccaggtgaccctgtccgggcaggcggtggaactggcgccgcgcgaatacgcactgctgcgcctgctgctggagaacagcggcaaggtgctctcgcgcaaccaactggagcagagcctctacggctggagcggcgacgtcgagagcaacgccatcgaagtccacgtccaccacctgcggcgcaagctcggcaaccagttgatccgcaccgtccgcggcatcggctacggcatcgaccagccggcgccctga

SEQ ID NO: 321829 - DNA, 861 bp, Pseudomonas aeruginosa
atgtccgccgctcccctggccagcgtaccgctggccgtcaacggcgcgccctgcctgctgcaccgggtacgcttccgctccgccgcggacggcggcggcctgccgctactggccaccctgcgcgatccgcagccggcgctggccgtcctggcgcaacgcatcgagctgagcgaagacgcggaactgccggagaccgccgtcgacgacgagctgctggtgatcttcgccaacgccgggctacagaccgggcacgcctggcgccagcgcctggaagcctggatggccgccggcgaggacgagcgccagccgaccctggaagcgccctcgttcggcgagcgggtgctgtggcgccccggccgcgcgctggtcatcggcaaccccgagcgctgccgggagctgctcgaaggcctggccgtcttcgcctggcacgaaggtcacctgcgccgcctggaaggcgagaccgcggcggcctgggaaccggcccaggccgatgtcgaactgacccagctaccgcgccgtgccgccctgcggcgccaggaacatgtgaaccggcaggtgcgacgcactacactctggcgcatggcctatgcccgcctggagtcgcacctggagaagccgccgctgcaactgaacggcgctgtgcgccggctctacaacgaactggccatgcaggccgaagtgcacgatcgcctggcgaccctggacgaccgcatcgaagtgctgcaggacctctacgaactggccgccgaccgcctcggcgaataccgctacttccggggcgaactgcgggtcgaatggctgatcgtcgccatcctcctgctggaggccggcctgagcctgtgggaattgtggaatcactga

SEQ ID NO: 321830 - DNA, 1128 bp, Pseudomonas aeruginosa
atggatacgccgatcgaacgcgccccgctggctcccgacctgagccaggcccgttacgccgtcgacctcaccggcctggtgccggcggaggtcgccgccgggctgccgccgctgccgccgaaccacttctatttctatccgccggacccgctgctggaaggcgacggcgcgatcaccgcgatcgaggacagcgaccccttcgaccagtacgtctaccgcctgcgccgggtgctctaccagggccgcacgcgctggcagaacgtgctgatcgccgacacctacaactacgaccgcgtgctgatgctcgacggcgcgatccagagcgccgagagcgatgagtcgctgtaccacgagctgctggtgcagccggccatgctcgcccacgacgagccgcgcgacgtactgatcatcggcggcggcgaaggcgccaccctgcgcgaggtgctgtcccatgccagcgtgcggcgggcggtgatggtcgatctcgaccgggagctggtggaactgtgtcgcgaacacctgttccagtggcaccagggcgccttcgacgacccacgctgcgaactgctcgccgaggacggccgggcctatctcgagcgcgacccgtcgctctatgacgtggtcatcatcgacgtcgtcgacatgctcgacaacggcccggcccaggctctctatacccgccagttctacgagctgctgcattcgcgcctgcgaccgggcggggtggtcgcggtgcaggggctggagttctcccacagcgacgacaagccccacgcggccctcgcccgcaccctgcgcagtgtcttctcccaggtccacagctaccgcgccacggtgccctcgttcctctcctcctggggcttcctgctggcttccgactggctcgacacgaaccactggcaggccgaggacatcgaccgacgcatcgaacgcaagctcggcccgctgtggctcgaccacctcgacggcgactacctcaaggcctgcttcgtgatggaccgggaaacccgcttcctgctcgcccaaccgggaccggtactggaagacggcgtacccttcgtcgcaccgccggatatcgaggagatcgagttcggcccggcacaattgccggccctggcgaggacctga

SEQ ID NO: 321831 - DNA, 483 bp, Pseudomonas aeruginosa
atggcaattcaaccgttgcgactcgatccgatcaccgtgctcggcaagcaactggtcatcgagctgttcgactgcgtcgaccagcgcttcgacgatatccagtggatcgaggaaagcatgctcgaggccgcccgccaggccaacgccaccatcatcacctcggcgttccacaagttcagcccgatcggcatctccggcgtggtggtgatcgccgaatcgcacctggcgatccatacctggccggagtacggctatgccgcggtcgacgtgttcacctgcggcgacgtgctcgatggcgcccaggccgtgcgcgtgctcagcgaacgcctgggcagccgtcggcacctgatctcgagcatggaccgcggcctcggcggccatcgcctggggctgctcagccgcagcctggccggcaatggcccggtcgacgaagacagcccgaccctgcgctgggcgctgggccagggcacgggggtggcctga

SEQ ID NO: 321832 - DNA, 2601 bp, Pseudomonas aeruginosa
atgagcctgccgattccctttctcgagaccgtcgagcggctgataccgcgcgaacgccgcttcgacgacccgctgtcgaccctggccttcggcaccgacgccagtttctaccggttgattcccaagctggtgctgcgcgtcgaaagcgaggacgaggtcgccgcgatcctatccgccgcctaccgcgagcaggtcccggtgaccttccgcgccgccggcaccagcctctccggccaggccatcagcgactcggtgctgctcgtcctcggcgacaactggaacggccgggaaatccgcgccgacggcgcgcagatccgcctgcagccgggtgtcatcggcgcccaggcgaacgcctggctggcgccgttcggccgcaagatcggtcccgacccggcctcgatcaacgcctgcaagatcggcggcatcgtcgccaacaacgccagcggcatgtgctgcggcaccgcgcagaacagctaccacaccctcgccggcctgcgcctgctgctggccgacggcacccgtctggacagcgaggacccggccagcgtcgcggccttccgcgccagccacggcgagctgctggaacggctcgccgaactcggccgcgagacccgcgccaacgccgaactggccgcgaagatccgccacaagtaccggctgaagaacaccaccggcctgtcgctgaacgcgctggtcgactacgacgagccgctggacatcctcacccacctgatggtcggctccgagggcaccctcggcttcatcagcgcggtgacctacgacaccgtcccggaacacccgcacaaggcctcggcgctgctggttttccccacggtggaaacctgctgcacggcggtcgcggtgctcaagcgccagccggtctcggcggtggaactgctcgatcggcgcagcctgcgctcggttgagaacatgcagggcatgccggaatgggtgaagagtctttccgccggtgcctgcgccctgctcatcgagtcccgcgcggcgagccgcacgctgctgcacgaacagctcgggcggatcatggcctccatcgccgaatatccgctggagaagcaggtcgacttcagcgaagacccggcggtctacaaccagctctggcgcatccgcaaggacaccttcccggctgtcggcgcggtgcgcgagaccggcaccacggtgattatcgaggacgtcaccttccccgtcgaacgactggccgagggagtcaaccgcctgatcgagctgttcgacaagcaccgctacgatgaggcgatcctcttcggccacgcgctggagggcaacctgcacttcgtcttcacccagggcttcgactcgcccgagcagatcgcccgctactcggcgttcatggacgacgtggcgcacctggtggcggtggagtacggcggctcgctgaaggccgagcatggcaccgggcgcaacatggcgccgttcgtcgagctggagtggggcgaggacgcctatcgcttgatgtggcagctcaagcgcctgctcgacccgcgcggcatcctcaacccgggtgtggtcctcagcgacgacccacagagccacctgaagaacctcaagccgctgccggctgccgacgagatcgtcgacaagtgcatcgagtgcggtttctgcgaaccagtctgcccgtcgcgcggactgaccctcacgccacgccagcgcatcgtcctgtggcgcgacatccaggcgaagaagcgcgctggcgtcgacaccacggcgctggagcgcgactaccgctaccagggcatcgacacctgcgccgccaccggcctatgcgcccagcgctgtcctgtgaacatcaacaccggcgagctgatccgcaagctgcgcggcgccgacgcccgccacgccgaaggcgccacctggctggcgcgcaactttgccggagccatgcgtgccatgggcccggccttcggcgacgaagagcgcgagccgctgctggacaagacccgccgtctactggaaaaggccggctaccaggtggtgttcccggataacctggacaacctctgctgcggccagccgttcgcgtccaaggggtatgcgaagcaggccgacgacaagcgcgacgagctgctcgccgccctgctccaggccagccgcggcggcctcgacccgatctactgcgacaccagtccctgcaccctgcgcctggtccagggtctggacgatccgcggctgcagatccacgacccggtgaaattcatccgcagtcacctgctcgatcgcctggagttcatcccgcaggacaaaccggtagcggtgcacgtcacctgcagcacccagcacctcggcgagagccaggcgctgatcgacctggtcggccgctgcacccgcaaggtggtgatcccggaaggcatccactgctgcggcttcgccggcgacaagggcttcaccacgccggaactgaacgctcactccctgcgcagcctgaaggatgccgtgcagttctgcgaggaaggcgtatccaccagccgtacctgcgagatcggcctcagcgagcacggcgggatcgactaccgcggggtggtctacctggtggaccgggtgacgcaggcgaagggcgcgcctcggtag

SEQ ID NO: 321833 - DNA, 1146 bp, Pseudomonas aeruginosa
atgatcatttccgcttccaccgactaccgcgccgccgcccaacgcaagctgccgccgttcctcttccactacatcgacggcggcgcctacgccgagtacaccctgcgccgcaacgtcgaggacctgtcggccatcgccctgcgtcagcgggtgctgaagaacatgtccgagctgagcctggaaacccgcctgttcgacgagaccctagcgatgccggtggcgctcgccccggtcggtctcaccggcatgtatgcccgccgcggcgaggtccaggcggcgcgcgcggcggcggcgaagggcgtgcccttcaccctgtcgacggtatcggtgtgcccgatcgaggaggtcgccccggccatcgaccggccgatgtggttccagctctacgtgctgaaggaccgcggcttcatgcgcaacgccctggagcgggccaaggccgccggcgtcaccaccctggtgttcaccgtcgacatgccggtccccggcgcccgctaccgcgacgcccattccggcatgagcggcccctacgccgcgccgcgccgcatcctgcaagccatgacccacccggcctgggcctgggacgtcggcctgctgggcaagccccacgacctcggcaacatttccgcctaccgcggcaacccgaccggactggaggactacatcggctggctgggcgccaacttcgacccgtcgatttcctggaaggacctggagtggatccgcgagttctgggacggcccgatggtgatcaagggcatcctcgacccggaggatgccagggatgcggtgaagttcggcgccgacggcatcgtcgtctccaaccacggcgggcgccagctcgacggcgtgctgtccagcgcccgcgcgctgccggcgatcgccgatgcggtgaagggcgaactggcgatccttgccgactccggcatccgcaccggtctcgacgtggtgcggatgatcgccctcggcgccgacagcgtgctgctcggccgcgccttcgtctacgccctggccgccgccggcgaggccggggtgcgcaacctgctcgaactgatcgaaaaggaaatgcgcgtggccatggtcctcaccggggccaagtcgatcggcgagatcagcgctgactcgctggtccgcgaactgggcgcctga

SEQ ID NO: 321834 - DNA, 1683 bp, Pseudomonas aeruginosa
atgcaagcctggcaacaactctatacccccctgggcagtctcggcctgtcggccgccgcggccgtcatcccgatcgtgttcttcttcctcgccctggcggtattccgcctcaagggccacatcgccggcagcatcaccctggcgctggccatcgcggtagccatcttcgccttccacatgcccgccgacatggccttcgccgccgccggctacggcttcctctacggtctctggccgatcgcctggatcatcgtcgccgcggtcttcctctacaaactgacggtgaagagcggccagttcgaggtgatccgcagctcggtactgtcgattaccggcgaccagcgcctgcaggtactgctgatcggcttctccttcggcgccttcctcgaaggcgccgccggtttcggcgcgccggtggcgatcaccgccgccctgctcgtcggcctcggcttcaatccgctctacgccgccggcctgtgcctgatcgccaacactgcgccggtggccttcggcgcactgggcatcccgatcatcgtcgccggccaggtgaccggcatcgacgccttcaagatcggcgccatgaccggccgccaactgccgttcctgtcgatcctggtaccgttctggctggtgttcatgatggacggctggcgcggcatccgcgaaacctggccggccgccatcgtcgccggcggcagcttcgccatcacccagtacctgacgtccaacttcatcggcccggagttgccggacatcacctcggcactggtcagcctggtctccctgaccctgttcctcaaggtctggcagccgcagggcgccagcgaagcgctcgccgcaggcggcggcgcggccgtggccggtggcagcttcggcgggcaacgcagcgtcgaaccgtccgcctacagcttcggcgagatcctcaaggcctggtcgccgttcctggtgctcaccgtactggtgaccatctggaccctgaaacctttcaaggccctgttcgccccgggcggcgagctctactggctagtgttcaacttcgccatcccgcacctcgaccaactggtggtcaagggcgcgccgatcgccaccagcgccacgccgatcgcggcggtattcaagttcgacccgatctccgccaccggcacggcgatcttcctctcggcgttggtatcgatgttcattctgcgcatcggagtgaaaattggtattaccactttcaaggaagtcctggtagagctgaagtggccgatcctgtccatcggcatggtcctggccttcgccttcgtcaccaactactcgggcatgtccaccaccctggccctggtcctggccggtaccggcgcggcgttcccgttcttctcgccgttcctcggctggctgggggtattcctgaccggttcggatacgtcctccaacgccctgttcagctccctgcagtcgaccaccgcgcaccagatcggggtcagcgacaccctgctggtggccgccaataccagcggcggcgtgaccggcaagatgatctccccgcaatccatcgccgtggcctgcgccgcgaccgggatggtcggcaaggaatccgacctgttccgcttcaccctgaagcacagcctgatcttcgccgcgctggtcggactgatcaccctggcccaggcatacctattcaccggcatgctggtgcactga

SEQ ID NO: 321835 - DNA, 774 bp, Pseudomonas aeruginosa
atggaatttggtcaggtcaggcagcgccgtctgtcggatgacatcgttgcgcaactggaggcgatgatcctggagggcacgctgaagtccggcgagcggctgcccgccgagcgcgtgcttgccgagcagttcggggtttcccggccgtcgctgcgcgaggcgatccagaaactggtggcgaaggggctgctggtcagccgccagggtggcggcaactatgtgaccgaatcgctgggcgcgactttcagcgatccgctgctgcacctgctggaaggtaacccggaggcccagcgcgacctgctggagtttcgccacacgctggaagggtcttgtgcctactacgcggcgctgcgtgcgacctccctcgatcaccagcgcctgaccgaggccttcgaggcgctccaggcctgctatgcgcgcaacgaccaggtcagcgcggaagagggcgccgccgacgcgcgcttccacctggcgatcgccgaggccagccacaacaccgtgctgctgcacaccatcaagggcctgttcgacttgctgcggcgcaacgtggtgaccaatatcggcgggatgtacgcgcagcgcacggaaacccgcgcgcaactgatggagcagcaccagcgcctatacgacgcgatcatcagcggtcaggcggagctggctcgggaggtgtccaaccagcacatccactatgtgcaggaggtcctggcggaggtccaggaagaggcgcgcaggatgaagcgctcgcagcgccgtcgcagcgtgcaggaagactag

SEQ ID NO: 321836 - DNA, 480 bp, Pseudomonas aeruginosa
atggctaagcagaagaaacacccttcggggaccatcgcgcagaacaagaaggctctgcacgactatttcatcgaacaacgcttcgaggcgggcgtcgccctggcgggctgggaagtgaaaagcctgcgcgccggcaaggcccagctggtcgacagctacgtgctgctcaaggatggcgaggcctggctgctcggcagccacatcacgcccctgaccaccgccagcacgcacgtgatcgccgacccggtgcgcacgcgcaagctgctgctgcacaagcgcgaactgggcaagctgttcggcgccgtgcaacagaagggctacgcctgcgtcgccctgtcgatgtactggaagaagcacctggtcaagtgcgagatcgccctggccaagggcaagaaggacttcgacaagcgccacaccgagaaggagcgcgactccgatcgggagatccagcgcgccatgcgccacggcaaggacgactga

SEQ ID NO: 321837 - DNA, 435 bp, Pseudomonas aeruginosa
atgagcacccatatccagcgttcggcgctgttgccttatcccgcccgcgcgctgttcgatctggtgaacgacgtgaagcgctatccggagttcctgccctggtgttcggccagccaggtcctggaggagagcgaaagcctgatgcgcgccgagctgaccgtggccaagggtagcctcagccagcgcttcaccacccgcaacgtgttggtgccgggagcttccatcgagatgaacctggaaaacggaccgttcaccgaactgcatggcgtctggcagttcaaggcgctgggcgagaaggcctgcaagatcaccctcgacctgaccttcgattacgccgggccgctggtcaaggcgacccttgggccgctgttcacccaggccgccaacaccatggtcgacgcgttctgccagcgcgccaagcaactctatggctga

SEQ ID NO: 321838 - DNA, 306 bp, Pseudomonas aeruginosa
atggctgagatcgccgtcgaggtggtctacgcgctgccggagcgacaggcgttactgcgcctgagcgtgccggcaggtaccagcgcacgcgaggccgtgctgctctccggcatcggcgaggcctttccagggctggatgtgcaaggttgtccgctgggtatcttcggcaagctcctggcacgcccggaggagcggatgctggaggctggcgagcgggtggagatctaccgtccgctgatcgccgatcccaaggaggtgcgcaagcagcgtgccgcacgggcccggagcgaacgcgaaggcggttag

SEQ ID NO: 321839 - DNA, 531 bp, Pseudomonas aeruginosa
atgcaaaacgccaagctcatgctgacctgtctcgctttcgcggggcttgccgcactcgccggttgctcgtttcctggcgtctataaaatcgacatccagcaaggcaacgtcgtaacgcaggacatgatagaccagttgcgccccggaatgacccgacgccaagtgcggtttatcatgggcaacccgctcatcgtcgataccttccacgccaatcgttgggactacctctacagcatccagccgggcggcggtcgtcgccagcaggagcgcgtcagcctgttcttcaacgacagcgaccagctggccggcctgaacggcgacttcatgcccggcgtcagccgcgacgaagcgatcctcggcaaggaaggcagcaccaccgtcacccagccggccgaccagcagaaaccggaagagcagaaagaagagccgccgaaaccgggctccaccctggaacagctccagcgcgaagtggacgaagcccagccggtaccggttccgactcccgaacctctggaccccagcccgcaatga

SEQ ID NO: 321840 - DNA, 405 bp, Pseudomonas aeruginosa
atggttgaaaatagcgaacttcgaaaagccggccttaaagtgaccctgccgcgggtcaagatcctgcagatgctcgactcggccgagcaacgccacatgagcgccgaagacgtgtacaaggcgctgatggaagcaggcgaggacgtgggcctggcaaccgtctatcgggtgctgacccagttcgaggccgccggcctggtggtgcgtcacaacttcgatggcggccatgccgtgttcgagctcgccgatagcggccaccacgaccacatggtctgcgtcgataccggcgaggtgatcgagttcatggatgcggaaatcgagaagcgccagaaggaaatcgtccgcgagcgcggcttcgagctggtcgatcacaatctggtgctctacgtgcgcaagaagaagtag

SEQ ID NO: 321841 - DNA, 1677 bp, Pseudomonas aeruginosa
atgctggttcacctgtccgttcacaactacgccatcgtcgagcacctggatctcgaactcgctaccggcatgagcgtgatcaccggcgaaaccggtgcgggcaagtcgatcatgctcgacgccctcggccttaccctcggcgaccgcgccgacagcggcgcggtacgtcccggagcggacaaggccgacattctcgccagcttcgacgtcagtgccatcgccgaggcccgcgactggctcgccgagcgcgacctggaacaggacggtccgtgcatcctgcgccgggtgatcactgccgaaggtcgctcgcgtgcctacatcaacggcacgccctgcccgctgggcgacctgaagagcctgggcgaactgctgatcgacatccatagccagcacgagcaccagtcgctgctgaagagcgagacccaccggcgcctgctcgacgagtacgccggctgccaggagctggcgcgccaggtgcagctcgccgcgcaacgctggaagcagaccagccaggaactcgaacgcctgtcgcgtagcggcgacgaacagcgcgcccgccaccagttgctcagctaccagctggaagaactggaaaacctgtccctcggcgaaaacgaactggaaagcctggagcaggagcagaagaccctgagcaacgccgaaagcctgctcgccgcctgccgccaagtcgtggaaatgtgcagcgagagcgatgccggcaacgtcctttccgcgctcaatgccagcctcaaccgcctgacctcgttcagcggccagcccgccgctctcggcgaagcggtcaacctgttgtccagcgcgcagatccaggtcgaggaggcgatcggcgaactgaaccgcttcgtcgaccacttcgatgccgatcccaatcgccagcagcaggtcgaggagcgcctggacgtcatttactccctggcgcgcaagcaccgggtccagcccgccgaactggccgacctgcagcagcgcctgttcgacgaactggaggcgctgaacgccgacgacgaagcagtcggacgcctgggcgacgagctggccgcctacgcccggcattaccaggaaaaagccgaagaactgagccgcctgcgccaggccgcggccgcacctcttgccgccagcgtggagcaggaaatgcagcgcctgggcatgcccggggggcgcttcgccatcgtcctgcatcccggcgacagcgccgagccgcaggccaacggactggaaagcgtggagttcctggtcagcgccaaccccgggcagccgctgaaagggctggccaaggtcgcctcgggcggcgaactgtcgcggatcagcctggcgatccaggtgatcacggcacagacctcgcgcatccccaccctggtcttcgacgaagtcgacgtcggcatcggcggccccaccgccgaagtggtcggacagttgctgcgccgcctcggcgaacgcggccaggtcctcaccgtgacccacttgccgcaggtcgccgcccagggccaccagcacctgttcgtgcacaaggaacgcggcagcagcgaaacccgtacggcggtcgccaccctgaacaaggcccagcggatcgaggagatcgcccgcatgctcggcggcgtcgacctgaccaaggaatccctggcccacgcgaagaaactggtcaacctggccgcccagaactga

SEQ ID NO: 321842 - DNA, 561 bp, Pseudomonas aeruginosa
atggctgacgaacagcagaccctggatcaacagacccccgagcagcccaccggcgccgccgaggacctgaccgcccgcgtgcaggaactggaggagcagctggctgccgcccaggaccaggcgctgcgcatggtcgcggatctgcagaacgtacgccggcgtgcggagcaggatgtcgagaaggcgcacaagttcgcgctggagaaattcgccggcgacctgctggcggtggtcgacaccctcgagcgcggcctggagatgtccgatcccaacgacgaggcgatcaagccgatgcgcgaagggatggaactgaccctgaagatgttcgacgacaccctgcgccgctaccaggtggaggcgctgaacccggaaggcgagcctttcaaccccgagcagcaccaggcgatggccatgcaggaaagcgcttcggccgagccgggcagtgtcctcaaggtgttccagaaaggctacctgctcaacggccgcctgctgcgtccggcgatggtggtagtcagcaaggcgccggcggaaaccccgccgtccatcgacgagcaggcttga

SEQ ID NO: 321843 - DNA, 1914 bp, Pseudomonas aeruginosa
atgggcaaaatcattggcatcgacctgggtaccaccaactcctgcgtggctatcctggagaacggtaacgtcaaggtcatcgagaacgccgagggcgcgcgtaccaccccctcgatcatcgcctacaccaacgatggcgaaaccctggtgggccagccggccaagcgccaggcggtcaccaacccgcagaacaccctgtatgcggtgaagcgcctgatcggccgtcgcttcgaagagaacgtggttcagaaagacatccagatggtgccgtacagcatcgtcaaggccgacaacggcgacgcctgggtggaagtgaagggccagaagatggcgcctccgcagatttccgccgaagtgctgaagaaaatgaagaagaccgccgaagactacctcggcgagccggtcaccgaagcggtgatcaccgttccggcctacttcaacgacagccagcgccaggccaccaaggacgccggccgcatcgccggcctcgacgtcaagcggatcatcaacgagccgaccgcggcggcgctggcctatggcctggacaaggccaagggcgaccacaccgtgatcgtctatgacctgggcggcggtaccttcgacgtgtcggtgatcgagatcgccgaagtcgacggcgagcaccagttcgaagtgctggccaccaacggcgacaccttcctcggcggcgaagacttcgacatccgcctgatcgactacctcgtcgacgagttcaagaaggaaagcggcatcaacctgaagggcgacccgctggccatgcagcgtctgaaggaagcggccgagaaagccaagatcgagctgtcctcgacccagcagaccgacgtcaacctgccgtatgtgactgccgacgcgagcggtccgaagcacctgaacgtcaaggtttcccgcgccaagctggagtccctggtcgaagacctggtgcagcgcaccatcgagccgtgccgcaccgcgctgaaggatgccggcctggatgtttccgatatccatgaagtgatcctggtcggcggccagacccgcatgccgctggtacagaagaccgttgccgagttcttcggcaaggaagcgcgcaaggacgtcaacccggacgaagccgtggctgtcggtgccgccatccagggcgcggtcctggccggcgacgtgaaggacgtgctgctgctcgacgtgaccccgctgaccctcggcatcgagaccctgggcggtgtgatgaccggtctgatcgagaagaacaccaccatcccgaccaagaagtcgcaggtgttctccaccgccgacgacaaccagggcgcggtgaccatccacgtgctgcagggcgagcgcaagcaggccgcgcagaacaagtcgctgggcaagttcgacctggccgacattccgccggctccgcgcggcgtgccgcagatcgaggtgaccttcgatatcgatgccaacggcatcctgcacgtctcggcgaaggacaaggccaccggcaagcagcagtccatcgtgatcaaggcatcctccggcctgtccgaggatgagatccagcagatggtccgcgatgccgaggcgaacgccgaggaggaccgcaagttcgaggaactggctgccgctcgcaaccagggcgacgcgctggttcacgcgacccgcaagatgatcaccgaggcgggcgacaaggccaccgccgaggacaaggcgaccatcgagaaggcgctgggcgagctggaagcggcggtgaagggcgacgacaaggccgagatcgaggccaagatgaacgctctgtcccaggcttccaccccgctggcgcagaagatgtacgccgaacaggcccagcagggcgaagacgctccccagggcgagcaggcgaaagccgctgacgacgtggtggacgccgagttcgaagaggtcaaggacaacaagtaa

SEQ ID NO: 321844 - DNA, 1134 bp, Pseudomonas aeruginosa
atggcgaaacgagacttttacgaggttctgggggttgagcgtggcgccagcgaggcggacctgaagaaggcctaccgccgcctggcgatgaaataccacccggaccgcaatcctggcgacaaggaagccgaggacaagttcaaggaggccaacgaggcctacgaggtcctctccgatgccagcaagcgggcggcctacgaccagtacggccatgccggcgtcgatccgaatatgggtgggggcgctggcgccggtttcggcggggcgagcttctccgacatcttcggcgatgtgttcagcgatttcttcggtggcggcggtgcccgcggtggctcgcgcggcggcgcgcagcgcggcgcggacctgcgctacaccctggacctcgacctggaggaggcggtacgtggcaccaccgttaccatccgcgtgccgaccctggtcggttgcaagacctgcaacggcagcggcgccaagcccggcaccacaccggtcacctgcaccacttgcggtggtatcggccaggtgcgcatgcagcagggcttcttctcggtccagcagacctgcccgcgctgccacggcaccggcaagatgatttccgatccctgtggctcctgccatggccaggggcgcgtggaagagcagaagaccctgtcggtgaaggtgccggccggcgtcgacaccggcgaccgcatccgcctcaccggcgaaggcgaggccggcagcatgggtggtccggcgggcgacctgtacgtggtggtcaatgtgcgcgagcacccgatcttccaacgcgacggcaagcatctgtactgcgaagtgccgatcagtttcgccgacgctgcgttgggtggcgagctggaagtgccgaccctggatggccgggtcaagctgaagattccggaaagcacccagaccggcaagttgttccgcctgcgcggcaagggcgtggccccggtgcgcggcggcggcgccggcgacctgatgtgcaaggtggtggtggaaaccccggtgaacctggacaagcgccagcgcgagctgctcgaggagttccgcaagtcgttgcagagcgacacctcgcattcgcccaaggccagtggctggttcgaaggcatgaagcgtttcttcgacgacctataa

SEQ ID NO: 321845 - DNA, 807 bp, Pseudomonas aeruginosa
atgcgacgtatagccgtagtgggcgccgccgggcgcatgggcaagaacctgatcgaggccgttcagcagaccggcggtgccgccgggctgacggcggcggtggatcgtccggatagcaccctggtgggggcggacgccggcgagctggccggtctcggccggatcggcgtgccgctgtccggggacctgggcaaggtctgcgaggagttcgacgtcctgatcgacttcacccatccctccgtaaccctgaagaacatcgagcagtgccgcaaggcgcgccgggcgatggtcatcggcaccaccggcttcagcgccgacgagaagctgctgctggccgaggcggcgaaggatatcccgatcgtcttcgctgccaacttcagcgtcggcgtgaacctttgcctgaagcttctggataccgcggcacgggtgctgggcgacgaagtggatatcgagatcatcgaggcccatcaccggcacaaggtcgatgcgccgtccggcaccgccttgcgcatgggcgaggtggtagcccaggcgctcggccgggaccttcaggaagtggcggtctacggacgcgaggggcagaccggcgcgcgggcgcgggaaaccatcggcttcgccaccgtgcgcgccggcgacgtggtgggcgaccacaccgtgctgttcgccgccgagggcgagcgcgtggagatcacccacaaggcttccagtcgcatgaccttcgcccgtggcgcggtgcgtgcggcgctgtggctggagggcaaagagaatggcctgtacgacatgcaggatgtgctcggtctacgctga

SEQ ID NO: 321846 - DNA, 1137 bp, Pseudomonas aeruginosa
ttgactaagccagccatacttgcacttgccgacggcagcatttttcgcggtgaagccatcggtgccgacggccagaccgttggcgaggtggtgttcaacaccgccatgaccggctaccaggaaatccttaccgatccttcctacgcccagcagatcgtcaccctgacctacccgcacatcggcaataccggtaccaccccggaagacgccgaggccaaccgtgtctgggccgccggcctgatcattcgcgacctgccgctgatcgccagcaactggcgcagcaagcagtcgctgcctgactacctgaaagccaacggcaccgtcgccatcgccggcatcgatacccgtcgcctgactcgcatcctccgcgagaagggttcgcagaacggctgcatcctggctggtgccgacgctaccgaggaacgcgcgctggagctggctcgcgccttccccggcctgaagggcatggacctggccaaggaggtcaccaccgccgagcgctacgagtggcgctccagcgtctggaacctggaaagcgacagtcacccggagatcccggccggtgaactgccgtatcacgtggtggcctacgactacggcgtcaagctgaacatcctgcgcatgctggtggcgcgcggctgccgcctgaccgtggtgccggcgcagacaccggccagcgaagtgctggcgctgaaccctgacggcatcttcctttccaacggccccggcgaccccgaaccgtgcgactacgcgatccaggcgatccgcgaattcctcgataccgagatcccggtgttcggcatctgcctcggccatcagttgctggccctggcctctggcgccaagaccctgaagatgggccacggccaccacggcgccaaccacccggtgcaggacctggacagcggcgtggtgatgatcaccagccagaaccacggtttcgcggtcgacgagagcaccctgccggacaacctgcgagccactcacaagtcgctgttcgacggtaccctgcagggtatcgagcgcaccgacaaggtcgctttcagcttccagggccaccccgaggcgagccccggtccgcatgacgtcgccccgctgttcgaccgcttcatctcggcgatggccgagcgtcgctga

SEQ ID NO: 321847 - DNA, 651 bp, Pseudomonas aeruginosa
atgccgaccctggggataaccgatttctggacctacgtgctgggtgtggttttcgtgatcctgttgcccggaccgaactcgttgttcgtcctcgcgacttcggcccagcgtggcgtggcgaccggctaccgggccgcctgcggcgtgttcctcggcgacgcggtgctgatgctgctgtcggcccttggcgtggcgtccctgctgaaggccgagccgatgctgttcatcggcctgaagtacctcggtgcggcctacctgttctatctcggcgtcggcatgctgcggggcgcctggcgcaagctgcgcaatcccgaagcgacggcggcgcaggccgaacaggtggatgtccaccagccgttccgcaaggcgctgctgctcagcctgtcgaatcccaaggcgatcctgttcttcatctccttcttcatccagttcgtcgatcccggctatgcctatccgggcctgtcgttcctggtgctggcggtgatcctggaactggtcagcgccctttacctgagcttcctgattttcaccggtgtgcggctggcggcctggttccgccggcggcaacggttggctgccggcgccacttcgggcgtcggcgccctgttcgtcggctttggtgtgaagctggccaccgcaaccctgtcctga

SEQ ID NO: 321848 - DNA, 3222 bp, Pseudomonas aeruginosa
atgccaaaacgtacagacataaagagcatcctgatcctcggtgccggccccatcgtgattggccaggcctgcgaattcgactactccggcgcccaggcctgcaaggccctgcgcgaggagggctaccgcgtcatcctggtgaactccaaccccgcgaccatcatgaccgacccggcgatggccgacgcgacctacatcgagccgatcaagtgggccaccgtggccaagatcatcgagaaggaacgccccgacgcgctgctgccgaccatgggcggccagactgcgctgaactgcgccctggacctggagcgccacggcgtgctggagaagttcggcgtggagatgatcggcgccaatgccgataccatcgacaaggccgaggaccgctcgcgcttcgacaaggcgatgaaggatatcggcctggcctgtccgcgctcgggcatcgcccacagcatggaggaggcctacggcgtgctcgagcaggtcggcttcccctgcatcatccgtccgtccttcaccatgggcggcaccggcggcggtatcgcctacaaccgtgaagagttcgaagagatctgcgcccgtggcctcgacctgtcgccgaccaacgagctgctgatcgacgagtcgctgatcggctggaaggaatacgagatggaggtggtccgcgacaagaaggacaactgcatcatcgtctgctccatcgagaacttcgacccgatgggcgtgcacaccggtgactcgatcaccgtggcaccggcgcagaccctgaccgacaaggaataccagatcatgcgcaacgcctcgctggcggtattgcgcgagatcggcgtggaaaccggcggttccaacgtgcagttcggcatctgcccgaacaccgggcgcatggtggtgatcgagatgaacccgcgggtttcccgctcctcggccctggcctccaaggccaccggtttcccgatcgccaagatcgccgccaagctggcggtcggctacaccctcgacgaactgcagaacgacatcaccggcggtcgcaccccggcgtcgttcgagccggccatcgactacgtggtgaccaagatcccgcgcttcgccttcgagaaattcccgaaagccgatgcccgcctgaccacccagatgaagtcggtcggcgaagtcatggccatcggccggaccttccaggagtcggtgcagaaagccttgcgcggcctggaagtcggcgccaccggcttcgatccgaagctcgacctgaacgacccggaggccgacagcatcctcaagcgcgagctgaccgtgcccagcgccgagcgtgtctggtacgtcgccgacgccttccgcgccggcaagagcgtcgaggaagtgttcgagctgacccgcatcgacgaatggttcctggtgcagatcgaggacctggtcaaggacgaggagaaggtcaagaccctcggcctgtcctccatcgatcgcgagctgatgtacaagctcaagcgcaagggcttctccgacgcgcgcctggccaagctgctcggcgtcaccgagaagaacctgcgcagccatcgccacaagctgaaggtactgccggtctacaagcgcgtcgatacctgcgccgccgagttcgccaccgacaccgcctacatgtattcgacctacgaggaagagtgcgaggccaacccgtcgagccgcgagaagatcatgatcctcggcggcggtccgaaccgcatcggccagggcatcgagttcgactactgctgcgtgcacgcggcgctggcgatgcgcgaagacggctacgagaccatcatggtcaactgcaacccggaaaccgtctccaccgactatgacacctccgaccgcctgtacttcgagccggtgaccctcgaggacgtccttgagatcgtccgcgtcgagcagcccaagggcgtgatcgtccagtacggcggccagaccccgctgaagctctgccgcgccctcgaagaggccggcgtgccgatcatcggcaccagtccggacgccatcgaccgtgccgaagaccgcgagcgcttccagcagatggtccagcgcctgaacctgcgccagccggccaacgccaccgcgcgcagcgaagacgaggccctggccgcgtccaaggccatcggttatccgctggtggtacgcccgtcctacgtgctgggcgggcgggcgatggaaatcgtctaccaggaagaagaactcaagcgctacatgcgtgaggcggttcaggtttccaacgacagcccggtgctgctcgaccacttcctcaactgcgccatcgaagtcgacatcgacgcggtatgcgacggcgagatcgtggtgatcggcgcgatcatgcagcatatcgagcaggctggcgttcactccggcgactccgcctgttcgctgccgccgtactcgctgccgcagcacatccagaacgagatccgcgagcaggtcaagaaaatggccctggagcttggcgtggtcggcctgatgaacgtgcagatggcggtgcagggcgaggatatcttcgtcatcgaggtcaacccgcgcgcctcgcgtaccgtgccgttcgtctccaagtgcgtcggcgagtcgctggccaaggtcgccgcccgcgtcatggccggcaagaccctggccgaggtcggcttcacccaggaaatcatcccgccgttcttcagcgtcaaggaagcggtgttcccgttcgccaagttccccggcgtcgatccgatcctcggcccggaaatgaagtccactggtgaagtgatgggcgtcggtgatagctttgccgaagcctttgccaaggctcagttgggggccagcgagattctcccgaccgccggttgcgccttcatcagcgtccgcgaagacgacaagccgttcgccgcccaggtggctggcgacctggtcgcgctgggcttcgaagtggtagccaccgccggtaccgcgcgtgtcatcgaggccgcgggcctgccggtgcgtcgcgtgaacaaggtgaccgaaggtcgcccgcacgtggtggacatgatcaagaacgacgaggtcaccctgatcatcaacaccaccgagggccggcagtccatcgctgactcctactccattcgtcgaaacgccctgcagcacaagatctgctgcaccaccaccattgcgggtgggcaggcgatctgtgaggcgctcaagttcggtcccgagaagaccgttcggcgtctgcaggatctccacgcaggaatcaaggcatga

SEQ ID NO: 321849 - DNA, 477 bp, Pseudomonas aeruginosa
atgagcaagttccccatgaccgtccagggcgcccgcgccctggaagaagaagtgaaacacctgaagggcgtgctgcgcccgcagatcagccaggccatcgccgaagcgcgtgaactgggcgacctcaaggaaaacgccgagtaccatgcggcgcgcgaacagcagggcatggtcgaggcgcgtatccgcgacatcgaggccaagctgtccaacgcccaggtcatcgatgtcaccgccatcccgcacagcggcaaggtgatcttcggcaccaccgtcgacatcgccaatgtcgagaccgacgagaccgtgacctaccagatcgtcggcgacgacgaggcggatatcaagggtggcaagatctcggtgaattcgccgatcgcccgtgcgctgatcggcaagaccgaaggcgatgccgtgctggtgagaaccccgggcggcgacgtcgagtacgagatcgtcgaggttcgccatatctaa

SEQ ID NO: 321850 - DNA, 408 bp, Pseudomonas aeruginosa
ttgcgcgcaggcgcgatcagttggctgctggcccagacgttctgggtcggcggcctctggttgctgcagttcgtggtcctgcctgcgttggccaagaccggactggcgccgctgctggtggaaaccgtagccgcggcgttgacgccgctgctgatcggcttcgccggattctgtgcggcgctgcaggcgctggtgttggtgtcgagccacgggccgaggagcctctggcgagaccttcgcggtcagctgttgctcgccgtcgcgctgctctgcctggtgtacttcctggtgcgtgggctggcgcccgaggcggtgcgctggctgctgttcaactacctggcggtggcgatgtgtggcctgctgctggtgttgcagccggtaccggggcgggacgaggaatacgtctga

SEQ ID NO: 321851 - DNA, 315 bp, Pseudomonas aeruginosa
atggcgctcactcaagagcagaagaaacagttcaaatctatcggtcaccacctgaaaccggtattgatcgtagccgagaacggcttgaccgaaggcgttctcgccgaactcgagcgcgcactcaacgatcacgaactgatcaaggtgaaactggcgctggccgagcgcgacgatcgccgcgccctgctcgacgaactctgcgcgcagtcgcgcagcgacttggtgcaaagcatcggcaagatggcgctggtctatcggaagaacccgaagccgaacaagaatctctcgaacatcagccgtttcgccggcatctga

SEQ ID NO: 321852 - DNA, 624 bp, Pseudomonas aeruginosa
gtggcccgctccaaaaccagccagcgttggctgaaagaacatttcgacgatccctacgtgaagatggcccagcgcgatggctatcgctcgcgcgccagctacaagctgctggagatccaggagaaggaccgcatcctgcgtccgggcatgaccgtggtcgacctgggcgccgcgccgggcgggtggtcgcaggtcaccagccgggtgatcggcgatcgcggccggctgatcgcttcggacatcctcgagatggacagtatccccgacgtcaccttcatccagggcgacttcaccgaggacgcggtgttcgcgcggatcctcgaggcgatcggcgaccatccggtagaccttgtgatttccgatatggcccccaatatgagtggagtgcgggccgccgaccagccgcgcgccatgtatctctgcgaactggcgctggacctggccggccgtgtgctgcggccgggcggcgatttcctgatcaagatcttccagggcgaaggtttcgaccagtaccacaagcaggcccgggaaatgttcgacaaggtacagatgcgcaagcccctgtcgtcgcgtgatcgttcgcgggaacagtatctgctcgcacgcggctttcgcggggaatag

SEQ ID NO: 321853 - DNA, 1920 bp, Pseudomonas aeruginosa
atggcaaagaatctgattctgtggctgatcatcgcggcggtactggtgaccgtgatgaacaatttctcgagcccgagcgagccacagacgctgaactactcggacttcatccagcaggtcaaggatggcaaggtcgagcgagtgaccgtggatggctatgtcatcaccggcaagcgtagcgacggcgataccttcaagaccatccgcccggcgatccaggacaacggcctgatcggcgacctggtcaacaacaacgtcgtggtcgagggcaagcagcccgaacagcagagcatctggacccagttgctggtcgccagcttcccgatcctggtgatcatcgccgtcttcatgttcttcatgcgccagatgcagggtggcggcggcggtcgcggcggcccgatgagcttcggcaagagcaaggcgcgcctgctgtccgaggaccaggtcaagaccaccttcgctgacgtcgccggctgcgacgaggccaaggaggaggtcagcgagctggtcgagttccttcgcgatccgggcaagttccagcgcctgggcggccgtatcccgcgcggcgtgctgatggtcggcccgcccggcaccggcaagaccctgctggccaaggccatcgccggcgaagccaaggtgccgttcttcaccatttccggttccgacttcgtcgagatgttcgtcggcgtgggcgcttcccgtgtccgcgacatgttcgaccaggccaagaagcatgcgccgtgcatcatcttcatcgacgagatcgacgccgtcggccgccatcgcggcgccggcctgggcggtggtcacgacgagcgcgagcagaccctcaaccagttgctggtggagatggatggcttcgagatgaacgatggcatcatcgtcatcgctgccaccaaccgtccggacgttctggacccggcgctgctgcgcccgggccgcttcgaccgccaggtggtggtcggcttgccggatatccgcgggcgcgaacagatcctcaaggtgcacatgcgcaaggtgccgctgggcgaccatgtcgatcctgccgtcatcgcccgcggtacgcccggtttctccggcgccgacctggccaacctggtcaacgaggcttcgctgttcgccgcgcgctccaacaagcgcatcgtcgacatgcgcgagttcgagctggccaaggacaagatcatgatgggcgccgagcgcaagaccatggtcatgtccgagaaggagaagcgcaacaccgcctaccacgaagccggccacgccatcgtcggtcgcctggtgccggagcatgacccggtctacaaggtgtccatcattccgcgcggacgcgccctgggcgtgaccatgttcctccccgaggaagatcgctacagcctgtccaagcgcgcgctggaaagccagatctgctcgctgttcggcggccgtatcgcggaagagatgaccctcggcttcgaaggcgtcaccactggcgcttccaacgacatcatgcgtgctacccagttggcgcggaacatggtgaccaagtggggtctgtccgagaagctcggcccgctgatgtacgcggaggaggagggcgaggtgttcctcggccgtagcgccggcagccagcacgccaatgtgtcgggcgagaccgccaagatgatcgaccaggaagtccggcgcatcatcgacgactgctacggtaccgccaagcgactgctcgacgagaaccgcgacaagctggagatgatggccgacgcactgatgaagtacgaaaccatcgactccgaccagatcgacgacatcatggccggtcgcgtgccgcgcgagccgcgtgactggcagggtggttcgggtaccggcaccccgccggccaacctggaagagtcgggccgccgcgagaacacccctcctatcggtgggccggccggcgagcactga

SEQ ID NO: 321854 - DNA, 780 bp, Pseudomonas aeruginosa
atgggcatcctcaatgtcacccccgattccttttccgatggcggccgttacgaccggctggacgatgccctgcggcatgccgagcgcatggtgcgggaaggcgcaacgctcatcgacgtcggcggcgagtcgacccgtcccggtgcgcgcagcgtttctccgacggaggagctggagcgggtcgctccggtagtcgaacgcatcgctcgcgagctggacgtcgtgatttcggtggatacctccacgcccgcggtcatgcgcgaaactgcgcgtctcggagcgggtctgatcaacgacgtccgttcgctgcagcgcgacggtgcgctggatgctgcggtggatagcggcctggcggtctgcctcatgcacatgcgtggagaaccgcagaccatgcaggatgcgcctgcctaccaggatgtggtggcggaagtcggcgcgttcctgcaggagcgtgtggatgcctgcgtggcggccggaatcgaccgcgagcggctgttgctggatccgggtttcggttttgccaagacactggagcacaacctggtgctgttcaggcatctgcaggcactccatggcctgggcttgccgttgttggtcggcgtttcgcgcaagagcatgatcggcaaggtactggggcgggaggtggacgaacgcctctacggcagcctagctctggcggccctggcgctggccaagggcgcacggataattcgagtgcatgacgtggcggcgaccgtcgacgtgatgcgaatgatctccgccgttgaaatggcggattga

SEQ ID NO: 321855 - DNA, 1338 bp, Pseudomonas aeruginosa
atgagcagaaaatacttcgggactgacggtatccgtggtcgtgttggcgagtttccgattactccggacttcgttctcaagctgggctgggcggtgggcatggccttccgccggcagggcaactgccgggtcctgatcggcaaggacacgcgcagctcgggttacatgttcgagtcggccttcgaggcggggctctccgcttccggcgccgataccctgttgctgggaccgatgcctacccccggcatcgcctacctgacgcggactttccacgccgaggccggggtggtgatcagcgcttcgcacaatccccacgacgacaacggcatcaagttcttctccgggcaggggaccaagctgccggatgacgtcgagctgatgatcgaggaactgctcgatgcgccgatgaccgtggtggagtccgcccgtctcggcaaggtttcgcggatcaatgacgcggcggggcgctacatcgaattctgtaagagcagcgtgccgaccagcaccgacttcaacggtctcaaggtcgtgctcgactgcgccaacggcgctacctacaagatcgctcccagcgtcttccgggaactgggcgcggaagtgacggtgctggcggccagcccgaatggcctgaacatcaacgacaagtgcggttccactcacctggatggcctgcaggctgcggtggtcgagcaccatgccgacctcggcatcgccttcgacggcgacggcgaccgggtgatgatggtcgaccataccggtgcggtcgtggatggcgacgaactgcttttcctcatcgcgcgcgacctgcaggaaagcgggcgcctgcaaggcggtgtggtcggcaccctgatgagcaacctcggcctggagctggctttgcaggaactgcatatcccgttcgtgcgggcgaaggtcggcgatcgctatgtgatggccgaactgctggctcggaactggatgctgggaggggagaattcgggacatatcgtctgctgccagaacaccacgacgggcgatgccatcatcgcggcgctacaggtgctgatggcgctcaagcatcgcggccagaccctggccgaggcgcgccaggggattcgcaagtgcccccaggtgctgatcaatgtgcgcttcaagggcgaaagcgatccgctcgagcacccctcggtgaaggaggccagcgtccgcgtcaccgagcaaatgggcgggcgcggtcgtgtcctgctgcgcaaatccggcacagagccgttggtccgggtgatggtcgagggcgacgaggaagctagcgttcgtgcccacgccgaacagctggcaaaaattgtttctgaggtatgtgcttga

SEQ ID NO: 321856 - DNA, 756 bp, Pseudomonas aeruginosa
atgcgtcgacccttggtggccggtaactggaaaatgcacggtacgcattccagtgtggccgagttgatcaaaggcttgcgtcagctggcgttgccgagcggagtcgatgtagctgtgatgccaccttgcttgttcatcagccaggtcatccagggcctggccggcaaggcgatcgatgtaggtgcgcagaacagcgccgtcgagccgatgcaaggcgcgctgaccggtgagactgctcccagtcagttggcggatgtcggttgtagcatggtcctcgtgggccactcggagcgtcgcctgattctcggcgagagtgacgaggttgtgagtcgcaagtttgccgcggctcagtcgtgcggcctggtgccggtgctgtgtgtcggggagacccgggcggagcgcgaggcgggcaagacgctggaggttgtcgcaaggcagctgggaagcgtgatcgacgagttgggtgttggagcttttgctcgcgcagtcgtggcttacgagccggtctgggcgatcgggaccgggttgaccgcgtcccccgcgcaagcccaggaagtgcacgcggcgatccgcgcgcaactggcagcggaaaatgccgaggtcgcaaaaggtgtgcgactcctttacggcggcagtgtaaaggcggcaagtgcagccgagttgttcggcatgccggatatcgatggggggctggtaggtggagcctccctcaatgcggatgagttcggcgcgatctgtcgtgccgcgggaagctga

SEQ ID NO: 321857 - DNA, 459 bp, Pseudomonas aeruginosa
gtgtcgagcaagctagaacagttgcaggccttgctggcccctgtggtcgaggcgctcggctatgagtgctggggcgtcgagttcatttcccagggtcgtcattcggtgttgcgcgtctatatcgaccgccccgaaggcatcctcatcgatgactgtgaagccgtcagtcggcaggtcagcggtattctcgacgtcgaagacccgatcagcggcgagtacaccctggaggtgtcctctccgggcatggatcggccgctgttcaccctcgaacagttcgccaagcatgccggcgagcaagtgaagatcaggctgcgttcgccctatgaggggcggcgtaactaccaaggcattctccgtggtgtggaggagcaggatgtggtggtcctggtggacgatcacgagtacctgctgccgatcgattcgatcgacaaggccaacatcattccccgttttgattga

SEQ ID NO: 321858 - DNA, 1482 bp, Pseudomonas aeruginosa
atgagcaaagaagtactgctggttgttgagtcggtatccaacgaaaagggcgtaccggccggcgtgattttcgaggcgctggagctggctctggcgaccgccaccaagaaacgtttcgaggacgaggtcgacctgcgcgtcgagatcaatcgtcataacggcagctacgagactttccgtcgttggcacgtcgtcgccgacgaggactaccaggaccccgccaccgagatcaccgtcgaggacgtccaggagcagaagccgggcgcgaaggtcggcgaggtcatcgaagaaaagatcgaatccatcgagttcggccgcatcgctgcgcagactgccaagcaggtcatcgtgcagaaggtccgcgaggccgagcgcgcccaggtggtcgatgcctaccgcgagaaggtcggcgagatcatttccggtaccgtgaagaaggtcacccgcgacaacgtcatcgtcgatctcggcaacaacgccgaggcgctgctggcccgcgaccagatcattccgcgcgagaccttccgcgttggcacccgcgtgcgtgccctgctgaaggagatccgtaccgagaaccgcggtcctcaactggtcctgtcgcgtaccgcgccggaaatgctgatcgagctgttccgcatcgaagtaccggaaatcgccgagcagttgatcgacgtgatggccgccgcccgtgacccgggctcgcgcgccaagatcgccgttcgttccaaggacaagcgcatcgacccgcagggcgcctgcatcggcatgcgcggttcgcgcgtccaggcggtatccggcgagatcggtggagagcgggtggacatcgtcctgtgggacgacaacccggcgcaattcgtgatcaacgccatggctccggccgaggtggcggcgatcatcgtcgacgaggatacccataccatggatatcgccgtcgccgaggacaatctggcgcaggctatcggccgcagtggccagaacgtccgtctggccagccagttgaccggctggaccctgaatgtgatgaccgaggcggatatccaggccaagcaacaggccgagaccggggatatcctgcagcgcttcgtcgacgagctggatgtcgacgaggaactggcccaggtactggtggaagagggcttcacgactcttgaggaaatcgcctacgtaccgatggaagagatgctcagcatcgatggcttcgacgaagacatcgtcaacgagctgcgctcccgtgccaaggatcgcctgctgaccaaggccattgcgaccgaagagaagctcgccgacgcacaaccggcagaagacctgctcagcctcgatggcatgagcaaggagctggccctggacctggcgctgcgtggcgtaaccacccgtgaagatctggccgagcaatcgatcgacgatctgctcgacatcgacggcatggacgaagagcgtgccggcaagttgatcatggccgcccgggcccattggttcgagtaa

SEQ ID NO: 321859 - DNA, 2523 bp, Pseudomonas aeruginosa
atgacgcaagtcacggtgaaagaactggcccaggtggtcgacacaccggtggagcgcctgctgctgcagatgcgtgacgcaggtctgccgcacaccagtgccgaacaagttgtaacggatagcgagaagcaagccctgctgacccacctgaaaggcagccatggcgatcgcgccagcgagccgcgcaagatcaccctgcaacgcaagaccactaccacgctgaaagtgggtggcagcaagacggtgagcgtcgaagttcgcaagaagaaaacctatgtcaagcgcagccccgacgagatcgaggccgagcgccagcgcgaactcgaggagcagcgcgcggcggaagaggcggagcgtctgaaggccgaagaggccgctgcccgccagcgtgccgaagaggaagcgcgcaaggccgaggaagctgcgcgtgccaaggctgcccaggaagcagcggctactgccggtgccgagcctgccgtggtggcggatgtcgcggttgccgaaccagtggccaagcctgccgccgtggaagagcgcaagaaggaagagccgcgccgcgtgcccaagcgtgacgaggacgatgaccgccgcgaccgcaagcacacccagcaccgtccctcggtcaaggagaaggaaaaggttcctgctccgcgcgtggctccacgcagcaccgacgaggaaagcgatggttaccgtcgcggcggtcgtggtggcaagtcgaagctgaagaagcgcaaccagcacgggttccagaacccgacaggaccgatcgtgcgtgaagtgaacatcggtgagaccatcaccgtagccgagttggccgcccagatgtcggtcaagggtgccgaagtcgtcaagttcatgttcaagatgggctccccggtgaccatcaaccaggtcctggaccaggagaccgcccaactggtcgccgaagagctgggccacaaggtcaagctggtcagcgagaacgcgctggaagaacaactggccgagtccctgaagttcgaaggcgaggcggtcacccgcgcgccggtcgtcaccgtcatgggccacgtcgaccacggcaagacctcgctgctcgactacatccgtcgcgccaaggtcgccgcgggcgaggccggtggcatcacccagcatatcggtgcctaccacgtcgaaaccgagcgtggcatggtgaccttcctggatacccccggccacgccgcgttcaccgcgatgcgtgcccgtggcgcccaggcgaccgacatcgtgatcctggtggtcgcggccgacgacggcgtcatgccgcagacccaggaagccgtgcagcacgcgaaagcggcgggcgtgccgatcgtggtcgcggtgaacaagatcgacaagcccgaggccaacccggacaacatcaagaacggcctggccgctctcgacgtgatcccggaagagtggggcggcgacgctcccttcgtcccggtttcggcgaagctcggtactggcgtcgatgaactgctcgaagcggtcctgctgcaggcagaagtgctcgaactgaaagccactccgtcggccccgggccgtggcgtggtggtcgagtcgcgcctggacaagggacgcggcccggtggccaccgtgctggtccaggacggtaccctgcgccagggcgacatggtgttggtcggcatcaactacggtcgtgtccgcgccatgctcgacgagaacggcaagccgatcaaggaagccggcccgtcgatcccggtcgagatcctcggcctggacggtacgccggatgccggtgacgagatgaccgtggtcgccgacgagaagaaggcccgcgaagtcgccctgttccgtcaaggcaagttccgtgaggtgaaactggcgcgagcccatgccggcaagctggaaaacatcttcgagaacatgggccaggaagagaagaagaccctgaacatcgtcctcaaggccgatgtgcgcggttcgctcgaggctctgcaaggctcgctcagcggcctgggcaacgacgaagtgcaggtccgcgtggtcggtggcggcgtcggtggcatcaccgagtccgacgccaacctggcgctggcttccaacgcggtgctgttcggcttcaacgtgcgcgccgacgccggcgcgcgcaagatcgtcgaagccgaaggtctggatatgcgttactacaacgtgatctacgacatcatcgaggacgtcaagaaggccctgaccggcatgctcggcagcgacctgcgggagaacatcctgggcatcgccgaggtgcgcgacgtgttccgctcgccgaagttcggcgcgatcgccggctgcatggtcaccgagggcatggtgcaccgcaaccgtccgatccgcgtgctgcgcgacgacgtggtcatcttcgaaggcgagctggagtctctccgtcgcttcaaggacgacgtcgccgaagtgcgtgccggcatggagtgcggcatcggcgtgaagagctacaacgacgtcaaggtcggcgacaagatcgaagtgttcgagaaggtcgaagtcgcacgcagcctttga

SEQ ID NO: 321860 - DNA, 393 bp, Pseudomonas aeruginosa
atggcaaaagactacagccgtacccagcgtatcggcgatcagatgcaacgcgaactggctcaactgatccagcgcgagatcaaggacccgcgcctgggtctggtcaccatcaccggtgtcgaggtcagccgcgacgtggcgcacgccaaggtgttcatcaccgtcatgggccaggacgatgccggcaagatcgccctgaacatggaaatcctcaacgacgccgccggctacctgcgcatgctgctgggcaagtcgatgaagctgcgcagcgtgccgcaactgcatttccactacgacgaaagcatccgccgcggcgccgagctgtcggctctgatcgagcgtgcggtggccgaagacggccgccgccacggcgacgacgagaccgaggactga

SEQ ID NO: 321861 - DNA, 915 bp, Pseudomonas aeruginosa
gtggcccaggtgaagcgtatccgccgctccatcagcggcatcctggtgctcgacaagccgcgcggcatgagttccaaccaggcactgcagaaagtccgctggctgctcaatgccgagaaggccggccacaccggcagcctcgacccactggccaccggggtgctgccgctgtgcttcggcgaggcgaccaagttctcccagtatcttctcgatgccgacaagggttacgagacggtgatgcgcatgggcatcaccaccaccaccggcgacgccgagggcgaactgctcgccgagcgggacgtgaccgtcggtcgggacgatctcgaacaggccctgccgcgcttccgtggcgacatagagcaggtgccgccgatgtactcggcgctgaagaaagacggacagccgctgtacaagctcgcccgtgcaggagaggtagtggagcgcgaggcgcgttctgttactattacgcgcctggatttgctctccttcgagccgccctgtgcgaccctggccgtttcctgcagcaaaggcacctacgtgcgtacgctggtggaagatctcggccaggtcctgggctgcggcgcgcacgtcgcggcactgcggcggacccaggccgggccgttcgccctggcccaggcgatcaccctcgagacgctcgaacgcgtgcatgccgaaggtggtccggaagcgctggaccaattcctgatgccggaagacagcggcctgttgcattggccggtgttgcagttgtccgagcacagtgcgtactactggctgcacgggcagccggtgcgggccccggaagcgccgaagttcggctggctgcgggtgcaggatcacacaggtcgtttcatcggtatcggtgaagtgaccgacgacgggcgtatcgccccgcgtcgactgattcggtcataa

SEQ ID NO: 321862 - DNA, 270 bp, Pseudomonas aeruginosa
atggcactgagcgttgaagaaaaagcgcagatcgttaacgaatacaagcaagctgaaggcgacaccggttccccggaagtgcaggtagccctgctgtccgccaacatcaacaagctgcaggatcacttcaaggccaacggcaaggatcaccattcccgccgtggtctgatccgtatggttaaccagcgccgtaagctgctggactacctgaagggcaaagacgtgtctcgctacactgccctgatcggccgtctgggtctgcgtcgctaa

SEQ ID NO: 321863 - DNA, 2106 bp, Pseudomonas aeruginosa
gtgaacccggtaaccaagcaattccagttcggtcagtcgaccgtcactctcgagaccggccgtatcgctcgccaggccaccggcgccgtactggtcaccatggacgacgtcagcgtgctggtcaccgtggtcggcgccaagtcgccggccgaaggccgcgacttcttcccgctgtccgtgcactaccaggaaaagacctacgccgcaggccgtatccccggtggtttcttcaagcgtgaaggacgtccttccgagaaggaaaccctgacctcgcgcctgatcgaccgtccgatccgtccgctgttccccgaaggtttcatgaatgaagtgcaggtcgtctgcaccgtcgtctccaccaacaagaagtccgatccggacatcgccgcgatgatcggcacctccgccgccctggcgatctccggcattccgttcgccggcccgatcggcgccgcccgcgtcggtttccatccggaaatcggctacatcctcaaccccacctacgagcaactgcagagttccagcctcgacatggtcgtggccggtaccgaagacgccgtgctgatggtggagtccgaggccgacgaactgaccgaagaccagatgctcggtgccgtgctgttcgcccatgacgagttccaggcggtgatccgtgccgtcaaggagctggccgccgaagctggcaagccggcctgggactggaaagccccggcggaaaacaccgtgctggtcaacgccatcaaggcagagctgggcgaagcgatctcccaggcctataccatcaccatcaagcaggaccgctacaaccgtctgggcgagctgcgcgaccaggccgtggccctgttcgccggcgaggaagagggcaagttcccggcttccgaggtcaaggacgtattcggcctgctggaataccgcaccgttcgcgagaacatcgtcaacggcaagccgcgtatcgacggtcgtgacacccgtaccgtgcgtccgctgcgcatcgaagtcggcgtgctcggcaagacccacggttccgcgctgttcacccgtggcgaaacccaggccctggtcgtcgcgaccctcggcaccgcgcgcgatgcccagttgctggataccctggaaggcgagcgcaaggacgccttcatgctgcactacaacttcccgccgttctcggtaggcgagtgcggccgcatgggcagcccgggtcgtcgtgaaatcggccatggccgtctggcccgtcgtggcgtcgccgccatgctgccgacccaggacgagttcccctacaccattcgcgtggtttccgagatcaccgagtccaacggttccagctcgatggcctccgtgtgcggcgcctccctggcgctgatggatgccggtgtgccggtcaaggcgccggtcgccggtatcgccatgggcctggtcaaggaaggcgagaagttcgccgtcctgaccgacatcctcggtgacgaagaccacctgggcgacatggacttcaaggttgccggtaccgacaagggcgtcaccgccctgcagatggacatcaagatcaacggtatcaccgaagagatcatggagatcgccctgggccaggccctggaagctcgcctgaacatcctcggccagatgaaccaggtcatcgccaagccgcgcgccgagctgtccgagaacgccccgaccatgctgcagatgaagatcgactcggacaagatccgcgacgtcatcggcaagggcggcgcgaccatccgtggtatctgcgaagagaccaaggcctcgatcgacatcgaggacgatggcagcgtgaagatctacggcgaaaccaaggaagccgccgaggccgccaagctgcgcgtcctggcgatcaccgcggaagccgagatcggcaagatctacgtcggcaaggtggagcgcatcgtcgacttcggtgccttcgtcaacatcctgccgggcaaggacggcctggtgcacatctcgcagatcagcgacaagcgcatcgacaaggtcaccgacgtgctgcaggaaggccaggaagtgaaggtcctggtgctcgacgtggacaaccgtggccgcatcaagctgtcgatcaaggacgtggctgccgccgaagcttccggcgtgtaa

SEQ ID NO: 321864 - DNA, 345 bp, Pseudomonas aeruginosa
atgaaattcagcaaactcgctattgccgctgctactgccactgctctgagcttctcgatggccaatgcgttcgctgcccagcccatcagcctggcggccaacgacactatgcagaaaaccgaagaagcggtttccgatacctggatcaccagcaaggtgaaatccagcctgatcgccaacaagaatgtcagtggcgtcgatatcaaggtcgagaccaacaaaggtgtggtttccctttccggcaacgtgaagagcgatgccgagcgtgacctggcgatcgagaccgccaagggcatcaagggcgtgaaagccgtttccgccgatggcctgaaatcggtcgagtaa

SEQ ID NO: 321865 - DNA, 198 bp, Pseudomonas aeruginosa
atgaattccgatgtgatcaaaggtaagtggaagcaactcaccggcaagatcaaggagcgttggggcgatctgaccgacgacgatctccaggctgccgacggacatgccgaatacctggtcggcaagctgcaggaacgctatggctggtccaaggaaagggccgaacaggaagttcgcgacttcagcgaccgcctgtga

SEQ ID NO: 321866 - DNA, 315 bp, Pseudomonas aeruginosa
ttgaatcgctcgcttccgcgcaccgggctggtggcgttgctgtccctgctgccgttggcacatgctcaggccgattcgctgcgttgcggcagccgcctggtgagtaccggcgacagcagcgccgacgtccttgcgcgctgcggcgagccacgcagccgcgacagcctgggttatcgcgaggtcgtcggggaatggggcaagcgctacgaggtcgaggtccaggaatgggtctatggcccatggaacggcatgctgtatttcgtccgtttcgagggcaaccgcctcagcgccatccagagccggcgcggcgactga

SEQ ID NO: 321867 - DNA, 294 bp, Pseudomonas aeruginosa
ttgcacaagcgattcgccgccctcgcggcccccctgctctaccttgcctgcgcgagcgcacaggccgacaccatgcgttgcggcagtgcgctggtcagcgtcggcgaccgggccttcgaagtacagcaaaagtgcggcgctccggatcaccgcgacgacgtcggctataccctgggcagctacgatcggcgggaattcaaggtcgaggagtgggtgtacggcccgcgcaacggcgtgacctacatcctgaccttcgaagccaacaagctgaaacgcatcgagttcaagcgttga

SEQ ID NO: 321868 - DNA, 3267 bp, Pseudomonas aeruginosa
atgcccaaaggactgaaacgcgctgtcagcgccctgctgatcaccttcctcgtctattgcctgctgggcttcctgctcatacccggcatcgggctgcgcgtcgccaaccagcaactggcgcaatacgccaccgtccccgcacgtctcgaacgtatcgaattcaaccccttcagcctggaattgaccctctggggtctgcgcctgggcgaggagaagaacccccagctcgccttccgccggctgtacgccaacctgcagctggacagcctgtggaaacgccagctgcacctggccgacgtcgagctggaaggtccgcataccgaactgctgttcgacgagaagggccagctcaacctggccagcctgttcaggatcccgccgagcgaatcgcccgagcctgaacagccgagcgacccgttcccgctgcgcatcgaccgcatccaactggccgagggcagcctgcacttccaggacctgcgaccgagcgagccggtggacttcagcttcgatccgctgggcttcgagctgcacaacctcagcaccctgcccgacgacggcgcgaagatgaccctggtcgccaccggcccgaacggcggccgcctcgactgggaaggcgacctgaccctggtgccgatcacgtccaggggccacctgagcgtcaaggatatccagctcaaggcctggtggccctatgtccgcgacaatgccccgctggtgctggagaacggcgtggtcagcctctccagcgactatcgcctggacctgtccaaggacacccagctgctgctcgacaaggccgcgctgaaactcgccgacttcagcatcaattcgccccagggcaagccgctggccaagctcgccagcctcgacgtggccgctaccaccctggacctggccaagcaggaagtggtgctcggcgaagtccgcagccagggcctggaggcctgggccgcgcgcgagaaggacggccagctcgactggcagaaactgttcgccgacttcactccgccgccacgcaaggcgcctgcacccaagccggcggaaaacaccgatcccgccgctgccccgaccgacgcggcgaagaccaccagcgaaccggcaaccgacggtgccgccaaggcagccgcgatagcctcgggcgacgcgggcaaggacaggccggcggagaaggacgccagcgtcgccgagacggaaagggcaacggacgacaaagagtccgccaaggccgcggaaggcgctgccgacaaggtagccaagcaagagacgagcaaggctccgaagaccggcaaggcaaccgggcaggaaacggccaagactgcggagatcgacaaggcggccagcgactctccgcaacagctcgccggcactgcaaagacgcctccgccggaaagtacgaaagccgccgcggagacgcctgccaagccctggcacatcgtcctgcgcgacgcccagttgcgcggctacaaggcgcacctggtggatcgccagccggccaccgaggtcccgctggaagtcggcccgctggacctcgacctgcagaacgtcgacagcctcggcaagacccccttcgacctcaagctcaagaccagcctcggcaaccgcggccaggtccaggccagcggccaggtggtgctcgacccggtcagcgccaggctcaaggtcagtacccgcgacatcgacctgcgcgtggcccaggcctacatctcgccgttcatccgcctggaactgcgcagcggcttccttggcagcgagctggcggtcgacctgaagagcgtcgagccgctggctttcagcgtcgacggcagcgccgaagtcagccagttgcataccctggataccatcaaggaccgcgacttcgtcaaatggaccaaactgaccctcaacggcctcgcctaccggcacgaggacagcctgtcgatccagagcgtgtccttcgaggagccctacgcccgcttcatcatcaacgaagatcgcagcaccaacgtcagcgagctgatcatcccgcaaccggctagttcgtccggcaagaccgccgccgaaagcaagaacgcgccggcgagcaagccgctgggcatccatatcggcggcgtacggatcaacaacggctcggcgaacttcgccgacctgaccctgatgccgccgttcggtaccgccatccagcagctcagcggcgaagtcggcaccctcgacacgcgcaactcgcagccggccaaggtggacatcaagggcaaggtcgacaagtacgcaccggtgaccatcgccggcgaactggacccattcgacccgctgaagaagctcgacatcaccaccagcttcaagcgcgtcgagctgaccaccctgacgccctattccggcaagttcgccggctaccgcatccgtaaggggcgactcaacctggacctgcactaccagatcgaacgcagccaactgaaggcggaaaacaaggtcctgctggaaggcctgcaactcggcgagaaggtcgacagcccggatgctgtggacctgccggtgaagctggcggtagccctgctcaaggacaccaagggcaacatcgatatccagttgccggtggccggtgatctgaacaacccggagttcagcgtcatgccgatcgtctggcagaccctgcgcaacctggtcctgcgcgccgtgcaggcgccgttcaagttcatcgccggcctcgccgccggcggtaacgaggatctcggcacggtacccttcgccgcgggcagcgacgagctgacgccagaagcccaggccaacctcgacaagctcgccgatgcgctcaaggagcggccggcgctgcgcctggaagtggaaggcgtggcctccgccgcggctgacggtccctcgatcggcgccaagcgtctcgaactggaataccagaacacctactaccgcatgctccagcgtcgcggcgacaaggtaccgagcgacgccaagcagctcgaggtgccggagaacatgcaggcaccgctgctcgaaggcatctaccggacccgcctgaagcagcagccaccggccgagtggaaggaactggacagcgacgaacgcaccgcgaagatgcgcgaagcggtgatcgcttcctgggccaagagccaggtgctgctgcgccagattggccaggcccgggccacccggatcaaggattacctggtggagaaaggccagttgccggacgatcgcatctacttgatcgacgtcagtttcgccgaaggcgaagacaagggtaatgtcgacacccaactgcacctggatagcgagtga

SEQ ID NO: 321869 - DNA, 882 bp, Pseudomonas aeruginosa
atggaaagcgtccgtcgccatatcgaaagccaggtgctgagccttaccgggctcgccgtcggcggtgtcgacttcgagtcgccgaaaggcgatccgggcctgttcggccccgatgccgcctgctggaaggtccacggcgacttcagcagcatgatgatcggcggcatcggcgcgctgctcctgcagatgctccatccgctggccctggcgggggtgtgggaccactccaatttccgcgacgacctgctcgggcgcctgcgtcgcaccggtcagttcatctcggccaccacctacggcccgctggccgatgccgagcgactgatcgagcgggtccggcgcatccacgaaagcgtcatcggccagttgcccgacggcacgccctactccgccagcgacccggacctgctgacctgggtgcatgtcgccgaggtcagcagctttctcaagtcctacctgcgctatctcaatcccgacctgccgggcagcgagcaggaccgttactactcggaaatcgccctggtcgccgaacgcctcggcgcccgcgcggtaccgcgcgaccgccagcagatcgccgcctacctggaggccatgcgtccacgcctgcgttgcgacgaacgcacccgcgaagtggtgcggattctcttcaacgcaccagcgcccagcaccctggccaggccgttcggcgcgctgatgctgcgcgcaggcgccgagctgttgccggaatgggccggatcgatgctcgacctcccgttcagtccgctacaacgccgcctgatccgcggcagcgtcaggcgcagcgtacccttgctgcgctgggcggtgcgcaacgcttcgatgcatcgagcctgccggcgcatggggctgccgccggtgagccactga

SEQ ID NO: 321870 - DNA, 1938 bp, Pseudomonas aeruginosa
atgttcgagatcagcgtccacccggtgccggacgccgtccgccagcgtgcctacctgaacgacgacgactaccagcgcctgtaccgccaatccgtcgagaaccccgacgagttctggggcgagcaggccaaggccttcctcgattggttcaagccctggcacagcgtccaccacggcgacctgaggaaaggccaggccacctggttcaagggcggccagttgaacgtcgcctacaactgcatcgatcgccacctggaacgccgcggcgaacagatcgcgatcgtctgggaaggcgacaaccccagcgaatccgcgcacatcacctaccgcaagctgcaccacaacgtctgccgcctggctaacgtgctgaagagccgcggcgtggaaaagggcgaccgggtctgcatctacatgccgatgattcccgaggccgcctacgccatgctcgcctgcgcccgtatcggggcggtgcactcggtggtgttcggcggcttctcgccggactcgctgcgcgaccgcatcctcgatgccgactgccgcaccgtgatcaccgccgacgagggcgtgcgcggcggcaagtacatcccgctgaagcagaatgtggaaaaggcactgaaggactgcccggacgtctctaccgtggtggtggtcgagcgcacccagggcgacataccctgggtcgaaggccgcgacatctggtaccacgaggcgctccacgcggcctcagccgactgcccggcggaagcgatggacgccgaggacccgctgttcatcctctatacctccggcagcaccggcaagccgaagggcgtgttgcacaccaccgggggctacctgctcggcgcggcgatgacccacaagtacgtgttcgactaccacgatggcgacgtctactggtgcaccgccgacgtcggctgggtcaccggacacagctatatcgtctacggcccgctggccaacggtgccaccaccctcatgttcgagggcgtgcccaactacccggacgcctcgcgcttctggcaggtgatcgacaagcaccaggtgaatatcttctacaccgcgccgaccgcgatccgcgcgctgatgcgcgaaggcgacgccccggtccgccagacctcgcgcagcagcctgcgcctgctcggctcggtgggcgagccgatcaacccggaggcctgggaatggtactaccaggtggtcggcgagaagcgctgccccatcgtcgatacctggtggcagaccgagaccggcagcatcctgatcaccccgttgcccggcgccactgcgctaaagccaggctcggctacccgcccgttcttcggcgtgcaacccgtgctgctcgacgagaaaggcaaggaaatcgacggcgcgggcagcggcgtactggcgatcaaggccagttggccgagtcagatccgcagcgtctacggcgaccaccagcggatgatcgacacctacttcaagccctaccccgggtattacttcagcggcgacggcgcgcgccgcgacgaggacggctactactggatcaccggccgggtcgacgacgtgatcaatgtctccggacaccggatcggcaccgccgaggtcgagagcgcgctggtcctgcacgatgcggtggccgaggcggcagtggtcggctgcccgcatgatgtgaagggccaggccatctacgcattcgtcaccctgatggccggcagtcagcccagcgaggcgctacaacaggaattgctggccctggtcggcaaggagatcggcagcttcgccaagccggatcacctgcaatgggcgcccagcctgccgaagacccgctccggcaagatcatgcggcgtatcctgcgcaagatcgcctgcaacgagctggacagtctcggcgatacctcgaccctggccgatccgggagtggtgcaggggttgatcgacaaccgcctcaaccgctga

SEQ ID NO: 321871 - DNA, 1665 bp, Pseudomonas aeruginosa
atgaagcaccacctcactccgctggatgccacgcaactcgacagttggcgcgccctggccgcccatcgccaggaactgcaggacttcaggatgcgccaggcgttcatcgacgatccggagcgcttcaagcggttttccttcagcgcctgtgggctgttcctcgacttctcgaagaacctgattcgccaggacaccatcgacctgctggtgaagctggccgaggaagcacggctgagcgacgcgatccgggcgatgttcgacggcgaggcgatcaatgcctccgagcgccggccggtactgcataccgcgctgcgtcgaccgatcggcgacaaggtgctggtcgatggcgtcgacgtgatgccggaagtccaccgcgtcctgcaccagatgaccgagctggtgggctacgtgcacaacggcctgtggcgcggctataccgaaaagccgatcaccgacgtggtgaacatcggcatcggcggctccttcctcggcccgcaactggtatccgaagccttgctgccgttcgcccagaaaggcgtgcgctgccactacctggcgaacatcgacggtagcgagttccatgaactggccagccgcctgaacgccgagaccaccctgttcatcgtttcctccaagtccttcgggaccctggaaaccctgaagaacgcccaggccgcacgcgcctggtacctggcccagggcggcaccgaggaagagctttaccgccatttcatcgccgtctccagcaacaaggaagccgcgatcgccttcggcatccgcgaggaaaacatcttccccatgtgggactgggtcggcggccgctactcgctgtggtcggccatcggcctgccgatcgccatgtccatcggcatctccaacttcaaggaactgctgtccggcgcctataacatggaccagcatttccagaccgcgccgttcgaacgcaacatcccggtgctgctcggcctgctcggcgtctggtacggcgacttctggggcgcgaacagccacgcgatcctgccctacgactactatctgcggaatatcaccgaccacctgcaacaactggacatggaatccaacggcaagagcgtgcgccaggacggcacgccggtcaccagcggcaccgggccggtgatctggggtggtgtcggctgcaacggccagcacgcctaccatcagttgctgcaccaaggcacccagttgatcccggcggacttcatcgtcccggtgagcagctacaacccggtggccgaccatcaccagtggctgtacgccaactgcctgtcgcagagccaggcgctgatgctcggcaagagccgcgaggaggccgaggccgaactgcgcgccaagggcctgccggaagccgaagtgcagcgcctggcgccgcacaaggtgattccgggcaaccgaccgagcaacaccctggtggtcgagcgcatcagcgcccgccgcctcggcgcgctgatcgccatgtacgagcacaaggtctacgtacagagcatcctctggggcatcaacgccttcgaccaatggggcgtggagcttggcaaggaactcggcaagggtgtctattcgcgcctggtcggcagcgaggaaaccccggccgaggacgcctcgacccaaggcctgatcgacttcttccgcggccgccatcgcggctga

SEQ ID NO: 321872 - DNA, 381 bp, Pseudomonas aeruginosa
atgcacgccatcatgctcaaagccaagttgcatcgcgccgaagtcacccatgccgtcctcgactacgaaggctcctgcgccatcgacggcgattggctggacctctccggaatccgcgagtacgaacagatccagatctacaacgtcgacaacggcgagcgcttcactacctatgcgatccgcgccgagaacggctcgaagatgatctcggtgaacggcgccgcggcacacaaggccaaggtcggcgaccgcgtgatcatctgcgcctacgcacactacagcgaagccgaactggccagccacaagccgcgcatgctgtacatggcgccgggcaaccagctcagccataccagcgaggcgattccgatacaggtcgcctga

SEQ ID NO: 321873 - DNA, 852 bp, Pseudomonas aeruginosa
atgaacaccgtcaagaccgtccgtgaactgcgcgccgcggtggcgcgcgcccgcagcgaaggcaagcgcatcggcttcgtgccgaccatgggcaacctccacgccggccatgccgcgctggtaaagaaagccggcgagcgcgccgacttcgtggtcgtcagcatcttcgtcaacccgctgcaattcggccccagcgaagacctcgacacatacccgcggaccctcgcagccgaccaggaacgcctgctcgaagccggctgccacctgctgttcaccccgaccgtcgaggaaatgtaccccgacggcatggacgggcagacccgcatccatgttcccggcgtctccgaaggcctttgcggcgccagtcgtcccggccatttcgaaggcgtggcgaccgtggtcagcaagctgctgaacatggtccagccggacctcgcgctgttcggcgaaaaggatttccagcagttggcggtgatccgcaagctggtccgcgacctcaacctgccggtgcagatcttcggcgagccgacggtgcgtgccgccgatggcctggcgttgtcctcgcgcaacggttacctcgacgagcagcagcgcgccgccgccccggcgatctaccgcaccctgcggcagctcggcgaacgcatccgcgccggcgccgaggacttcccggcattgctcgccgacgcccgccaggccctggaacaggccgggctgcgccccgactacctggaaatccgcgagccgatcagcctgcgccccggggtacccggcgaccgccaactggtgatcctggtcgccgcctacctgggcagtacgcggctgatcgacaacctctcagtccacctcgattga

SEQ ID NO: 321874 - DNA, 801 bp, Pseudomonas aeruginosa
atgcctgatgtaaccctgaccaccctgcaagggttgaagcagagcggcgagaagatcgccatgctgacctgctacgacgccaccttcgcccacaccgccagccaggccggcgtggacgtgcttctggtcggagattcgctcggaatggtattgcagggtcacgacagcaccctgccggtcagcaacgaggaaatggcctatcacacggcctgcgtgaaacgcggtaacaaaggttccctgatcgtcaccgacctggccttcgaatccagccattccgtggcccagacccttgccgacgcggtccgcctgatgcaggccggcgcacacatggtcaagctggagggtggggcctggctggcggagccgatcgcccgcctggcacagatgggcgtgccggtctgcgcgcatctcggcctgaccccgcaggcggtcaacctgttcggcggcttcaaggtccagggccgccaggaaacccaggcgcgccagttgcgcgccgatgccatcgccctggagcaggccggcgccgccatgctgctgctggagtgcgtgcccagcgtgctggccgaagagatcacccaggcggtgaagatcccggtgatcgggattggcgccggtgcggcgaccgatggccaggtgctggtcatgcacgacatgctcggtctctcgctgaccggccgctcgcccaagttcgtcaaggatttcatgcaaggccaggagagcatcccggccgccatcgcggcctatgtccgcgccgtcaaggacgtgtccttccccgccgccgaacacggattcaacgcatga

SEQ ID NO: 321875 - DNA, 489 bp, Pseudomonas aeruginosa
atgatccagcgcgtctacgtggcgctgggcagcaacctggccgaaccgcgcgagcagatccaggctgccctcgacgccttcgagcggcttcccgagacccgcctggtcgccgtctcgccgctctatatcagcgacccgctcggccccgccgaccagccgcgcttcgtcaacggcgtggcggccctcgacaccaacctggcgccgctcgacctgctcgacgccctgcaggccatcgaactggaacaggggcgcgtccgcgacctgcgctggggtccgcgcacgctcgacctggacatcctgctgttcggcgaacaattgctcgacctgccgcgcctgaaggtgccgcactaccacatgcaggcgcgcgctttcgtgctctatcccctcgcagatctcgcccccgacctgcgcctgcccgatggccgccacctgccggagctgctcgcggcctgtccgttcgagggcatcgaacgccttccgggcgcctga

SEQ ID NO: 321876 - DNA, 1404 bp, Pseudomonas aeruginosa
atgctgaaaaagctgatccagaccattcgttcccccctgcgccgtccgcgcgccgtccgtacaaccccggaagtcatcggtaacaaccagcactccctgcgccgggaccagttcagccggaacgccgtcaaggtcgtcgagatcctccagcgggccggctaccaggcctacgtggtcgggggctgcgtacgcgaccagatgctcggcatcgctcccaaggacttcgatgtcgccaccagcgccacgccggagcaggtccgcgccgaattccgcaacgcgcggatcatcggccgccgcttcaaactggtacacgtgcacttcggccgcgagatcatcgaggtcgccaccttccgcgcccatcatccggaaggccaggacgatggcgatagccgcgcgtccagcaacgaaagcggccgcatcctgcgcgacaacgtctatggcagcctggaagacgacgcccagcgccgtgacttcaccatcaatgccctgtacttcgacgtcaccagcgagcggctgctggactacgccaatggcgttcacgacatccgcaatcgcctgatccgcctgatcggcgatccggagcagcgttatctggaagacccggtgcggatgctgcgggcggtacgtttcgccgccaagctcgacttcgagatcgagaagcacagcgccgcgccgattcgccggctggccccgctgctgcgggaaatcccttcggcgcgcctgttcgacgaggtgctcaagctgttcctcgccggccgggccgagcgcactttcgaactgctggtcgagtacgaactgttcgcgccgctgttcccggccagcgccaaggcactgcaggccaaccccgactacaccggcaagctgatccgccaggccctggccaataccgatgcgcgcattcgccagggcaagccggtaaccccggccttcctcttcgccgcgctgctctggccggccctgccggcgcgcgtcgcgcagttgcaggagaaaggcatgccggctatcccggcgatgcaggaagccgcccacgaactgatcagcgaacagtgccagcggattgccattcccaagcgtttcaccctgccgatccgcgagatctgggatatgcaggaacgtctgccgcgacgccagggcaagcgcgccgacctgctcctggaaaacccgcgcttccgcgccggctacgacttcctcctgctgcgcgaaagcgccggcgaggaaaccgaagggcttggccaatggtggaccgattaccaggaagtcagcgacagcgagcggcgcaacatgatccgcgacctggtcagccaggaagacggcagcgccccgcgcaagcgtcgccgcggcggcaacagcggccgtcggcgccgcgggccgcgcaaggaaggcagcggcggaagcggcgaatga

SEQ ID NO: 321877 - DNA, 1437 bp, Pseudomonas aeruginosa
atggcacatattctgatcgtcgaagacgaaaccattatccgatctgcattgcgacgcctgctggagcgcaaccagtaccaggtcagcgaagccggctcggtgcaggaagcccaggagcgctacaccatcccctccttcgacatggtggtcagcgacctgcgcctgccgggcgcccccggcaccgaactgatcaagctcgccgaaggcattccggtgctgatcatgaccagctacgccagcctgcgttcggcggtggattcgatgaagatgggcgcggtggactacatcgccaagcctttcgaccacgacgaaatgctccaggccgtggcgcgcatcctcaaggaccgccaggagaaccgcagcgcggccccggtctccgccaacggcggcaaggccggcggcgagcgcggcgccagcccggcggcagccgacggcgagataggcatcatcggctcctgtgcgccgatgcaagagctgtacagcaagattcgcaaggtcgcgccgaccgactctacggtactgatccagggcgagtccggcaccggcaaggaactggtcgcccgcgccctgcacaacctgtcgaagcgcgccaaggcgccgctgatctcggtgaactgtgcggcgattccggaaaccctgatcgaatccgagctgttcggccatgaaaaaggcgccttcaccggtgccagcgccgggcgcgccgggctggtcgaagcggccgacggcggcaccctgttcctcgacgagatcggcgaactgccgctggaggcccaggcccgcctgctgcgcgtattgcaggaaggcgagatccgccgggtcggctcggtgcaatcgcagaaggtcgacgtgcgcctgatcgccgccacccaccgcgacctgaaaaccctggccaagaccgggcaattccgcgaagacctctattaccgcctgcatgtgatctcgctgaagctgcccgccctgcgcgagcgtggcaacgacgtgatggagatcgcccgcgcctttctggctcgccagtgcacccggatggggcgcgcgccgctcagcttcgcccacgacgccgaacaggcgatccgccattacccatggccgggcaacgtgcgcgaactggaaaacgccatcgagcgggcggtgatcctcagcgagagccaggaaatccacgccgacctgctgggtatcgacatcgagctggacgacctcgaggacgacttcgccgccgacctcggcctcggcccggcgggcgccgcggccagcaaccacgagcccaccgaggacctttcgctggaagactacttccagcacttcgtcctcgagcaccaggaccacatgaccgagaccgagctggcccgcaagctgggcatcagccgcaaatgcctgtgggaacgccgccagcgcctgggcattccgcggcgtaaatcaggggcctcggccgactcgtaa

SEQ ID NO: 321878 - DNA, 2952 bp, Pseudomonas aeruginosa
atgctgacgagctttagcctgacccagctgatcctgatcagcgtcgcctacctctccaccctcttcggcatcgcctggatcaccgagcgcggctacgtgccgcgccggctggtacgccacccgctggtctacaccctgtcgctgggcgtctacgccagtgcctgggcgttctacggcacggtaggcctggcctaccagtacggctacgggttcctcgccatctacctggggatttccggggccttcctgctcgccccggtgctgctctatccgatcctccgggtgacacgcgcctaccagctgtcctcgctggccgacctcttcgccttccgtttccgcagtacctgggccggcgccctgaccacgctgttcatgctgatcggcgtgctgccgatgctggccctgcagatccaggcggtcaccgactcgatcagcattctcacccgcgacccggcccaggagcgggtcgcgttcgtcttctgcaccctgatcaccctgttcgcgatcctcttcggcgctcgccacatcgccacccgcgaacgccacgagggactggtgttcgccatcgccttcgagtcgctggtcaagctggtgatgctcggcagtatcggcctctacgccctgtacggcgtcttcggcgggccggaaggcctggaagtctggctgctgcagaaccagaccgcgctgaccaccctgcacacgccgctggccgagggtccatggcgaacgctgctgctggtgttcttcgccgcggccatcgtgatgccgcacatgttccacatgatcttcaccgagaacctcaacccgcgcgcgctgatttccgccagttggggcctgccgctgttcctgctgctgatgagccttgcggtaccgccgatcctctgggccgggctgcgcctcggcgcctcgaccacaccggagtactacaccatcggcctcggcctggcggtggacagcccggccctggccctggccgccttcatcggcggcatctccgccgccagcgggctgactatcgtgatgaccctggcgctctcgggaatggtcctcaaccacctggtgctgccgctctaccagccgccggcgcagggcaacatctaccgctggctgaaatggacccggcgcctgctgatcgtcgccatcatcatggccagctacgccttctacctgctgctgggcgccgaacaggacctctccaacctgggcatagtgtccttcgtcgccaccctgcaattccttcccggcgccctctcggtgctgtactggccgaccgccaaccgccgtggcttcatctccgggctgatcgccggcatgctggtctgggcgatcaccatgctgctgcccctgatggggaacgtacagggcctgtacctgccgctgttcgacgtgatctacgtgctggacgattcgaactggcacctggcggcgctgtcctcgctggcggccaacgtgctggtattcaccctggtgtcgctgttcaccgaggccagcgacgaggaaaaaggcgccgccgaggcctgcgcggtggacaacgtacgccgtccgcaacgccgcgaactgttcgccggttcgccgcaggagttcgccagccagttggccaagccgctgggcgccaagaccgcgcagaaggaggtcgagcaggccctgcgcgatctccacctgcccttcgacgaacgtcgcccctatgccctgcgtcgcttgcgcgaccgcatcgaggcgaacctttccgggctgatgggacccagtgtcgcccaggacatcgtggagaccttccttccctacaagaccagcgaagaaagctacgtcaccgaggacatccacttcatcgagagccgcctggaggactatcactcccggctgactggcctggctgccgaactcgacaccttgcgccgctaccaccggcagaccctgcaagacctgccgatgggcgtctgctccctggccaaggaccaggaagtgttgatgtggaaccgcgccatcgaggaactcaccggggtcggcgcgcagaaggtcgtcggttcgcgcctgtcggccttgcccgaaccctggaagggcctgctggaacgtttcatcgacgcccccgacgagcacctgcacaagcagcgcctggtctacgacggccacacccgctggctgaacctgcacaaggcggccatcgaggaacccctggcgccgggcaacagcggcctggtgctactggtggaagacctcaccgaaacccaactgttggaagacaagctggtccactccgagcgcctggcttccatcggccgccttgccgccggggtggcccacgagatcggcaatccgatcaccggcatcgcctgcctggcgcagaacctgcgcgaggaacgcgaaggcgacggcgagctgaccgagatcagcgagcagatcctcgaccagaccaagcgcgtatcgcgcatcgtccagtcgttgatgagcttcgcccactccggcagccacctgcaggccctggaaccggtgtgcctgagcgaagtcgcccaggaggccatcggactgctgtcgctgaaccggcgtagcgtcgaagtagagttcttcaacctctgcgatccggcgcactgggtcgagggcgactcgcagcgcctggcccaggtgctgatcaacctgctctccaatgctcgcgacgccagcccgccgggcggcgcgatccgggtccgcagcgaagcctcggaacataccgtggacctggtcgtcgaggacgagggcagcggcatcccgaaggcgatcatggaccagttgttcgaaccgttcttcaccaccaaggaccccggcaaggggaccgggctcggcctcgcactggtctattcgatcgtggaagagcattatggacagataaccatcgagagcccgacggatcaccagcgagaaggcggcacccgcttccgcgtgaccctgccgcggcaccctggcccgacggccgagctgtag

SEQ ID NO: 321879 - DNA, 177 bp, Pseudomonas aeruginosa
atgtacatctaccgactggtcctgctcctggtcgtgggcatctatctcttttcccccgccatcatggactggtggatcgaccccaacggcgcctggtaccgcccgtacctgctgtggctgatcctcatcgtggtcactttcatcctgcagagccagcgcgatgctgacgagctttag

SEQ ID NO: 321880 - DNA, 966 bp, Pseudomonas aeruginosa
gtgcagccgcgccttcttctattgcctttcctgctcagcagcctgccggcgctggcggtgaccttccagacgcggctggagagcgtcgagtggaaggtcgaaggcgaccagttcgaatgccgcctgtcgcagccggtggcgaatttcggagtcggcgagttcgtccggcgtgccggcgagcaggcgaccttccgcctgaagcccgaggcccagtggctggggcgcgggtcggcgaccctgctggctgccgcgccgccctggcgaccggggcagggcgacatcaaccttggccaggtcagcatcggtagcggcgaggtgccgttcaacagcagccagcaacaggccggtcggttgctcaccggcctgctcgaggggcgcagcccgctggtccgccatcgcacctggcagggcgatcgcctggaggtgcgcctgctgccggcgcgcttcgccagcgtctacagccagtaccaggcctgcatcgccaagctgctgccggtgaacttcgaccaggtcaagctggcccaggtcggcttccccgacggcggcacggcgctgaacgacgtggcgcgagccaagctggacatcatcctccaactgctcaaggccgatccgagcatcaaccggatcgaactcgacgggcactccgacaacagcggcaaccgcctgaccaaccgcgacctgtcgcgccgccgcgcgctggcggtgcaggagtacctgaagagcaacggggtgccggaaagccagatcaacgtgcgcttctacggcgagcgctacccgctggtggccaacaacagcgccgccaaccgtgcgcgcaaccgccgggtcaccgtgcacctgtcgcgcgaggcggtggtcgagccggcgacggaagcgccgaaggccgaggacaagccggcgccgcccgcggcagaacctgccgcaccgaagcctccggccgcctcgcttcagggaaaacccacggtttga

SEQ ID NO: 321881 - DNA, 1218 bp, Pseudomonas aeruginosa
atggcggatgtgaagaaggtagtcctggcgtattccggcggcctggatacctcggtaattctgaagtggttgcaagatacctataactgcgaagtggtgaccttcaccgccgacctcggccagggcgaggaagtcgaaccggctcgcgccaaggcccgcgcgatgggcgtcaaggaaatctacatcgacgacctgcgcgaagaattcgtccgcgacttcgtctacccgatgttccgcgccaacaccgtctacgaaggcgagtacctgctgggcacctccatcgctcgtccgctgatcgccaagcgcctgatcgagatcgccaacgagaccggcgccgacgccatctcccacggcgccaccggcaagggcaacgaccaggtccgcttcgagctgggcgcctacgcgctgaagcccggcgtcaaggtgatcgcgccctggcgcgagtgggacctgctgtcccgcgagaagctgatggactatgccgagaagcacggcatccccatcgagcgccacggcaagaagaagtcgccgtactcgatggacgccaacctcctgcatatctcctacgaaggcggcgtgctggaagatacctggaccgagcacgaagaagacatgtggaagtggaccgcttccccggaaaacgcgccggacaccccgacctacatcgagctgacctaccgcaagggcgacatcgtcgccatcgacggcaaggacatgaccccggccgaggtgctcaccgagctgaaccgcgtcggcgggatcaacggcatcggccgcctcgacatcgtcgagaaccgctatgtcggcatgaagtcccgtggctgctacgagacccccggcggcaccatcatgctcaaggcccaccgcgccatcgagtcgatcaccctggaccgcgaagtggcccacctgaaagacgagctgatgcccaagtacgccagcctgatctacaccggctactggtggagcccggagcgcctgatgctgcagcagatgatcgacgcctcgcaggtcaacgtgaacggcgtagtgcgcctgaagctgtacaagggcaacgtcgtggtggtgggccgcaagtccgacgactcgctgttcgacgccaacatcgcgaccttcgaggaagacggcggcgcctacaaccaggccgatgccgcgggcttcatcaagctcaacgcgctgcgcatgcgcatcgccgcgaacaagggccgcacgctgtcctga

SEQ ID NO: 321882 - DNA, 387 bp, Pseudomonas aeruginosa
atgcgcattctccataccatgatccgggtcggaaacatcgatcgctcgatcgatttctatacccgggtgctaggcatgaccctgctcaggaagaacgactatcccgacggccagttcaccctcgccttcgtcggctatggcaacgaggcggattccgcggtgatcgagcttacccacaactggggcgtggatgcctacgagatcggcaccggctacggccatatcgccatcgaggtcgacgacgcctaccaggcctgcgacgacatccgcaacaacggcggccaggtcacccgcgaagccgggccgatgaagcacggtaccaccgtgatcgccttcgtgaccgacccggacggctacaagatcgaactgatccagaagtcttcctga

SEQ ID NO: 321883 - DNA, 1158 bp, Pseudomonas aeruginosa
atgaatctcagacacttcatccgcatcaccgcgacgctaggtgtcgcggcccttatcgctggctgcggggaatcggcgccgccgggggcggcgagcgccccgccaagcgttcccgtcgccgaggtggtggttcgcccggtgacaccctacgccgagttcaccggctcgctgaccgctgtcgagcaggtagaactgcggccgcgcgtcgccggctacatccaggacgttacggtgccggaaggccgcctggtagagaagggccagcaactgttcctcatcgacccgcgcgtgttcaaggcggcgcaggatgccgccagggcacgcctgcgcgaggccgaggccgcggcgttgctggcgcgcaccgaacacgagcgagccgagctgctgtatgcgcggaaggtcgtcgcccgggagcggctcgacagcgccatcgcctcgcgcaatgccagcaaggcccaggtcgatgcggccagggccgccctcgacgcggcgcaactggatctcggcttcacgcgggtgacggcaccgatcggcgggcgtgtcgggcatatccaggtcaccgagggcaactacgtcaccaatggcgtcaccgcgctgaccagcatcgtttcggtcgatccgctgtacgtgtacttcgatgtcgacgagcgcacctacctgcaggccctggcgccgacccgcggcagggaaggcgagcaggcccccagggtcaaggtggcgctgctcaccgacgagtcctatggacgaagcagtcgcctcgatttcctcgccaacgccgccgaccgcgggaccggcacggtccgggttcgggcggtggtggacaacccggacgggcaactgacgccggggctgttcgccaaggtcaggctggagaccggcaagcctcgcgcgcaggtgctggtcgccgaccattccatcggcaccgaccagggcaggcgctatgtgctggtcgtcgacgaaggcaacaagacccagtaccggccggtggaactcggcccgatggtcgacggcctgcgggtcgtccgccagggcctgcagccgggcgagcgcatcgtcgtcaagggcctggtccggccggacatgcagatcacaccgcgccttgcggaaatcgatggcacgcccgtcgacctgtcgaagaccgtgggggccgcacaatga

SEQ ID NO: 321884 - DNA, 3162 bp, Pseudomonas aeruginosa
atgacattcccacgcttcttcatcgataggccgatcttcgccatcgttctttcggtgctgatgatgatcggaggcatcgtttcgttcttccagttgccgctgagcgaatacccggcggtgacgccgccgaccgtgcaggtgactaccgcctatcccggcgccaaccccgacgtgatcgcgcagacggtggcgacaccgctggagcaggcgatcaccggggtcgaggggatgctgtacatgtcctcgcagtcggccaccgacgggcgaatgatcctgactatcaccttcgaccagcacatcgatcccgacatggcccagatccaggtgcagaaccgggtctcgcgggtgctctcgcgcctgcccgacgaggtgcagcggcagggcgtggtcacccagaagacctcgccggacatcctcatggtggtgcacctgctgtcgccggagcaacgctacgacccgctgtacatctcgaactacgcctacctccaggtgcgtgacgaactgctgcgcctgccggggatcagcgatgtggtggtgtggggcgccggcgagtacagcatgcgcctgtggctcgaccccgacctgatcgccgcgcgcgggctgacggcgggcgaggtgatcgccgcggtacgcgaacagaacgtccaggtggcggccggcgccgtcggccaggcgccggactccaccgcggccttccaggtcacggtgaataccctcgggcggctgagcgacgaagagcagttcggcgacatcatcgtccgcaccggcgccgacggccaggtgacgcgcctgcgcgacgtcgcgcggatcgagatgggcggcgatgcctatgcgctgcgcagcctgctggacggcgagccggcggtggccttgcagatcatccagagccccggagccaacgcgctggataccgccgaagcggtgcgtgccaccgtggcgaggctcgaaggcaacttcccggccggcctgagcgcgcgcatcgcctacgacccgacggtgttcgtccgcgcttcgttgcagaccgtggccaccaccctgctggaggcgatcctgctggtcgtggtggtggtggtgctgttcctgcgtagctggcgtgcttcgctgattccgctgatggccgtgccggtctcgctggtcggcaccttcgccgtcatgcacctgatgggtttctcgctgaataccctgtcgttgttcggcctggtgttgtcgatcggcatcgtcgtcgatgacgccatcgtggtggtggaaaacgtcgagcgccacatcgagaacggcgagccgccgctccaggccgcgcggcgtgcgatggacgaggtcaccgggccgatcatggcgatcacctcggtgctggcggcggtgttcatccccacggcctttctcagtggcctgcagggcgagttctatcgtcagttcgccctgaccatcgccatctccaccatcctgtcggcgctcaactcgctgaccctcagcccggccctggcgggcctgctgttgcgtccgcggccggccggaggtgcggtggcggggcgcttccagcgactgctccaggtcctcggccgaccgttgcgaaatgcccccgaggcctacggcaacgcggtgcgcaaggtggtgcgggtgagcggcctggccctggtggtgtatgggggcctgcttggcctgacctgggtcggtttccaggcggtgccgccgggcttcgtgccgatgcaggacaagtactatctggtcggcatcgcccagttgccgaacggagcgtcgctggagcgtaccgatgcggtggtcaggcagatgtcccggatcggcctcgacgagccgggggtggagagcgtcgtggccttcccgggcctgtcggtgaacggtttcgtcaacgtgccgaacgccgcggtcatgttcttcatgctcgatccgttcgaatcgcgcacctccgccgatctcggcgcgctggccatcgccgggcgcctgcaagccaggttcgccagcattcccgacggcttcctcggggtcttcccgccgccgccggtaccggggctgggaaccatcggcggcttcaagatgcaggtcgaggatcgcggcggcgccgggctggaagccctggccaggcagacccaggtgctgatgatgaaggccactgagtccggccagctcgggggcttgatgaccagcttcgatatcaatgccccgcagctcgaggtggtggtcgaccgcaccaaggtgaagagccagggcgttcgcctggccgatgtgttcgaggcattgcaggtctacctcggctcgctgtacatcaacgacttcaaccgcttcggtcgcacctacaaggtcactgcccaggccgatgcgccgcaccgcatgcaggccgaagccatcgggcgcctgcaggtacgcaatgccgccggggcgatgttgccgctgtcctcgttcgtcaccgtgacgcccagctccggtcccgaccgggtgatccactacaacggctatccgtcggcggatatcagcggcggcgcgcttcccggcgtcagttcgggacaggcggtggcgttgatggagcgcctggccggcgaagtgctgcccgagggcatgaccttcgaatggaccgacctgacctaccagcagaagctggccggcaacagcgcgctgttcatcttcccgctgtgcgtgctgctggcctacctgatcctcgccgcgcagtacaacagctggctgttgccgctggcggtcctgctgatcgtgccgatgtgcctgctcagcgcgatcgccggggtgtggctggtgggcggcgacaacaacgtgttcgtccagatcgggctggtggtgctggtaggcctggcggcgaagaacgcgatcctgatcgtcgagttcgcccgcacgctggaggccgagggcgcccgtgcgctggaggcggtggtcgaggcttgccgcctgcgcctgcggccgatcctgatgacctcgctggcgttcatcgccggcgtggtgccgttggtcatggccagcggcgccggagcggaaatgcgccaggcgatgggcgtcgcggtattcgccgggatgctcggggtgacgctgttcggcctgttcctcacgccggtgttctacgtactggtacgggcactggcggcgcgcctggagcgacgcgccggcggcagcctggcgcatctggagggaggccgtccatga

SEQ ID NO: 321885 - DNA, 1524 bp, Pseudomonas aeruginosa
atgaagccatacctgcggtcttcgttgagcgcgctgatcctgctgggcggctgtgccgcggtggggcccgactatgcgccgccgagcgcgtccgcaccggccagcttcggcgcgatgccggcgggtatcgatggcagtggcgtggagatcgagtggtggcgcgggttcgacgagccagacctggagtctctgatccagcgggcgctcgcggcgaacctcgacatcgcccttgccggcgcgcgcctggacgaagcgaaggcgctgctgcgcgagaaccgcgaagagttcctgccgcgcggcggcccggcgttcgattaccaggcccggcggcgcggcgaggtggaaacaccggccggccagcagcgcgacatcgagacctatcgcggcgcgctggatgcttcctgggaaatcgacctgttcggccgggtgcggcgctcggtggaggccgccgaggcgcaggcgggctcgcgcgaggccctgctgcgcaacgtgcaggcgagcgtcgcggctacggttgccatgacctggttccagctacagggcatcgaggccgaacttgcggtggtccatgacatcgccggcaaccagcgcgacagcctggagatggtcgaacgcctggtcagcgccggctccgcccacgagttcgaccggttgcgcgccgaagcgttattgcacaacgtcgaggcggccgtgcccgacctcgaacggcgccgcgccgccacccgcaatgcgctggccgttctcctcgcggaagccccgcaggccttcagcccgccggtcgcccgtgcctccggggaaaggctgacgctccgcaccctcggggtcggcgatccgtcgggactgttggcgcgtcgcgccgacatcgccgcggccgaacgcaacctggcggccgcgaccgcacgtatcggcgtcgagaccgcggggctgtatccgcaggtcgaggtacgcggctcgatcggcctggtcgccggcaatctcgatgctttggacgagagtggtacgtccttcaacgtcctgaacccggtgattcgctgggcgttactcgaccgcggtcgcgtgcgggcgcggatcgccgccagcgaggcccgtgcgcaggaggcattgatcctctacgaccggacggtgctgcgcgccctgcaggagaccgatgatgccttcaacggctatggcgctgccgctgacaggctccgcctgcgcctgctcgaggcgacggccaatcgcgaggcggcgcgcctggcccgggagcgcttcgtccagggggacggcgagtacctggacgtgctcgaggcggaacgctcggactacctcagccggcgcgcattgagcatcgcgcgcaccgagcagcgccttgccgtcgtgggtatctacaaggcgctggggggggggctgggaggcctgcgcgggggcgcggcgctgtggcgtggctaccgacgatacctctccaggcgtggcacggcagcgcgacagtcgctcctgatcagccgccggcggtttccggccgccggccttcgctcgactgcctag

SEQ ID NO: 321886 - DNA, 195 bp, Pseudomonas aeruginosa
atgttttctttccatattccgaacatgacctgcggcggttgtgccaagactgtcacccgtatcctgcacggcgtcgatccccaggcgcgcgtagagaccgatcctcctcggcgcgaggccagggtcgagagcactctggacaagcacgcattcctcgaggcgttgagcgaggccggttatccggagggccgttga

SEQ ID NO: 321887 - DNA, 1038 bp, Pseudomonas aeruginosa
atgacttcaaatccgttacagcaatgctgcaattcttcctccgatatgaatatccgcccccagcggacaatgtcggaacctgcccgaaatgcatcggctctcctggctgaagccttgaaacccggtgcctccctggaccagatcacgctcgcgctcgaggcgattctcgcggtcacggccaaaggcctgggcggcgatgcttcggcttacgcgcagtaccaggcgttgctcctggaactgcacgtaggcagcgatccgcatacggagccgacccgccgctggatggcgagccaggtctacctggtcgaggatcgtttcgctcccgagccggccggtttcagcgccgtcccggtggaggagttccgcaagaaggtcgacgccgagatcgaggcgcgcagccgggtgcgccatcccatgtcggtccacctgttccagggcacgccgccggtcgaggacgtgcgcttcttcctggaacaccattgggtccgttcctacaacttctacagcctcctggcggagctggccttccgtttcgaaaacatcgaggacgcctcggtgttctaccgcaacctctacggcgaggccggggcggagacgccggagcgctcgcaccccgcgttgctgtcccacctgatgacctacttcgacattccgctgcgcatcgatttcccggcgctgcatccgctggagaaggcctacctcaacaaccgtatccgttgcgtgcggcacaccgatgtcgcctggggccttgcgctcctgtacgcggtcgagtcggtgagctgcgtcaatcaccggcgcatctacgaactcctgcagcgcctgggcgtgcccgagcaacccagcgagttccatcgcctgcacggcacccaggacgagatcgataccgaggagatgtgggcgctgatcgccaagttcgcgccgagcgaagacttccagcgcaagttcatgcagtcgctggcgcgccacttcgaaatcaaccgggcctacttcgacctgctctgggagcagatgcaggcgaattccctggccatggcctga

SEQ ID NO: 321888 - DNA, 987 bp, Pseudomonas aeruginosa
atgaatacccgcaatttttccctgccgcagttgcagaacctgcccatcgaagaagcacgcatcgttgccgatgcgctggccgtccacgctacttcccgccagatcgatagcgccgcgagcaagctggccgcgctggccgaggcagggctcaagggcgaccgccaggcctatgccgcgtaccagcagttgctctacgtcctttcgttgagcgacgacgtggcgaccgcccagacccggcgctggctggcccgggcgatctatcgcgtcgaagagcgtttcatgcccgccgccgatctttccagggcgttgtccgaggaggatttccagaagcgtctcgaacaggaaatcgccgcgcagtcccgcgagcggcacccgatgtcgcagtacgtgttctccggctcggcctcccgcgcgcagctccaggtgttcctccgtcaccagtggttccgcaccttccgcctgtaccgcgatgcggccgacctgttggtcaacctgaccgatgtggacgaggccgcggcgctcgcgcgttacctctatggcgagttgggcgaggaagacgaaaagggttcgcatccgcgcctgctggccaagctgctcgaggccatcggcctggaggcggacttccaggccgtgtcgacgatgcccgaggaaatcgcctacctgaacaatcgcgcccgtgccttccggcatgccgaggtcggttgggggctggcggtgttctacatcaccgaactggtcgtgccggggaaccacgaaaagctctatcgggccctgctccaggccggcctgagcgaggaccaggcggagtactacaaggtccacatcagcctcgtaccgccgcgggccaagcgcgaatggcaactcatcgcgcggcgggttccggacgtgcagttccagaatgcgttcctgacctcgctatcgcagcacttccgtgtggaaagggcctattacgacgcgatctgggaagagatgcagagcgtcaagtga

SEQ ID NO: 321889 - DNA, 1434 bp, Pseudomonas aeruginosa
atgccaagtcacattacggaatcccgtatacacgggggcgcctactcgtccccggcattcgccgcgatcttttccgataccaaccaggtgcggaggtggctggatgtcgagcgagccttggcggcgacccagggcgagatgggcatcatcccccacgaggcggcgcgggagatcgaccgcgccgcccaggtggagcgcttcgacctcatgcaactgggccgcgaaagcctggagacagggcacctgctggtgcctaccatccgcgccctggcgaagtcgtgcgagggtagctggggggagtacgtgcactatggcgtgaccactcaggacatcctcgacaccgggctgatgctgcaggtcaaggaagcctggggccatacgctcgggctcctgcactcgatccgtggccatctgctggcgctcgccctgcgccaccagcacacgccgatggttgcacgcacccacgggcagcaggcgctgcccacgaccttcggctacaaggtcgccgtctgggtggatgaaatcgaccgtcacctggcgcgcttcgacgaggcgcgcgaacgcgtcctggtcggcaacctgaccggtgccgtgggaaccctggcgtcgttcggcgcccagggcttcgagctacagcggcgaaccctggccaggcttggtctcggcgcgccgtcgaccagttggcacagcgcccgggaccgggtgctggaggttgccgggttgctggtccaggtgtcggtgacgctgggccgggtggcgaacgagatctaccacttgcagcgcagcgaaatcgatgaggtacgcgagggcagccggccgggacaggtgggcagcagcaccatgccgcacaagcggaacccgtcgtcggtcgacctggtcagcgcgctgtcgcggctggtgcgggcacagatggtggcgctcaccgatgccgcgttccagttgcacgagcgcgacggcaccgcctggcgcatcgagtgggcggcgttgccggagctgttcgtctacgccggcgccttgctgacccgcatggagtcggtgctggccgaggggctcgaggtgcgcgaggaacacatgcgcgccaacctcgacctgctgggtgggctgatcctgtcggagcgggtcatgctcgcgctggcggggcagttcggcaagcagaccgcccacgaactgctccatgagataacccaggcctcccagcggcagggcgttccgttccgcgaggcgctgctcgggcagccaaggttgcgcggctgtttcagcgccgaggcgctcgaagaactgctcgaccccgtcggctacgtcggcctcgccgccgagatggtcgacctggtcgccggcaaaccacgaaccggcgcgtcgggcgacaggcccgaaggcgccgcctcttcccaaggaaatcccggtcagtcccagtacgtgatggaggataggtga

SEQ ID NO: 321890 - DNA, 1452 bp, Pseudomonas aeruginosa
atggatgctgaatcgctggaaatgcttgcccgttcctcgtgcaccgcgcatccgcagagcttcggcggcgcaccggccgagtcgtcctgcaagcacgaacacagtcacatcgttgactctaaaacccatggcggcggctacgccggcccggtgagccgccggatcttctgtagccactgccgcctgcaacgctggctcgacgtggaggcggcgctggcgctggcgcaggccgatgtcggcgtcattccgcccgaggcggcgctggagatcgcgaaggccgccaggctttcggccgtcgacctgcagcagatcgccgagggtgtggccagcaccgggcattcgctgatgcccctgctgggcgcgctgcaaaggaactgcagccccagcgcgcgcgagtacgtgcatttcggcgcgaccacgcaggatatccaggacaccgcgcagtccctggaaatgcgcgatgtgctggatgaaacggagcgggcgctggacatcctcctggaccggctctcggtgctggcgagcgggacccgcaatgcgctgatggttgccaggacccactcgatcccggcgttgccgaccaccttcgggctgaaggtggccggctggatcgacgagttgctgcgtcaccgcgaacgcctgggcgaggcgcgcaagcggatcctggtggtgcaactgttcggcggcgtgggcacgatggccgccttcggcgacgaggccatgctcctgctcgaaagcttcgcgcggcggctgtcgctggacgtgccgctggcgggttggcacgtgtcccgcgaccgggttaccgagttcgtcagcaccctggccatggtcaccgcgtccctggcgcggatcgccgacgagatccgcaccctgaaccgctgggagatcggcgagctggaggtgggctggacgcagcagcagatcggtagcagcaccatgccccacaagcgcaatccggaaggctgcgagcaggtcgtggtgctggcccggctggccaaggcccaggtcctgctcgcgttggacgccatgatcctcgagcacgagcgggactaccgcggcacgcgcctggaatggtgtgcggtggcggacgtttcccactatgcgctgatggcgctgtcgctgctgaccgacaccatcgacgggctcacggtccacgacgagaccatggcgcggacggcgaatgcatacagcgatgcgatctgtaccgaggcgttcgtcttcgagatggccaagcaactgggcaagagcagcgcttacgaaatcatcttcgagatcacccaggcctgccagcgcaagcggattccgatgcgccaggcgctcgagtcggatccgcgggtgggcgccgtcatgccgaaggaaaccctggccaggctgttcgagccgcggacccatctcggcatggccgggaccatcgtcgacaaggtgctggacaaggtcgccagccaccactga

SEQ ID NO: 321891 - DNA, 1074 bp, Pseudomonas aeruginosa
atgacaaaggctaacgagatcgaaaccgcgaaggtcaagcagttttcagcacggatcatggaggactacggcaataccctgcgcggcgcgatgctctacatcggcgaccgcctggggctgttcaaggcgctcgcccatggccaatgggtgaccctggaagagctggcgcagcagaccggctacaccacccgctacctgcgcgaatggctgggcagcatggtcaccggcaactacctggcctacgatccgcagagcaggagctatcggttgccggccgagttcgtcccggtgctcgccgacgaggactcgccttatttcgccggcgggatcatccagttgagcgtgcccttcgtgagcatggcgccgaagatcatcgaggccttccgctgcggcggcggttgccccgaggaatccttcccgctggaaacctgggaaggcatggagcgcatgaccatgccctggtacaagcacttcctcgtgcagcactggattccttcgctggatggcgtcaaggaaaagctccaggcgggtggcagcgtgctcgatttcggctgcggcagcgggctggccgcgatcatgatggccaaggcgttccccgaagcccaggtctatggctgtgacttccacgcgccgtccatcgaacgcgcgcgggcgaacgccgaggccgcgggggtcggcgaccgggtgcgcttcgaggtcagcgattccgatgcgctggcgggcaagaagttcgacttcgtcacgaccttcgtggtcatccacgacgcgaccgacccgcagcagatgatgaaggacctgcgcgagtcgaccgccgacgatgggacctacctgatggtggaactcaacctgtcgcaggaactgcacgagaacatgaacctgttcggtcgcgtgatgtacccgcagagcacgctgtattgcatgacctgttcgctgtcccacggcggcgagggcctcggcgccttcatgggcgaggaccgcgcgcggcagatggccgaggccgccggcttcagtcgcttccgcaaggtgccttcggagtggccgccgctgccggcgctgttcgaactgcgaccctga

SEQ ID NO: 321892 - DNA, 180 bp, Pseudomonas aeruginosa
atggcaaaagccaaagaagaactcgagatcgacgacgaagccggcgttgaagaggatgacggcgaggaaaccagcgtcgaggtggccaagaccaacctgaccaagcgtcgcatcatcgacaacctgctggaagaacgccgcctgcagcgccagttgtcggactacgacttcgacctgtga

SEQ ID NO: 321893 - DNA, 639 bp, Pseudomonas aeruginosa
atgaatgccgccaagcgcgcggagatcttccgccgactgcacgaagacaaccccgagccaaggaccgaactggcctacaccacccccttcgaactgctcatcgcggtgatcctctccgcccaggccaccgacgtcggggtgaacaaggccaccgcccgcctctatccggtggccaacacccccgaggcgatccacgccctcggcgtcgaggggctgtcggagtacatcaagaccatcggcctctacaacagcaaggcgaagaacgtcatcgaaacctgccgcatcctcatcgaaaagcacggcggccaggtccccgacaaccgcgaggacctcgaagccctgcccggggttggccgcaagaccgccaacgtggtgctcaacaccgccttccggcaactggccatggcggtggacacgcatatcttccgcgtcgccaaccgcaccggcatagcaccgggaaagaacgttctggaggtggagaagaaactgctgaagttcgtgccgcgcgagtacctgctcgatgcccaccactggctgatcctgcatggccgctacgtctgcaaggcgcgcaagccgcaatgcggaagctgccggatcgaggacctgtgcgaatacaagcacaagacttcagacgattga

SEQ ID NO: 321894 - DNA, 717 bp, Pseudomonas aeruginosa
atgagtgaacaagatttccgcgagatcgcccgcaacggcctgtggcgcaacaacccgggcctggtccagttgctcggcctgtgcccgctgctgggcaccagcaactcgacggtcaacgccctcggcctgggcctggccaccatgctcgtgctggcctgctccaatgccgcggtatcgttggtgcgcggcgcggtgagcgaggcgatccggctgccggcgttcgtcatgatcatcgccgtgctgaccacctgcatcgaactgctgatgcaggcctggacctacgagctgtaccaggtcctcggcatcttcatcccgctgatcaccaccaactgcgtgatcctcggtcgcgccgaggccttcgcggcgaagaacggcgtgctgcgcgccagcttcgacggactgctgatgggcctcggcttcgccctggtcctgctggtcctcggcggcctgcgcgagctgctcggccagggtaccctgctggccgacatgcacttgctgttcggcccggcggcggcggactggaagatccagccgttcccgcagtaccagggcttcctgctgccgatcctgccgccgggcgcgttcatcatgctcggcctgctgatcgccctgaagaaccgtatcgatgaaagcctggcggaacgcgccaaggtgcaggcgggcgacgtacccgccacccagcgccagcgcgtccgcgtcaccggagtgattgaatga

SEQ ID NO: 321895 - DNA, 645 bp, Pseudomonas aeruginosa
atggacgccgcgactcgccgctcgatgctgcgcaacgccctcctgctcgggctcttcgccctggtcggggtgggcctggtggccctggtgcagcaattcacagaggcgcgcatcgccgaagcccagcgcgaggcgcgcggccgcgccctgctggaactgctgccgccgggcagctacgacaaccatccgctggacagccaggtgccaaccttcgcgccgaagctgctcggcctggatgcgccgcgtccggcctatgtcgcccgcctgcacggccaggccagcgcagtcatcctccaggccagcgcgccggatggctacagcggcgccatccagctactggtcggggtcaccgcccagggccggctgctcggcgtgcgggtcgtcgcgcacaaggaaacccccggcctcggcgaccgcatcgaactggccaagagtccctgggtgcacggtttcgacggcaagagcctgggcgatccggcggacgccggctgggcggtgaagaaggacggcggtacgttcgaccagttcgccggcgccaccgtcaccccgcgcgccgtggtccgcgccgtgcacaaggcgctgcgctacttcgacgccaaccgcgaacgcctgctcgcccccgaagaggctgccggacatgagtga

SEQ ID NO: 321896 - DNA, 1035 bp, Pseudomonas aeruginosa
atggccctgccccgccccacctcgccccacgcccgcggctccaatcgtacccaggcgatcatgcgcctggtgctcggcgcctgcgtccccggcctgctgacgctgacctggctgtacggcccgggcaccctgctcaacctggcctgggccagcctcgtcgcgctggcctgcgaagccgccatgctggccctgcgcaaacgtccgccgggggtgttcctcaaggacggcagcgcgctggtcaccgccctgttgctggcagtcgccctgccgccctacgccccctggtggctgaccctggtggcgaccttcttcgccctggtattcggcaagcacctgtacggcggcctcggacagaacccgttcaacccggcgatgctcggctacgtcgtggcgctggtctcgtttcccctggaaatgacccgctggccctcgccggacagcgccctcggcctgcccgacagcctccgcgaattcctcggcctcgctacccggccggacgcctgggcccacgccaccgccctcgacgtgctgaagaccgaccgcagcctgaccgtcgatgagctgttcgccggcaacccggccttcggccacctcggtagcgccggcagcgagtgggtcaacctggcgttcctcctcggcggcctgttcctgctctggcgccggctgttcacctggcacgcgccgctgggcatgctcgccggcctgttcgccatgagcctgctgttctggaatggttccggctccgattcccatggctcgccactgttccatctgttcagcggggcgaccatgctcggcgccttcttcatcgtcaccgacccggtgtccggcgccaccagcaatcgcgggcggctggtcttcggcctcggcgtcggcgtcctcacctacgtcatccgcgcctggggcggctatcccgatggcgtggcgttcgctgtgctgctgatgaacctggcggcgccgaccatcgactactacacccggccgcgcacctacggccatcgcaaggccgagcgcggcttcaaggcaggcgactga

SEQ ID NO: 321897 - DNA, 2310 bp, Pseudomonas aeruginosa
atgagcgccctgcacgccttccccggcggcctctgcctgccggccaacaaggagcgctccaccgccctgccgatccagcaggcgccgctggcgcagcgctacatcgtgccgctcggccagcacatcggcgcgccggcgcgaccttgcgtggaagtcggccaggccgtactcaagggccagaccatcgccctcccggacggcaccgtcagcgccgcgctgcatgccccgacctcgggtaccgtggtggcgatcggcgcacacccctatccgcatgcctccggtcttcccgcgccggccatcgtcatcgccagcgacggcctggagcgctggaccgagctgcatccctgcccggacttccgcgccgaaagcccgctggcgttgctcgaacgcatccgcgcggccggcatcggcggtctcggcggcgccggcttccccaccgccgccaagctcgccgcgcgcccggcggaaaagatccatacgctggtggtgaacggcgccgaatgcgagccctacatcagcgccgacgacctgctcatgcgcgagcgcgccacgcaggtgctgggcggcatcgatatcctggtgcagatcctgcgccccgaagaggtgctggtcggcatcgaggacgacaagccggaagccatcgccgccctcggcgccgccctcggtgaacggccctatcgcatcgtcgccctgccgacccgctatccctcgggcggcgagcgccagctgatccagttgctcaccggcagggaagtcccggcggacggcctgccggcggacatcggcatcctgtgccagaacgtcggcaccctggccgccgtgcacgatgccgtcgtcctcggtcggccgctgatctcgcggatcactaccctcgccggcggcgccctgcagcggccgatgaacgtcgaggcgctgatcggtacgccggtacacgagttgctggcgttcgccggcctcgccgagggacgcctggaacgcgtgctgatgggcgggccgatgatgggcttcgccctgcccgatctctcggtgccgctgatcaagacctgcaactgcctgctcgccggcgatgccacggagctgccggaaccagtgccggccatgccctgtatccgctgcggcgactgcgcccaggtctgccccgtcagcctgctgccacaacaactgcatttcttcgccctgggcgacgagcacgagcaattgctcgcccacaacctgttcgattgcatcgaatgcggcgcctgcgcctacgtctgcccgtcgagcattcccctggtgcagtactaccgcgcgtccaaggcggagatccgcgagcagcggcagaagctgctgaaggccgaacaatcccgtgagcgtttcgagcaacgccaggctcgcctgcgccgcgacgaggagcgccgggccgcagaacgcgcccaacgcgcggagaaggccgcgctggccgagcgcgaggaagccgcccccgccacggcggtcgacccggtgcaggcggcgatcgagcgggccagggcgcgcaagcaggccggtagcggcagcgaacggctgaaacggctgaagatcgaagcgagcatggcgcgggtggccctgaagaaggccgagaaacagttgctcagccacgacaccccggaacagcatggcctggtcgcggaactgcgcgccgccgccgaggccgccgacaaggccctggccgatgccgaagccagcctgccgcgcgacctacccagcgcaccgcctgccgcgctcgacgacgaagccgaactgaagaaggccaaggcccaggccgccatggcccgcgcccagctcaagcgctcggaaaaggccttcggcgaagcgcccggcgccgagcagcgggcgaccctcgacgaactgcgcgccgaggtcgagcgttgcgaagccaccctggcccgcctcgagcgtcacgcgccgaagcccgcggcgcccggcgacgacggccaggcggcgctgaagcgggcgaagatcgccctggtcggcaagcgcgcggccttgaagaaggccgagcaggccggggtgatggacagcgagctggaacgcctgcgcggcgagctgcaagccgccgagcgcgacctgcatgccgccgaggacgcctgcggcaagccggcgccggagctggtgcggatcgacaagcgcccggtcgacccgcgcacccgcgagctgaagaccgagctggcctacgcccgcgccgccctgaagaagctcgaacgcctggcgaacgccgacgccgccgcactcgccgccgcccgcacgcgcctgagcgccgccgagcgcgccctgaccgaacacggcacggagtga

SEQ ID NO: 321898 - DNA, 567 bp, Pseudomonas aeruginosa
atgaacggcgtgttcctggcgatcggcgcgctgctgccgatctgcctggccggcggtgcgctgctcggctatgcggcggtgcgcttccgcgtccagggcgatccggtcgccgagcaggtcaacgccctgttgccgcagacccagtgcggccagtgtggctaccccggctgcaagccctacgccgaggcgatcgccgccggcgacaagatcaacaagtgcccgccgggcggcgaagcgaccatccgcgccctcgccgacctgctcgacctggagcccgagccgctcgacgccgccgaggaaaccccgccgcgggtagcctacatccgcgaggccgaatgcatcggctgcaccaagtgcatccaggcctgcccggtggacgccatcgtcggcgccgcacggttgatgcacacggtgatcgccgacgaatgcaccggttgcgacctgtgcctggagccctgtccggtggactgcatcgagatgcgcgagataccggacgacgtgcgccactggaaatggccgcagccgtcgccgcgactgatcgccagcgaccgggagcgagcggcatga

SEQ ID NO: 321899 - DNA, 585 bp, Pseudomonas aeruginosa
atgactgaactcgccctgatcctggtcagcgccatcctggtcaacaactttgtcctggtgcagttcctcggcctgtgcccgttcatgggcgtgtcgcggaagatcgagacggccatcggcctgtccctcgccaccaccttcgtcctgaccctggcggcgatgtgcagccatatcctgcaacgctacgtgctgcgcccgctggacctggagtacctgcgcaccatcggctttatcctggtgatcgcggtggtggtgcagttcaccgagatgctggtgaagaagaccagcccgctgctgtaccgggtgctcggcatcttcctgccgctgatcaccaccaattgcatcgtcctcggcgtcgccctgctcaacgccaacaaggctgaatacggcttcctccaggccactacccagggcttcggcgccgggctgggcttttccctggtgctggtgctgttcgccgccctgcgcgagcgcatcgccatcgccgacgtgccggcgccgttccgcggcgcggccatcggcatgatcaccgccggcctgatgtcgctggcgttcatgggcttcagcgggttggtccggccatga

SEQ ID NO: 321900 - DNA, 438 bp, Pseudomonas aeruginosa
atgaagacagtcgccctgattctcgccagcctcgccctgctggcctgcaccgcggagtccggggtggacttcgacaagaccctgacccacccgaacgggctggtggtggagcgccccgtcggcttcgacgcgcggcgcagcgccgagggcttccgcttcgacgaaggcggcaagctgcgcaacccacgccaactggaggtccagcgccgggacgcgccgcccccgaccgacctggcgagcaggcgcctgggcgacggcgaggcgcgctacaaggtagaggaagacgacggcggctccgcaggcagcgaataccgcctgtgggcagccaagccggcgggcgcgcggtggatcgtggtcagcgccagcgagcagagcgaggatggcgaaccgaccttcgccctggcctgggcgctgctggagcgggccaggttgcagtga

SEQ ID NO: 321901 - DNA, 1227 bp, Pseudomonas aeruginosa
atgaccgccaccagcgacctgatcgagtcactgatttcctatagctgggacgactggcaggtgacccgccaggaagcccgccgggtgatcgccgcgatccgcaacgacaacgtgcccgatgcgaccatcgccgcactcgacaagagcggctcgctgatcaagctgttccagcgggtgggcccgccggaactggcgcgctcgctgatcgccagcatcgccgggcgcaccaccatgcagcgctaccaggcacgcaatgccttgatccgcagcctgatcaacaatcccctgggcacccagaccgacaactggatctacttccccaccatcaccttcttcgacatctgcgccgacctcgccgacgccgctggccgcctgggcttcgccgcggccggcgccaccggggtggccagccaggcgatccagggtccgttcagcggggtcggcgccaccggcgtcaatccgaccgacctgccgtccattgccttcggcgaccagctcaagctgctcaacaaggacccggcgaccgtcaccaagtacagcaacccgctcggcgacctgggcgcctacctgagccagctttcgccgcaagacaagctgaaccaggcacagacgctggtcggccagccgatcagcacgctgttccccgacgcctatccgggcaacccgccgtcgcgggccaaggtcatgtccgcggccgcgcgcaagtacgacctgacgccgcaactgatcggcgcgatcatcctcgccgagcagcgtgaccagacccgcgacgaagacgccaaggactatcaggcggcagtcagcatcaagagcgccaacacctccatcggcctcggccaggtggtggtctccaccgcgatcaagtacgagctgttcaccgacctgctcggccagccggtgcgccgcggcctgtcgcgcaaggcggtcgccaccctgctggcttccgacgaattcaacatcttcgccaccgcccgttacatccgctacgtcgccaacctcgcgtcgcaacaggacctgcgcaagttgccgaagacccgcggcgcatttccctccatcgatctccgcgcctacgccggcaatccgcgcaactggccgcgggacaatgtccgcgcgctggcctcggaatacacctcgcggccctgggacgacaacctgtcgccgggctggccgatgttcgtcgacgatgcctacgccaccttcctcgaccctggaatgaggttcccatga

SEQ ID NO: 321902 - DNA, 801 bp, Pseudomonas aeruginosa
atgaacgcatggaagcttgccgccggcgtcctgctggcggcgctctacggatgctccgccgaacacgccgaaagcgtctccggcaatgccgttttccagggcgagacgggcaaacccggcaccgccctcgcctacgaacaccgcgtcggcatccgccttcccgccgcgcgtatcgacgcgcaactcgccgccagccgcgacgcctgcaacagcgagcgcttcggccagtgcgacgtgctcgccatcgaacaacgcggcggtatcggccattacgccgaactcaccgtgcgcatcgtcccggacggcgtggagaagctggtcgcggccgctgccgagggcggcacgctggaaagccggcagacccgcgccgaggacctggcccaggcggtcgccgacacccgccagcaacgcgagcgcctgcaacgcgagtaccagaccctgcagcaataccaggggcgcaaggacatgagcgtcggcgacctgctggccctggccaaggaaatcgccgcggtggaagcccaactggccgacaacgcccaggccggcgcccagcagcagcggcgcatcgccaccaacctgctgaccctgagcttcagcagcgaggcacagccggacagccgcctcggccagctcgccacggccgccgggcaactgctcgacgaccttgtcgatggcaccatcgccgcgatgaaattcttcgcctacagcctgccgttcctcgtcgtgctgctgccgctgggcctgttgctgcgcggcctgtggcgctggctgcggcggcccggcaagaacgaggcgcgctga

SEQ ID NO: 321903 - DNA, 2034 bp, Pseudomonas aeruginosa
atgtccgaaccacgcaagatcctcgttaccagcgccctcccctacgccaacggttccattcacctgggacacatgctggagtacatccagacggacatgtgggtgcgcttccagaagatgcgtggcaaccaggccgtctacgtctgcgccgacgacgcccacggttcggcgatcatgctccgcgccgagcgcgagggcatcacctccgagcaactgatcgacgccgtgcgcgccgagcacatgggcgacttcgccgacttcctggtggacttcgacaactaccactcgacccactcggaagagaaccgcgagctgtccagcgcgatctacctgaaactgcgcgacgccgggcacatcgacacccgcccggtgacccagtacttcgacccggaaaagcagatgttcctcgccgaccgcttcatcaagggcacctgcccgaagtgcggcaccgccgaccagtacggcgacaactgcgaggcctgcggcgcgacctacgccccgaccgaactgaaggacccgaaatcggcgatctccggcgccaccccggtgctcaaggaatcgctgcactacttcttcaagctgccggacttcgaggccatgctcaagcaatggacccgcagcggcgcccttcaggagtcggtggccaacaagctcgccgaatggctggacagcggcctccagcagtgggacatctcgcgtgacgcgccgtacttcggcttcgagattcccgacgctcccggcaagtacttctacgtctggctggacgcgccgatcggctacatggccagcttcaagaacctctgcgcgcggcgtcccgagctggacttcgacgcgttctggggcaaggactccggcgccgagctgtaccacttcatcggcaaggacatcgtcaacttccacgcgctgttctggccggccatgctcgaaggcgccggctaccgcaagccgaccgcgctgaacgtgcacggctacctgaccgtgaacggccagaagatgtccaagtcgcgcggcaccttcgtcaaggcgcgcacctacctcgaccacctggacccggaatacctgcgctactactacgcgtccaagctcggccgcggcgtcgaggacctcgacctgaacctcgaggacttcgtgcagaaggtcaactccgacctggtcggcaaggtcgtcaacatcgccagccgctgcgccggcttcatccacaagggcaacgccggcgtgctggtcggcgccgatccggcgccggagctgctcgccgccttccgcgaggccgcaccgggcatcgccgaggcctatgaggcccgcgacttcaatcgcgccatgcgcgagatcatggccctcgccgaccgcgccaacgcctggatcgccgaacaggcaccctgggcgctggccaagcaggaaggccagcaggacaaggtccaggccgtctgcggcctgggcatcaacctgttccgccagttggtgatcttcctcaagccggtgctgccgaagctagccgccgccgccgaagccttcctcaacgtcgccccgctgacctgggccgaccaccagaccctgctggccaaccaccagttgaacccgttccagcccctgatgacccgtatcgagcccgcgaaagtagaagccatgatcgaagcctccaaggaagacctcgccgccgcatcccaacccgccggcaatggcgagctggtcaaggaacccatcgccgcggagatcgacttcgacgctttcgccgcggtcgacctgcgcatcgccctgatcgagaagtgcgaattcgtcgaaggcgccgacaagctgctgcgcctgtcgctggacatcggcgacgcgaagcgtaacgtgttctccgggatcaagagcgcgtatcccgacccgagcgccctggaaggccgcctgacgctctatgtggccaacctggcgccgcgcaagatgaagttcggggtgtccgagggcatggtcctggccgccggcccgggtggcgaggagatctacctgctgagtccggacagcggcgccaagccgggccagcgcgtcaagtaa

SEQ ID NO: 321904 - DNA, 1095 bp, Pseudomonas aeruginosa
atgtccgctatcactcgccaaacggtggaagccaccctccgccagtaccaggacccctatctgaaccaggaccccgtcagcgccggctgcctgcgcgaggtggagatccagggcgaccgcgtgcgggtgcgcctggaactggggtacgccgccgggctgttcaggaacggcctggcgcaaaccctgcaaatggccctggaggcgctcgacggcgtcgctcgcgccgaggtccgggtcgactgcgtgatccagccgcacaaggcgcagccgcaggtcgaggtgatgggcaacgtgaagaacatcgtcgcggtggcttccggcaagggtggcgtcggcaagtccaccaccgccgccaacctggccctggccctggcccgcgagggtgcgcgggtgggcatcctcgacgcggacatctacggccccagccagggcatcatgttcggcctgccggaaggcacccggccgaaggtccgcgagcagaagtggttcgagcccctggaggcgcacggggtacaggtgatgtcgatggccttcctcaccgacgacagcacgccggtggtctggcgcgggccgatggtctccggcgccctgatccagctgatcacccagaccgcctgggacaacctcgactacctggtggtggacatgccgccgggcaccggcgacatccagctgaccctggcgcagaaggtgccggtggccggcgcggtgatcgtcaccaccccgcaggacctggcgctgctcgacgcgaagaagggcgtggagatgttccgcaaggtgaacatcccggtgctcggcgtggtggagaacatggcggtgcacatctgctccaactgcggccatgccgagcacctgttcggcgagggcggcggcgagaagctggcggcgcagttcggcgtcgagctgctggcgtccatgccgctgtcgatcgccatccgcacccaggccgacagcggccggccgacggtgatcgccgacccggaaagccaactggcgatgctctaccaggaaatcgcccgccatgtcggcgcgcgcatcgttctcagcgagcgggccagcgtcggcctgccgaacatcagcatcagcgacgactga

SEQ ID NO: 321905 - DNA, 567 bp, Pseudomonas aeruginosa
atgaccatcaaatcggacaagtggattcgccgcatggctcaggagcacggcatgatcgagccgttcgtcgagcgccaggtgcgcggcgcggacgacagccgggtgatttcctacggggtgtccagctacggctacgacgtgcgctgcgccgccgaattcaaggtgttcaccaacatccattcggcggtggtcgatccgaagaacttcgacgagaaaagcttcgtcgacatcaacagcgacgtctgcatcatcccgccgaactccttcgccctggcgcgcaccgtcgagtacttccgcatcccgcgcgacgtcctgaccatctgcctgggcaagagcacctacgcgcgttgcggcatcatcgtcaacgtcaccccgctggagccggagtgggaaggccatgtgaccctcgagttctccaataccaccaacctgccggcgaagatctacgccaacgaaggcgtggcgcagatgctcttcctgcaatccgacgaggcctgcgaagtgtcctataaggaccgtggcggcaaataccagggccagcgcggcgtgaccctgccaaaagcctga

SEQ ID NO: 321906 - DNA, 888 bp, Pseudomonas aeruginosa
atgcggcgcgaaagtctgttggtatcggtttgcaagggcctgcgggtacatgtcgagcgcgttgggcaggatcccgggcgcagcacggtgatgctggtcaacggcgcgatggcgaccaccgcctcgttcgcccggacctgcaagtgcctggccgaacatttcaacgtggtgctgttcgacctgcccttcgccgggcagtcgcgtcagcacaacccgcagcgcgggttgatcaccaaggacgacgaggtggaaatcctcctggcgctgatcgagcgcttcgaggtcaatcacctggtctccgcgtcctggggcggtatctccacgctgctggcgctgtcgcgcaatccgcgcggcatccgcagctcggtggtgatggcattcgcccctggactgaaccaggcgatgctcgactacgtcgggcgggcgcaggcgctgatcgagctggacgacaagtcggcgatcggccatctgctcaacgagaccgtcggcaaatacctgccgccgcgcctgaaagccagcaaccatcagcacatggcttcgctggccaccggcgaatacgagcaggcgcgctttcacatcgaccaggtgctggcgctcaacgatcggggctacctggcttgcctggagcggatccagagccacgtgcatttcatcaacggcagctgggacgaatacaccaccgccgaggacgcccgccagttccgcgactacctgccgcactgcagtttctcgcgggtggagggcaccgggcatttcctcgacctggagtccaagctggccgcggtacgcgtgcaccgcgccctgctcgagcacctgctgaagcaaccggagccgcagcgggcggaacgcgcggcgggattccacgagatggccatcggctacgcctga

SEQ ID NO: 321907 - DNA, 1281 bp, Pseudomonas aeruginosa
atgcacgccatcctcatcgccatcggctcggccggcgacgtatttcccttcatcggcctggcccggaccctgaaattgcgcgggcaccgcgtgagcctctgcaccatcccggtgtttcgcgacgcggtggagcagcacggcatcgcgttcgtcccgctgagcgacgaactgacctaccgccggaccatgggcgatccgcgcctgtgggaccccaagacgtccttcggcgtgctctggcaaaccatcgccgggatgatcgagccggtctacgagtacgtctcggcgcagcgccatgacgacatcgtggtggtcggctcgctctgggcgctgggcgcacgcatcgctcacgagaagtacgggattccctacctgtccgcgcaggtctcgccatcgaccttgttgtcggcgcacctgccgccggtacaccccaagttcaacgtgcccgagcagatgccgctggcgatgcgcaagctgctctggcgctgcatcgagcgcttcaagctggatcgcacctgcgcgccggatatcaacgcggtgcgccgcaaggtcggcctggagacgccggtgaagcgcatcttcacccaatggatgcattcgccgcagggcgtggtctgcctgttcccggcctggttcgcgccgccccagcaggattggccgcaacccctgcacatgaccggcttcccgctgttcgacggcagtatcccggggaccccgctcgacgacgaactgcaacgctttctcgatcagggcagccggccgctggtgttcacccagggctcgaccgaacacctgcagggcgacttctacgccatggccctgcgcgcgctggaacgcctcggcgcgcgtgggatcttcctcaccggcgccggccaggaaccgctgcgcggcttgccgaatcacgtgctgcagcgcgcctacgcgccactgggagccttgctgccatcgtgcgccgggctggtccatccgggcggtatcggcgccatgagcctggccttggcggcgggggtgccgcaggtgctgctgccctgcgcccacgaccagttcgacaatgccgaacggctggtccggctcggctgcgggatgcgcctgggcgtgccattgcgcgagcaggagttgcgcggggcgctgtggcgcttgctcgaggacccggccatggcggcggcctgtcggcgtttcatggaattgtcacaaccgcacagtatcgcttgcggtaaagcggcccaggtggtcgaacgttgtcatagggagggggatgcgcgatggctgaaggctgcgtcctga

SEQ ID NO: 321908 - DNA, 726 bp, Pseudomonas aeruginosa
atgaggaatgacggaggctttttgctgtggtgggacggtttgcgtagcgagatgcagccgatccacgacagccagggcgtgttcgccgtcctggaaaaggaagtgcggcgcctgggcttcgattactacgcctatggcgtgcgccatacgattcccttcacccggccgaagaccgaggtccatggcacctatcccaaggcctggctggagcgataccagatgcagaactacggggccgtggatccggcgatcctcaacggcctgcgctcctcggaaatggtggtctggagcgacagcctgttcgaccagagccggatgctctggaacgaggctcgcgattggggcctctgtgtcggcgcgaccttgccgatccgcgcgccgaacaatttgctcagcgtgctttccgtggcgcgcgaccagcagaacatctccagcttcgagcgcgaggaaatccgcctgcggctgcgttgcatgatcgagttgctgacccagaagctgaccgacttggagcatccgatgctgatgtccaacccggtctgcctgagccatcgcgaacgcgagatcctgcaatggaccgccgacggcaagagctccggggaaatcgccatcatcctgagcatttccgagagcacggtgaacttccaccacaagaacatccagaagaagttcgacgcgccgaacaagacgctggctgccgcctacgccgcggcgctgggcctcatctga

SEQ ID NO: 321909 - DNA, 606 bp, Pseudomonas aeruginosa
atgatcgaattgctctctgaatcgctggaagggctttccgccgccatgatcgccgagctgggacgctaccggcatcaggtcttcatcgagaagctgggctgggacgtggtctccacctccagggtccgcgaccaggagttcgaccagttcgaccatccgcaaacccgctacatcgtcgccatgggccgccagggtatctgcggttgtgcccgcctgttgccgacgaccgacgcctacctgctcaaggaagtcttcgcctacctgtgcagcgaaaccccgcccagcgatccgtcggtatgggagctttcgcgctacgccgccagcgcggcggacgatccgcaactggcgatgaagatattctggtccagcctgcaatgcgcctggtacctgggcgccagttcggtggtggcggtgaccaccacggccatggagcgctatttcgttcgcaacggcgtgatcctccagcgcctcggcccgccgcagaaggtcaagggcgagacgctggtcgcgatcagcttcccggcctaccaggagcgcggcctggagatgctgctgcgctaccacccggaatggctgcagggcgtaccgctgtcgatggcggtgtga

SEQ ID NO: 321910 - DNA, 807 bp, Pseudomonas aeruginosa
atgccgaagtcattccgccatctcgtccaggccctggcctgccttgcgctgctggccagcgccagcctccaggcgcaggagagccgcctcgaccgcatcctcgaaagcggcgtgctgcgcgtcgccaccactggcgactacaagcccttcagctaccgcacggaagagggcggttacgccggtttcgacgtggacatggcgcagcgcctggccgagagcctgggggccaagctggtagtggtgccgaccagttggccgaacctgatgcgcgatttcgccgacgaccgcttcgacatcgccatgagcggcatctcgatcaacctggagcgccagcgccaggcgtatttctcgattccctacctgcgcgacggcaagacgccgatcaccctctgtagcgaagaagcgcgtttccagaccctggagcagatcgaccagccgggcgtgacggccatcgtcaaccccggcggcaccaacgagaagttcgcccgggcgaacctgaagaaggcccggatcctggtgcatccggacaacgtgacgatcttccagcagatcgtcgacggcaaggccgacctgatgatgaccgacgccatcgaggcccgcctgcagtcgcgtctgcacccggaactctgcgccgtgcatccgcagcaacccttcgacttcgccgagaaggcctacctgctgccgcgcgacgaggccttcaagcgctacgtcgaccagtggctgcacatcgccgagcagagcggcttgttgcgccagcgcatggagcactggctcgaataccgctggcccaccgcgcacggcaagtaa

SEQ ID NO: 321911 - DNA, 861 bp, Pseudomonas aeruginosa
atgcgttatctactgttcgtcaccgtcctctgggcgttctccttcaacctgatcggcgagtacctcgccggccaggtcgacagctacttcgccgtgcttacccgggtccttctcgctggcctggtgtttctcccgctgacccgctggcgcggcgtcgaaccgcgtttcgtcggtggggtgatgctggtcggcgcgctgcagttcggcatcacctacgtctgcctgtacctgagcttcaacgtgctgacggtgcccgaggtgctgctgttcaccgtgctgacgccggtccacgtggccctgttcgacgacctgctcaaccgccgcttcaacttctgggccctggccgccgcgctggtggcggtgctgggcgcggcgatcatccgctacgacgggatcaccggcgagttcctccagggcttcctgctgctgcaactggccaacgccaccttcgccgccggccaggtgctgtacaagcgcctggtgcgcaagtacccgtccgagctgccgcagcgccagcgcttcggttatttcttcgttggcgcgctgctggtggcgttgcctgcctggctgctgttcggcgatccgcagcgcctgccggccggcgagctgcaatggggcgtactggtatggatggggctgctggccaccgccctcggccagttctggtggaacaagggcgccaccgaggtggacgccggtaccctggcggtgatgaacaacctgcacgtgccggtcgggttgctgctcaacctgctgatctggaaccagcacgcagacctgccgcgcctggccctgggcggcgcggtgatcgtcgcttcgctgtgggtcaaccggctcggccggcgcgaggtgcgtgcatga

SEQ ID NO: 321912 - DNA, 900 bp, Pseudomonas aeruginosa
atgaggatttccggacagggcgtgctgctgtcgctggccgcctcggtgctgttcgttaccctgccgggctacgtccacctgctggagccgctggacagcctgcaggtggtggcgcatcgggtggtctggtcgatcccgatggtattcctgctggtcgtcgccacccgccagtggccgaccctgcgcgccgcctggcgccggctgttcgccgagccctggctgctggcctgcttcccgctgaccgcggcgatgatgctgctgcaatggggcatcttcatctgggcgccgttggccgggaagacccttgaactgtcgctgggctacttcctcctgccgctggcgatggtgctggtggggcgggtgttctacggcgagcgcctgacgccgctgcaggctatcgccgtggcctgcgcgctggccggggtgctccacgagttctggctgacccgcgcgttctcctgggtctccctggtcaccgcgctgggctatcccccgtacttcatgctgcggcgcaggatgggcgtggacgcgctgtccgggttcgtcttcgagatgctcttcctgctgccgctggcgttggccgcgctgtactggctgggcgacgagagccaggccttccgcgaggcgccgcgcctgtggctgctgctgccgatgctggggctgatcagcgcgctggccttcggcgcgatgatggcttccagccggctgctgccgatggggctgttcgggattctcagctacgtcgaaccggtgctgctgttcctggtggcggtactgttcctcggcgaggcgttccgtcccgagcagctatggacctacgcgccgatctggctggcggtgctgttgaccggctgggacagcgcgcgcctgctgaggaaacaggcgcggcggggcatctga

SEQ ID NO: 321913 - DNA, 597 bp, Pseudomonas aeruginosa
atgcgttcaccctttttgacatgcctgtctgtaggcttcgcggcccttctggccgccctctcgacgcccagcctggcttccaaccaggtcacccacaccttcaagccgtcgaagaattccaccctgtcgcccagccgggtcgtcagcacccgccagtccgccaaccgctcggtggtcgcggccgccgcttccgaagtcaccgaccgcgccttcagcatgatcggcaccccctaccgctggggcggcaccacgccgaagaaaggcttcgattgcagcggcctggtcaactatgtgttccaggacgtcgatgacgtcgacctgccgcggaccgcgcgcgccatctacaacatggacaacaacaaggtctcccgcggcaagctgcaaccgggcgacctggtgttcttccggatccgcagccgcagcgtcgaccacgtcggcatctacgtcggcaacgaccgcttcgtgcacgcgccgcggcgcggcaagaaggtccgcgtctccgacctcaacagcagctactggaaacgccactacctggccggcaagcgcatcctgccgaccaccctcgcccaggtcgaaagcacccgcaagcgctga

SEQ ID NO: 321914 - DNA, 1695 bp, Pseudomonas aeruginosa
atgaccgaaacagccaagcgtcccttgtacgttccccatgccggcccatcgctgctggagatgccgctgctgaacaaaggcagcgcgttcagtacccaggaacgcatcgatttcaacctgcagggcctgctgccgcacaacatcgagaccatcgaggagcagaccgagcgcgcctacagccagtacaacctgtgcaacaccgatctggaccgccacatcttcctgcgctcgatccaggacaacaacgagaccctgttcttccgcctgctcgaggagcacctggaagaaatgatgccgatcatctacacccccacggtcggccaggcctgccaggagttctcgaagatctaccggacccaccgcggcctgttcatctcctacccggaccgcgagcggatcgacgacatcctgcgcagcgccaccaagaacaacgtgaagatcgtggtggtcaccgacagcgagcggatcctcggcctcggcgaccagggcatcggcgggatgggcatcccgatcggcaagctgtcgctgtacaccgcctgcggcggtatcagcccggcctacaccctgccggtggtgctggacgtcggcaccaacaacccggacctgctcaacgacccgatgtacatgggctggcgccacgagcgggtgagcggggcgcagtacgaggagttcgtcgacctgttcatccaggcgatcaagcgccgctggcccaacgtcctgctgcaattcgaggacttcgcccagaccaatgccatgccgttgctggagcgctacaaggacgagctgtgctgcttcaacgacgacatccagggcaccgccgcggtggccgtgggcaccctgctggcggcttgcaaggccaagggcgagaagctcagcgagcagaccgtgaccttcgtcggcgccggctccgccggttgcggcatcgccgaacagatcatcgccgccatgcaactggagggcctggacgaggcccaggcgcgtcggcgcatcttcatggtcgaccgctggggcctgctcaccgacgacatgagcaacctgctcgacttccagcaccgcctggcgcagaagcgcgccgatctcggtgcctggggcggccagcagggcgacgacctggcgttgctggaagtgatccgcaatgcccggccgacggtgctgatcggcgtctccgggcagcgcgggctgttttccgaagaggtcatccgtgagctgcacagccattgcaagcagccgctggtgatgccgctgtccaacccgacctcgcgggtcgaggcgactccgcaggaaatcctcaactggaccgacggccaggcgctggtcgccaccggtagcccgttccaaccggtgcaggtgggcgacaagcggattcccatcgcccagtgcaacaacgcctatatcttccccggcatcggcctgggggtgatcgccgcgcgggccaaccgggtcaccgaaggcatgctgatggccgcggccaacgccctggccaactgctcgccgatcgttacccagggcgagggcgccgtgttgccggcgctgggcgacatccgcgaggtcagcaagcgcatcgccgtcgccgtggccaagcaggcccaggccgagggcaaggccctgcataccagcgacgaggtactgaacgacgccatcgaggcgaacttctggttcccgcgctaccgtgcctaccgccggacttcgttctga

SEQ ID NO: 321915 - DNA, 459 bp, Pseudomonas aeruginosa
atgaccgacaacctgctgagcatttccgccgcctgcctgttcgacgaccagggcaacctgttgctggtgcgcaagcgcggcacccaggccttcatgctcccgggcggcaagcgcgagccgggcgaaacgcccctcgccgcgctacagcgcgaactgctggaggaactgcgcctgccgatgggcgcctcgaccttcgagcacctcggcagcttccaggcgccggcggccaacgaggcgaacacccgcgtcgatgccgatatctacgtcgcccgcttgccccacgccgtctgtgcgcaggcggagctggaggaactggcctggctggtccccggccaagcgcagccggacaatctcgcgccgctgctgcgcgatcatgtcctgccggccctggcgcggcgcgcggcggaaaacccggaaacccaggccgaacaccggacgcgccccgatcatgtgcgctga

SEQ ID NO: 321916 - DNA, 543 bp, Pseudomonas aeruginosa
atgaaaccgcacctgatctactacgtcgccaccagcctggacggcttcatcgcccgtcccgacggtagcgtcgactggctcgaccgtttcgccgagggcggcaacgaccatggctacaacggcttctaccagggcatcgacgggctgctgatgggccgcggcacctacgatatcgtgcgcggcttcggcgactggccgtatccgggcaagccctgccaggtgctcacccgcaatccccgggagagcgcggtggaaggcgtcgagttgcgccatgacacgccccaggaaggcctcgcacgcctcggcgaacagggctgccggcgggtctggctggccggcggcggcagcctcgccggtagttgcctggcggccgggctgctcgacgaggtgatcgtcagcgtcattccgcagctgctcggcgccggcatcccgctgttcgccggcggccgcgagcggcgcctgcaactgctggaacaacatggctacaacagcggcatcgtacagatgcgctaccaggtgatcgccgaggacgacccgcaatga

SEQ ID NO: 321917 - DNA, 1329 bp, Pseudomonas aeruginosa
atggactccacatcccttctcgaccagctctccgggtactggtcggcgctcgaccaacaccctatcctgcacgccggcctggccttcggcctgctgctggtgggcgccctgatcctcggccgggtggcccgctacatcgtcctctacgccgccaacctgctcgcccgccagcccgcgctgcactggctcggcgacctgatccgcaacaaggtgttccagcgcctggcgcagaccacgccctcgctgctggtgcaattcggcctgccatggatcccggagatgccggacaaggccgcgcacttcctcggcaacctggcactggccttcaccgtgctgttcctgatcctcgccctcaccgcgctgctgaatgccctgctggacatctacgcgcgtaccgagcacgcccgcacccgctcgatcaagggctacgtgcaactggcgaagatcgccgtgttcgtgttcggcgcgatcatcatcgtctcgatcatcatcgaccgctcgccgctcctgctgctgtccggcctcggcgcgatgtcggcggtcctcctgctggtctacaaggacaccctgatgtccttcgtcgccagcgtgcagctcaccagcaacgacatgctgcgagtcggcgactggatcgagatgccgcaggtcggcgccgacggcgacgtggtggacatcaccctgtacaccgtgaaggtgcagaacttcgacaagaccatcgtctcggtgccgacctggcgcctgatgtcggagtcgttcaagaactggcgcggcatgcagcagtccggcggacggcggatcaagcgggcgatctacgtcgactccagccaggtgcgtttcctcgacgagaaggaagagcggcgcctgagccaggtgcgcctgctcaccgaatacatggcccgcaagcagaccgagttgcaggagtggaatgccgccaacggcggggtcgccccgctggccgccaaccgccgccggctgaccaacatcggtacgttccgcgcctacgccctcgcctacctgcagaaccatccggacatccatccgcacatgacctgcatggtccgccagttgcagccgaccgcccagggcatcccgctggagatatactgcttcacccgcaccaccgcctgggtcgactacgagcgcatccagggcgacgtgttcgactacctgctggcggtgatgccggagttcggcctcggcgcctaccagcagcccagcggccaggacctgcgccaggggctgcagggcatgctcgaagggcgtgacgccgaggcccgttcgttcgaggcgttggccgcaccgagccgcagcgacgaagccactgtctga

SEQ ID NO: 321918 - DNA, 1368 bp, Pseudomonas aeruginosa
atgcccgacgcgcccgcatccgccgccgaacgcctcgaacggctgccgctgagtccgtatcaccgactggtcttcgtgatcatcgcgctggcgttcttcttcgactcgatggacctggcgatgatgaccttcctgctcggctcgatcaaagccgagttcgggctcgactcggcgcaggccgggctgctggccagctcgagcttcttcggcatggtgatcggcgcggccctgtcgggcatgctcgccgaccgcttcgggcgcaagccggtattccaggccagcatcgtgctctggggcctggccagctacctgtgctccaccgccggcgacctcgacagcctgaccttctaccgggtattgctggggatcggcatggggatggagtttcccatcgcccagtcgctgctgtcggagatgatcccggccagccgccgcggcaagtacattgcgctgatggacggcttctggccgctgggcttcgtcgctgccggctgcctgtcctacttcctgctgccgctgaccggctggcgcagcattttcctggtgctggcgctgccggcggtgttcgtcctcgccatccgcttcctgattcccgagtcgccgcgctggctggagcaggccggccggcgcgaacaggcggaccgggtattgcgcgacatagaagcacgggtgatgcgttcgctgggcctgaccgagctgccgccgccgctgcgccagccgcagcgggaacgcagccgtccgggcttcttcagcgccttcgccgaactctggtcgccagcctaccggcgccgcaccctgaccgtctggggcctgtggttcttcgccctgctcggtttctacggcctgacctcctggctcagcgcgctgctccagcaatccggcttcgccgtcacccagtcggtgtactacacggtgctgatttcgctggccgggatacccggcttcctctgcgcggcctggctggtggaaagctggggccgcaagccgagctgcgtgctgatgctcctcggcggcggcgcgatggcctacgcctacggccagaccgcggtgttcggcggcagcctggcgctgctgatcggcttcggcctggccatgcagttcttcctgttcggcatgtgggcggtgctctacacctataccccggaactctatccgacctccgcgcgcgccaccggctcgggcttcgcctcggcggtcgggcggatcggctcgctgctcggcccgctggtcaccgggctggtcctgccgctcaccggccagggtggggtgttcaccctcggcgccctctgtttcggcgtcgccgccctggtggtctgggccttcggcatcgagacccgcgggcgcaccctggaggagcttgccggctga

SEQ ID NO: 321919 - DNA, 1341 bp, Pseudomonas aeruginosa
atgccgaggtttcccttgttcagccaatttcccctccacgaacgcctgctgaaggcactggaaagcctgtccttcagcgagccgacgccggtccaggccgcggccattcccaaggcgctggaggggcacgacctgcgggtcacggcgcagaccggcagcggcaagaccgcggccttcctgctgccgctgctgcaccgcctgctggccgaggacaagccgcgctccctggcgcgcgcgctgatcctcctgccgacccgcgagctggcccagcagaccctcaaggaagtcgagcgcttcgcccagttcaccttcatcaaggcctgcctgatcactggcggcgaggacttcaaggtgcagggcgcgcgcctgcgcaagaacccggagatcatcatcggcacccccggccgcctgctcgagcagcgcaacgccggcaacctgccgttgcaggacatcgaggtgctggtgctggacgaggccgaccgcatgctcgacatgggcttcgccgacgacgtgctggccctggccaatgcctgcccggccgagcgccagaccctgctgttctccgccacccacagcggcgccggattgaacaaggtgatcgccgaggtgctgcgcgagccgcaagtgctgcgcctgaaccaggtcggcgagctgaacgagaacgtccgccagcaggtcatcaccgccgacgacgtggcgcacaaggaacagttgctgcaatggctgctgagcaacgagacctacaccaaggccatcgtcttcaccaacacccgggtctccgccgatcgcctgaccgggcggctgatcgccaaccagcacaaggtcttcgtcctgcatggcgagaaggaccagaaggaccgcaagctggccatcgagcgcctgaagcagggcgcggtgaagatcctcgtcgccaccgacgtcgccgcacgcggcctggacgtcgaaggcctggacctggtgatcaactttgacatgccgcgcagcggcgacgagtacgtgcaccgcatcggccggaccggtcgcgccggcgccgagggcctggcgatctcgctgatctgccatggcgactggaacctgatgtcgagcgtcgaacgctacctgaagcagaacttcgaacgacgcaacatcaaggaactgaaggccgcctaccaggggccgaagaaactcaaggcgtcgggcaaggccgccggcagcaagaagaaaaagcaggacaggaagggcgccgccgccaagcccgcggccaagcgcaagcccgccgcgcggccgaaggccgggccgtcggcggtggtcagcgccgacggcatggcgccgctcaagcgcaagaagccgacggcggagtga

SEQ ID NO: 321920 - DNA, 1716 bp, Pseudomonas aeruginosa
atgctccagtccgtttcgcccaagcacgacctgcccctcaaacccgaaggccaagcggccaagccagaacgcaccggcacctgggcgccgttctcgatccaggccttccgcatcatctggatctgcaacctgttcgccaacctcggcacctgggcccagtcggtggccgccgcctgggtggtcaccgacgcccacgccagcccgctgatggtggcgatgatccaggtcgccgcggcgctgccgctggtgctgctgtcgatcctctccggggtcatcgccgacaaccacgaccggcgcaagatcatgctctggggactcagcttcgagatgaccggggcgatgttcgccaccctgctggccttcctcggctacctcgacccggtgctgctgatcatctccatcctctggatctccctcggcggctcggtgaccatcccggcctggcaggcggcggtcaacgagcaggtgccggcgcgcatggtcagcgacgcggtgctgctcaacagcgtcaactacaacgtcgcccgcgccgccggcccggccctcggcggcctgttgctgagcgcggtgggaccggcctgggtgttcctgttcaacagcttctgctacatggccctgatctgggcgatctggcagtggcggcgcgacgtgcccaagcgcagcctgccgccggaaggcatcctcgaaggcgtcaccgcggcgctgcgcttcacccagtactcaaccgtcacccgcctggtgatgatgcgctccttcgccttcggcctctccgccagcgcggtctgggccctgctgccgctgctggcgcaccgcaacccggacggcgacgcggcgatctacggctacatgctcggcgccctcggcctcggcgcgatcctcggcagcacccaggtctcacgcctgcgccagcggatcggcagcagccggctgatcagtctggccggcttcaccctggcgctgatcctgctgaccctcggcctggtggacaacctctgggtcctgttcccggtgctgatcctcggtggcggctgctggatcggcgccctcgccacctacaactcggcggtgcagatcctcgtccccgactggatcaaggcgcgcgccctggcgttgtaccagaccgcgctgtacggtggcctggcgctgggttcgttcctctggggccatctcgccgagaccatgaccgtgcacggtgcgctgctggccgccggctgcctgctgctggcctcggtgatcctgctatacaactcgcgcctgccggaaatggacgcagccagtatttcccgcgcgccggcgagcatgcccgggcagccgagcttcgtcttcaacacgcggcggggcatggtgctggtctccatcgaataccggattcccgccgagcgcacccgcgacttcgttcgcgccgcccagccgctgcgccgcctgcgcctgcgcaacggcgcggagcgctggtcgctgttccgcgacgtgagcaacccggaggtctggcaggaactgttcctggtggacaactggatccagcacctgcgcatgctcgaccgcatgaccctggccgacaagatcgtcatcgacaacgtcaccgccctgcatgccggcgacggtccgccgcagatccgccattgcgtgagctacgaggccagcagctacgatacgccgctggtgaagagcgccacgccgccggccaacgacgaggcgggcgcgacggcggggagctga

SEQ ID NO: 321921 - DNA, 1326 bp, Pseudomonas aeruginosa
atgaagttgctgttgcgttgcctgctgctgggggcgtgggtcgtctcgccgagcctgtgggcctggtccaaccatacggtgggcagctacctggcattacgcgagctggcggccatccgcgaggcgccggaagtcgaggtggagccgctggaggcgttcctcgccgccgagcgcggcggactggccgccctgctggacgagcaggaggcctacgcccgagcgcatatcggtaactacccggcgcgtccggacgccctgcgcttcgccgccgagggcgaggccggcgacttgcgccaggcgttcctcgcggcgctgcgggtcaacccggagatccgcctggcgctggcgatccagccgcttcccgggcaggaccagccgcagcgcccgcacctcaagccacaggaggtgctggtgttccagaacctctcgccgtggaccgcctggcgtttcatccgcctggagcccggcgagcgagtcgcgcccctggcagtgctggccaccgccgccgacgaaccggactacggccacgacatcaacctgttcagcgacaaccccggcgaagccggccagcgctacggcttcggcacccagccattcggcgacccgcgcttcgagttcagctcccaggcgccgttccacatgggcttctaccacgaggcggcggtgatctacagcggcgcgccgttcctcgcccgggcctggccggaatggcgtgcctaccagtacttcggcctgtcccgcttcgccttcgccaacggtcatccttactggggctaccggttccttggctggggcatgcactacatccaggacatcacccagccctaccactccacgccgctgcccggtgccagcctggcggcgatgctacagatggagggcaaggcattgctcggctacccggaggaaaagcaggcggccatcgagcgtgtcgcgaaccgccataccgcggtggagaaataccagttcgactggctgcgccaactgctccgcgacggccgcccgcagccgatgctcgacgcctacgccgacacccgccgcgacggtgcctatccggcctattcgccgacctacttgcgcgaggtggtggccgccgagtcgaacgcccacgccgcggccttcgacgccgccatcggcgaatggctggccgcccgcccggcctccgccgcgcaggacttcagcgagagcaaccagccacgccccgaggcccacgacaatgcggtgctgaacgcgcaactgatcgagctgatcgggcatttcggcgcgcatagccggaacatcgccagggcggcgttggagacggaggagggtggggcgaaggagtga

SEQ ID NO: 321922 - DNA, 231 bp, Pseudomonas aeruginosa
atgctgatcccccacgacctgctcgaagccgacaccctgaacaacctgctggaagacttcgtcacccgcgaaggcaccgacaatggcgacgagaccccgctggacgtgcgtgtagaacgcgcccggcatgccttgcggcggggcgaggcggtgatcctgttcgacccggagagccagcagtgccagttgatgttgcgcagcgaggtgcctgcggagctgttgcgcgactaa

SEQ ID NO: 321923 - DNA, 2757 bp, Pseudomonas aeruginosa
atgtctcgactctgcctggtcctgctgttgctctgctgcgcgctgccggcccgggcgcagccgcccgcaccgctggacggagaggacctgcgcctgtccctgggcgagtacgccgagtactaccgcgacgccggcgggaaggcgcgcctgggcgacatcctcgccttgccggcgcaggccttcgccgccctgcgcggcgaccacgcgaacttcggcaagaacgccgcagcctggtggttcagggtgcgcctggacaaccgcaacggcaccgacctggccggtttcctggagatcaactacccgctgctggacgacctcaaggtctacctgctgaccgccgatgggcgcatcgaacagcaggagagcggcgacctgttcgccttctcccagcgcccggtgcaagtgcgcaacttctggttcccgctgcgactgccgcccggcgagagcaccctgctgctgcgcgtgcagagcaccagcaccgtctacgtgccgctgtacttcagcacctacgcggccagcgcggccagccaggaaaccctgatgggcttcaacggggccttctacggggtgctgttcgggttgttctgctacaacctgttcctcttcgtctcgctacgcgaggccacctatgcctggtacctgctgtacaacctcagcctcggcctgttttccgccagcttcgacggcctgctgttcaagctgctgcccggacacgtggcgctggagtcggccggcatctacctgctgatgtacctgagctgcctggtgtcgatccagttcagccgcggctacctctacacccgccgcgacttcccgcgcctcgaccgcttcctccgcggcctgctgctggcctgcgtggtcctgttggccagcgagccgctggtggggctgcgcgcctggaacgtcctcgccagcctgacggtgatgctggtctccctcagcctgctgctggccggcgtccacgtctggcgccagggcctgcgctacggcctctactacatcctggcctggggcgcgctgctgctgtcgttcctggtcaccaccgccgcctcgctgggcttcgaactgttcggcctgttcggcagcagcgtggtcaagatcggcatgaccgtggaactggtgaccctgtccatcggcctcgccgaccgcatcaatgcgctcaaggaggaaggcttccgctcgcgccaggcggccgagcaggcgcgggtggagaacgaggcgaagagccgcttcctggcgaagatgagccatgagattcgcaccccgctgaacggcgtgctgggcatgctgcaactgctccgcgacaccccgctggaccgcggccaggcggcctacgtggagaccatcgccagctccggcagcgcgctgatgtcggtgatcaacgatatcctcgactacgctcgcatcgagtccggcaagctgcacctggagcgcatcgacttcgacttggaggaactgctctccgacaccctggcgctgttcagcgcccaggccgtggaaaaacgcctgcgcctgcatctcggcctggacaggggcgtgccgcgccgcctcaacggcgacccgacgcggttgcgccaggtactgatgaacctgctcagcaatgccctcaagttcaccgccgaaggccatgtcgccgtgcgcgtgcagcggcgcttcgacgagggcggacacgagcgcctgctgtacagcgtcagcgacagcggcatcgggatatccgcccaggcgcagaagaccctgttcgaatccttctcccaggccgactccagcaccacccgccgctacggcggcagcggcctgggcctggcgatcagccgggagctggtgcagatgatgggcgggcgcatcgaggtgagcagcgagccgggcaagggcacccggttcagcgtcgacctgccgctcagccccgccctcgacgccggcgaagcggacgaactggcgcaactgctgcaacaccgcccggccctgctggccagcgaggacaacctgaccctggactgcctgcaggcattgctggagcgttggggactgcgggtcgaacgctgcctgcagccgagacggctgaacgcctacctggaggacttcagcgcaccgcccctgctggtcctggcggcgccctggccggggccgccgtcgatctggctggacaccctctatgcgcaactggagcaaggccagcgcatcctcctgctatgcccgccgcagcactgccaggacctgccgccgcacgaaggcctgcgcctgctggccctggcccagccggtggcggtgaaggccctgcgcgaagccctgctggaactgtaccgggagcggcgccgacagccagggcggagcagcgaggcggccccggacgaacgcccggacgccccatgcatcctggtcgccgaggacaacccggtgaaccagctggtggtgcgcggcttcctcgccaagcgcggctacgcggtgcgcctggccggcaacggacggctcgcgctggacgagtacctgcgcgatccgaacggcatccagttgatcctgatggatggcgagatgccggaaatggacggcttcgaggcgacccgcctgatccgccgggaggagcgtgcccagggctggccgcgcgtaccgatcgttgccctgaccgcgcacatcctcgacgaacaccgccgggccggaatcgaggccggcatggacgcctacctcggcaagccggtggaccgggcggaactctatgccaccctcgaacgcctgctcggccagccttcgcgacaggcatga

SEQ ID NO: 321924 - DNA, 1197 bp, Pseudomonas aeruginosa
atgacccctctgccacaaccggacctcaactacctgcaacgggtgctgctggagatgctcgccatccccagccccaccggcttcaccgataccatcgtgcgctatgtcgccgagcagctcgacgaacttggcgtgcccttcgagatgactcgccggggaaccatccgggcgaccctccagggccgcctgaatacccccgaccgggcggtttccgcgcacctcgacacgatcggcgcgctggtccgcgagatcaagcccaacggccgcctcggcctggccccggtaggctgctggtcgagccgcttcgccgagggtagccgggtcacggtgttcaccgaacagggcgtgttccgtggcagcgtgctgccgctgctggcttcgggccacgccttcaataccgaggtggacaacctgaagatcagttgggacaacatcgagctgcgtctcgacgcctataccgccagtcgcgccgacagcgagagcctgggcatctcggtgggtgactacgtggccttcgatccgctgccggagttcaccgagagcggccatatcagcgcccgccacctggacgacaaggccggggtcgcggcgctgctggcggcgctgaaggcggtcaaggaaagcggccaggagccgccgatcgactgccacccgctgttcaccatcaccgaggaagtcggctccggcgccgccggcgccctgccctgggacgtcagcgagttcgtcggcatcgacatcgccccggtggccgaaggccagaattccaacgagcacagcgtcagcgtggccatgcaggactccggcgggccctacgacttccatctgtcgcggcacctgctgcggctcggcgagcgccacgacatcgccctgcgccgcgacctgttccgctactaccacagcgacgcgcagtcggcgatcgccgccggccacgacacccgcgccgcgctgctggcgttcggctgcgacgccacccacggctacgagcgcacgcacatcgacagtctcgccgcgctgagccggctgctcaccgcctacatcctcagcccgccggtcttcgccagcgacgccaagccccgggaaacctcgctggaacgcttcaacaagcagctcgagcatccggtgcacatggaaagctgcacccacgtcccgccggtggacgaagtgctcgacagcagcaacaacagcgacaaggactga

SEQ ID NO: 321925 - DNA, 1758 bp, Pseudomonas aeruginosa
atgaaaggccacttgcatctgcctcacccgcacaaccagcgcctgcaacgtatccaggcgcccacctacgaacgcctccaggcgcgtctcgccgaagatcacagcgagcccaccgagaaaccgctgagcatccactgcggctggggccgcctgctgatcgggcagacctacccggacgccgaggaactggcccgcgacctgttgcaggaagcccccggcgaacgcgacatcgcgctctacgtggcggcgccgcagcaggtcctggcccacgccccgcagcagctcttcctcgatccctcggataccctgcgcctgtggttcaccgactaccgcccggcacgccgtccgccacgcggtttccgcatccgccgggtgcataccgaggaggactgggcggcgatcaaccgcctgtacctggcgcgcggcatgcttccggtgcagaccgagcgcctcagcccgcgccaccagggcgggccgatctactggctggccgaggacgccgacactggcgtcgcggtaggcacggtgatgggcctcaaccacgccaaggcgttccaggatccggagggcggctccagcctctggtgcctggcggtggacccgcaatgcagccggccgggcgtcggcgaggcgctggtacggcacctggtcgagcacttcatgagccgcgaactggcttacctcgacctctcggtgctgcacaacaaccagcaggccaaggcgctctaccgcaagctcggcttccgcgaactggcgaccttcaccatcaagcgcaagaacggcatcaaccagtcgctgttcctcggccccggcccggaggaagacctcaacccctacgcccggatcatcgtcgacgaagcccaccggcgcggcatcgaggtgcgcgtcgacgacgccgagggcggcctgttcaccctgacccagggcggccggcagatccgctgccgtgaatcgctctccgacctgaccacggcggtaagcatgaccctctgccaggacaaggtcctcacccaccgcgccctgcagcacgccggcctgcgccagccacagcagcgcctggccggcagcgcggaggaaaacgccgcgttcctcgccgagcacggttcgctggtggtcaagccggtggacggcgagcagggccagggcgtggcggtggacctgcgcaccgcggacgaggtcgaggaggccatcgaggccgcccgccatttcgattcgcgcgtgctgctggagagctaccacgccggccacgacctgcgcgtgctggtgattggctacgaggtggtggccgccgccatccgtcgtcccgccgcggtgatcggcgacggccggcacagcatccgcgagctgatcgaggcgcagagccgccggcgccaggccgccaccggcggggaaagccgcatcccgctcgaccacgagaccgagcgcaccctgcgggccgccggctatggctacgacgacgtgttgcccagcggcgaacacctggccgtgcggcgcaccgccaacctgcacaccggcggcatcctcgaggacgtcaccgacgccctccatccggccctccgcgaggccgcgatccaggccgcgcgggccctggaaataccggtggtgggcctggacttcctggtcgaggctgccgaccagcccgactacgtgatcatcgaagccaacgagcgcgccggcctggccaaccacgagccgcagccgaccgccgaacgcttcgtcgatcttctcttccccctcagccgcgaggtgccttcatga

SEQ ID NO: 321926 - DNA, 1770 bp, Pseudomonas aeruginosa
atgtgcggcatatcaggagagtttcgtttcgacaaccaggcagccgacctcgcagcggtcgaacgcatcacccaccacctggcccctcgcggccccgacgcctggggcttccacgcccagggtccgatcgccctcggacatcgacggctgaagatcatggacctggcggaagcttccggccaaccgatgatcgatcccgatctcggcctggccatggtgttcaatggcgccatctacaactaccccgaactgcgtggcgaactggaaagccttggctatcggttcttctccggcggcgacaccgaagttctcttgaaggggtaccatgcctggggcgccgatttattgccccggctcaatgggatgttcgccttcgccgtctgggagcgcgatcgccagcggctgttcctggcccgtgaccgactcggcatcaagccgctctactacagcctcgaccgctcgcgcctacgcttcgcctcgagcctgccggccctgctcaagggcggcgacatcgccagcgacctcgatccgcaggcgctgaatttctacctcaacttccacgccgtggttcccgccccgcacaccttgctggagggcgtgaagaagctgccgccggcgacctggatgagcgtcgacctcgacggcagctgcgagcagcgcacctggtggacgctggactacggcccacgcccggacgagcgcgagctgacgctcgacgactggcaggagcgcgtcctcgacggcctccgcgaagcggtggcgatccgccagcgcgccgcccgcgaggtcggcgtgctgctctccggcggggtcgattcgagcctgctggtgggcctgctgcacgaagccggggtggacaacctgctgaccttctccatcggcttcgaggatgccggcggcgagcgcggcgacgagttccagtattccgacctgatcgccgagcgctatcacacccgccaccatcgcctgcgcatcggcgagcacgaagtgatcgagcagttgccggcggccttccgcgccatgagcgagccgatggtcagccacgactgcatcgccttctacctgctcgcgcgggaagtctcgaagcactgcaaggtggtgcagagcggccagggcgccgacgagctgttcgccggctaccactggtatccgaaggtggatggcgccgacgacgccttcgccgcgtaccgcgcggcgttcttcgaccgcgaccacgaggaatacctggccaccgtcggcgagcgcttccgcgtcgaggacgtcgccgggcgcttcgtccgcgaccacttcgccagccccggcgccgaggccgcggtggataaggcgctgcgcctggatagcacgatcatgctggtcgacgacccggtcaagcgggtcgacaacatgaccatggcctggggcctggaagcccgcgtgccgttcctcgactaccgcctggccgagctgtcggcgcgcattcccgcccgcttcaagctcggcgacggcggcaagcaggtgctcaagggtgccgcgcgcaaggtgattcccagcgaagtcatcgaccggcccaagggctacttcccggtgcccggcctcaagcacttgcagggccgcacccgcgaatgggtacgcgaactgctgctcgacccgagccaggaccgcggcctgttccagccggcgatattcgatcgcctgctgagcgatccggacggcgacctcacaccgctgcgcggctccaagctgtggcagctggccgccctcaacctctggctcagcgaacagggactttga

SEQ ID NO: 321927 - DNA, 474 bp, Pseudomonas aeruginosa
atggttgaaagtaataagaccgctgccgatacctattcgctcgctattttccgcgccatccgccgtctccagcaggccgccgaaatccactccaagcgtctcagccgatacggtggcctgaccccgctgcaattgctgatcctgcatgtcctggcggtggagggagaactgaccgcgacgcaactggccaagctggtcagcctgtcccaggcatcgctctccggcgtgctcgaccgcctcgaaggacgcggcctgctctatcgtcggcgcgacgaacaggaccggcgcaagtcctggctgcacctcgacccggccggccacgaagccctggcggaggcgccgccgctattgccggagtacgtgatcgagcgcttcgccgcgttgcccgagtgggagcgccacggcctgctggccgcgctgctgcgcgcggccgacctgttcggcttgccggaagaggacgtcgaagaagagtga

SEQ ID NO: 321928 - DNA, 753 bp, Pseudomonas aeruginosa
atggatgtactgctcttcgaatccctgggcatcggcgccgttctcggcctgctgctcggcctcacaggcgccggcggctcgctggtcgccctgcccctgctgctcagcctgcacctgccgctgcgcgacgccatcggcgtgagcctcggcgcggtcgccctgtcggcgctgattggcgccattccgcgcgcgcgccagggccaggtggcctggaggccggtgctggtcctggcgctggccggcctgccgagcaacgccgtcggccaatggctcggccgcttcgtcccggaaggcgtgctgatcgtcgccttctgcctgctggtgctctggtcagcctggcgcatgtggcgcggcgccgggatgaaacgcgaggccagcgaccaggcacggagcctgccgctgctcggcatcggcctggcggtcggcttgctgtcgggattgatgggcgtgggcggcggcttcctggtggtgccggggctactctggttcaccccgctgtcgatgatggccgccaccgccacctcgatggcggtgatcgcgctggtctccggcggcggcttcctgatctacctgaccggcgcccacccgccgctgccgctgctcggcggcctcgccgccggcggcgcggtcggcgtgctcggcggcaacctgctggcgcagcgcctcggcggcccgaccctgcaacgcctgttcgcgctgatgctggtggcggtgagcttctccctggcggcgcagaagctctacggcgggtag

SEQ ID NO: 321929 - DNA, 2067 bp, Pseudomonas aeruginosa
atgtccgacttccagcatgcccagctcgactgggacgaaaacggccagccgctatcccgcgccttcggcgacgtatatttttcccggcattccgggctcaacgagacgcgccatgtgttcctcgccaccaaccgcctggccgagcgcttcgccgcgctgggcgacggcgaggtgctgtgtatcggcgagaccggcttcggcaccggactgaacttcctctgcgcctggcagctgttcgagcgggtcgcgccggccggcgcgcgcctggagttcgtcagcgtggagaaattccccctcgccgccgccgacctgcgccgcgccctggcgctatggccggaactggcgccctggagcgaggccctgctgggccagtaccttgccgtgcacccgggcttccagcgcctggcgttcgcgggcggaagggtcggcctgaccctgctgctgggcgatgccctggagtgcctgccgcagctcgacgcgcgggtcgacgcctggttcctcgatggcttcgccccggcgaagaacccggacatgtggtcgcccgtactgttcgccgaactggcgcgactgtcggcgccgcaggcgaccctgggcactttcaccagcgccggtttcgttcgccgcgggctggtcgaggccggtttcgccatgcaacgggtaccgggctacggacagaagcgcgagatgctcagcggcacctaccaggggccgccggcgaacgccggcaagccctggtacgcacgccccgcgccccacgccgggcgccgcgcggcactggtggtcggcggcggcctggccggctgcgccagcgccgccagcctcgccgcgcgcggctggcaggtgaccctgatcgaacgccatcccggcctcgcccgggaagcctcgggcaacccccagggcgtgctctacctgaaactctcggcccacggcacgccgctgtcgcgcctggtgctcagcggcttcggccatacccgccggctgctcgaacgcctgcggcgcggccacgactgggacgcctgcggcgtactgcaactggccttcgacgccaaggaagcgcaacgccaggcgcaactggccgcagccttccccgccgacctgctgcacggcctggagcgcgagcaggccgagcgcctcgccggcgtcgccctgcccgccggcggcctgttctatcccgaagccggctgggtccatccgcccgcgctgtgccaggccctggccgccacccccgggatcaccctgctgagcggccgggcagtacgcttgcgccgcgagggcgacgactggtgcgcctacgccggcgacgaatgcctggcccgcgcgccactcgcgatcctcgccaccgccgccgacatccgcgacttcccgcccgccgccgagctgccgctgaagcgcattcgcgggcaggtcacccgcctgccggccaccccgcaaagccgggcgctgcgcaccgtggtctgcgccgagggctacgtcgcaccgccgcgtggcgacgaacacaccctcggcgccagcttcgacttcaagagcgaagacctggcgccgaccctcgccgaacaccagggcaacctcgaactgctgcgggaaatatcccccgatctgttgcagcgcctgggcgccgacgacctgccgctggagcgcctggaaggccgcgcggcattccgctgcaccagccccgactacctgcccctggtaggcccgctggccgagcgcgcggccttcgacgaggcctacgcggtgctcgcccgcgacgcccgccaggtgccggagcgtgcctgcccctggctgccaggcctgtacctgaacagcggccacggctcgatttcccgcagcagttcgaggttgccctggtgttcggcgaactgctggcggcgtggatctgcggcgagccgctgccgctgccgcgcgcggtggccgaggcctgccacccgaaccgcttcctgctgcgcgacctggtgcgcgggcagcgcggctgaagccccgggcgcaccgatttgcgctacccttcgggcctgccgcacgcgcaggccataccggaccaccggctggctcacccgcggaaatagttga

SEQ ID NO: 321930 - DNA, 1491 bp, Pseudomonas aeruginosa
atgttcgaatccgcggaagttggccacagcatcgacaaggacacctacgagaaggccgtcatcgagttgcgcgaagcgctgctcgaggcgcagttcgagctcaagcagcaggcgcgcttcccggtgatcatcctgatcaacggcatcgagggcgccggcaagggggagacggtcaagctcctcaacgagtggatggacccgcgcctgatcgaagtgcagagcttcctccgtccctccgacgaggaactggagcggccgccgcagtggcgcttctggcggcgcctgccgcccaaggggcggaccggtatcttcttcggcaactggtacagccagatgctctacgcgcgggtcgaggggcatatcaaggaggccaagctggatcaggccatcgatgccgccgaacgcttcgagcgcatgctctgcgacgaaggcgcgctgctcttcaagttctggttccacctctccaagaaacagctcaaggaacgcctcaaggcgctggaaaaggacccgcagcacagctggaagctcagtccgctggactggaagcagagcgaggtctacgaccgcttcgtgcattacggcgagcgcgtgctgcgccgcaccagccgggactacgcgccctggtacgtggtggaaggcgtggacgagcgctaccgcgccctgaccgtcggtcgcatcctcctcgaagggttgcaggccgcgctggccaccaaggagcgcgccaagcgccagccgcacgccgcgccgctggtgtcgagcctggacaaccgcggcctgctggactccctggacctgggccagtacctggacaaggacgcctacaaggagcagctcgccgccgagcaggcccgcctggccgggctgatccgcgacaagcgcttccgccagcattcgctggtcgcggtgttcgagggcaacgacgcggccggcaagggcggcgccatccgccgtgtcaccgacgcgctggacccgcgccagtaccatatcgtgccgatcgccgcgccgaccgaagaggagcgtgcgcagccctatctctggcgcttctggcggcacattccggcgcgtcgccagttcaccgtcttcgaccgttcctggtacggccgcgtgctggtggagcgcatcgagggcttctgcgcaccggccgactggctacgcgcctatggcgagatcaatgacttcgaggagcagctcagcgagtacgggatcatcgtggtgaagttctggctggcgatcgacaagcagacccagatggagcgcttcaaggaacgcgagaaaaccccctacaagcgctacaagatcaccgaggaagactggcgcaaccgcgacaagtgggaccagtacgtggacgcggtgggcgatatggtcgaccgtaccagcaccgagatcgcgccctggaccctggtcgaagccaacgacaagcgcttcgcccgggtcaaggtgctgcgcaccatcaacgacgccatcgaagcggcgtacaagagggacaagtga

SEQ ID NO: 321931 - DNA, 1185 bp, Pseudomonas aeruginosa
atgcgtgaagtggtgatcgtcgacagcgtccggaccggcctggccaagtccttccgcggcaagttcaacctgacccggccggacgacatggccgcccactgcgtcgacgcgctgctggcgcgcaacgacctcgacccgctgctggtggatgactgcatcgttggcgccggctccaacgaaggcgcccagggccacaacatcgggcgcaacgtggcggtgctctccggcctcggcatccaggtgccggggatgaccctcaaccgctactgttcctccggcctgcaggcgatcgccatcgccgccaaccagatcgcttccggttgcagcgaggtgatcgtcgccggcggcgtcgagtcgatcaccttgaccctgaagagcgtcaacaccgaccacctggtgaacccgctgctgcaaagggaggtgccgggcatctactaccccatggggcagaccgccgagatcgtcgcccgtcgctacggcatcacccgcgaggcccaggacgcctacgccctgcagagccagcagcggatggcgcgagcccaggcggacgggctgttcgccgacgagatcgtgccgatgaccacccgctacgcggtggaggacaaggccagcggcgagaagcaggtgctcgacggagtggtcgaccgcgacgactgcaaccgcccggacaccaccctcgaaggcctggcctcgctgaagccggcgttcgccgaggacggttcggtcaccgccggcaacgcctcgcaactctccgacggcgcctcgatgaccctgctgatgagcctggagaaagcgctggcgctgggcctggagccgaaggccttcttccgtggcttcaccgtggccggctgcgagccggacgaaatgggcatcggtccggtgttctcggtgccgaagctgctcaaggcgaaggggctgaagatcgccgacgtcgatctctgggaactcaacgaagccttcgcctcgcagtgcctgtactgccgcgaccggctggagatcgacaacgagaagtacaacgtcaatggcggctccatcgccatcggccacccgttcggcatgaccggctcgcgccaggtcggtcatctggtccgcgaactgcgccggcgcaacctgcgctacggcgtggtgaccatgtgcgtcggcggcggcatgggcgccagcgggctgttcgaagccgtacgctga

SEQ ID NO: 321932 - DNA, 666 bp, Pseudomonas aeruginosa
atgtccaccgagcccaactcgccgttcgtcgacgacccgctgagcgccgtcgatgcacggattctcggcagcctcgtcgagaagcaggcgaccaccccggaaacctatccgctgaccctcaatgccctggtcctcgcctgcaaccagaagaccagccgcgatccggtgatgaacctcacgcccggccaggtcggccagagcctgcgccagctcgaggggcgcggcctggtcaggctggtgatgggcagccgcgccgaccgctgggagcacaccctgggcaagggcctggaattggtggcgccacaggtggcgctgctcggcctgctgttcctgcgtggtccgcagaccctcaacgaactgctcacccgcagcaaccgcctgcacgatttcgacgacgtcgagcagatccgccaccacctggaacgcctcgccggccgtggcctggccgtgcacctggagcgtcgcgccgggcagcgcgaggagcgctacatgcacctgctcggcagccaggccgacctcgaggccgccgtggaggcgatgggcagcgacccggaacgcgccgcgccggccgctctgtcggccgatgcggaagcgcggatcgccgagctggagacgcgcctggcggcgctggaggagcgcctggccaggctcgaaggaggggcgtga

SEQ ID NO: 321933 - DNA, 1572 bp, Pseudomonas aeruginosa
atgaaaaaaatcttattgatgcttttgtgcgtcagcgtgctgggttgctccaaaaacagcgtcgaatcggaaaaaccggtcgacgtgctcctgatcggtggcggcatcatgagcgccaccctgggtacctatctgaacgaactggaaccaggctggaccatcgagatggtcgagcgcctggacaaggtcgccgaagaaagctccaacggctggaacaacgcgggcaccggtcactcggcgttctgcgaactgaactacaccagcgaggccgcggacggctcgatggatatcagcaaggcggtggcgatcaacgagaacttcgagatctccaagcagttctgggcctaccaggtcgaccgcaaggtgctgaacgatccgaagtcgttcatcaacaacgtcccgcacatgagcttcgtctggggcgacgacaacgtcgccttcctcaagaagcgccacgccgccctgcagcacagctcgctgttccgcggcatggagtactcggaagaccccgagcagatcaagcagtgggtgccgctggtgatggaaggccgcgagccggggcagaagatcgccgccacgcgcatgtcgatcggcaccgacgtcaacttcggcgagatcactcgccaactggtgggctcgctgtcggccaaggacaccttcaagctgcgcctgcaacatgaggtccgcgacctcaagcgcaacgacgacaacacctggaccgtgaccatggccgacctggccaatggcgacaaggaaaccagcgtcaaggccaggttcgtcttcatcggcgccggcggcggcgcgctgaagctgctgcagatgtccggcatccccgaggccgaaggctacgccggcttcccggtgggcggttcgttcctcgccaccaccaacccggacgtggtcaagcgccacctggccaaggtctacggcaaggcttcggtgggttcgccgccgatgtcggtgccgcacctcgacacccgcatgatcgacggcaagccggttctgctgttcggtccgttcgccaccttctccaccaagttcctgaagaacggctcgctgtgggacctgccgggctcggtgaccagcggcaacatcggcccgatgttcaacgccggcatcgacaacttcgatctcagccagtacctgatcggccagttgatgctcagccaggacgaccgcatggcctcgctgcgcgagtacttcccggaagcccgcgacgaggactggaagctagtgcaggccggccagcgcgtgcagatcatcaagaaggacgccgagaaaggcggcgtactgcaattcggcaccgaagtggtgaccgccgccgacggctccgtcgccgccctgctcggcgcctcgccgggcgcctcgaccgccgcgccgatcatgctgtcggtgctggagaaggccttcaaggacaaggtcgctactcccgagtggcaggcacgcctgaaggaaatcgtgccgtcttacgggcgcaagctgaacaacgacatcgagctgaccaacagcacccgtgcctggagcagcgagcgcctgcaactgatccacgtgccggtacagccggaggcctga

SEQ ID NO: 321934 - DNA, 210 bp, Pseudomonas aeruginosa
atgttggggaaacgttccaccgatcccaccccggccacccgctttcgcagcgatcgcataagttcggtgaatgggcagtacttcttctccacccgcgaagggaccctggaaggtccctatttcacccgtttcgacgcggagcgggaaatcgacgcgtatatccgcaggatgcgccaatcggcggaaatccacgcgccgggttcccgctga

SEQ ID NO: 321935 - DNA, 639 bp, Pseudomonas aeruginosa
atgagcctcagactcggcgacatcgcccccgatttcgaacaggactccagcgaagggcgcatccgcctccacgagtggctgggcgacagctggggcgtgctgttctcccaccccgccgacttcaccccggtgtgcaccaccgagctgggtttcaccgccaagctcaaggaccagttcgcccagcgcggggtcaaggtcctggcgctgtcggtggatccggtggagtcgcacctgaagtggatcgacgatatcaacgagacccaggacacccgggtcaatttcccgatcatcgccgacgccgaccgcaaggtttccgaactctacgacctgatccacccgaacgccaacgacacgctgaccgtgcgttcgctgttcatcatcgacccgaacaagaaggtgcgcctgatcatcacctacccggcgagcaccgggcgcaatttcaacgagatcctccgggtgatcgattcgctgcaactgaccgacgagcacaaggtcgccacgccggccaactgggaggacggcgacgaggtggtaatcgtgccttcgctgaaggacgaggaagagatcaagcggcgtttccccaaaggctaccgcgcggtgaagccctacctgcgcctgacgccccagcccaaccgctga

SEQ ID NO: 321936 - DNA, 1002 bp, Pseudomonas aeruginosa
atgatcgccgctctccgtcgctgccgggcctggctggccctgctcgccgttcttgccgtgtttcccgcggcagaggccaccgcccccgctgaaatccgtctcgactatgcctactacgcccccaccagcctggcgctcaggaagttcggctggctggagaaaagcctggacggcagcggcacccgggtgcgctgggtgttcagccagggcagcaaccgttccctggagtacctcaacgccggcagcgtcgatttcgcctcgaccgccggcctcgccgcggtactcgcgcgggccaacggcagcccggtacgtaccgtatacgtcgccagccgcccggagtggaccgcgctgctggtgcgcaaggattcgccgatccgcagcctcgccgagctcaaggggcgcaaggtggctgccaccaagggcaccgatccctacctgttcctgctccgcagcctgcacagcgtaggcctggacaagaacgacctgcgtatcgtccacctgcagcatcccgacggccgggtagccctggagaagggccaggtcgacgcctgggccgggctcgatccgcacatggcggccagcgagttgcaggccggctcgcggctgctctaccgcaacctcggcttcaacagctacggcgtgctcaatgtccgcgaggatttcgccgaacgccatccgcaactgatccgccaggtgctggcggcctacgagcaggcgcgccactgggtgatcgggcatcccgacgaggccgcgcaactgcttgccgaggaagccggcctgccgctggaagtggctcgcctgcaactgtcgcgcaccgatttcagccagccgctgccgggcgccgaacaggtcgccgcgctcaaggccgcggcgccgatcctggcggacgagcgcctggtgcggccgggcgtggacgtgcagaaggtggtcgacgaactgatcgcgccgcagtgggccgccgaggtcatcggcggtgtcccgttggcgcgcacggagccctga

SEQ ID NO: 321937 - DNA, 504 bp, Pseudomonas aeruginosa
atgtccaggcgcttgcttttcgtggccaccctggtcgcgaccctttcccttgccgctcatgccgacgaacccctgccatcggtcgagcaggtgatgaacgagcacaaggaaaagatcaggaaccagctggaaaccatcaactacaagcgcaaacggatggtcgaggcaaacatggcgctggacggcaccgaagccgagacgttctggccgatctattcacgctaccgaggcgagacggacagcctgcacaaggagacattccagctcctgctcgaatatgcccgcgcctatggttccggcagcattaccgacgcggaagcttcgaggatggtcgacctctatcggggattgcaggagaaacagctggccgtgctgcaccggtacgtgcaggaagtggccgagaagatgtcacctcggcgggccatgcgcttcctgcagatcgaagcgcaactggacgcgctggaggcgttgcagatcggcaagcaggttccgctgatcaattga

SEQ ID NO: 321938 - DNA, 1953 bp, Pseudomonas aeruginosa
atgcgtcctcccctttcccaggttgtcgtgctggtcagtcaccttcaacgacctcggcagcgcagtcgcctcgccagcctggtggccggcctggcggcgggctacccggacgtccatatcgaggtgctcgacacctcggtatccgaagccctgcaaaccgcccgcgatctcgaacagcgcggcaaggccgacgtgttcgtctgtgctggcgccactgccgcctacctgcgtagacacctggcacgtccggttctgacgatgcgcgttggcggcggagacctgttgcgtgcgctggagcaagcccgcgaacactcctcccatgtcgccctgctcagctacaaccgcatcgaccgggacctgcaagccatgcgaacgctgttcacggtgcaggttcaccaggtcgcctacaccaccctggaagaggctcgccaggctgtcctggaggtagcccgcctgggttgccgcagcatcatcggttcgtcgacggtggtggagctggcggaacaggcaggcctgcacggcgtgctgtcgctgagcgaagacactgcgcgcaaggcgctcgaggaagccatgggagtcctcgacagccagcgcctggagatcgccaagcggcggcatctggacgcggtgctgcaacacattccaagcggtgtggcagcggtcgacaaccagggtgtggtgcaatcgctcaaccctgcccttgcccagttgctggagttgccggtcagctcggctctgggtcgaccgttacagcagctatgcccggagcttgacctgcaacaggcgctagaggatggcggtggcgaggaaaaccgggtgatccggctgggctcgcacgccgtggtcagcaatctcctgccgatcctggagaatggcgagcgtaccggcctggtgctcacctgccaggacatcaccgccgtgcagcgcgcggatcaacgcatccgctccactcgccgtccaggtgccttcaccgcgcgttaccggctcgaacaactcaacggcgcgagcaaggccaaccgtgagatgttgcagctggccaagcgctttgccgccagccattcgaccatcctgatcactggcgaaagcggcaccggcaaggaactgctcgcccaagggatccataacgagagccctcgccggcacgggcctttcgtcgccatcaactgcgcggcgtttcccgagtcgctactggaaagcgaactgttcggctacgaggaaggcgccttcagcggttcgcgcaaaggcggcaagcccggcctgttcgaggcggctcaccgtggcacgctgttcctcgacgagatcggcgacatgcctgtgtcgctgcagactcgcctccttcgtgtattgcaggagcgagaggtcttgcgcctgggcggcaccgagccgatctccatcgacgtgcgcatcgtcgccgccacccacaaggacctgggggccgccatgaaggatcgcgagtttcgcaccgacctgtattaccggctgaatatcctgcgcttgcagaccacgcccctgcgcgagcggcccgaggacattcctctgatttgccagggaatcagccagcgcctgctggtccagggccagccaccgggtgccgcaggcataacgacgctcctgctaccctacctcgtccgccattcctggcccggaaacgtcagggaactggagaatgtcatcgaacgggcgatgctctccgccagcgaaatcttccatgagcacggcgtggatgagcattacctggctcgcgtgctgcccgagctattcgaaggccagcctcagcccaggtcccggaaagagccatcgcgcacaaaggatttgcacgccatcggcaaaaccgcgcagttgcgctacatacaggagacgctggacagctgccagggcagccttgacgaggctgcgcgtcggctcgggatcagccggaccacgctgtggcggcggcttcgttcggcacgctga

SEQ ID NO: 321939 - DNA, 1056 bp, Pseudomonas aeruginosa
atgagcactcctcctacgaccgtacgggacggcgagacattcgtggccccggacgaccagccactggtcgagttcatccgcgagcacgccgcagcgaagcgggtggtcatccaggcacgccagcgcctgagcggcggcgccatccaggaaaactggctgctggacctgctgatcgaaggcggcccctgggctggcgcccggcgttgggtgctgcgcagcgacgcgctttccgcgctacccgccagccttgaccgcgaacaggagttcgcggtgctgcaagtggttcatcaagccggtgtgaaagtaccgcgcccgctgtggctgtgccgcgatatgcgcgtgcatgggcgggtgttcttcctgatggagtacgtgccgggtgtcgccgccggtcgcttgctcagcgctggcgccggcacccagggccgggcgcagctggcggcgcagcttggcgccaacctggcgcgcctgcatcaggttcgcccgccgtgcgccgcgctggatttcctgccgatgccaacccgctcaccggccttggcgaccatcgacgcctatcgccactacctcgacaccctcgccgatgcctatccggtgctggagtggggcctgcgctggagcgagctgcacgcaccgcgcaacagcatcctgtgtctgttgcaccgtgactaccgcaccggcaactacctggccagcgaacagggactcgaagccgtactcgactgggagttcaccggctggggcgacccttgcgaggacctaggctggttcaccgcccgctgctggcgcttcacccgcccagacctcgaggccggcggtatcggccaactggaggacttcctggggggctaccacgaggtgtctccgctgcgtatcgagcgcagccaactgcactactggcaggtcatggccaccctgcgctgggcggtgatcgccctgcagcaaggccagcgccacctgtccggcgaagagccgtccattgagctggcactgaccgcacgactgctgccggagcttgagctcgacatcctgcacatgaccggagccgaagcgccatga

SEQ ID NO: 321940 - DNA, 357 bp, Pseudomonas aeruginosa
atgacccagcccgatgcccatgaactgctcgacatcgctcgctcgacgcttctggagcaactgctgccagcgctgcccggcgagctgcgttacccggccctgatgatcgccaatgccatggccatcgcagcccgcgaaagccgcctgggggctctggccgaggaccaggagcggacacgtctggccgccttggtcgacgaggcgcccgcagccttgcccgacctgcgccgccaactggcacgggccattcgcctgggcagccatgacgccccgcaaaaccatagaaccctggtcgagacattgcgccaggtcaccctcgcccgattggccatcagcaatcccaaggccttgccctga

SEQ ID NO: 321941 - DNA, 1173 bp, Pseudomonas aeruginosa
atgaacttcaccctcccggacgaactgctcgccttgcaggccaagacccgagacttcatcgccgaacaggtcatcccgctcgagaacgacccccgccaggacagccacggccccagcgacgccctgcgccaggatctggtggcccgcgcccgcgcggccggcttgctgacgccccacgccagccgcgaaatgggtggcctggcgctgagccacgtggccaaggcgatcgtcttcgaagaggccggctactcgccgctgggcccggtggcgctgaacatccatgccccggacgaaggcaacatccacctgatggacgtggtcgccaccgaggcgcagaaagaccgctggttgcgcccgctggtccagggccatgcccgttcctgcttcgccatgaccgagcctgcgccaggctccggctcggacccctcgatgctgcgcaccaccgccacccgcgatggcgacgactacctgatcaatggccgcaagtggctgatcaccggcgcagaaggcgccgacttcggcatcatcatggcgcgcatggaggatggtacggcgaccatgttcctgaccgacatgaaacgcgacggcatcatccatgagcgtcagctggactcgctggacagctgcttcaccggtggccacgggcagctgcgtttcgacaacctgcgtattccggcgagcgatgtgctcggcgagatcggcaaggggttccggtatgcccaggtgcgcctggcgccggcgcggctcacccactgcatgcgctggctgggcgccgcgcgtcgcgcccacgacatcgcctgcgactatgcgcgcacccgcgacgccttcggcaagccgctgggcgagcaccagggtgtgggcttcatgctggccgacaacatgatggacctgcacgtggtgcgcctggcggtgtggcactgcgcctgggtgctcgaccagggccggcgggccaatgtcgactccagcatggccaaggtgatcagcgccgaggcgttgtggcgggtggtcgatcgttgcgtccaggtactgggcgggcgcggggtgaccggagacaccgtggtggagcggatcttccgcgacattcgcccgttccgcatctatgacggcccgagcgaggtgcaccgcatgagcctggcgaagaaactgctcgaccagcgcctggaggcccgctga

SEQ ID NO: 321942 - DNA, 768 bp, Pseudomonas aeruginosa
atgcagccgaacctgacccgactgttcgccctcgacgggcgccgcgccctggtgaccggagcctccagcggcctgggccgccacttcgccatgaccctggccgccgcaggcgccgaggtggtggtgactgccaggcgccaggcgccgctgcaggcactggtggaggccatcgaggtggcgggagggcgggcgcaggcctttgccctcgatgtgacctgccgtgaggatatctgccgggtgctcgatgccgccggcccgctggatgtgctggtcaacaatgcgggggtgagcgacagccagcccttgctggcctgcgacgatcaaagctgggaccgcgtgctcgacaccaacctcaagggcgcctgggcggtggcccaggaaagcgccaggcgcatggtcgcggcggggaagggcggcagcctgatcaatgtcacttcgatcctcgccagccgtgtggccggcgccgtcggcccctacctggcggccaaggccggcctggcccacctgacccgcgccatggcgctggagttggcgcgccatggcatccgggtgaacgccctggcgcccggctacgtgatgaccgacctgaacgaggccttcctggccagcgaggccggcgacaagttgcgctcgcgtatccccagccgccgcttcagcgtgccggcggacctggacggcgccttgctgctgctcgccagcgatgccgggcgggccatgagcggcgccgagatcgtggtcgatggcggccacctgtgcagcagcctgtaa

SEQ ID NO: 321943 - DNA, 1650 bp, Pseudomonas aeruginosa
atgatggttccgaccctcgagcacgagcttgctcccaacgaagccaaccatgtcccgctgtcgccgctgtcgttcctcaagcgtgccgcgcaggtgtacccgcagcgcgatgcggtggtctatggcgcaaggcgctacagctaccgccagttgcacgagcgcagttgcgccctggccagtgccctggagcgggtcggcgtacaagcgggcgagcgggtggcgatactggcgccgaatatcccggaaatgctcgaggcccactatggcgtacccggtgccggggcggtgctggtatgcatcaacattcgcctggaggcacgcagcatcgccttcatcctgcgccactgcgcggccagggtgctgatctgcgaccgtgagttcggtgccgtggcccagcaggcgctggccatgctcgatgcgccgcccttgctggtgggcatcgacgatgatcaggccgagcgagccgacctcgcccacgacctggactatgaggcgtttctggcccagggcgacccggggcggccgctgagtgcgccgcagaacgaatggcagtcgatcgccatcaactacacctccggcaccacgggggatcccaagggcgtggtcctgcatcaccgcggcgcctacctcaacgcctgcgccggcgcgctgatcttccagttggggccgcgcagcgtctacctgtggaccttgccgatgttccactgcaacggctggagccatacctgggcggtgacgctgtccggtggcacgcacgtatgcctgcgcaaggtccagccagatgcgatccacgccgccattgccgagcatgcggtgacccacctgagcgccgcgccggtggtgatgtcgatgctgatccatgccgagcatgccagcgtccctgccgtgccggtatcggtgatcaccggcggcgccgcgccgcccagcgcggtcatcgccgccatggaagcacgcggcttcagcatcacccacgcctacggcatgaccgaaagctacggccccagcaccctgtgcctgtggcagccgggggtcgacgaattgccgctggaggcccgggcccagttcatgagccgccagggcgtcgcccacccgatgctcgaggaggccacggtgctggataccgacaccggccgtccggtcccggccgacggccgcacccttggcgaactggtagtgcggggcaacaccgtgatgaaaggctacctgcacaaccccgaggccacccgtgccgcgttggccgacggctggctgcacaccggcgacctggccgtgctgcacccggacggctacgtggaaatcaaggaccgggccaaggacatcatcatttccggcggcgagaacatcagctcgctggagatcgaggaagtgctctaccagcaccccgaggtggtcgaggccgcggtggtggcgcgcccggattcgcgctggggcgagacaccccacgcgttcgtcgccttgcgggcggatgccttacccagaaccacgggtgacgatctggtccgctggtgccgcgagcgcctggcgcacttcaaggcaccgcggcatgtgacgcttaccgaactgcccaagaccgccaccggcaagatccagaagttcgtcctgcgcgagtgggcccggcaggaggaggaggccggcgacgccggccgctga

SEQ ID NO: 321944 - DNA, 324 bp, Pseudomonas aeruginosa
atgtccagcctgctatacgcgcgtatccgcgccagtgcccggttccagcaactggtggcgcgccgaaaccgtttcaccctgagcctgctcctgctgatcctggccacgttccacggctacatcgcgctggtatcgttctgccccgagctgattgccaggcgtctggcgcagggctcgaacatgaccttcggcgtcgcggccggcgtgttcctgttcgtgtttttctgtgccttgtcggcgctctatgtgtaccgcgccaacggcgaattcgatcgcctgacccaggctctggtcgctgggctggaagaggagcagggcgcatga

SEQ ID NO: 321945 - DNA, 1659 bp, Pseudomonas aeruginosa
atgaagaagctccttcccctggcgttgtcgctgcactccggcctgctgttggcctcgcccgcgttggacgctggccagcgccagccgctcaacctgcatgccatcggcatgttcatggtgttcgtgctgttcaccctgtgcatcacctggtgggcggcgcgacggacccattcgacggcagatttctatagcgccggtggcggtatccggggctggcagaacggcctggcgctggccggcgactacatgtccgcctccacgctgctgggaatcaccgcgctcatctacagctccgggatggatggctacatctatctcatcgccttcttcgcgggctggccggtactgctgctattgatgaccgagcggctgcgcaacctgggccgcttcaccttcgccgacatcacctcgtaccgtctcgaccagggcaaggtgcgcaccatggccgccatcggatcgctgaccgtggtgtgtttctacctggtggcgcagatggtcggggccgggcagttgatcaggctgctgttcggcctggactaccagatcgccctggtgatcgtcggtgcgctgatgatgctgtatgtgaccttcggcggtatggtggcaaccacctgggtgcagatcgtcaaggcattcctgctgctggtcggcggctcgctggtgctgttcctggcgatgcgcgaattcgacttcagctatgacaggctggtcagccaggcgatggatagccatgccctgggcgaacgcctgctggcccctggtggcttgctggccgacccgttgaccgcgctatcgctgagcctggggctggtgttcggcaccgccgggctgccgcacatcctgatgcgtttcttcaccgtcggcgatgcccgggaggcgcgcaagtcggtgctctacgccaccgggttcatcggctacttcttcaatgtcattttcctgctgggcctggcgtcgatcgtgatcgtcagccagcagccccggttcttcgagggcggggaagcgggaggcaagctgctgggcgggggcaacatggtggtcatgcacctggcccaggcagtgggaggcaacctgctgctgggcttcctctccgccgtgaccttcgccaccatcctggccgtggtgtcaggcctggccctggccggggcgtccgccatcgcccatgacctgtatgcgcgggtgatcatgaagggcgcggccagcgaggcgcaggagctgcgggtaaccaagctggcaaccctgggccttggcttggtggcgatagccctgggcatcgtgttcgagaacatcaacgtggccttcatggtcgccctggcctttggcatcgccgcttcggccaacttcccggtgctgttcctgtcgatgttctggtcggggctgaccacccgtggcgcgttggccggtggctacgtcgggttgttcagcgccatgggcttcgtggttttctccaggctggtgtgggtggatgtgttgcacttcgccgatccgctgttcccctatacccagcctgcgctgttctccatgccgttggcgttcctggtggcgtatggcgtttcccgcctggaccggaccaagcgggccatggcggaaagggcagccttcgccgaccagtacgtacgaggccagaccggccttggcgccagcggagccatagaccactga

SEQ ID NO: 321946 - DNA, 153 bp, Pseudomonas aeruginosa
atgcgccgattcggttttctactggctgtccttgtactggtcatcttcctgagtgcactgttttcgaagccttccgtcgtcaaccgcgggacggctcagcgcatggagcactaccccaccgtcggtatcggagacatcttccgggggcactag

SEQ ID NO: 321947 - DNA, 960 bp, Pseudomonas aeruginosa
ttggacatcagccagaacaataatcaggagacctcgagcgtgcgtgaacacaatgatgaaagcttcgagttcgaagtgtccgtgatcgggctcggagccatgggaaccatcatggcccaagcgttgctcaggcaaggcaggcgcgtggcgatctggaaccgctcacccggcaaggcctcggcgctcgtcgccgctggcgctcacctgtgcgagagcgccgaagccgcgctggctgcaagcccggccacgatcttcgtgctcctggacaaccaggcgacccacgaggtgctcgggatgccaggtgtgatgcaggcgctggccaaccgtacgatcgtcgattacacgaccaacgcccgggacgagggcctggcgcttcagagtctcgtcaaccgcgcgggcggccattacgtcaaagggatgatcgtggcctacccgcgcaacgttggtcgtcgcgaaagccacagcattcataccggtgatcctgaggccttcgaacggcatcgggcgctgcttgaggggcttgccggtcatacgacgttcctcccctgggacgaagcattggccttcgccaccgtgctccacgcgcatgcgtttgccgcgatggtggctttcttcgaggccgtgggggctggtgtccacttcggcctgccgccttcgaagaccgctcggctcatgctcgacacgtcgcgctttttcgtcgccgatgcactcgaggaagcggtccgtcggctggaagcgcaggatttcgcaggcgatcaggcgaggctcgatgtgcatgcccaggccttcgcccatatcgccggagccctgcacgcacaaggggcctggacgccggtcttcgacgcgctgtgccaggccgtgcaacgcgcggcagccatgggctatggcgaccaggacatcgtagccgtcacccgcctgttcgcccgcgaatgcgacaccgcaagcgcggcgggacagtga

SEQ ID NO: 321948 - DNA, 1254 bp, Pseudomonas aeruginosa
atgaacaacatcgagacgttcgaaaggctcgagtccaacgtgcggatgtactgccgcgacttgcccctggtgttcgataccgcccaaggcagcaggatccgcggcgaagatggccgcgaatacctggacttcttcgccggcgccggcgccctgaactatggccacaacgacccgcgcatgcgcgatgcgctgatcgcgtatctgtcggccaacggcgtgacccacgccctcgacctgcacaccaccaccaagcgccagttcctggaagcgatcgagcgcgacctgttcaagccacgcggctgggactacaaggtccagttcaccggcccgaccggtgccgacgccgtcgaggcggcgttgaagctggcgcgcaaggcgaccgggcgtaccaaggtcgtatcgttctacggggcttaccacggcatgaccgccggcgccctggccgtcaccggcaaccgcactcgccgtggccccgggctttccaccgacgtggtgttcgtgccctacgaagacagcccctatggcgaattcgacagcattggcttcctcgagcgcctggccaacgaccagggcagcggctcggagctgccggcggcggtgatcgtcgagtcggtgcagatccaggccggcgtctacccggcttccaaccaatggctgcaacgcttgcgcaagtggaccaccgaccacggcgtgctgcttatctgcgacgagatccaggccggttgcggccgcaccggcgacttcttcggcttcgagcgctccggggtggtgccggacctgatcacctgcgccaaatcgatcggcggcttcggcctgccgatggcgatcgtgttgcttcgtgccgggctggatgtatggcaaccgggcgatcacatcggcaccttccgcggcaaccagttggcgttcctgaccgcccgcatcgcgctcagctattggcacgatgagcagttcctgaaattgctggccgacaactgcgcggccatggagcgcgcagttgccggctttgcggaaattccaggcgtcgcgtccgcgcgttgtcgcggcatgatcgccggcatcgatttcggccgcggcaacgtcgaggtcgccaaggacgcccagcagcgcgtgctgcaagcgggcgtgctggtcgaccgctgcggcccgaatggcgaaatcatcaagctgatgccaccgctgaacactccgaccgaccaactcgaaggcggcctcagggccttcggcgaatcggtcgcggcagcgctgggagaatag

SEQ ID NO: 321949 - DNA, 1425 bp, Pseudomonas aeruginosa
atgcaaaccaaacttctgatcaatggtgccctggtggccggcgaaggcgagagccacgcggtgtacaacccgtcccagggcaacgtcctggtgcgaattaccgaggccagcggcgcccaggtccatgccgcggtgcagagcgcggatgcggccttcgacgcctggtcgcaaacgccgcccaaggatcgcgcggccctgctgctcaagcttgccgagcgcatcgatgcccaggcgcacgtgttcgctcgcctggaggcggacaactgcggcaagcctttcaacgccgtgctgctggacgaactgcccgccgtatcggacgtgttccgtttcttcgccggcgccgtgcgctgcctgcagggctcggcggcgggagagtacgtcgcggggcatacctcgatgatccgccgcgacgcggtgggcgtggtcgcctccatcgcgccgtggaactatccgttgttgatggcagcgtggaaactcggcccggcattggccggcggcaacaccgtggtgctgaaaccgtcggagcacacgccgctgagtaccttgaaactgggcgagctgcttgccgagatcttccccgccggcgtggtcaacatcgtccacggtcgaggtgcctcggtgggtgagccgctgaccagccatgcccaggtgcgcatggtgtcgctgaccggctccgtgcgcaccggcagccggatcatcgaaggtacggccgagagcgtgaaacgcatgcacatggagttggggggcaaggctcctgtactgatcttcgacgatgccgacatcgacgccgccgtcgaaggcatccgcgccttcggcttctacaacgccggccaggactgtaccgcctcgtgccgcctctatgtgcagaaaggggtctaccaggagttcgttcgcaagctcggcgaggccgtatccagcatccggtgcgggctgccggacgatccggcgaccgagatgggaccgctgatcaccaaggagcatctggagcgtgtcgaggggttcgtgaaccgggccagggagttgccgcacatcgaagtggtcaccggcggcaagcgcgccgagggtgccggcttcttcttcgagccgacggtcctggccggcgctacgcaggaggatgaggtggtgcgccgcgagatcttcggcccggtggtgaccgtctcgtcgttcgaggatgaagcccaggcgctggcttgggcgaacgactccgactacggcctggcgtcttcggtatggaccgccgatgtggggcgcgctcatcgcctggccgcccgcctgcaatacggctgcacctgggtcaacacccacttcatgctggtcagcgaaatgccccacggcggggtcaagctgtccggctacggcaaggacctgtcgatgtacggcctggaagactacaccgtggtgcgccacgtgatgttcaagcactga

SEQ ID NO: 321950 - DNA, 1332 bp, Pseudomonas aeruginosa
atgagcgaatcaatcgccggcgcttcattgaagcgcacgctgggtccgttttccgttctgctgttcggtctggcgttcctcgctccgttgatcgtgttcggcacctatggcgtgatcacgcaggccagcggcaacaccactgcgatggcctacctgatcgcggcaatcggcgtggtgttcacggccttgagctatggccggctggtcagggtgttcccggtcgccggttcggcctacacctatacccgcaagatgctgagcgcgaacctcggcttcatggtgggctgggccgccctgctcgattacttcttcatcccgatgctgatctggctgctcggcgccagctacctcaacatggcctttccagaggtgccgcaatgggtgtggatcatcggcttcatcgtctccacctcgctgcttaatatcctgggcatccaggtcgccaaccgcttcaacgtgctgttgatggtcgcgcaactggccatcatcgtcgtgttcatcagcctgtgcgtgcactacatcgtcgcggccaacggccctggcgggctgctgtcggccaagccgttcttcaacccggacgtgtccttcgccaccagcatggccggcgccgccattgccgcgtactcgttcctgggcttcgacgcgctgtccacgctcagcgaggagacccgcgacccgggccggacactgccgcgcgcgatcctgctggtcgcattgatcggcggttcggtctacgtcggctcgtcgtacttcatgtacctggcgcacccctcccccgccttcgagcatgtggacggcgccgccttcgagatcgcccgcatgatcggcggcgacctgttcttcgccgtggtcctggcggggatcatcatcgcccacttcgccgcaggcatgtcgttccaggccagcgtgggccggctgctgtacgccctggggcgggacaaccaactgccgcgcaagctgttcggtgtcctgcatcctcgctacaagaccccggccttcaacattctgctctgcggcattttcggctgcgcgggttttgccctgacgatcgccaccgcgacgtccctggtcaatttcggcgcgtttctcgccttcagtgcagtcaacctttgcgcgttgcggctctccttcgatacccgcctcggagacggggcgggcttgctgcgcggggtgctctgcccgctcgttggcctggtcacggccgggtggatgctggtcagcctggataaagacgcgctgatcatgggctgtagctggctgggcctgggggcggtctatctcgcttgccggaccagcttcttccgcaacccggtgcccgacgcgctggcgtag

SEQ ID NO: 321951 - DNA, 1158 bp, Pseudomonas aeruginosa
atggaattcaagttcttactccccgccaaagtcgtgatgggacccggcctgcgcgagcgcaccggcgaatacctgcgggaactcggcatggcgcatgtgctgatcgtgacggacgccggggtaaaggccgcaggcctgttgaatggcgtgtatgccagcctgaatgagtgggagatcgcgttcgacgagatatcggaggtcaaggcaaaccctcgcagcgaagacatcaaccaggcggcgcagctgtatcgcggcaaaggtatccaaggcctgctggccatcggcggcggcagcgcgatggacgcggccaaggcgatcagcctgctgctgacccacgagggccggatcgaagactacgagggctctttcaccctcaggcacgccatcccgcctatcgtcgccatcccgaccaccgccggaaccggcagcgaagtgacctgtttctcggtgatcaccgataccgcccggcatttcaagatgagcgtccaggattaccgggtgggccccgttctggcattgctcgactcccgcattctcgacacgctgcctgcatcgattgccgccgcaaccggcatggatgccctcacccacgccatcgaagcctacacctgccgtgtgtcgaatccgatcagcgacgggctggcgctgcatgccatccgcctgatcagccaatacctcaggcccgccgtactggagccgggcaacctgcatgcacgcgagcaaatgctggtggccagcctgatcgccggcatggccttcggtaacgcggacgtcggcagcgtgcactgcatttccgaagccatcggaggcatgtacgacacgccacacggcgtgggcaacgcgatcttcctgcccttcgtgttcggccataaccgcgacgccgacatcacccgccacgcgcaggtcgcctacgcattgggtatcgaccccaacctctcgccggccgaggccgccgaggccgctgtcggctacctgttccagatgagcaaggacctgggcatcccccgcttcgccgaggtgaaaggcgtgcgcgaggaagacttcctgagcatcgccgaaaagtcgaagaagaatttctccgacggcagcaatgccaagcaaatgacggtggaaacctaccgtgaaatcgtcgccgccgcttaccactacgtagcgtga

SEQ ID NO: 321952 - DNA, 876 bp, Pseudomonas aeruginosa
atgactgcggatcggttctgcgagctaccgggcaagcgtagcctctgctatcgcagccacggtccggaaaccgcgcctgcggtcatcctcatcgtcggcctggggctgcaattgatctactggcctgaagcgctcatcgccggcctggtcgagcggggcctgcgcgtgatcacgctggacaaccgtgactcgggcaggtctttcttcaccgaggtcaccccgccctcgaccctgcaacagttcttccgcaaaccgactgcggggtatgacctgggcgacatggccgacgatgtgatcggcctcatggatggcctgcgcctgggtgcggcgcacgtcgtagggatgtcgatgggcggcatgatcgcccagacacttgccgctcgttatccgcagcgagtcatgagcctggcgtccatcttctcgacgacaggatcgctgcgagtaggccagccagcgttcaagaccatcttgcaacttctccggcgtcctccccggaaccagcgggagagcgttcgcgactatgtggagatcatgcgttccgtcggtacgacgctggaatgggacgagcaggcccatcgcgactacgccatgcaagcctgggagcgaggcggcggggaagcgagcaacctcgggatggcgaggcagatcggcgccatcatcaactcgggcgaccgaacgcaggaactccagcgaattcgctgcaacacgctggtcatccatgctgagaaagacctcatggtcgccaccagcggaggcttcgccacggcggcggccattcccagggcgcgcttggtgctgttgccgggaatggggcatgacttccccgcctgcctgacaggaacgctgctttccctgctcgcaggccaaatgcattag

SEQ ID NO: 321953 - DNA, 1527 bp, Pseudomonas aeruginosa
atgtcctctcacactgctcttccaattgagccgctcgatgttctgatcataggagccggtgtgtctggcatcggcgctgcggcttaccttcgacgtcaccaaccgaacaaggtgtttgcgattctcgagtcccgggagcgaatgggcggcacctgggacctgttccgctatcccggcatacgctccgactcggacctgtacaccttcggcttcgacttcaagccttggaccaaggcgaaatctctggcggatgccgccgacattctcgaatacctgcgagaagccgtcgctgaataccagttggaccccttcatccagtaccggcagaaagtggtctcggcgaattggcagagcgacaaagggctgtgggcggtatgcgtcgaggacggccacacggcagaaacccgcaccatcgaatgccgctggctgttcagcgcaggcggctactaccgttatgaccaaggcttcagcccacgcttcgagggcgcggagcagttcaaggggcaaatcatccacccgcaacactggcccgagcgcttggactatcggggcaagcatgtggtggtcatcggcagcggcgcaacggcggtgaccctgattcccgccatggccgacgaggtcgccagcatcaccatgttgcagcggacgccctcctatatcgtcaaccagcccgccaacgattccgttgccgcttttcttcgcaagattctgccggcgcaaaccgcctactcactgacgcgctacaagaatgccaagatcaccctggtcttctggcgattctgccagcgcttccccgggctcgcccgcaagctgctcatatggctgacccgtagagaattaccgaagggctatccggtcgacgttcatttcaacccgccctacaagccctgggaccaacgcttgtgctcggttcccgaaggcgatcttttcaaggccatcagtgcaggtaaagcctcggtcgttaccgaccatatcgagcgctttaccgagtccggtgtcttgctcaagtccggcacggaactgaaggccgatatcatcatcacggccaccggtctgaacgtgcagttgttcggcggtatcgccctgcacaaggatggcgagccggtagtgttgagccagacgctggcgtacaagggcacgatgctttccggcgtacccaattttgcctttgcggtgggctataccaactcatcctggacgctgaaagtatgcctgctgtgcgaccacttctgtcgcttgctgggcttcatggacagccagggccataacgtctgcgagccgaaggcgccggatggtgtcgaaacccgtcccctgctggatttcggggccggatatgtccagcgggcattggatagcatgccgcgccaggggcctcgcgagccctgggtgatgtcgatggattacttccgtgacatcaagcttttgcgccgagggaaggtcgccgacgaatgcctccggttcagcacggtgcctgacgcctacctgcacagaagcgtggcgcttcagactcagggcggcgggcgatga

SEQ ID NO: 321954 - DNA, 582 bp, Pseudomonas aeruginosa
atggctcgagtgggcgccgaagtgcgcaggcaagactttattgaggccgccgtgaaggtgatcgcggaatatggtgtggcgaatgccactacccgtcgcatcgcggccgcggcgaattctccattggcctccctgcactatgtcttccacaccaaggacgaattgttcgacgcggtctatgaatccctgatagacaagccacagcagtccttgctgcatgttacggcgggagccacggcggcagactcggtagcagagatattgcgccagttggtcgggtggttcaccacgcatccggaactggcgactacgcagttcgagctgtttttctggaatctgcgtaacaaccccgctatggcgagcaagatctacaccgattccgtcgaagcgacgaagcaggccattgaacaggtcgctggctcggtgctggaccaggaagcgctggccactgtcagtcgcttgctcatcaacctgttcgatggcttgcttctcgcctggtccgcccatggtgaccaggagcggctgaatgccgagaccgaagccgcctgccaggctgtgaagctgttggtggccagcttctga

SEQ ID NO: 321955 - DNA, 888 bp, Pseudomonas aeruginosa
atgagtacgcgaagattgacgacagtcagctgcgacaccccgatcgagcaggtagtggaaatcatcaggcgtgatggcgctgtcgctatttgcaacttcgtctcggaagaaaccttgaagtctcttaccgaggacctggacagctatctgggcgttaccccctgcggcatggacccttacttcgccggcacccagactcgacgtaccgcgcggatcctggcgaaaagcgactccgccgtggaagtggcactgaaccccctgttcctcgagacggcaaagcaggtattgcagactcccacccatgtctgggtagggaacgatcgggtcgagatcacgcccgatatccaactgagcatgacccaggcgatacagatcgggcctggacaaggtcttcaacccctgcatcgcgacgatgccacttcgctctggcggcatccgcagtatggtcgcgaggctcgcttgcagctcatgctggcgattaccgacttcaccgaagagaacggcgcgacgcgggtcattcctggcagtcatcaatgggatgacgaacggatgcccacccaggaagaaaccatcggcgcagaaatgaaggcaggcactgcgcttctctggctgggatcggtatatcacggcggtggcgccaacagatccgacgctcctcgcataggcctgaccatggcctatgacctggccttcctgcgcctggaagaaaaccacttcctttccatacccgtcgagcgcgttcggcagctcccctcgcaaatgcagcgtctgctgggatggagtgccagttccacgctactgggttgggtggagatcgatggtcagatgcgtgacccgcaagagctgttgggcatgccctccttttccgaggcggggaaggggttctag

SEQ ID NO: 321956 - DNA, 1368 bp, Pseudomonas aeruginosa
atgaatgccttcaacggagcggcacgcaacaatgcagaacccatgagattccgcagccttggcggatgggtggagcagccagacgacctgcagccggcgctgaaaggccacgagcacgcagacgtagtcgtggtcggcgccgggttcgccggcctgtcaacggcgctggaactaagggcgcgtggagcgaacgtcatcgttctggaacagcagttcgcaggcttcggtgccagcgggcgcaatgccggctatctgctcggcagcatgggcatagaatgcgaggttttcgtcaagcgagtggggcttgagcaggcacgtaagttcgtcggtttctatgacgaggccgtcacctatgtggaagagcgtttggctgcgctggacatcgattgcgattacacgccctcgggaatcatccgggccgccgtccatcccagccaggaaaagcgactgcgagcgaacatggagcttggccacgcgctgggctctgtcacgcgcttcgtggatagcgccgagatgcgcgcgcgaggcataccgcccgcattcctgtttggcagcgagcagcgtggcggcaccttgaatccgggaaagtacgtcaacggcctgcgtcgtgcggcaatcaaggctggcgtgaaattgtacgaacgcacgccggtgctttcctactgtgaagggcaggtgattacctgcaatacggcccagggtatcgccaccgcccctgtaatggttctggcgaccaacgcctacacgcctcagctgggagtgctccgcaacaaggttgcaccgatccgggtttcggcaatcgaaacccagccgctatcggcggagcaactggcgtccctgggttggcaagagcgtgaaggcctcattacgccgcactacaccatggaaagtcatcgcctgacggcccatgacaccctgctgctgaccgtgaagcaattgggttatgcctacggctcgaagacacccaatgttccggaccacgccgcctacgccgcgttgtcgagagtgttgcgcgagcgttttccttccttgcagggccttgccattcggcattgctggagcgggtatatcagcggggcctacgacttcctccccgtggtcggggtgacaggggccaggcagaacatcttctatacggcgggatgttcagggcatggccttgccactcaatcgctcatgggcgcgcttttcgccgagcgaatcggcggtggagagcctccgctgctagcggcgctggaacacaagacgccatccatgctacccgagccacttcaatggtgcgccataaagacggcctttgcggccgccaggctactggatgcatggaccgacaagaaagtgcgcaaagacaaagccttgaacggctga

SEQ ID NO: 321957 - DNA, 663 bp, Pseudomonas aeruginosa
gtggaaccgagagacttgttcgctctgctctcatgtattctcctggtgatttccggattgttttatggcgctgcattcatcaggcggaaaaactatttgcttggcctggagttcttgatcgtaggtatctcggcatcgaacttcactacattcatagccaccggctggcaagccaactacaacatcgcgatctttctcgacgccttttcgcgaggggtgggagtgccagttatcgctacgctcgggctaatggcagttacccacgattacaaaccgtcgcccaccaaggacatcctcatttttgtagctggctttgccgctaccggcgtctatttcctgtctggaatcatcgagggattcctcccttatttctatgtattcatgtggtcagcctataccttgtatctttgctacttcaccttgcaactggcccgtgcaggcgaagccctccatactctggccaccatcgctggcgggctggcgggcctggtagtagcactcagatatgacttcttcccgattccgggagacgacacgaagatggtcttcatgaccatggccttcctggcttggtcctattccatggtgcagttgtactatgcctatggtgcgctggagcgttcgaacaaggtatacggccaagcgtttcctcgtccgcgataa

SEQ ID NO: 321958 - DNA, 1425 bp, Pseudomonas aeruginosa
atgaaagatgtaactgaacggctggaaggtgaagcgcccacccgtcgtgttttccagcagcagttgttcatgaccctcgcggtatcgaccgtgctctgttcggtccaggctgcgccccagggccccgaggcgctggggtcgaaactgacccccttgggcggggagatcgcagcgagtgcaagcggggatattcctgcctggacgcagcctggacagcaggacgagggatggagctacggccaggtgcgaggagagcactggaagttcaagggcgacaagccgctctacagcatcgacgcgaacaatctcgcgcaacactcgagcaagctgtcccccggacaggtcgaactgttcaagaggattcccggctatcgcatggatgtgtatccgacccgtcggacctgtagcgctccggacttcgtggtcgagaacacccggcagaacgttggtttcgccaagctcgatgctgccggcctcgctctggacgaggctcacgttccgggcatcccgttccccatgccgagtaccggtgccgaggtgatgtggaacatgaagatgcgctaccgcggcgttggcgtcgaaattccccggaccatttccggaatttctccacgcaaagggggggaatggttacgtcagtcgacagataccttcttcttcacgccctgggggaaaaaggggagtgcgctcttctcgtcagttggccgcctggagaatgcgaccttcttcaactacctcgagccggctgctctggccggccagtccgcggtacagactgccgtggccggcgaacaggccacgaccttctactacttccccggccagcgccgcgtgcggcgaatgccgtcgtactcctacgatgcgccacagatcggcctggataaccagtacaccgtcgacgaggcgaacgtcttcttcggcaccatggaccgtttcgactggaagctgatcggcaagcaggagttgctggtgccttacaacgatttcggtgcctacgacactggcgccaaggtggagacgtttgccggcaacgactcgatcgcgccgcagtcgcgtcgctatgagctgcatcgggtctgggtcgtcgaggccaatgtccgtcaaggcatgcgccatcaggcgccgaagcgcatgttctacatcgacgaggacagctggaacccgttgctggcggtggactacgacaagcaagggcagatctggaaagtgcgcgaagggttctcgattcccgtgtacgagacaggcgcctgcgacgtccaggcccaggtccagtacaacctggcggatggccgctacctcttcgacatgacctcgatcggtgcgggcaagaacgatattcgctggctcaccaaagacaacggctccccccgcctgaagcgtgacttcttcacctccgacaatctgcgagccatcagcgagcgctaa

SEQ ID NO: 321959 - DNA, 1587 bp, Pseudomonas aeruginosa
atgggattcacgttcgaaaccgaaaccctcaatggctccttcgactccacgatcaccgcaggcatgggtctgcgtaccgagtcacggggctgcaacctgatcaaccagggaccgaccgggcacaacgcgccctccggctgcctggcgcagagctccggcgtggccgaccagggcgacctgaactacgaccgcggcgacatgttcaccaactacctcaagggcacccatgagctgttgctgaagatgcccgaggacatcaccttcatggcgcgcggcacctggatccgcgacttcgctgccaccgataccaccggcacgctgtcgttcaacaccccggagagcgtcggcagcaacgggctgagcgacgacgctcgcgacgacctcgcgttcaaggcccgcctgctggacctgtgggtgagcaaaggcttcgacgtgggcgggcagcgggtccgcgcacgcctgggcaaccaggtgatcaactggggcgaaagcctgttcgtggccggtggcatcaacaataccaacgcctacgattaccaggccttggcgcgccccggcgtgcagctcaaggaggccgtgctgccggcgccgatgctcagtgtcgcgtcgggcctgggctcgggtgtcaacgtcgaggcctactatcaattccgctggaacaagagcgaattgccgccggtgggcagctactggtccaccaccaacgcgctgggtgagggcaggggggactatggattctccgaaaaggacgcccgcgacagcggccagtggggcctttcgctgcgctggcagccggaggacagcgacgtcgcctatggcttctacgtgatgcgttatcacgacaagttgccatcgttgcgtgtcgccattctcgacccgaacaccttcgcggcggcaccgacctgggagtaccaggaagaccggatgatgtacggcatcagtgccaacatgccgatcggtgactgggccgtcggtacggagctgtcgtaccggccgaaggactcggtcatgctcaacccggtcatcgacctgtgtaccggcaacggcggcaaatgctggaaggacgagaagaaattccagtggcacctgacaggcctgtacagcttcacgccgtccaattccccgacgcttctggatttcagcggggccagcacgggcagcttgctgaccgaactggtggtcatcaagtacccggggctgcatgacgaggtcaatggcgaaccgctcgccgcgggactcaatgcctggcagctggatcctgccagagcgccgaagtcccgtggcgacaagacctcttcagggatcaacctggacttcagcctgacctatgacggcaccttgttgccgggctggcaggtcacgccgggcgtcttctatgcacggtcgctgggaggacggacaccgaacctcagcgcaaccttcaccgaggacgcgagcagcatgaacctgtacctgaacttcgtgcggaacccggccagttggcagatttccctcaactacgcgaagttcatgggcggtgagacgccctacgaccagctttatcgtgaccgcgattatgtcggcatcgcgatctcccgcaccttgtga

SEQ ID NO: 321960 - DNA, 2403 bp, Pseudomonas aeruginosa
gtgaacggttctgtaaagctacctgaggccccgacacgtggcctgttgtcatatgtcgaaggtgtgttgttcaggcatcgccggctggtgctggcgagcctggcggtattcacgctgatcatgggctggttcgccgtacagctgcgcatggatgccggcttcgaaaagcaattgccggtaggccacgaatacatcgagacattcgaggcctaccgcaatgacctgctgggggcgaaccgactgaccatcgtggtcaaggcccgagagggcgatatctggagcgccccgggcctgaagcggctgtatgacgtcacccaggcggtgaccttcctcccgggagtatcgcgcagcagcgtgcgctccctgtggacgcccaacgccttcgtcaacgaaatcaccgaggaaggttttcgtgctgatccgctggtacccggaacggtttctcccgagcacctggatgaccggatcatcgcgaagatcgccaattccactgcccagggcggcttcatcggtacgctggtttcccgggaccagagcagcgcgatgatcacggtggaactcaacgagtacgatagccagggcgcccatctggactacgtaaccttcaaccatcggctggagaaagagatccgccagcgcttcgaagacggcgatttcgaaatccagatcatcggtttcgccaagcagatcggcgacatcgccgacggagcttcagccgtgctggagttctgtttgctggcgttgctgctgacggcgggggcggtgtactggtattgccactcgctgcgtttcaccttgctggcgttggtctgttcgctggcctcgctggtctggcagttcggcagcttgcgcctgttgggctacgggctcgatccgctggcagtgctggtgcccttcctggtattcgccatcggggtttcccatggcgtgcagcaaatcaacttcatcgtgcgcgagatcgccatcggcaagagcgccgaagaggcggcacgctcgagcttcaccgggttgctggttcccgggacgctggcgctggtgaccgcgctggtttccttcgtgacgctgctgttgatcccgatcccgatggtgcgggaactggcgatcacggcttcgcttggcgtggcctacaagatcgtcaccaacctggtgatgctgccgttgatggcgtcgttgctgcgcgtcgacgacaagtacgcagccgcccaggaggtttcccggcagcgtcgcagccgttggctgcggggcctggcccggctcgccgagccacgcaaggcgcagtgggtgctcggcgcggccttggcggtgttcctggcggcgatctggcaaagccatgaccgcgtcgtcggcacgctgctggcgggtgcgccggagttgcgcgaggactcgcgcttcaatcgcgacgcggtctccatcgccagcaactacgacattggcctggactggctcagcgtggtgttcgaagtcgacaaggctccttccgaggtggcctgcgaggatgttgccctgggccagtaccaggatcgtttcgtgtgggccatgcagggggtgcccggcgtcctctcggtcgcgtccttttccaccaccatgcgtcagttcaacgagggctacaacgaaggcaacccgaagatggcggcggtgcccatcgacccgatgaactacgccgcgctggccaccgaggttgcgcgaacccccgggctgatgcgcaccgattgcagcatgtcggccgtgcacctgtacctggccgatcacaaggccacgaccatcaaccgagtggtggacgccgccaaggccttccgcagcgagtatccgatgtcaggcatttcgattcgcctcgcctccggcaacgccggcgtcctggcagcgatcaacgaagaggtggagaagagcgaaacccccatgctgctttacgtctatgccgccatcgccttgctggtgttcgtggtctatcgcgacttgcgggcagtcctggtgtgttgcctgccgctgaccatcggcaccttcattggctactggttcatgaaggagctgcagatcggcctgaccatcgccaccttgccggtgatggtgctggcagtgggcattggcgtcgattacgccttctacatctacaaccgcctgcaactgcacctggcccatggccagacgatcaccaaggcggtggagtacgcgctgctcgaggtgggcgtcgccaccattttcaccgccatcaccctggccgttggcgtggccacctgggccttctcggagctcaagttccaggccgacatgggcaagctgctggccttcatgttcgtcgtcaacatggtcatggccatgaccgtgctgccggccttcgccgtatggctggagcgggcgttcccgcgcaaacgtcccgtgcgcatgatcggcgcgctggtgcactga

SEQ ID NO: 321961 - DNA, 963 bp, Pseudomonas aeruginosa
atgaagttcagggtttcattcaccgcggccttgctcgcagcaggattgccgctgatgtctctccaggccgcgccgttgcaggccgtgccggccgtgcaggcgggcaatgccacgcaggccaccatgctggccgccggctgggccggagagcgggtggttgccgtgggcgaccacggtgtcgtgttgttgtccgacgaccagggcaggcagtggcgccaggcacgctcggtcccactatccacgccattgacgggtgtgtccttcgtggatgccaggcacggctgggcggtgggtcactggggggcgatcctgtccaccgccgacggcggggaatcctggcaggtccagcgcctgtcgagcgaagaagaccggccgctgttcgccgtgcactttttcgatgcccggcagggcgttgcggtagggctctggtcgttggtgctgaccaccgaggatggcggcaagacatggacggggcagccgttgcaagcgcctccaggagccaagcgggccgacctcaacctgatggggctgtttgccgacaaccacggcaccctgtacgccacggccgagcatgggcaggtgctgcgctccgacgaccaggggaagaactggcgttacctggataccggctatgagggcaccctgtggtctggcgcggtgctggccgatgggcgtctgctgctgggtggtcagcgtggcaccctgttgcagggctctgccgatggcaaggcttttcgcagagtgccaacgcaaggcaagggctcggtcacatccatagcagtggctggcgctcgggtactggcggtcgggcttgacggactgaaggtacggagcagggatggtggaaacagtttccaggaagcaccgtcggctgacggcctttcgctgacggcggcgctgttcaacgccgacggcacgccgctgctgttttcacgtcgcggagtaatgccccgccaggaatga

SEQ ID NO: 321962 - DNA, 867 bp, Pseudomonas aeruginosa
atgtcagcctctcgcgataccttcagcctgcccgtcgtaacccgctcgactccagcgcaagagattgcactgctgagcgaccaggcaggtgcggtgatcatccgcaacttcatgacccccgaacaagtcgcacggatcaacaacgaactggacgctcccctggccgcgctcgaggccggctccaagcaccagcacgagctgatcgccgagttccatggccgccagaccaaacggctcaccaacctcgtcacccacagcaagacctttcgcgaggagatcctcgatgacgacctctttcacgacctggggaacgtgctctacgccgcggagtgcggtgactggtggctgaccacggcccagttgatcgagatcggcccaggcaacaaagcgcaaatgctgcaccgcgacatggcgcagtaccaaccgttcgtggccatgaataaacatgcgccgcgcaccatcaccaacctgatgctggcgctgaccgatttcaccgaggaaaacggtgccacgcgcttgatccccgggagccaggactgggatgacttcgacgatgtaggaaccccagaaatgacgatccctgccctgttgaaagcaggagatgccgtgctgttcggcgggaaagtcgttcatggcggcggggccaacgtgaccgctgacttctaccgtcgcgggctgaccatcccgatgcaggcttcgatcatcacgcctgaagaggcctacccgttgatcgtgccgctcgaactggtcagaacgcttgctccgcgcgttcagaagatcctcggcttccgctcccagtaccccaatggcagcccaggcctgtggcaacataactacgcagacctggccgactatctccagctctag

SEQ ID NO: 321963 - DNA, 1200 bp, Pseudomonas aeruginosa
atgcgcaaaggcgccgagctcgctcagacgctgccgccggagtgggtcgagcgcctcaatcaggcgctgttctcttcaccggaagatgccaagctgctggaggacccggtcatcctcgcggcgtgccggcgcgccaaccgcgcagagttgctgcattgggcgaacgccaatctgcagcgccccggagaaccggtgcaaccctacgtctcggccgacatggtggacacggccagggaactcgcccgcagagggctgtccgagctgctgatgaatgtcgcgaggtcgacacagaacaccgcctgggagctctggatgaagatggccttcaacctgacgcaggatcccagggtgcttgaggaattcctggaggtctcgtcgcggtccatctcggagttcatcgacagcaacatgcgtgtggtgacccagatcatcctcgaagaaaagagcgcccaggcccatgacgacccgatcgacaaacgaagcctggtcagtcggctgctcgagggcagggatgtggatacggagcaattcggcaggcggctgggctacagccttttccagaagcactacgccggcctggtctggtgcgaaagcccggacgccgagatccgccttctggaggatgtggcgcgtaccctggcgcaactcacgggcacggcggcgccgttgatcgtattcgccggccccgcgaccctgtgggtctggagccatgcggcgaaaccgctggacctgaacctgctgcaaggcatcgcactgcggttttcagggattcgcgcggcaatcggctcgccgggcacgggagtcaatggcttccgtcgctcgcatctggaggccctgacgacgcaaaggctgatgggccgcctggcgggcgcacccgccgttgccaccatcgaccaggtgaggatggtgtcgctgatgacccaggacgaccgcgcggccaggcagttcgtcttgagcaccctggggcggctggcgacggagccttcggtgcttcagcgctcgctgcacgccttcctggccaatggctgcaatgtcacccagaccgcagaagcgctgggcacgcatcgcaacacattgctgcgccggctggagcgtgcccaggacctgttgcccgtccggcttgccgatcatcgcattcagatcgccgcggcccttgaactggtgatctggagtactcccctgatcgatgatgataaataa

SEQ ID NO: 321964 - DNA, 543 bp, Pseudomonas aeruginosa
atgtcacctagcccctcccccgacgagcgtcggcttgtattcgaagcgcgccgactgaccattgaagcactggtgaaaatctatcttgagcaggtttcttcctcaaggaacctggtgacggtctaccttcgcctcatgttcactttgtcactcggtgccctcgccggcgtgataactctatatgggaccatgcttcgctttggcacttcggccagtatcagcatgatcactcccctggaggtggttcttgctatcgcagcgcttgcggccctggtcacttcggctctgctttccgcgcgggcgctccagaaaagtgcattcgatgtcgctccgctcttgcataacccatttccaagcgcggactcggtgatcgattcaatattcgatgcagacgatatcgatgagcggcaaatactcagaaagctttatttcgccctggacaagactgtcgagcatcagcctcctctcaggctcagcactcgtctgatcaccctcttccttattggcggtcttttcctgaccggggcatcctttttactgtga

SEQ ID NO: 321965 - DNA, 507 bp, Pseudomonas aeruginosa
atgtcacctagcccctcccccgacgagcgtcggcttgtattcgaagcgcgccgactgaccattgaagcactggtgaaaatctatcttgagcaggtttcttcctcaaggaacctggtgacggtctaccttcgcctcatgttcactttgtcactcggtgccctcgccggcgtgataactctatatgggaccatgcttcgctttggcacttcggccagtatcagcatgatcactcccctggaggtggttcttgctatcgcagcgcttgcggccctggtcacttcggctctgctttccgcgcgggcgctccagaaaagtgcattcgatgtcgctccgctcttgcataacccatttccaagcgcggactcggtgatcgattcaatattcgatgcagacgatatcgatgagcggcaaatactcagaaagctttatttcgccctggacaagactgtcgagcatcagcctcctctcaggctcagcactcgtctgatcaccctcttcctttattag

SEQ ID NO: 321966 - DNA, 969 bp, Pseudomonas aeruginosa
atgccggcacccggtgcccgggtgctctggaacgcgcttttcaacaagccgagaagcaccgtcccgcggcagcctttacccgtgctcagcccgagccgtgccgagctcgatgcgaccgtcgatggcagtctgttccgcctgggtcattcgaccttgctgctgaaactggccggtagctggtggttgaccgacccggtattttccgagcgcgcctcgccgttgccgttcgccgggccgaagcgtttccatgcgccgccggtggcattggcggatctcccgccgatccgtggggtaattctttcccacgatcactacgaccacctggaccgcgccgcgatcaaggccctggtcccgctcgtcgaactgttcctggcgccgctcggcgtaggcgaccgcctgctggcctggggcgtaccgccaggcaaggtgcgccaactggactggtggcaaggtatcgaggctggcggtttgcgcctgactgccacgccggcacagcacttctcaggccgtgggctacatgatgggaaccgtacgctgtggtgttcctgggtgatcgaaagcgccgaactgaagctgttcttcagcggagacagcggttacttcgatggtttcgccgaaatcggccgccgctacggaccgttcgatctgaccatgctggaaaccggcgcctacaacgaacattggccgtacgtgcacatgcacccgcagcagaccctccaggctcaccgggatcttggcgggcgctggctgctgccgatccacaacggcaccttcgacctggccatgcatgcctggtacgagccgttcgaacggatactcgaactggccaccgaacacggcgtgcgggtttccacgccgatgatgggcgagcggatcgacctgcaagcaccgcatgccggccgacgctggtggcgcgaagtggtcgacagcgaaacgcaggtgcagggttacggctgttgcagaagctag

SEQ ID NO: 321967 - DNA, 363 bp, Pseudomonas aeruginosa
atgaaacacatgctccccctcatcgcactggccctggcaaccacgactcccctcgcccactccgccgaagtgatttccgcagatagggaccgaacggtcggctacggcgccggcggcgtggttggcgtcatggtcggcgcggccctcggcggtcccctgggcgctatcgccggggccgcgctgggagccctgggaggcgcctccgtccagcaggcaaccggtctgagcgaaaatgcctacaccgttcgctacgaggacggcacgaccgaacgcttccgctctcccaacgcccggttcgacgccggcgaccaggtgcaggtacaaggcatccgcctcatccctgccccgtcgctctcgcgttga

SEQ ID NO: 321968 - DNA, 741 bp, Pseudomonas aeruginosa
atgagtgaattcaacgaccggttcgccgtcgtcaccggcgcgagttccggcatcggcctgaaactgaccgaaacgttgctcgggcacggcgcgactgtcctggcgatggcaaggcgcgaaggaccgccggaaagcctgcacgcccactccggcaagcgtctgcactggctggcgggcgacgtcacccgcgaacgggacctggacgccctggcttcgcgtgccgcgtccatcggccccgtcgattacctggtacccaacgccggcatcgcccagctcgccgacggcctggacagcctggcgttcgagcagcagtggcgggtcaacggcgccggggcgctgaacaccttttccgtgctcagccggcaaacgagcaaaccggccagcgtagtcttcatcggtaccttcctcagccaagtgaccttccccgggctcgccgcctacatcgcttccaaggcggccctgatcgcccaggccaggacgctggcggtggaatgggcggaaaaaggcgtgcggatcaacctcgtctcccccggccctaccgccaccccgatatgggcgtcactgggcctgagcgatgcccaggcggagtctgtcacccggagcatcaaccagcgcctggtcgacggcagcttcctcagccccggggaaatcgtcgacgtggtgatgttcctgctgtcgtcgaaatccgccgggctctacggccaggagttgatcgtcgacaagggctacgggctgcgctga

SEQ ID NO: 321969 - DNA, 720 bp, Pseudomonas aeruginosa
atgcccctgcctgccctacccctggatgcccttctcaccggccgcgcccggcccttcacccgccccggctcgcgcagcggcatcgccaagtctccgcgcgacggtgcgctcagggtcacccccgtcggcctggaaggcgacgaacagggcgacctgcgcgtccatggcggcgtcgagaaggcgatccaccattatccgcgcgaacactacgccgcctggatcgccgaactgggcgaacatcccctgctgatgcaggcgggcgccttcggcgagaacttcagcaccagcggctggagcgaagccgacgtctgcctcggcgaccgcgtgcgggccgggaccgcgctgctggaggtgtcccaggggcgcatgccctgctggaagctcaacgaccgcttcgaggtcgccgggatgtccctgagggtgcaggagtccgggcgcaccggctggtactaccgggtgctggaggaaggcgtggtggcggctggcgatatcctgcaactggtcgaacggcgccatccggactggtcgttgttgcgcctgtccgaggtgctgttcgacaggcgggccgacgccgagctgctgcgccagtgcctggcgctgccgctgacgccatcctggcggcgcaccctggagcggcgcctggaaaaaggccaggtcgaggactgggggccgcgcctggagggagcccccagccaggccgagacgcccaggccgacctga

SEQ ID NO: 321970 - DNA, 597 bp, Pseudomonas aeruginosa
atgctgcggctctcgatgccggccctgctcctggctcttgccggctgcgccaccaagccccccgccaatcccgacaacctctgcgagatcttccgcgaaaaaccgaaatggcacgaggcggcgctgaagatgcagcagcgctggggcgcgccggtccaggtgccgatggcgatgatgtaccaggaatcttccttcaagcatgacgccctgccgccgcgctactacttcctcggtttcatcccctggggccgggtcagctccgcctacggctacgcccaggccaaggacgagacctgggccgactacaagcgcgaggccggcggctggggcgccagccgcgacgacttcgccgacgccctggacttcatgggctggtacatccagaagagccaacgggtcaacggcgtctccaagtgggacgcctacggccagtacctgaactaccacgagggctggggcggctaccgcaaccgcagctacgacgccaagccatggctgaagaacgtctcgcagaaggtccagtcccgcgcctcgctgttcggcgcccagtaccgcagttgccagcaggagctgtcgcgcggcggctggttctggtag

SEQ ID NO: 321971 - DNA, 1437 bp, Pseudomonas aeruginosa
atgcattcgaagtcggtagatagcctgtcgctgacacgggctggattcatcgagtacttcctggtcgcgaccaagctggtacacgcgctcaccgccatcgccccggcgctgttcctgctgtactaccccggcctggttcccgtggagctgcgcagcaacatgctcgggctgctgctgttcttcggcgcgctcacggtgatcatgttccaggcactggacgtctactccgacgatatcttcagcaaccgcctgcgcttccgcatcatgttcttcgcctgggcctcggcgttctgcctgctgttgttcatgtaccagggcctgggcctgtttccctacctcagcagcaagctggtgatcttctggttcaccggcagcctgctgctgttcggcgtgcagcgcctgctggtgctgcgcctgtaccgggcctggatgaaacgcggcatgtacctgcaacgcacggtgatcctcggcttcaccgagagcggcatgcacctggccgaatacctggtacgcaaccacgacatccgctccggcatcatcggcttcatcgacgaccgctccgagcgggtcccggagaactacaactcgctgccgctgctgggcaacaccaaggacctggagaagctgatccgccaggaacaggtcgaccaggtgctggtcgccctgccctggttcgccgaggggcgcatcggcgccatcgtccatcgcctgcggcaattgccggtgaacgtcctgctggtgccggacatggctgccttccggcatgcccacaaccgcatcgtcgacgtttccggaatccccatgttcaacgcgtccgagctgccgctgcgtggctggtcgccgctgatcaagcgctgcgaggacctggtcctggcgagcatcgcgctggtcctcttcgccccgctgatggccctggtggccctggcgatcaggctcgactccaaggggcctgtgctgttccggcagaaacgctacggctacaacaaccggctgatctgggtcttcaagttccgctcgatgtacacggaaaggaccgacgccaacgccgaacgccagaccacccgcgacgacgaccgcatcactcgggtcggccgcttcatccgcaagaccagcatcgacgagctgccgcagctgttcaacgtgctcgccggcagcatgtcgatggtcggcccgcgcccccacgccaccgcgaccaaggccgccggcattcccttcgaggaggcggtcagcgaatacagctcgcgccaccgggtcaagcccggcatcaccggctgggcgcagatcaacggctaccggggtgagaccgacaccctgcacaagatcaagaaacgcgtggaatacgacctcgaatacatcgccaagtggtcggtgtggttcgacctctacatcctgttccgtacggtgccagccgtactcctgaccaaggaagtctactga

SEQ ID NO: 321972 - DNA, 1467 bp, Pseudomonas aeruginosa
atgaacgccgtcgccccgctgatcccctgcatcgtttccggcggttccgggacccgcctgtggccggtttcccgggagagcatgccgaaacccttcatgcgcctggccgatgaccagagcctgttgcagaagaccttcctgcgtatcgccgggctgccggacgtcgcccgcctgctcacggtgaccaaccgcgatctgctgttccgtaccctggacgactaccgcgcggtcaaccgcagcggcctggcccaggacctgctgctggagccgatgggacgcaataccgcgccggccatcgccgccgccgcgctgcatgtgcaggagcacttcggcgaccaggcgcagttgctgatccttcccgccgaccacctgatccgcgacgagcaggccttcgccgcggcggtggccgaggctcgcggactcgcggcccaaggctacctggtgaccttcggcatcaccccggagcgcgccgagaccggcttcggctatatcgaacagggcgccccgctgggcaacggcttccgggtcgcacgcttcgtcgagaaacccgaccaggccaccgcccagtcctacctggacagcggcaagtacctgtggaacgccggcatgttctgcttccaggccgccaccgtgttgcaggaactggagcgccacgcgccggaggtgctgatcgccgcccgcgccgccctggccgacggcagcagcctggagaacggccagtgccgccagcgcgagctggccgccggggccttcgccgaggcgccggacatctccgtcgactacgcgctgatggagcgctcggacaaggtcgccgtggtgccctgctccatcggctggagcgacatcggctcctggcaggcgctgcgcgaactcagcgcggcggacgagaacggcaaccaggtacgcggcgaaagcgtgctgcacgacgtcagcaactgctacatcgattcgccgaagcgcctggtcggcgccgtcggcgtgcacgacctgatcatcgtcgacacccccgacgccctgctggtggccgacgcggcgcgcagccaggacgtcaagttcgtcgcccaggaactcaagcgtcgcggccacgacgccttccgcctgcaccgcacggtcagccggccctggggcacctacaccgtgctcgaggaaggccgccgcttcaagatcaagcgcatcgtggtgcgccccaaggcttcgctgtcgttgcagatgcaccaccatcgcagcgagcactggatcgtggtcagcggcatggcgctggtggagaacggcgagcgcgagtttctcctcaacaccaacgaatccaccttcatccccgccgggcatagccaccgcctgagcaatccggggatcatcgacctggtgatgatcgaggtacagagcggcgagtacctcggcgaggacgacatcgtccgcttcaacgacatctacggtcgcgcccccgccagcgacgagaagaaagcctga

SEQ ID NO: 321973 - DNA, 912 bp, Pseudomonas aeruginosa
atgcgctgcgccctggtcattcccacgcgcaacgccggcgcgcacctggaccggctgctgccggccctggccgcgcaacggcggcagccggacagcatcctggtggtggacagccgctccagcgacgacacggtggagcgcttccgcgccttcggcgcgcgggtcgaggtcatcgagccggccagcttcaaccacggcgggacgcggcgctgggccagccagcaggtcgaggccgacgcgctgatctacctgacccaggacgccattcccgcctcgcccgacagtttcgccaacctgctcgacgaactctatgccgaggccgacatcggcgtggcctacggccgccagttgccgcaccccggcgccggcctgctcggcgcccaggcgcggcgcttcaactacccgccggaaagccgcagcaagcgcctggccgacgcctcggaactggggatcaagacctgcttcagttccgactcgttctccgcctaccgcagcgacgccctggcggccgtcggcggcttccccgaagacgtcatcggcagcgaggacgcctacgtcgccgcgcgcctgctgcaggccggctacgcggtgcgctacgcggccagcgccgaggtctaccattcccacgattaccgcttgctggaagagttccgccgctatttcgacatcggcgtgttctacggccgcgagcgttggatacgtgctgccttcggcggcgcgggtggcgagggcaagcgctatgtcctcgccgagatacaggccttgcgtgccgccggtgccctgtatcgcgtacctgaaatagcgctgcgtagcgcgttcaagctgctcggctaccgccttggccagctggaacgccacctgccggtcgccctcaagcgccgcatcagcatgtttccaggctactggaagtga

SEQ ID NO: 321974 - DNA, 795 bp, Pseudomonas aeruginosa
atgacctacaggaagtgctccctcatgaaacgcaccctcctcatgctcgccatgctcgccctggccgcatgcaacacccccgcacggattcccgcaccggacagcgacaccgtggacagcggcaagcgtgccctggaagaactcgccaggctaccgccggcgatggagcgggtgcgcgtcggggacaccctgcggatcgtccgcgatgccggggagatgccgaccctctcggcgttcaacgtcgccaccatctatgaactgacgctgtacaccgtgctcaacgacggcagcatctactatccgttcatcggtcgcatccaggccgcgcaccgcacgccgcaggaaatcgccaacgagctgaccaccaagctcgcgccgatctaccgcgagccgcgggtcacggtgaacatcaaccaggcgccgggcaatacggtgttcgtcggcggcgcggtgcgcaacccgtcggccgtgccgatccccgccgccaacaacatggagcaggcgatcctcggcgccggcggcatcctgccggtgggcgacgcccgccgcgtggcgctcatgcgcgaggactcggaaggccgctatcacgcctacttcctcgacttcagccagttgatgaagatcgggccggaaggccgcaagcccctgaccatgcagcgtggcgacatcgtcttcgtgcccaagtcgatggtcggcgaccgtatcgagggcgtcgacgtctacctgaaccagttgctgcccttcgccaagtccatcggcgtcggcgtcagctacaccgtcaacaatgatcgctga

SEQ ID NO: 321975 - DNA, 1989 bp, Pseudomonas aeruginosa
atgatagaaattcgttccttgcgtgatctgttgcgcctgctgttcatctaccagcgcgagttcaagctggcggccctcagcgcggtggtgatcatcgtcctcggcgccttcctgctgccggccaagtacgagtccaacgcacgcctgctggtcaagccgggccgtgactcgaccctgccgatcgagatcagcaaccgccaggcgctggtgatgccgagcacccagcgcgaccctatcgtcgacgaagaacgcctgctcaccggccggccgatcgtccgtcaggtggccgagcgctacctcgaggtgctggccaaccggccgccgccggagggcctgtggaagcgcaccaagttctatgtgaagaaggccatcggcgcggtgttcgacgggattcgcgtgaccctggaaaccttcggcgtgatcgaggaaaccaccgcggtcgagcgcctggccaaggacctcgagaagaaattcgaggtcacccatgcggccggctcgacggtgatggagatcagcttcacctggagcgagccggaagtcgcccaggaagtggtcaaggcctggatcgagatctacatggaagagcgcacccaggcgctcggccgcaagagcctgtacgccttctacgaggcgcagactgccgacagcgcggcgcagatcaagagctacaaggcgcagatcctcaagcacctcaacgagatcggcgcatccagcatcgaggaccgcctgcaggacctgtccgagcggatcaacgtgctgcgcggcgagcgtttcaactcgatccgcctgatcgcctcctccgacagcgccttggaatccacccgccagcaactcaaggggctgcccagggagatcgtcacggtgcggcagatcgcgctgaacccggcgcagcaggacctgcgccggctgctcaaccagaagcgcctggaacgcgccgacatgatgcgcacctacaccgacgacgcgccgccggtgaaggccctggacgcctcgatccgtgccctggagaaggaagtccaggacgaaggcgccaccgtgcagagttccgaggaccgcgcgccgaacaccctgaccactcacctggaacgggtcctgctggacgagaccagcaacaacgcggccctgcgcacccagctcgcggagcaggaaaagcagctcgccgaactcgaggcgcaacggcgcgaagcgctggacatcgagccgaccctggcgcgcctgcagcgcgagctgaacgccaccgagcgcaactacgcgctgtacgtcgacagcctggagaaatcgcggatcgaccgtgaactggacaagagccagatcagcaacatctcggtgatcgaggaagccacctacaaccctgggcggatcttcccgaaaaccctgctgatgctgttcctcgccgtgcccttcggcctcgccgtcggcctgctggtggtctatctctgctacctgctcgaccagcgcatccacgacggcggcctggtcgaggagaaattcggcctgccgctgtggaccaccctgccggagctgagcaatagcaccgcggagagcagcaacgccttcaccgccagcatctaccggctgtacgggctgctgccctacgcgcgcatcgaggaaaagggcctgaccctgggcctgacctcggcgcgccacggtgaaggcgtgaccttcatcatcgagcaactgcgccgcctgctggaggaaaacggcgtgcgcgtgcggatcggcggcgaaccggcccagccgggtgaagtggtattgctcgacgcgccggccctgctggacagccgcgaggccttcatcgccctgcgccgcgccgacctgatcgccctggtggtagaggcgcagaagagcaccgtgccggtggtcgagcatgcgctgaccatcctcaccacggcgttcggcaaggtcgacgggatcatcatcaaccggcgccgcttcgaggtgccgagcaaggtcctgcagaccatcgcccgctaccggagcgcgttctga

SEQ ID NO: 321976 - DNA, 1188 bp, Pseudomonas aeruginosa
atgcggatcgccctcctcgcgcccctgccgccggaaaagaatggcatcgccgactacgccagtcatttccgcaacgccctgcagggtctcggcatcgaagtagccacgccgctcgccggcgtggcggccgacagcgcgaatatcgccagccggctggacagcgtcgactggaacggcttcgacctggtccatgccgaactcggcggcggccgcctgggtgagttcatcgccctgcgcgagctgcgcaagcgtttcccgcgcctgccgctgagcgccacggtgcacgatccggagcgcatggtctggcgccgcgagcgcctgccctggccgctgaacctgctggaacgcctgccctctcccctgccccaggccgccgtggtgctcgccgacccgctgaccctgcgcgaagagcgtgccgtggcccagggcctgacgcgcctggtgaccctcaccggcctgggcggcgagtgcctggcccggcggatgcgcctgccgcccgggcgggtcgaggtgatcaaccacggcaacctggagatcgccacggtgccgctgccgtcgctggacaccctgcgcctgctgtacttcggattcatctatcgcggcaaaggcatcgaggacctactcgaggccctcgccgacctgttcgccagcgcgccggagatgcgccagcgcgtgcgcctgaccctggccggcggcaccgccgcggaaatggccttcggcgccggcggcaactacctcgaccagttgaaggcacagatcgccgagcttggcctggccgacgccatcgactggaacctgaacctggccgccgcggacatcccgcgtaccatccaggcccaccacgtgatggtcctgccgtaccgcgagtcgaagaaactcggtctgctcggccagcagcgcggcaccagcggcgccctgtcctgggcggcagcctgcgggcgcggcgcgatcacctcggacgctcgcgccttcgccgaggaagtcgccagcggcaacggcgccatctaccctcagggagacgtggcagccctctccgaacagttgttgaacctcgctcgcgaaccccgcctggcacaggcctgggccgagcgcgccggagcgatcggccatgcgcggacctggccgcgcaccgcgctgcgcttccaggcactgttcaacgacatggtgggaaccgttcatggcacgtaa

SEQ ID NO: 321977 - DNA, 1329 bp, Pseudomonas aeruginosa
atggcacgtaagggactctatctgggcggcagcgcgctgctgctcgccgtggtactgctgctggtgttctgggggcgtcccgccgacgccgagatccaggtactgaaggcgcctcgcgcggtggtctggaaagacttcctcggggtcaacgcgcagttcctctggttcagcccggagcgttacaacaagcagatcgaccgcctgcaggacctggggctggagtgggtgcgcctggacctgcactgggaccgcctggaaaccgccgaggaccagtaccagctggcctccctcgaccagttggtcaaggatctcgaggcgcgccagctgaagtcggtgttctacctggtcggctcggcccgcttcatcaccaccgcgccgttctactcgcccttccaggaccagtatccgccgcgcgacccggaagtcttcgcccggcgcatggcgatgctctcgcagcgctacccgagcgtggccgcctggcaggtatggaacgagcccaacctgatcggcttctggcggcccaaggccgatccggaaggctacgccaagctgctccaggccagcaccatcgccctgcgcatggtcgacccggagaagccggtggtttccgccggcatggccttcttcagcgagatgcccgacggccgcaccatgttcgatgccctcggccacctgggcgtggagagcctcggcaccatcgccacctaccacccctatacccagttgccggaaggcaactacccgtggaacctggacttcgtctcccacgccaaccagatcaaccgcgccctgcgcaacgccggcgtgccggcgatctggagcaccgagtggggctggtcggcctacaaggggccgaaggagttgcaggacatcattggcgtcgaaggccaggccgactacgtgctgcgtcgcctggcgctgatgagtgcgctggactacgaccggatcttcctcttcaccctcagcgatctcgaccagcgcgccagcgtgcgcgaccgcgactacggcctgctcgacctggacgccaaccccaagccggtctacctggccctgcaacgcttcctcaaggtcaccgggccgaagctgcgcccggccgacccgccggtcaccgaggacctgcccgacggttccttcagcatcggctggacccgcgaggacggtcgcaacgtctggctgttctggtcggcccgcggcggcaacgtgcgcctaccgaagctcaaggaggccaccctgcacgatccgctcagcggcaaggtcacgcccttgagcggcagcgacggcctggaagtcccggtgaagtccagcctgcagatgctggtctgggagtga

SEQ ID NO: 321978 - DNA, 1209 bp, Pseudomonas aeruginosa
atgcgtattctctggatcctgccctactcgccctggcccaccaccagcggcggcaagacccgccagtaccacctgctgcgcagcctcgcggcacgcggccaccggatcaccgtgctgctgcacagcaagcagccggtgagcgccgaggaccgccaggccctggagcccttcctcgaacgcctggtcgtgctgccgcgccgaccgctgcgcagcctctccacgctgctcgccgcgctgttcgcgccctacccgctgctggccagcgtcaacggcctgtcggcggagctgcaacgcaccgccacggagttgctgcgcgagccctgggacgtggtccaggtcgagcacagctatagcttccagccctacgagcgaccgctgcgcgacgccggccagccgttcgtgctcaccgagcacaacgtcgagtcgtccctcggtgccgccacctacgaccgcctgccgggctgggcgctgcccttcgtgcgctacgaccagtggcgttaccgccgctgggaacgccgggtgatgagccaggcggcagcggtcgtcgccgtgaccgagaaagatgcgcggcagctcggcgcgatgctcggccgcccggtgccagtggtggtcaacggggtcgactgcgagcacttcgccgccgcccggccgacgcccgaagcgcagcgcgtgctgttcctcggcaactacgaatacgcaccgaacgtcgatgccgtggaatggatgctcgacgagatcctgccgcgggtctgggcacactgccccgaggcgcgcatgagcgtctgcggctatgcgctgccggcggagtgggcgcaacgctggagcgatccgcgcatcgaatggcaaggcttcgttcccgacctgctgcaactgcaatcgagcagttcggtgttcctcgccgcgctgcgccatggcggcggttcgaagctgaaggtgctcgaggccctggccgccgggctgccgctggcgagtaccgcgcagggcgtttccggcctggaactgcgggacggcgaggactacctcggcggcgaatccgccgagcagctcgccaacgccgtggtgcgcctgttgcaggacccggcgcaggcccgcgcgctgggcgagaacggccgcgcctacgcgcgccgcgcgcacgactggagcgtcgccgccagccaactggaacaggtctacgccggcctcgccgaaggagcgccggcatgcgcatag

SEQ ID NO: 321979 - DNA, 1104 bp, Pseudomonas aeruginosa
atgcgcataggactcgactaccgcaccgtcggcagctcgccgcactcgggcatcagccgccaggtctatgccatggagcaggccctggaaagcctgcccggcacgcaggtgacccgcttcaccgtggcccctctcgacgacccgctgcgccagcgggcggtctgcccgccgtggggctgcccgcgcaccgcgatgcaccagccgcaccagcgcctgcgcttcgaagccgggttcctcctacgcgccttgcgcgaacaggacatcgacctgtacatcagcaccttcaacatgggcctgccgctaccgccgcgtccgccgggcgtgcgctatgcgctgctgatccacgatctgttccagatcaccctgaagaactaccacgccaaccgcctcaaggcactggtctatcggatcagcgactacctgtcgatcgcctatgcgctgcgtgtcgccgaccgtgtctggaccccttcgcagtacagcgccgacgaggctgtgcggctgtttcccggggtcgccgggaaagtccgggtgctgcccaaccaggtcgacggcttcgccggcgaacccgccgacctctcggcacgcggcctgccgccacgctactggctgctggtgggtacccgcgaactgcgcaagaacgtgccctggttcgtcagtgcctggacccgggcgcgcgcccaggcgcccggcgtgccgccgctggtgctggtcggcagcctcgaccacctgcccgaggaacaacgcggcttgcccggcctgcacgcgctcggcgggctcgacgacgccgaactgcacgcgctgtaccgccaggccgagcggctctggcaaccgtcctacgcggaaggcttcggcctgccggtggtcgaggcgctgagcgtcggcacgccggtggcggtggccagcggcacctcgctggacgaagtcaccccgccgtcggcgccgcgcttctcgcccagcgacggcgccgccctggaacgcctgatgctgcgcctggccgatgcgccgcgcgaagcctcggcggaagaactcatcgcctgggccgcgcgcttcaaccgcgaagcctaccggcaacggctggccgcactgatcgaggaactgagttga

SEQ ID NO: 321980 - DNA, 1437 bp, Pseudomonas aeruginosa
atgtcgttgggaaacctcgtcgctgtcgtcttcggcctggccttcggcggagcgctgctgatgctcagcccggccaaggccggcgccgccatggtcggcctggcggccgcggtcaccatcctgcgcttcccgttctgggggctgctgctgttcgccctggtggcgaccttcatgccctactccacggtcaacgtggggatccgttcgacggtcagcgaagcgatcctcgccctgacctggggcgcggtgctctggcacatcttcctctcgcgcctgccgccggcgccgacgctgcgctaccgctccaccgagcgcatgctgctgtggctgatgctgttcaccgtgctgccgttcgtggtcggccaggtcagcatcaaggccgaggccagcggcctgtcgaactggctgcgctggttgctcaacctgtccatcgtgttcctcgccggacgcctgctggtggagcgcaagaaccgcgagacactggtcatcgccctgctgctgggcaccctggcgatgctgctgatgtccatcgcggtgttcatccgctaccgctcggcgtcggggatggcgccgatcctggcgatgttcaactacgccaacctggacaccctcaagttcggcctggaggcgctttcctcgcgaatgggctcgccatggatgcaccccaacgccaccggtgggatcatggccctgctgctgcccctggcgttctgctacggggtcgccaaccagggctggcggcgcggcctgggcctcgccgtggcggtcctcggcgccgccgcgatcctcctcgccagttcccgcggggcgatgctcagcctggcggtggtgctgttctggatgtccctacgcaaggtgccctacaccggccgcctgctgttgctcggggtcggcctggtggtggtcctggtgctcagctacccgccgttgcaggagcgcctggcgaccatcttctcgccgcagaacgccagtaccgaggtgcgtttcgacgaataccggatgttccccaaggccgtcgcccgctatccgctgggaatcggcttcaaggtcgacccgccggtgccgggcaccgacctcctgggcatctccaacctgtggctgaacttcatgtacaaggtcggcctcggcggcatgctgctgttcatcgcggtgacctggcgctggtggcgcgaagcccgtccggagaaaggcccgatccgcctgacccgcgacaacgcgatctggctgggcagtacgggcggcatcctggcggcgctggtcagcggcctgttcgaccactacttcagcttcgccgtggtgatgatcggcctgttctggctgctggtcgggatcaacctgctggaagcccgccggctgttcccggaacgccagccgcaaccgcgggcggtgggttatcgcaagctcaagcgacagctcgagcgcggggccgaggcctga

SEQ ID NO: 321981 - DNA, 1410 bp, Pseudomonas aeruginosa
atgctcggctccgccttctggctgaccctggccaccctgctcggcctgtgcctgggcttcgcccgcgaatggctgctggtggcctcctggggcgccggcgagcgcagcgacgccttcctcatcgccctgttcctgcccgaggccctgcgcatgtcgctggccggcggcgtgctcagcgcggcggccctgccactgttcctcgaacgccagggcgaacgtcgcctcgactggctggcggcaatcctcccggcgctgctcggtatcgccgtggcgctcagcctcctgctgctggcggcggcgccctggctggtgcgcttgctcggcccgggcctggccgagacggccagcgcccaggccgcggccaacttgcgggtcctcgcctggtgcgtgccggggctgatgctccatgcgctattcagcatccccctgcaggccgccgagcgcttcgtcctggccgggctcggctcgctgctgttcaacctgccgccggtgctctacctggccttgcacggccaggccagccagcccgaacaactggccctggcctgcctgctcggcagcctgctgatgccgctggtgctgctgccttcgctatggatcgagggctggcggccctggcactggcgcctgtccggcaccgaactgggcgagcttggcgggcgcatcgctccgctgttgctgagcaacgccgccagccagggcctggcgctggtcgagcggctggtggcctcgctgctcggcgaaggcgcggtgacctgggtcaacctggcgcgcaagctgatgaacctgccgctgatcgccctgatgagcctcaaccaggtgttgctcggcatgatgagccgacgccagggtggcgagcgtctggccctgcttcgccgcggcctggagaccgccagcctgctgaccctgccggccggggtcgggctggtcgctgccgcacccggcctggtggcgctgttgctgccgcggcagaccgccggctcgccgttgccggcgctgctggcctggttcgccgtgccactggtgttcggcgcctggaatgccttgctggcgcgttacgcctacgccgccggcgatactcgcctgccgctgcgctgcgagctgctcggcagcgcgctgaacgccgcgctgctggcggtcctgccgttgattttcggactgccggggattcccctcgcggcccttggcggggtgctctgcaccgcgctgctgctgatgcgtcgccaggccctgctcggcgccctgccctgggcccggctgtggctactgaacgccctggccatggcgctcgccgccggcctgctgttccgcatcgacggtatctggctgcaattgggcctgggcaccgtcgccggctgcctggcgctgctcggcatggcgctctggctgcggccctggcgcaccgattga

SEQ ID NO: 321982 - DNA, 1068 bp, Pseudomonas aeruginosa
gtgaaaaaacgctggattcagatggatgtgacccgcggcgtgggcatcctgatcatcgtcttcgggcacagctggttcgtcgccagttcgccgaccgtgctctatccgttgctctctccgttcatcctgccactgttcttcttcatttccggggtgttcttcaggaccgagcaacccttcggcgagatggccctgcgcaaggccgacgccctcctcaagccgttcttcgtgaccatgctcggctacgtcatcctccgcgacctgctgcgcggccagccgctgctgccggacatcggcggagtgctgtacgcctcggtcgacaccctgccctggcaggcgctctggtacctgccgcacttctgggtagcgaccctgttcgcctggttcatgctgcgcgtcatccagcgtctcggcctgtccctcgccgccagttgcgtgctgctggccgtgcaactgggcctgggcatcctgttcctcaagacgttctggcagatcccggtggagttcggcggcaaacagtacctgctgccgggcctgccgttcagcctggacatcaccctgatcagcagcgcccacttcatgttcggctatgtcctgcgcgacgtcctgcgtcgccaccagagttcgttgctgaccctgtgcatcgcccttgccgtgaccaccgccagcttcctctactacccgacggtggtggacatggcgcagcgccgctacgaccactggttctgggccaccgtccaggcagtgagcggcgtctacctgtgctgggcgctgtccgggctgatgatgaagatcgactggctgggcaaggcgatgacctacatcggccagtcgaccctgatcctgctgatcttccacggcgagatccagcacaagaccttcaacctgctggtccacctgggtctgtcggaaccggccgctgccagcgtcgccctggtgatctcggtgatcgtctcgctgctgatcggcgaagtgatcaagcgcgtcgcgctgctgcgcgccctctacttccccttcccggtgcgcaagaaggccgccgcggtccagggcggcggcgaagcgcgctga

SEQ ID NO: 321983 - DNA, 1734 bp, Pseudomonas aeruginosa
atgacctctgcggccgtcgagaccaccccgctaacctgtgacgtgctggtcgtcggctccggcgccgccgggctggcggcggcggtgaccgcggcctggcacgggcgccgggtagtcctggtggagaaggacccggtgttcggcggcgccagcgcctggtccggcggctgggcctggttgccgcgcaacccgctggcgcgtcgcgccggtatcgaggaggacatcgagcaaccgcgtacctacctgcgccacgaactgggcgagcgttacgacgccgcgcggatcgacgccttcctcgaagcctgcccgcacatggtggccttcttcgagcgccacacccacctgcggttcgtcgacggcaacggcatcccggacatgcatggcgacacgccgggcgccgccgagggcggccaccagttggtcgccgcgccccatgacgcacggcaactgggcccgctgctgccgcgcctgcgcaagaccctgcgggagacctcgttcatgggcatgccgatcatggccggcgccgacctcgccgccttcctcgacctgacccgctcgctgccggccttcctgcatgtcgcccggcgcttttccagccacctctggcacctgctgcgctacggtcgcgccatgcacctggtcaatggcgtggccctggtagcgcgcctggccaagtccgccgaagccctgggtgtgcgcctgatcgaatcggcgccagcccgcgaactgctgctgcgtgacggcaaggtggtcggcgcgctggtcgagagcgccgagggactcctgcgcatcgaggcaggcgccgtggtcctggcctgcggcggctttccccatgatccgcagcgccgcgccgagctggcccccaccctggacaccctgctgccgctgccgccgccgggctgcaacggcgacggcttgcgcctgggggaaagcgccggcggccgggtggccgacgacctgcgctcgccgatcgcctgggcgccggtctcgcgagttccccacggcgatggcgagaccgggcacttcccgcacatcatcgagcgcggcaagcccgggctgatcggcgtgctggccaacggcaggcgcttcgtcaatgaggcgcacggttaccacgactatgtcgccgccctgctcgaggccaccccgcccgggcagccggcacgctcctggctggtctgcgaccggcgcttcctgcgtcgctacggcctcggctacgtgcgtccggcgccgctgccgatcgccgcgcacctgcgcagcggctatctcaagcgcgggaccagcctggatcagttggcaaggagctgcggcatcgacccgtccggcctggccgccaccgtcgccgaatacaaccgccacgcccgcgagggccgcgacccagagttcggccgcggcggcacggcattcaaccgtaagcagggcgacccggcgtatccggggccgaatccctgcgtcgcccccatcgaacgcggaccgtactacgcggtgcaggtcgagcccggctgcttcggcaccttcgccgggctgaagaccgacgcccaggcccgcgtgctggacggcggcggccagccgatccccggcctgtacgcggcgggcgcggacatggcgagcctgttcgccggccactatccctccggcggcatcaacctggggccggcgctgaccttcggctacatcgccggccgccatatcgccggcgccctcggctacgagcaggagcaagcgcagcgcggttga

SEQ ID NO: 321984 - DNA, 1002 bp, Pseudomonas aeruginosa
atgagcgcagcgccaccggatatccccgccctgcccgccggcctctgctacgtcgacgaccgccagccgggcatccgtcgacgccggcagggcaagcgcttcgtctatttcgatgccgacggccagcgcatcggcgacgccgaggagatccgccggctggacaagctggccattccgccggcctatcgcgaggtctggatctgtcccgaccccaacggccatctccaggccaccggccgcgacgcccgtgggcgcaagcagtaccgctaccacccgcgctggcgcgaggtacgcgatgccgacaagtacgagcgcctgctgcgcttcggccaggcgctgccgcggctgcgccggcacatcgacgcccagttgcgcctgcccggcctcggtcgcgacaaggtggtggccctggcggttgcgctgctcgacgccaccctgatccgcgtcggcaaccaccgctacgcccgcgacaaccgctcctacggcctgaccaccctgcgtacccggcacgtcgacgtgaacggcagtcgcatccggttccgcttcaagggcaagagcggcatcgagcacgacgtcagcctggagcatccgcgcctggcgcgggtgctgcggcgctgcctggaattgcccggccaggacctgttgcagtacctggacgaggacggccagccgcaccgcatcggctcccacgacatcaacgagtacctgcgccggcataccggcgaggatttcagcgccaaggactaccgtacctgggccggcagcgcgctggcgctggagcgcctgcggcgtgccgaagccgacgggcttggcgcggtggtggcggaggtcgctgccgaattgggcaacagcgtggcgatctgccggcaatgctacatccacccggcgatcatcgaggcctaccaggccgggcaactgggccagctcaggcgcgcccgcaagcgccgctggctgagtgccgaggaagcgaccctgctggccttcctcgacacgcccggctga

SEQ ID NO: 321985 - DNA, 294 bp, Pseudomonas aeruginosa
atgaaagccagcaaacccgggcccaagccgagcggcaaggccaagtcggccgcccagcggatgcgcgaataccgcgcgcgcaaggccgaagaggccctcggcgccgagcattccgacaaggagcgcgagcggcagatccgccgtgaggcgcgcgccgaactcgaacgcgtgaagctggagcagcagcgccgcgaacacaccctgcgcaaggaactggaagcctgccagaccgagattggccgcctgctcggcctgctgcgccggcacggcatcgatccgcacccgggcaactga

SEQ ID NO: 321986 - DNA, 462 bp, Pseudomonas aeruginosa
atggctgaactcgaccgcatcgacctgaaaatcctccgtgccctggccgacgacggccgcctgagctggcgcgatctcgcccagaaggtcggcctgtcgctgacgccgacgctgcgccgggtacgccgcctggaagaggaacactacatccagggctacttcgcccggctcgacgaggagcgcctgtccggggcgatgagcgtgttcgtctcggtgtccctggaaaagcagaccggcgactacctcgctcgcttcgaggaacgcatcgtcgatgcgccgcaggtcatgagctgtttccagatgaccggcgatgcggactacatgctgcgggttgtggtcaaggatctcgccgcctaccaggcgttcctcaccaataccctgacctgcattcccggcgtggctggcatcaagtcggccttcgcgctgaagtcggtgatgctgcgctcggccccgccgctctaa

SEQ ID NO: 321987 - DNA, 129 bp, Pseudomonas aeruginosa
atgagtgacgtcacccagtacgaccgcgcctgccgtaccccggcatgcctgcaacccgcccccacccacaggacgggaacccgccatccgcccagtccgccgcttcgagcgccgttcgcccgtttctga

SEQ ID NO: 321988 - DNA, 1233 bp, Pseudomonas aeruginosa
atgagtgattacgagccgttgcgtctgcatgtcccggagcccaccgggcgtcctggctgcaagaccgacttttcctatctgcacctgtcccccgccggcgaggtacgcaagccgccggtggatgtcgagcccgccgagaccagcgacctggcctacagcctggtacgcgtgctcgacgacgacggccacgccgtcggtccctggaatccgcagctcagcaacgaacaactgctgcgcggcatgcgggcgatgctcaagacccgcctgttcgacgcgcgcatgctcaccgcgcaacggcagaaaaagctttccttctatatgcaatgcctcggcgaggaagccatcgccaccgcccacaccctggccctgcgcgacggcgacatgtgctttccgacctatcgccagcaaggcatcctgatcacccgcgaatacccgctggtggacatgatctgccagcttctctccaacgaggccgacccgctcaagggccgccagctgccgatcatgtactcgagcaaggaggccggtttcttctccatctccggcaacctcgccacccagttcatccaggcggtcggctggggcatggcctcggcgatcaagggcgacacgcgcatcgcctcggcctggatcggcgacggcgccaccgccgagtcggacttccacaccgccctcaccttcgcccatgtctaccgcgcgccggtaatcctcaacgtggtcaacaaccagtgggcgatctccaccttccaggccatcgccggcggcgaaggcaccaccttcgccaaccggggcgtgggctgcgggatcgcctcgctgcgggtcgacggcaatgacttcctggcggtctacgccgcctccgagtgggccgccgagcgcgcccggcgcaacctcgggccgagcctgatcgaatgggtcacctaccgcgccggcccgcactcgacttcggacgacccgtccaagtaccgccccgccgacgactggaccaacttcccgctgggcgacccgatcgcccgcctgaagcggcacatgatcggcctcggcatctggtcggaggaacagcacgaagccacccacaaggccctcgaagccgaagtactggccgcgcagaaacaggcggagagccatggcaccctgatcgacggccgggtgccgagcgccgccagcatgttcgaggacgtctatgcagaactgccggagcacctgcgccggcaacgccaggagctcggggtatga

SEQ ID NO: 321989 - DNA, 1053 bp, Pseudomonas aeruginosa
atgaatgccatgaacccgcaacacgagaacgcccagacggtcaccagcatgaccatgatccaggcgctgcgctcggcgatggacatcatgctcgagcgcgacgacgacgtggtggtattcggccaggacgtcggctacttcggcggcgtgttccgctgcaccgaaggcctgcagaagaaatacggcacctcgcgggtgttcgatgcgccgatctccgagagcggcatcatcggcgccgcggtcggcatgggtgcctacggcctgcgcccggtggtggagatccagttcgccgactacgtctacccggcctccgaccagttgatctccgaggcggcgcgcctgcgctatcgctcggccggcgacttcatcgtgccgatgaccgtacgcatgccctgtggcggcggcatctacggcgggcaaacgcacagccagagcccggaggcgatgttcacccaggtctgcggcctgcgcacggtgatgccgtccaacccctacgacgccaagggcctgctgatcgcctgcatcgagaacgacgacccggtgatcttcctcgagcccaagcgcctctacaacggcccgttcgatggccaccacgaccgcccggtgacgccctggtccaagcatccggccagccaggtgccggacggctactacaaagtgccgctggacaaggcggcgatcgtccgccccggcgcggcgctgaccgtgctgacctacggcaccatggtctacgtggcccaggccgcggccgacgagaccggcctggacgccgagatcatcgatctgcgcagcctctggccgctggacctggaaaccatcgtcgcctcggtgaagaagaccggccgctgcgtcatcgcccacgaggcgacccgcacctgcgggttcggcgccgagctgatgtcgctggtgcaggagcactgcttccaccacctggaggcgccgatcgagcgcgtcaccggttgggacaccccctacccgcatgcccaggagtgggcgtatttccccggccccgcgcgcgtcggcgcggcattcaagcgtgtgatggaggtctga

SEQ ID NO: 321990 - DNA, 1287 bp, Pseudomonas aeruginosa
atgggtacccatgtgatcaagatgccggacatcggggaaggcatcgccgaggtcgaactggtggagtggcatgtccaggtcggcgactcggtcaatgaagaccaggtcctcgccgaggtgatgaccgacaaggccacggtggagattccctcgccggtggccggacgcatcctcgccctcggcggccagccgggccaggtgatggcggtgggcggcgaactgatccgcctggaggtggaaggtgccggcaacctcgccgagagtccggccgcggcgacgccggccgcgcccgtcgccgccaccccggagaaaccgaaggaagccccggtcgcggcgccgaaagccgccgccgaagcgccgcgcgccttgcgcgacagcgaggcgccacggcagcggcgccagcccggcgaacgcccgctggcctcccccgcggtgcgccagcgcgcccgcgacctgggcatcgagttgcagttcgtgcagggcagcggtcccgccggacgcgtcctccacgaggacctcgatgcctacctgacccaggatggcagcgtcgcgcgcagcggcggcgccgcgcaggggtatgccgagcgacacgacgaacaggcggtgccggtgatcggcctgcgtcgcaagatcgcccagaagatgcaggacgccaagcgacgcatcccgcatttcagctatgtcgaggaaatcgacgtcaccgatctggaagccctgcgcgcccatctcaaccagaaatggggtggccagcgcggcaagctgaccctgctgccgttcctggtccgcgccatggtcgtggcgctgcgcgacttcccgcagttgaacgcgcgctacgacgacgaggccgaggtggtcacccgctacggcgcggtgcacgtcggcatcgccacccagagcgacaacggcctgatggtgccggtgctgcgccacgccgaatcgcgcgacctctggggcaacgccagcgaagtggcgcgcctggccgaagccgcacgcagcggcaaggcgcaacgccaggagctgtccggctcgaccatcaccctgagcagcctcggcgcgctcggcgggatcgtcagcacaccggtgatcaaccatccggaggtggccatcgtcggcgtcaaccgcatcgtcgagcgaccgatggtggtcggcggcaacatcgtcgtgcgcaagatgatgaacctctcctcctccttcgaccaccgggtcgtcgacgggatggacgcggcggccttcatccaggccgtgcgcggcctgctcgaacatcccgccaccctgttcctggagtaa

SEQ ID NO: 321991 - DNA, 1395 bp, Pseudomonas aeruginosa
atgagccagatcctgaagacttccctgctgatcgtcggcggcggtcccggcggctacgtcgcggcgatccgtgccgggcaactgggcattcccaccgtactggtggagggcgccgccctcggcggcacctgcctgaacgtcggctgcatcccgtcgaaggcgctgatccacgccgccgaggaatacctcaaggcccgccactatgccggccggtcggcgctgggcatccaggtacaggcgccgagcatcgacatcgcccgcaccgtggaatggaaggacgccatcgtcgaccgcctcaccagcggcgtcgccgcgctgctgaagaaacacggggtcgatgtcgtccagggctgggcgaggatcctcgacggcaaaagcgtggcggtcgaactcgccggcggcggcagccagcgcatcgagtgcgagcacctgctgctggccgcaggctcgcagagcgtcgagctaccgatcctgccgctgggcggcaaggtgatctcctccaccgaggcgctggcgcccggcagcctgcccaaacgcctggtggtggtcggcggcggctacatcggcctggagctgggtaccgcctaccgcaagctcggcgtcgaggtagcggtggtggaagcgcaaccgcgcatcctgccgggctacgacgaggaactgaccaagccggtagcccaggccttgcgcaaactgggcgtcgagctgtacctcgggcacagcctgctgggcccgagcgagaacggcgtgcgggtccgcgacggcgccggcgaggagcgcgagatcgccgccgaccaggtactggtggcggtcggccgcaagccgcgcagcgaaggctggaacctggaaagcctgggcctggacatgaacggccgggcggtgaaggtcgacgaccagtgccgcacctcgatgcgcaatgtctgggccatcggcgatctcgccggcgagccgatgctcgcgcaccgggccatggcccagggcgagatggtcgccgagctgatcgccggcaagcgtcgccagttcgccccggtggcgatccccgcggtgtgcttcaccgatccggaagtggtggtcgccgggttgtccccggagcaggcgaaggatgccggcctggactgcctggtggcgagtttcccgttcgccgccaacggccgcgccatgaccctggaggccaacgaaggcttcgtccgcgtggtggcgcgtcgcgacaaccacctggttgtcggctggcaggcggtgggcaaggcggtctcggaactgtccacggccttcgcccagtcgctggagatgggcgcccgcctggaagacatcgccggcaccatccacgcccatccgaccctcggcgaagcggtccaggaagccgccctgcgcgcgctgggacacgccctgcacatctga

SEQ ID NO: 321992 - DNA, 819 bp, Pseudomonas aeruginosa
atgtccgagcacctgggcgccaatctcaagctgctttgcagccattaccgctcgatttccgaggtttgccggcaattggcgatcaatcgcgcgcagttcaacaagtacctcagcggccagagccagccgacgccctacaaccgcaagcggataggcgacttcttcggcgtcgaggactacgagctgggcttgccgcccgagcagttcgcccgcctgatcggcgcccgtgccagcgcccagccgcgccagtccagcaacgacccgctgttgcggctgctgcaaccgctgcgcgccgaggccggcgacctgggccgctactgcggctactacttcgaatatgccaactgcatgtcggtgccgggcagcatcctgctctccctggtgcatctctacgaggaagacggggtgttcctcttcgagcgccaggaacgccaggagcgcaccagcagtaccgacgtgcaggcggaggagtgggcgcgctgccgctacctcggcgcggccttccagttgcaggaccgggtgttcctgatcgactacgagtcgctgaccctcaacgagatgagccagaccatcctcattcccagtttcaagagccgtatcacccgcctgaacggcctgaagatgggcgtttccagcggtgaccggcggaccccggcatgcagccgggtggtctgggagtacctcggtgcggaaatcaaccggatcaacgcctaccgccaggtgcgcctgtaccgcccggacgatccgcggatcgacgaggatattcgccagcgcctggcggcggggagcttgcggcatgggttgctggagacggagtga

SEQ ID NO: 321993 - DNA, 1446 bp, Pseudomonas aeruginosa
atgcttgaaatgctcaacgatttcctttccggaaaagtcctcatcgtcctgatcgtcggcctgggtgcctacttcacgatccgttcgcgtttcgtccagttccgccacttcggccacatgttcggcgtattcagggaatcgctgcgcggccaggccggccagctcagttccttccaggccctgatgctgagcctcgccggccgggtcggcgccggcaacatcgccggggtcggcatcgccgtgaccctcggcggtccgggggcggtgttctggatgtgggtcaccgcgctggtcggcatgtccagcagcttcttcgaatgcaccctggcccaggtctacaagcgcagcgacggcgacggcctgtatcgcggcggcccgtcctactacatccagcacggcctgaagctgcgctcgatggcggtggtcttcgcggtactcctgctggtgacctacggcttcgccttcaacggcctgcagtcctacaccgtcacccattcgctgcagaacgccttcggcttcgccccgcagcacaccgggatcgccctggcggtgctgctcggcgtggtcttcatcggcggcatcaagcgcatcgccgcggtctccgacctgctggtgccgatcaagaccctggcctacatcggcgtcaccctgtacgtcatcgccagccagatcgagcacgtcccggcaatgctggaaaccatcgtcaagagcgccttcggcctagacccggcgttcggcggcctgctcggcagcgccatcgtgatgggcgtcaagcgtggcgtcttcgccaacgaggccggcctgggcagcgcgccgaacgtcgccgcggtcgccgccgtgcgccatccggcggcacagggcgtggtccaggccttcagcgtgttcctcgacaccttcgtgatctgcacctgcaccgccctgctgatcctgctctcgggcttctacaccccgggcttcgaaggcgacggcatcgtcctcacccagaactccctagccgcggtggtcggcgactggggccgggtgttcgtcagcgtggccctgtcgctgttcgtcttcacctgcatcctctacaacttctacctgggcgagaacagcctgcagttcctcagccgcaaccgcctggtgctgatcggctaccgcgcgctggtgctggccctggtggtctggggctcggtgcaggacctgtccaccgtgttcgccttcgccgacatcaccatgacctgcctggccttcgtcaacctgatggccctggccctgctgttcaaggtcggcctgcgggtgatgcgcgactatgacgtgcagcgccgcgccgggatcaagcaaccggtgttcgactcggcgcagttcgccgacctcgacctggaccgcgaagcctggcccgccggccagcgcgccgagcccccggcgcaggcggacgccgagccgctgccgagcggcaatcgctga

SEQ ID NO: 321994 - DNA, 987 bp, Pseudomonas aeruginosa
atgctcccagtcaagaacctcttcgtgctctacaccggcggcaccatcggcatgctgcagacccctcagggactggctccggccggtggcttcgaagcgcgcatgcgcgaccacctgcaaagcctcggcgacgccccggacctgcgctggcgcttcgccgaactgcaaccgccgctggacagcgccaacatgacccagggcaactggctggcgatgcgcgacgccatcgtcgccgcgctcgacgccggccacgacggcgtgctgctcctgcacggcaccgacaccctggcctacagcgccgcggcgctgtccttcctgctcctcgacctgccgatcccggtgctgctgaccggctccatgctgccggccggcgcgccggacagcgatgcctgggacaacctggtcggcgccctgcgcgtcctccaggagggccacgcgcgcggcgtacaggtctatttcaacgatgccctgctgcacggcgcgcgagtcagcaagctgcgcagcgacgcgttcgacgccttcgccgaactgccgcgaccgcgccacgccgagcatgcgccggtgcctgcggcgctcggctaccgccagccgcgccgggaagtgaacctcgccgtgctgccgctctatccagggctgcgcgccgcgcacctgcgcgggctgctcgacagcggcgtggaagcgctgctgctggaatgctatggcagcggcaccggcccgtccgatgacgaggagctgctggcgctgctgcgcgaagcccacgcccgcggcgtgctgctcgccgcggtcagccagtgcgcctacggccaggtcgagttcggcgtctacgccgccggcagccgcctgcgcgacgccggcctgctctcggctggcggaatgacccgcgaggcggccctgggcaagctcttcggcctgctcggcgccggcctcggacgcgacgaagcgcaacgctggttcgccctcgacctgtgcggcgagaacgccgactga

SEQ ID NO: 321995 - DNA, 939 bp, Pseudomonas aeruginosa
atgcagaccttgctgaaactacttcaagacgggcgattccactccggtgaggagttgggggcagtactgggcatcagtcgcagtgcagtctggaaacgcttgcagcacctggaggctgaacatggcctgcagttccacaaggtgcgtggccggggttaccgtctggcgagtcccctcagtctcctggatccgcggaagatcgacagcctctggcctgtcgagatcatgcccaccgtcgattcgaccaatagcgaggccatgcgtaggctcgcggctggagcctcgacgcctttcgttatcgtcgccgagcagcagactgccgggcgtggacgtcgcggccgagcctgggtcagtccctatggagagaacctctattattctctggccattactgtcagggggggcgctcgggagctcgaagggttgagcctggttgtcggtctcgcggtgctccgggccctggagtctttgggcgtccgggacgccgggttgaagtggccgaacgaccttctgcagggaggcaagaagatcgccggaattctcctggagctgagtggcgaccccgcggatctgtgtcatgtcgttatcggcatagggatcaacgtcaacatgaggaccgccactgatatcggccagccttggacctccctgcgcgaagcgctgggggagctggtggatcgttcgcggctgctttctgctctcaatcggcagctggctgattatctcgataggcattcgcgcgaaggctttgctgcaagtcgcgaggagtgggagtcctgcaatctctggcagggtgcccaggtcattctctcgactgccctgagttccatcgagggtcgtgtgctgggtgtcgatagccgaggagcgctgcgtcttgaggtggatggcgtggagcaggggttcagtggaggggagcttagtttgaggttgcgtcaatga

SEQ ID NO: 321996 - DNA, 747 bp, Pseudomonas aeruginosa
atgattcttgagctcgactgtggaaactcgctgatcaagtggcgggtcatcgagggggcggcgcggtcggtcgccggtggccttgcggagtccgatgatgccctggtcgaacagttaacgtcgcagcaagcgctgccagtgcgagcctgtcgcctggtgagcgttcgcagcgagcaggaaacctcgcaactggtcgcacggttggagcagctgttcccggtttcggcgctggttgcatcatccggcaagcagttggcgggtgtgcgcaacggctatctcgattaccagcgcctggggctcgaccgctggctggccctcgtcgcggctcatcacctggctaagaaggcctgcctggtcattgatctggggaccgcggtcacctctgacctggtcgcggcggatggagtgcatctggggggctacatatgcccgggcatgaccctgatgagaagccagttgcgcacccatacccgacgtatccgctacgacgatgcagaggcccggcgggcgcttgccagtctccagccagggcaggccacggccgaggcggttgagcggggttgtctgctcatgctcagggggttcgttcgtgagcagtacgccatggcgtgcgagctgctcggtccggattgtgaaatattcctgacgggtggggatgccgaactggttcgcgacgaactggctggcgcccggatcatgccggacctggttttcgtagggctggcactggcttgcccgattgagtga

SEQ ID NO: 321997 - DNA, 705 bp, Pseudomonas aeruginosa
atgcgctggttcttcctgtttctcctggccctgaacgtcttctactacgtctggcaccagcagcaatccccgctacgggccaaggaaatcgcaccgctggaactctataaggatgggcagaagaacattctgctgttggccgagagcaaccttgcttccagggcgcgctcgggatcgcaggtgccggcgccgagtgtgcctccggctgccgaagagtcgatcgcatccgagtcggcctgtctctatcttggcggaggcggtgaggaggcggatgcccgaaggttgcagcagcgcctgctgggcctggatatcgaggcggaggtcgaggcccgtggggagatgagcgtcgattactgggtctatcttcctccgctagcctcacgggaggctgcgcttcgtcagttgaaggagcttcaggcgcgcaatatcgacagctacctgattggcgagggagtgctggccaatggcatttctttggggatgttttccgcgcgggattcggctgaaagtgcgcaggcccgtctcaagacggcaggttacgaggcggagctgaaggaattgccccgcgggcagcgtgatttctgggtaagggtggcacccggcagccggcgtctggtggatgagcaactgctccaggagctggctcgggacttcaagggattgcagcatcaaataatgtcgtgcaaaggtgttgcatccccctga

SEQ ID NO: 321998 - DNA, 1194 bp, Pseudomonas aeruginosa
atggctaaagaaaaatttgaacggaacaagccgcacgtcaacgtcggcaccatcggtcacgttgaccatggcaagaccactctgaccgctgcactgaccaaggtctgctccgacacctggggtggttccgctcgtgctttcgatcagatcgacaacgcgccggaagaaaaggcccgcggtatcaccatcaacacctcgcacgttgaatacgattccgctgttcgtcactacgctcacgttgactgccccggtcacgccgactacgtgaagaacatgatcaccggtgctgcccagatggacggcgcgatcctggtttgctcggctgccgacggccccatgccgcagacccgcgagcacatcctgctgtcccgccaggtgggcgttccctacatcgtcgtgttcctgaacaaggccgacatggtcgacgacgccgagctgctggaactggtcgagatggaagttcgcgatctgctgaacacctacgacttcccgggcgacgacactccgatcatcatcggttccgcgctgatggcgctggaaggcaaggatgacaacggcatcggcgtaagcgccgtgcagaagctggtagagaccctggactcctacattccggagccggttcgtgccatcgaccagccgttcctgatgccgatcgaagacgtgttctcgatctccggtcgcggtaccgtggtaaccggtcgtgtagagcgcggcatcatcaaggtccaggaagaagtggaaatcgtcggcatcaaggcgaccaccaagaccacctgcaccggcgttgaaatgttccgcaagctgctcgacgaaggtcgtgctggtgagaacgttggtatcctgctgcgtggcaccaagcgtgaagacgtagagcgtggccaggtactggccaagccgggcaccatcaagccgcacaccaagttcgagtgcgaagtgtacgtgctgtccaaggaagaaggtggtcgtcacaccccgttcttcaagggctaccgtccgcagttctacttccgtaccactgacgtgaccggtaactgcgagctgccggaaggcgtagagatggtaatgccgggcgacaacatcaagatggttgtcaccctgatcgctccgatcgccatggaagatggcctgcgcttcgcgatccgcgaaggcggccgtaccgttggcgccggcgtggttgccaagatcatcgaataa

SEQ ID NO: 321999 - DNA, 378 bp, Pseudomonas aeruginosa
atgcacaacgtaccaacgcttagccacggcgcacccttaacctacaatcatggaaaccaaccaacccagcagggaatcgagcccccacagcagcagcgccattaccagcactaccgcgaccacgatcagcgtggtctgagttgtttcttgacgactcggccatacgaccttgcgaatctcgacgcgcgcttccttagcaagactaaagaaggcctgccccttggccgtttgcagagccaggaaagcagcgatcaccgccagaacgagaataccgagaacgcgatacaggattggttgagccgaaaagtactgattgcccacaacggcaaccacaaccagaacggcaaccaagagccatttcaagagatcaaaacgtga

SEQ ID NO: 322000 - DNA, 480 bp, Pseudomonas aeruginosa
atgcgctcgctgatcgagcgtgtcaagcttgctggcatggaagaagagttcggcgagattctggttcccaccgaagaagtggtggagatgcggaacggccagaagcgcaagagcgagcgcaaattcttccctggctatgtgctggttcagatggaaatgaacgaaggtacctggcacctggtgaaggataccccgcgtgtcatgggcttcatcggcgggactgccgacaagccggctccgatcaccgatcgtgaggctgatgcaatcctgcgtcgcgtggccgatagcggcgacaagcccaagccgaagaccctgttcgagccgggcgagaccgttcgtgtcatcgatggtcctttcgccgacttcaatggtgtcgtcgaagaagttaactacgagaagagccggatccaagtggccgtgctcatctttggccgctctaccccggtggagctggagttcagtcaggtcgaaaaggtctag

SEQ ID NO: 322001 - DNA, 432 bp, Pseudomonas aeruginosa
atggctaagaaaatccaggcttatatcaagctgcaagtaaaggccggtcaggccaacccgtcgccgccggtcggccctgccctgggtcagcacggcgtgaacatcatggaattctgcaaggcgttcaacgccaagacccaaggccaagagccgggcctgccgactcctgtgatcatcaccgtttacagcgaccgtagcttcaccttcgaaaccaagagcaccccggctgccgtcctgctgaaaaaagcagctggcatcaccagcggctccgctcgtccgaactcccagaaagtcggcaccgttacccgtgcccagctggaagagatcgccaagaccaagcaggctgacctgaccgctgctgatctggacgctgctgtacgtaccatcgctggctccgcgcgcagcatgggcctgaacgtggagggtgtgtaa

SEQ ID NO: 322002 - DNA, 696 bp, Pseudomonas aeruginosa
atggctaagctgaccaagcgccagaaggcgattgccgagaaagtagttgccggcaagcagtacagcttcgaagaggccgccaagctgctggccgagctgtccaccatcaagttcaaggagtccgtggacgttgccgtgaacctcggcgtcgatccgcgtaaatccgaccaggtcgttcgtggcgccaccgtcctgccgaacggcaccggcaagagcgtccgcgttgccgtcttcacccagggtccggctgccgaagccgctctggctgccggcgccgacaaggtgggcatggacgaactggctgccgaaatgaaaggcggcgacctgaactacgacgtcgtcatcgcttccccggatgccatgcgtgtcgtcggccagctgggccagatcctcggcccgcgtggtctgatgccgaacccgaaagtcggcaccgtgactccggacgtcgctaccgccgtgaagaatgccaaggctggtcaggtacgtttccgtaccgacaagaacggcatcatccacagctccgtcggtaaggtcgatttcgagccggccaagctgcagcagaacgttgaagcgctgctggccgacctgaagcgcctgaagccgtcctcgtcgaaaggcgtgtacgtcaagcgcgtgaccctgagcaccaccatgggtccgggcctgcagatcgacctggcttccctggaagcctaa

SEQ ID NO: 322003 - DNA, 501 bp, Pseudomonas aeruginosa
gtggcaattaaactcgaagacaagaaggccatcgtcgctgaagtcaacgaggctgccaaagctgccctgtccgctgtcgtggccgatgcccgtggcgtgaccgtaggcgccatgaccggactccgtaaagaggcccgcgaagctggtgtgtacgtgaaagtcgtacgtaacaccctgctcaagcgcgccgttgaaggcacccagttcgacgtgctcaacgacgtgttcaaaggcccgaccctgatcgctttctccaacgaacatccgggcgctgccgctcgtatcttccgtgagttcgccaagggtcaggacaagttcgagatcaaggcggctgccttcgagggtcagttcctcgcagccaatcagatcgacgtactggcaagcctgccgacctacgacgaagccgtatcgcagctgatgagcgtgattcagggcgctaccagcaagctggctcgtactctggcggccattcgcgaccagaaagaagctgctgccgcctaa

SEQ ID NO: 322004 - DNA, 369 bp, Pseudomonas aeruginosa
atggctctgaccaacgaagacatcatcaacgccgtatccgaaatgtccgtcatgcaagtggtcgaactgatcaaggcgatggaagagaagttcggcgttaccgctgctgccgctaccgttgccgctgctggcccggctgctgccgctgccgaagagcagaccgagttcaccatcgtcctggccgaagctggcgacaagaaagtgaacgtgatcaaggtcgttcgcgaactgaccggtctgggtctgaaagaagccaaggctgtcgtagacggcgctccgggcgtggtgaaggaaggcgcttcgaaagaagaagccgaagccgccaagaaagccctggaagaagcaggcgccaaagtcgagctcaagtaa

SEQ ID NO: 322005 - DNA, 4074 bp, Pseudomonas aeruginosa
atggcttactcatacactgagaaaaaacgtatccgcaaggactttagcaagttgccggacgtcatggatgtgccgtatttgctggccatccagctggattcctatcgcgaattcctgcaggctggcgcaaccaaggagcagttccgcgatatcggtctgcacgcggccttcaagtccgttttcccgattatcagctattccggcaatgctgccctggaatacgtcggctaccgtctgggtgagccggcattcgatgtcaaggagtgcgtgctgcgcggcgtgaccttcgccgtaccgctgcgcgtgaaagttcgcctgatcatcttcgaccgcgagtcgtcgaacaaggcgatcaaggacatcaaggaacaagaagtctacatgggggaaatccccctgatgaccgagaacggtaccttcatcatcaacggtaccgagcgtgtcatcgtctcccagctgcaccgttccccgggcgtgttcttcgaccacgaccgtggcaagacccacagctccggcaagctgctgtactccgcgcggatcattccttaccgcggttcctggctggacttcgagttcgatccgaaggactgcgtgttcgtccgtatcgaccgtcgccgcaagctgccggcctcggtactgctgcgcgcgctcggctacagcaccgaagagatcctcaacgccttctacgcgaccaacgtcttccacatcaagggcgagaccctgaacctggaactggtcccgcagcgcctgcgcggtgaagtcgcgagcatcgacatcaaggatggcagcggcaaggtgatcgtggagcaggggcgtcgtatcactgcccgccacatcaaccagctggaaaaggctggcgtgagccagctggaagtgccgttcgactacctgatcggccgtaccatcgccaaggcgatcgtgcatccggctaccggcgagatcatcgccgagtgcaacaccgagctgaccctcgacctcctggccaaggtggccaaggcccaggtcgtgcgcatcgagaccctgtacaccaacgacatcgactgcggtccgttcatctccgacaccctgaagatcgacaacaccagcaaccagctggaagccctggtcgagatctaccggatgatgcgtccgggcgagccgccgaccaaggaagctgccgagaccctgttcggcaacctgttcttcagcgccgagcgttacgacctgtcggccgtaggccggatgaagttcaaccgccgtatcggtcgtaccgagatcgaaggtccgggcgtcctgagcaaggaagacatcatcgatgtgctcaagaccctcgtcgacatccgtaacggcaagggcatcgtcgatgacatcgaccacctgggcaaccgtcgcgtccgttgcgtcggcgaaatggccgagaaccagttccgcgtgggcctggtgcgtgtcgagcgcgcggtcaaggaacgcctttccatggccgaaagcgaaggcctgatgccgcaggacctgatcaacgccaagccggtggctgccgcgatcaaggagttcttcggttcgagccagctgtcgcagttcatggaccagaacaacccgctttccgagatcacccacaagcgccgcgtctccgcgctcggcccgggcggtctgacccgtgagcgtgcgggcttcgaggttcgtgacgtacacccgacccactacggccgcgtgtgcccgatcgaaacccctgaaggtccgaacatcggtctgatcaactccctggcgacctacgcccgcaccaacaagtacggcttcctcgagagcccgtaccgcgtggtcaaggacagcctggtaaccgacgagatcgtgttcctgtcggcgatcgaagaagccgaccacgtcatcgcccaggcttcggcgaccctcaacgagaagggtcaactggtggacgagctggtggccgtgcgtcacctgaacgaattcaccgtgaaggcgccggaagacgtgaccctgatggatgtttcgccgaagcaggtcgtttccgtcgctgcctcgctgattccgttcctcgagcacgacgacgccaaccgcgcactcatgggctcgaacatgcagcgtcaggccgtgccgaccctgcgtgccgacaagccgctggtgggtaccggcatggagcgcaacgtggcgcgcgactccggcgtctgcgtcgtggctcgccgtggcggtgtgatcgactcggtcgatgccagccgtgtcgtggttcgcgtggcggatgacgaagtcgagaccggcgaagcgggtgtcgacatctacaacctgaccaagtacacccgttccaaccagaacacctgcatcaaccagcgtccgctggtgagcaagggtgacgtggtcgcgcgcggcgacatcctggccgacggtccgtccaccgacatgggcgaactggccctgggccagaacatgcgcgtagcgttcatgccctggaacggcttcaacttcgaagactccatctgcctgtccgagcgcgtggtccaggaagatcgtttcaccacgatccacatccaggaactgacctgcgtcgctcgtgacaccaagctcggcccagaggaaatcaccgcggacatcccgaacgtgggcgaggccgcgctgaacaagctggacgaagccggtatcgtctacgtcggcgccgaagtgcaggccggcgacatcctggtcggcaaggtcactccgaaaggcgagacccagctgactccggaagagaagctgctgcgcgcgatcttcggtgagaaggcgtccgacgtgaaggacacctccctgcgtgtgccgaccggcaccaagggtaccgtcatcgacgttcaggtcttcacccgcgacggcgtcgagcgcgattcccgcgcgctgtccatcgagaagatgcaactcgaccagatccgcaaggacctgaacgaagagttccgcatcgtcgaaggcgcgaccttcgagcgtctgcgtgccgccctggtcggtgccaaggctgaaggtggcccggcgctgaagaagggcacggagatcaccgacgactacctcgacggtctcgagcgcggccagtggttcaagctgcgcatggccgacgacgccctgaacgaacagctggagaaggcccaggcctacatcagcgatcgtcgccagctcctggacgacaagttcgaggacaagaagcgcaagctgcagcagggcgacgacctggctccgggcgtgctgaagatcgtcaaggtctacctggcgatcaagcgtcgcatccagccgggcgacaagatggccggccgtcacggtaacaagggtgtggtctcggtgatcatgccggtggaagacatgccgcacgatgccaacggcaccccggtcgacatcgtcctcaacccgctgggcgtaccgtcgcgtatgaacgtcggtcagatcctcgaaacccacctgggcctcgcggccaaggggctgggcgagaagatcaaccgcatgctcgaagagcagcgcaaggtcgccgaactgcgtaagttcctgcacgagatctacaacgagatcggcggtcgcgaggaaaacctcgacgagctgggcgacaacgagatcctcgcgctggccaagaacctgcgcggtggcgtaccgatggcgaccccggtgttcgatggcgccaaggaacgcgagatcaaggccatgctgaagctggccgacctgccggaaagcggccagatgcgtctgttcgacggccgtaccggcaaccagttcgagcgtccgaccaccgtcggctacatgtacatgctcaagctgaaccacctggtggacgacaagatgcacgcccgttccaccggctcgtacagcctggttacccagcagccgctgggtggtaaggcacagttcggtggtcagcgcttcggtgagatggaggtgtgggcgctggaagcctatggcgcggcgtacaccctgcaggaaatgctgacggtcaagtcggacgacgtgaacggccggaccaagatgtacaagaacatcgtggacggcgatcaccgcatggaggccggcatgcccgagtccttcaacgttctgatcaaagagatccgttcgctcggcatcgacatcgaactggaaaccgaataa

SEQ ID NO: 322006 - DNA, 4200 bp, Pseudomonas aeruginosa
ttgaaagacttgcttaatctgttgaaaaaccagggtcaaatcgaagagttcgatgccatccgtattggcctggcttcgcccgagatgattcgttcctggtctttcggcgaagttaaaaagccggaaaccatcaactaccgtaccttcaagccggagcgcgacggcctgttctgcgccaagatcttcggcccggtgaaggactacgagtgcctgtgcggcaagtacaagcgcctcaagcaccgcggtgtgatctgcgagaagtgcggcgtggaagtcgccctggccaaggtgcgccgcgagcgcatgggccacatcgagctggcttcgccggttgcccacatctggttcctgaagtcgctgccgtcccgtatcggcctgctgctggacatgaccctgcgcgatatcgagcgcgtgctctatttcgagagctacgtggtgatcgatccgggcatgaccaccctggaaaagggccagctgctgaacgacgagcaatacttcgaggccctcgaagagttcggtgacgatttcgatgctcgcatgggcgccgaagccgttcacgaactgctcaacgccatcgatctggagcacgagatcggccgcctgcgcgaagagattccgcagaccaactcggaaaccaagatcaagaagctgtccaagcgcctgaagctgatggaagccttccagggctccggcaacaagcctgagtggatggtcctgaccgtcctgccggtgctgccgccggacctgcgtccgctggttccgctggatggcggtcgcttcgcgacttccgacctgaacgacctgtatcgtcgggtgatcaaccgtaacaaccgtctgaagcgcctgctcgacctggccgctccggacatcatcgtgcgcaacgaaaagcgcatgctgcaggaagccgtcgacgccctgctcgacaacggccgtcgcggtcgcgccatcaccggctcgaacaagcgtccgctgaagtcgctggccgacatgatcaagggcaagcaaggtcgcttccgtcagaacctgctcggcaagcgcgtggactactccggtcgttccgtgatcaccgtgggcccgaccctgcgcctgcaccagtgcggtctgccgaagaagatggccctggagctgttcaagccgttcatcttcggcaagctggaaggtcgtggcatggccaccaccatcaaggccgccaagaaaatggtcgagcgcgagctgcccgaggtctgggacgttctcgccgaagtcatccgcgagcatccggttctcctgaaccgtgcgccgaccctgcaccgtctgggcatccaggcgttcgagccggtcctcatcgaaggcaaggcgatccaactgcacccgctggtctgcgccgcgtacaacgccgacttcgacggtgaccagatggccgtccacgttccgctgaccctcgaggcccagctggaagcgcgcgcgctgatgatgtccaccaacaacatcctgtcgcccgccaacggcgagccgatcatcgttccgtcgcaggacgtggtaatgggtctgtactacatgacccgtgaagcgatcaacgcgaagggcgagggcatggccttcgccgacctgcaggaagtcgaccgcgcctaccgcagcggccaggcgtccctgcacgctcgcgtgaaagtgcgcatcaacgaaaagatcaagggtgaagacggccaactgaccgccaatacccgtatcgtcgacaccaccgtcggccgagcgctgctgttccaggtcgttccggccgggctgccgttcgacgtggtcaaccagtcgatgaagaagaaggcgatctccaagctgatcaaccactgctatcgcgtggtgggtctgaaggacaccgtcatcttcgccgaccagctgatgtacaccggtttcgcctactcgaccatttccggcgtgtccatcggcgtcaacgacttcgtcatcccggacgagaaggcgcggatcatcaacgccgccaccgacgaagtgaaggagatcgagagccagtacgcctccggcctggtaacccagggcgagaagtacaacaaggtgatcgacctgtggtcgaaggccaacgacgaagtgtccaaggcgatgatggccaacctctcgaaagagaaggtcgtcgatcgcgagggcaaggaagtcgaccaggagtccttcaactccatgtacatgatggctgactcgggtgcgcggggctccgcggcccagatccgtcagctggcaggtatgcgtggcctgatggccaagccggacggctcgatcatcgagaccccgatcaccgcgaacttccgtgaaggcctgaacgtactccagtacttcatctctacccacggtgctcgtaagggtctggcggataccgcgctgaagaccgcgaactccggttacctgacccgtcgtctggtcgacgtggcccaggatctggtagtgaccgagatcgattgcggtaccgagcacggcctgctgatgtcgccgcacatcgaaggcggcgacgtggtcgaaccgctcggcgagcgcgtgctcggccgtgtgatcgcgcgcgacgtgttcaagccgggcagcgacgaggtcatcgtgccggccggcaccctgatcgacgagaagtgggtcgacttcctcgaagtgatgagcgtcgacgaagtggtggtgcgttccccgatcacctgcgaaacccgtcatggcatctgcgccatgtgctacggccgcgacctggcccgtggccatcgcgtcaacatcggcgaggcggtcggtgtcatcgctgcccagtccatcggtgagccgggcacccagctgaccatgcgtaccttccacatcggcggtgcggccagccggacctccgcggccgacaacgtccaggtgaagaacggcggcactatccgcctgcacaacctgaagcatgtggttcgtgccgacggcgcgctggtcgcggtttcccgttccggcgaactggcggttgccgacgacttcggtcgcgagcgcgagcgctacaagctgccgtacggtgcggtgatctcggtcaaggaaggtgacaaggtcgacccgggcgctatcgtcgccaagtgggacccgcacacccacccgatcgtcaccgaggtggacggtaccgtggccttcgtgggcatggaagagggcatcaccgtcaagcgtcagaccgacgaactgaccggcctgaccaacatcgaagtgatggatccgaaggaccgtccggctgccggcaaggacatccgtccggccgtgaagctgatcgatgccgcgggcaaggacctgctgctgccgggtaccgacgtaccggcgcagtacttcctgccggccaacgccctggtcaacctgaccgacggcgccaaggtgagcatcggtgacgttgtcgcgcgtatcccgcaggaaacctcgaagacccgtgacatcaccggtggtctgccgcgcgttgccgacctgttcgaggctcgtcgtccgaaggagccttcgatcctggcggaaatcagcggcaccatctccttcggcaaggagaccaagggcaagcgccgcctggtcatcacgccgaacgatggcagcgatccgtacgaggagctgattccgaagtggcgtcacctgaacgtgttcgaaggcgaacaggtgaaccgcggcgaagtcatctccgacggtccgagcaacccgcacgacatcctgcgcctgctgggcgtgagctcgctggcgaagtacatcgtcaacgagatccaggacgtctaccgtctgcagggcgtgaagatcaacgacaagcacatcgagaccatcctgcgtcagatgctgcgcaaggtcgaagtcagcgagtccggcgactccagcttcatcaaaggcgaccaggtggaactcacccaggtgctggaagagaacgaacagctcggtaccgaggacaagttcccggccaagtacgagcgggttctgctgggtatcaccaaggcctccctgtcgaccgagtcgttcatttccgcggcgtcgttccaggagaccacccgcgtcctcaccgaggcggcggtcaccggcaagcgcgacttcctgcgtggtctgaaagagaacgtggtcgtgggtcgcctgattccggccggtaccggtctggcttaccacagcgagcgcaagcgtcagcgcgacctcggcaagccgcagcgtgtgagtgccagcgaggcggaagccgcactgaccgaagcgctgaactcgagcggtaactaa

SEQ ID NO: 322007 - DNA, 372 bp, Pseudomonas aeruginosa
atggcaactatcaaccagctggtgcgtaagccgcgcaagcgcatggtcgacaagagcgacgtgcctgcgctgcagaactgcccgcaacgtcgtggcgtatgcacccgcgtatacaccaccacgccgaaaaagccgaactcggcactgcgtaaggtatgccgtgtacgtctgaccaacggtttcgaggtttcctcgtacatcggtggtgaaggtcacaacctgcaagagcacagcgtagtgctgatccgtggcggtcgtgtaaaggaccttccgggtgtgcgttaccacaccgtgcgcggttcgctggacacctcgggtgtcaaagaccgtaagcagggtcgttcgaagtacggcgccaagcgtccgaagtaa

SEQ ID NO: 322008 - DNA, 471 bp, Pseudomonas aeruginosa
atgccaagacgtcgtgtagcggccaagcgtgaagtgctggctgatccgaaatacggaagccagatcctggccaagttcatgaaccacgtgatggaaagcggcaagaaagccgttgccgagcgtatcgtttacggtgcgctggacaaggtgaaggaacgcggcaaggccgatcccctggaaaccttcgaaaaagctctcgatgccatcgctccgctggtcgaagtgaagtcccgccgcgtaggtggtgcgacttaccaggttccggtcgaagtccgtccgtcccgtcgtaatgccctggccatgcgttggctggtggacttcgcccgcaagcgtggcgagaagtccatggctctgcgcctggctggcgagctgctggatgccgctgaaggcaagggcgcagcagtcaagaagcgtgaagacgtgcaccgtatggcagaggccaacaaggccttctcgcactaccggttctaa

SEQ ID NO: 322009 - DNA, 2121 bp, Pseudomonas aeruginosa
gtggcccgtactacacccatcaaccgctaccgtaatatcggtatctgtgcccacgttgacgcgggcaagaccaccaccacggagcgggttctgttctataccggcgtcaaccacaagctgggcgaagtgcatgacggcgctgcgaccaccgactggatggtgcaggagcaggagcgcggtatcaccattacctccgctgccgttaccaccttctggaagggctcgcgcggtcagtacgacaactatcgcgtaaacgtcatcgacacccccggccacgtagacttcaccatcgaggtggagcgttccctgcgtgtactggacggcgctgtcgtggtgttctgtggcacctccggcgtagagccgcagtcggaaaccgtatggcgtcaggccaacaagtacggcgtaccgcgcatcgtctacgtcaacaagatggaccgccagggcgcgaacttcctgcgcgtcgtcgagcagatcaagaagcgcctgggtcataccccggttccggtccagctcgccatcggcgctgaagagaacttcgttggtcaggtcgacctgatcaagatgaaggccatctactggaacgatgacgacaagggcatgacctaccgcgaggaagaaattcctgcggagctcaaggacctggccgaagagtggcgttccagcatggtcgaggctgcggccgaagccaacgaagagctgatgaacaagtacctcgaagagggcgagctctccgaagccgagatcaaggaaggcctgcgtctgcgcaccctggcgtgcgagatcgttccggccgtctgcggttcctcgttcaagaacaagggcgttccgctggttctcgatgccgtcatcgactacctcccggctccgaccgagatccctgcgatcaagggcgtcagcccggacgacgagaccgtcgaagacgagcgtcatgccgacgacaacgaaccgttctcgtccctggcgttcaagatcgctaccgacccgttcgtcggtaccctgaccttcgcccgcgtttactccggcgtcctgagttccggcgactccgtcctgaactcggtgaaaggcaagaaagagcgcgtcggtcggatggtgcagatgcacgccaaccagcgtgaagagatcaaggaagtgcgcgcaggcgacatcgctgccctgatcggcatgaaggacgtcaccaccggtgacaccctgtgctcgatcgagaagccgatcatcctcgagcgcatggacttccccgagccggtaatctcggtcgctgtagagccgaagaccaaggctgaccaggagaagatgggtatcgccctcggcaagctggcccaggaagacccgtcgttccgtgtcaagaccgacgaagagtccggtcagaccatcatctccggcatgggcgagctgcacctggacatcatcgtcgaccgcatgaagcgcgagttcggcgttgaggccaacatcggcaagccgcaggttgcctaccgtgagaccatcaccaaggacaacgtggagatcgaaggcaagttcgttcgccagtccggtggtcgcggtcagttcggtcattgctggatccgtttctcggccgcggacgtggacgagaagggcaacatcaccgaaggcctggtgttcgagaacgaagtcgtgggcggtgtggttccgaaggaatacatcccggcgatccagaagggtatcgaagagcagatgaagaacggcgtcgttgccggctatccgctcatcggcctgaaggctaccgttttcgatggttcctaccatgacgtcgactccaacgagatggcgttcaagatcgctgcttccatggcgaccaagcagctggcccagaagggcggcggcaaggtgctcgagccgatcatgaaggtagaggtggtgactcctgaggactacatgggtgacgtgatgggcgacctgaaccgtcgtcgtggtctgattcaggggatggaggacacggtttccggtaaggttattcgtgccgaggttccgctgggtgagatgttcggttatgcgaccgacgtgcgttccatgtcccagggtcgcgcgagctactccatggaattctccaaatacgccgaagctccgtcgaacatcgtcgaagcgctggttaaaaaacaaggttga

SEQ ID NO: 322010 - DNA, 1194 bp, Pseudomonas aeruginosa
gtggctaaggaaaaattcgaacgtaacaaaccgcacgtcaacgtcggcaccatcggtcacgttgaccatggcaagaccactctgaccgctgcactgaccaaggtctgctccgacacctggggtggttccgctcgtgctttcgatcagatcgacaacgcgccggaagaaaaggcccgcggtatcaccatcaacacctcgcacgttgaatacgattccgctgttcgtcactacgcccacgttgactgccccggtcacgccgactacgtgaagaacatgatcaccggtgctgcccagatggacggcgcgatcctggtttgctcggctgccgacggccccatgccgcagacccgcgagcacatcctgctgtcccgccaggtaggcgttccctacatcgtcgtgttcctgaacaaggccgacatggtcgacgacgccgagctgctggaactggtcgagatggaagttcgcgatctgctgaacacctacgacttcccgggcgacgacactccgatcatcatcggttccgcgctgatggcgctggaaggcaaggatgacaacggcatcggcgtaagcgccgtgcagaagctggtagagaccctggactcctacattccggagccggttcgtgccatcgaccagccgttcctgatgccgatcgaagacgtgttctcgatctccggtcgcggtaccgtggtaaccggtcgtgtagagcgcggcatcatcaaggtccaggaagaagtggaaatcgtcggcatcaaggcgaccaccaagaccacctgcaccggcgttgaaatgttccgcaagctgctcgacgaaggtcgtgctggtgagaacgttggtatcctgctgcgcggcaccaagcgtgaagacgtagagcgtggccaggtactggccaagccgggcaccatcaagccgcacaccaagttcgagtgcgaagtgtacgtgctgtccaaggaagaaggtggtcgtcacaccccgttcttcaagggctaccgtccgcagttctacttccgtaccaccgacgtgaccggtaactgcgaactgccggaaggcgtagagatggtaatgccgggcgacaacatcaagatggttgtcaccctgatcgctccgatcgccatggaagatggcctgcgcttcgcgatccgcgaaggcggccgtaccgttggcgccggcgtggttgccaagatcatcgagtaa

SEQ ID NO: 322011 - DNA, 312 bp, Pseudomonas aeruginosa
atgcaaaaccaacaaatccggattcggttgaaggcttttgaccatcgcctgatcgatcaatcaacccaggaaatcgtggaaaccgcgaaacgtactggtgctcaggtgcgtggtccaatccctctgccgacccgcaaggaacgtttcaccgtgctgatctctccgcacgtcaacaaagatgcgcgtgatcagtacgaaattcgtacacataagcgtgtactggacatcgtccagccgacggataaaaccgtcgatgcgctgatgaagctcgatcttgctgcaggcgttgaagtacagatcagcctcggctaa

SEQ ID NO: 322012 - DNA, 636 bp, Pseudomonas aeruginosa
atgacaattggtgttgtcggtcgtaaatgcggcatgacccgcattttcaccgaggaaggtgtctctattccggttacggtcatcgaggtcgagccgaatcgcgtcacccagttcaagactgaagaaaccgatggctaccgtgcagtgcaagtcaccgccggcgagcgtcgtgcttctcgcgttaccaaagcgcaagctggtcactttgccaaggcgaatgtcgccgccggtcgcggcgtgtgggaattccgtctgggcgaagagcagtatgccgctggtgaccagatcactgtcgatctgttccaggcaggccagatggtagacgttaccggcgagtccaagggtaagggcttcgcgggcaccatcaagcgctggaacttccgtggtcaggataacacccacggtaactccgtttcccaccgcgtcccgggttccatcggccagtgccagactcctggtcgagtgttcaagggcaagaaaatgtccggtcatctgggtgcggagcgggtaaccgttcaatccctggagatcgtgcgcgtcgatgctgaacgcaatctgctgctggtcaagggtgccgttcccggcgctaccggcggtgatgtgatcgtgcgtccggcagccaaggctcgcggttaa

SEQ ID NO: 322013 - DNA, 603 bp, Pseudomonas aeruginosa
atgcaattgaatgtgaacggcgctcaggctatcgaagtctccgagcgtacctttggtggcgaattcaacgagaccctggtgcaccaggcagtcgtggcctacatggctggcggccgtcagggcagcaaggcgcagaagactcgctccgaagtctctggtggtggcaagaagccgtggcgtcagaagggcaccggtcgtgctcgtgctggcaccatccgtagccccatctggcgtgggggcggcaccactttcgccgctaaaccgcgtagccacgaacagaagctgaacaagaagatgtaccgcgcagcactgcgctccatccttgccgagctcgttcgtctggaccgtctggtcgtcgttgccgacttcgctgtcgatgcaccgaaaaccaagggcctggttgccaagctggacaccctgggtctgaaagacgtgctgatcgtgaccgatggtgtcgacgagaacctgtacctcgctgcgcgcaacctggcgcacgtcgatgtacgtgatgtccaaggttccgaccccgtcagcctgatcgcctacgacaaggtgctggtcaccgtgtccgccgtgaagaagttcgaggagctgctgggatga

SEQ ID NO: 322014 - DNA, 300 bp, Pseudomonas aeruginosa
atgaaccaggaacgcgtattcaaagtgctgcttggtccgcacatctccgagaaagccacgggtctcgcggacggcaagagccaattcgttttcaaggttgccaccgatgcaaccaagctggaaatcaagaaggccgtagaaagcctgttcagcgtgaaggtacagcgcgtcactaccctgaacgtcaagggtaagaccaagcgcaccgctcgcggtctgggcaagcgtaacgactggaaaaaagcgtacatcgctctccagccgggccaagatctcgatttcgccaccagcgctgagtaa

SEQ ID NO: 322015 - DNA, 822 bp, Pseudomonas aeruginosa
atggcaatcgttaagtgcaaaccgacttccgctggtcgtcgctttgtcgtcaaggtggtgaatcaggagctgcacaaaggcgctccctacgcaccgctgctggaaaagaaatccaagtctggcggccgtaacaacaacggtcgtatcaccacccgtcatatcggtggtggtcacaagcagcactaccgtctggtcgacttccgtcgcaacaaggatggcatccctgccatcgttgagcgcgtcgaatacgatccgaaccgcactgcacacatcgctctgctgaagtatgcagacggcgagcgtcgctacatcatcgcccccaagggcgttgctgcaggtgaccagctgatctccggtatcggtgcgccgatcaaggcaggcaacagcatgcctctgcgcaacatcccggtgggtagcactgttcatggtatcgagctgaagccgggtaaaggcgctcagatcgctcgctccgctggcgcttccgcccagctggtcgcgcgtgaaggtgcgtacgtaaccctgcgtctgcgctccggtgaaatgcgtaaagtcctggctgagtgccgtgcgaccctgggcgaagtctcgaactccgagcacagcctgcgttcgctgggtaaagccggtgctacgcgctggcgtggtgttcgcccgaccgttcgcggcgtggcgatgaacccggtcgaccacccgcatggtggtggtgaaggccgtacctctgctggtcgtcatccggtatcgccgtggggtcttcagaccaagggtaagaagactcgctcgaacaagcgtaccgataacatgatcgtccgccgccgcaagtaa

SEQ ID NO: 322016 - DNA, 276 bp, Pseudomonas aeruginosa
gtgccacgttcactgaaaaaaggtccgtttatcgatcttcacctgttgaagaaggtcgaagtcgcggtggaaaagaacgaccgcaagccgatcaagacctggtcgcgtcgttcgatgattctgccgcatatggttggtctgaccatcgccgtgcacaacggccgtcaacacgtaccggttctcgtcaacgaggacatggtcggccacaaactgggcgagttcgccgctacccgcacctaccgcgggcatgctgcggacaagaaagccaagcgttaa

SEQ ID NO: 322017 - DNA, 333 bp, Pseudomonas aeruginosa
atggaagtagccgctaagctgtcgggcgctcgtatctccgcccagaaagcccgcttggtcgccgaccagatccgcgggaagaaggtgggcgaagcgctcaacctcctggctttcagcagtaagaaagccgccgagatcatgaagaaagtgctggagtcggccgttgccaacgctgagcacaacgaaggcgccgatgtggatgacctgaaggtctccaccgtcttcgtcaacgaaggtcgttcgctcaagcgcatcatgccgcgtgccaaaggccgtgctgatcgcatcgtgaagcggtcttgccatatcacggtcaaggttgcggacaagtaa

SEQ ID NO: 322018 - DNA, 687 bp, Pseudomonas aeruginosa
atgggtcagaaagtacatcccaatggcattcgcctgggtatcgtcaaggagcacacctccgtttggtacgcagaccgcaagaactatgcggattacctgtttgccgacctgaaggtgcgtgagtacctccaagacaaactaaaaagcgcgtccgtaagccgtatcgatattcatcgtccggctcaaaccgcacgcatcaccatccacaccgctcgtcccggcatcgtgatcggcaagaaaggtgaagatgttgagaaactgcgccaggacctgaccaagcaaatgggtgtgcccgtgcacatcaacatcgaggaaatccgcaagccggaactcgatgccatgctggttgcgcagagcgtagcccagcagctggagcgtcgcgtaatgttccgtcgcgccatgaagcgcgccgtacagaacgccatgcgcattggtgccaagggcatcaagattcaggtcagcggtcgtctgggtggggctgaaatcgcccgtaccgaatggtatcgcgaaggtcgtgtgcccctgcacaccctgcgcgccgatatcgactatgccacctacgaagcgcacaccacttacggtgtgatcggtgtcaaggtttggatcttcaagggcgaggtcatcggtggccgccaggaagagctgaagccggtagcacccgctcctcgtaaaaaagctgctaggtaa

SEQ ID NO: 322019 - DNA, 414 bp, Pseudomonas aeruginosa
atgctgcaacccaagcgtacgaagttccgcaaacaaatgaccggccacaaccgtggtctggctcatcgtggtagtaaggtcagcttcggtgagtacgcactgaaggccactagccgtggccgccttactgctcgtcagatcgagtccgcgcgtcgtgcgctgacccgtcacgtgaagcgtggcggcaagatctggatccgcgtattccctgacaagcctgtcaccaagaagcccctcgaagttcgtatgggtaaaggtaagggtggggtcgagtactgggtagcccagatccagccgggcaaggtcctgtacgagatcgagggtgtttccgaagagctggcgcgtgaggctttcgccctggctgctgcaaagctgcccctcgccacctcctttgttaagcggacggtgatgtga

SEQ ID NO: 322020 - DNA, 192 bp, Pseudomonas aeruginosa
atgaaagcgaatgaacttcgtgaaaaatccgttgagcagctgaacgagcaactgctcggcctgctgcgcgaccagttcaatctgcgcatgcagaaagcaactggccagttggggcagtctcacctgctctcgcaggttaagcgcgacatcgctcgcgttaaaactgtgctcaatcagcaagcaggtaagtga

SEQ ID NO: 322021 - DNA, 267 bp, Pseudomonas aeruginosa
atggctgaagctcagaaaaccgtccgtacgctgaccggccgcgtcgtcagcgacaaaatggacaagaccgtcaccgtactgatcgagcgtcgcgtcaagcacccgatctacggcaaatacgtcaagcgttcgaccaaactgcacgcacacgacgaatccaatcagtgccgcattggtgacctggtcaccattcgcgaaacccgtccgctggccaagaccaaggcctggaccctggttgatatcgttgaacgcgcggtggaagtctaa

SEQ ID NO: 322022 - DNA, 369 bp, Pseudomonas aeruginosa
atgattcagactcaatccatgctcgatgtcgctgacaacagcggcgcgcgtcgtgtgatgtgcatcaaggtgctcggcggttcccaccgccgttacgccggcatcggcgacatcatcaaggtcaccgtcaaggaagcgattccgcgcggcaaagtgaagaagggccaggtcatgactgccgtggtcgttcgcaccaagcacggcgtacgtcgtaccgacggttccatcatccgcttcgacggcaacgccgccgtcctgctgaacaacaagcaggagccgatcggcacccgtatctttgggccagtgactcgtgaactccgtaccgagaagttcatgaagatcgtctcgctcgcccccgaagtgctgtaa

SEQ ID NO: 322023 - DNA, 315 bp, Pseudomonas aeruginosa
atgcaaaagattcgtcgtgacgacgaagtaatcgtcattgccggcaaggacaagggcaagcgtggcaaggtgctgaaggttctcgctgacgaccgtctggtcgtcggcggggtgaacctgatcaagcgccacaccaagcccaatccgatgctcggccaacagggcggtatcgtcgagaaggaggcgcctctgcacgtctccaacgtcgccatcttcaatactgaaaccagcaaggctgaccgcgttggcttcaaggtagaagacggtaagaaaattcgtgtcttcaagtcgacccagaaaccggttcaggcttga

SEQ ID NO: 322024 - DNA, 540 bp, Pseudomonas aeruginosa
atggcacgattgaaagaaatttatcggaaggaaatcgcgcccaagctgaaagaagagcttcagctggcgaacgtgatggaagttccgcgcgttaccaaaatcaccctgaacatgggtcttggcgaggcggtcggtgataagaagatcatcgagaacgccgtagccgatctggaaaagatcactggtcagaagccggtcgtgacttacgctcgtaagtccatcgcaggcttcaagatccgtgaaggctggccgatcggcgtcaaggtcaccctgcgtagcgaccggatgtacgagttcctggatcgtctgctgtccatctccctgccgcgcgtgcgtgacttccgcggcctgaatgccaagtccttcgatggtcgcggcaactacagcatgggcgtgaaagagcagatcatcttcccggaaatcgattacgacaagatcgatgcgctgcgtggcctggacatcaccctgaccaccaccgctcgtacggatgacgaaggtcgcgccctgctgcgtgctttcaaattcccgttccgtaactga

SEQ ID NO: 322025 - DNA, 306 bp, Pseudomonas aeruginosa
atggctaaagagagcatgaagaaccgcgagctgaagcgtcagctgacggtagccaagtacgccaagaagcgtgccgagctgaaagcgatcatcgctaatccgaactcctctgcggaagagcgttggaatgcccaggtcgccctgcagaagcaaccgcgtgacgccagcgccagccgcctgcgtaaccgttgccgcctgaccggtcgtccgcacggcttctaccgcaagttcggcctgagccgtaacaagctgcgcgaagccgccatgcgcggcgacgtaccgggtctggtgaaagccagctggtaa

SEQ ID NO: 322026 - DNA, 393 bp, Pseudomonas aeruginosa
atgagtatgcaggacccgttagcagacatgctaactcgcatccgtaatgcccagatggctgaaaagaccgtcgtaagcatgccgtcctcgaaactgaaagcggcggtagccaaagtcctgaaggacgaaggctatattgcggatttccagatcagctcggaagtaaaaccccagctgtccatcgaactgaagtacttcgaaggcaagcctgtcatcgaagaggtcaagcgcatcagccgtcctggcctgcgtcagtacaaatccgttgagcaactgccgaaagttcgtggcggcctcggtgtgtcgatcgtctccaccaacaaaggtgtgatgaccgatcgtgctgcccgtgctgctggtgttggcggcgaagtgctctgcactgtgttctaa

SEQ ID NO: 322027 - DNA, 534 bp, Pseudomonas aeruginosa
atgtctcgcgttgctaagaaccccgtcaagctgcctgccggcgttgaaatcaaactggctggtcagcaactgtccatcaagggcgccaaaggtgctctggagctcaaggtccatccttcggtcgaagtgatccaggacagcggtgagctgcgttttgctgcgcgtaacggcgaccagcagactcgcgccatggctggtaccacccgtgctctggtgaacaacatggtagtcggcgtcagccagggcttcgagcgcaagctccagctggtcggcgttggttacaaagcgcaggccaagggccaagtgctgtccctgtccctcggcttctcccatccggttgattacgaactgccggccggcatcgtcgctgagacccccagccagaccgatatcctgatcaagggtatcgacaagcagctggtcggtcaggttgctgccgaaattcgcgacttccgtccgccggagccttacaaaggcaagggcgtgcgttacgccgacgaagtcgtccgtcgtaaagaagccaagaagaagtag

SEQ ID NO: 322028 - DNA, 351 bp, Pseudomonas aeruginosa
atgagcgtcaagaaagaaacccgtctgcgtcgcgctcgcaaggcacgcctgaagatgcgcgagctggaaaccgtacgcctctgcgtgtaccgctcttcccagcacatttacgcccaggtcattgcggccgacggcggcaaggtcctggccagcgcctcgaccctggacaaagacctgcgcgaaggtgccaccggcaacatcgatgcagccaagaaagttggtcaactggtcgccgagcgcgccaaagcggccggcgtcacccaggtggcgttcgatcgttctggcttcaagtaccacggccgtgtgaaagcgctggctgatgccgctcgtgaaggcggactggagttctaa

SEQ ID NO: 322029 - DNA, 501 bp, Pseudomonas aeruginosa
atggcaaacaacgagcaaaagcgcgacgaaggctacatcgagaagctggttcaggttaaccgcgtcgccaaaaccgtaaaaggtggccgtatcttcgctttcaccgcactgaccgtggtgggtgatggcaagggtcgcgttggtttcggtcgtggcaaggcgcgtgaagtgccggccgccatccagaaagcaatggaagccgctcgccgcaacatgatccaagtcgatctgaacggcaccaccctgcagtatccgaccaagtccgcccatggcgcctccaaggtgtacatgcagccggcttcggaaggtaccggcatcatcgccggcggcgccatgcgtgccgttctggaagtggctggtgtgcagaacgtcctggccaagtgctatggctccaccaatccggtgaacgtggtttacgccaccttcaagggcctgaagaacatgcaggctccggaagcagtagcggccaagcgtggcaagagcgtcgaggagattctctaa

SEQ ID NO: 322030 - DNA, 177 bp, Pseudomonas aeruginosa
atggcaactgtcaaagtcactctggtcaagagcctgaacggccgtctggccaaccacaaggcttgcgtcaagggtctcggcctgcgtcgcatcaatcataccgtcgaagttcaggacactcctgagaaccgcggcatgatcaacaaggcctactacctgctgcgtgtggagggttaa

SEQ ID NO: 322031 - DNA, 435 bp, Pseudomonas aeruginosa
atgcaactgaacgatctgcgttccgcgccgggtgcccgtcgcgaaaagcaccgtccgggccgtggcatcggtagcggtctgggcaagaccggtggccgtggtcacaaaggtctgacctcccgctccggtggcaaggtcgctccgggcttcgagggtggtcaacagcctctgcaccgtcgcctgccgaagttcggcttcgtttccctgaaggccatggatcgtgctgaagtacgcacctccgagctggccaaggtcgaaggcgacgtcgtcagcctgcagaccctgaaggatgccaacctgatcaaccagcacgtacagcgcgtcaaagtcatgctgtccggcgaagttggtcgtgcggtcaccctgaaaggtatcgccgccaccaagggtgcgcgtgcggctatcgaagcagctggcggtaaattcgaggactaa

SEQ ID NO: 322032 - DNA, 1329 bp, Pseudomonas aeruginosa
atggctaagcaaggtgctctctctgcgctaagcaacggcggtctgtccgagctctgggcacgtctgcgtttcctgttcctggcgatcatcgtctatcggatcggcgcgcacatcccagttccgggcatcaaccccgatcgcttggcggcactgttccggcagaacgaggggaccattcttagcctcttcaacatgttttccggcggcgcgctggagcgcatgagtatctttgcactggggatcatgccgtacatctcggcatcgatcatcatgcagctcatgaccgctatcagcccgcagctggagcagttgaagaaagagggtgagtctgggcgtcgcaagatcagccagtacacccgctacggtactgtagtcctggcactggtccaggccatcggcatgtccgttggcctgggcagccagggcgtagccttctccaacgacttcggcttctacttcgtggctgtcaccaccttcgtggctggtgccatgttcatgatgtggctgggcgagcagatcaccgagcgcggtgtcggcaacggcatctcgatgttgatcttcgctggtatcgttgcaggcctgccgcgcgccatcggtcagtctttcgagtctgcccgtcaaggtgacatcaacatcttcgccctgatcggcgtcggcctgctggccgtggcgatcatcgcgttcgtggtgttcatcgagcgtggccagcgtcgcatcgcggtgcattacgccaagcgccagcaaggccgcaaggtgtttgcagcgcagaccagccatctgccgttgaaggtgaacatggcgggtgtgattcccgcgattttcgccagcagtatcctgctgttcccggcgtccctgggctcctggttcggtcagtcggaaggcttgggttggttgcaggacgtcgcgcaagcgatcgctccggggcagccgctgaacatcttgctgttcactgcagggatcgttttcttctgcttcttctatacagcgctgatgttcaacccgaaggacgtggcggagaacctcaagaagtccggtgcatttattccgggcatccgtccgggcgaacagtccgctcgctacatcgatggcgtgctgacccgtttgaccatgttcggtgctctgtacatgacggctgtctgcctgctgccccagttcctggtggttgcggcgcacgtgccgttctatcttggcgggacctcgctgttgatcgtggtcgtggttgtcatggactttatggcccaggtgcaatctcacctcgtttctcaccagtatgaatccctgatgaagaaagccaacctgaagggctacggcagcggcatgctgcgctga

SEQ ID NO: 322033 - DNA, 357 bp, Pseudomonas aeruginosa
atggcccgtattgcaggcgtcaacattccggataacaagcacactgttatctcgctgacctacatctatggtgttggtcgcactactgctcagagcatctgcgcagccaccggcgtaaacccggctgccaagatcaaggacctgagcgacgagcagatcgatcagctgcgtaacgaagtcgcgaagatcaccaccgaaggtgacctgcgtcgcgaaatcaacatgaacatcaagcgtctgatggacctcggttgctaccgcggtctgcgtcatcgtcgcggtctgccggttcgcggtcagcgtaccaagaccaacgcgcgtacccgcaagggcccgcgtaagccgatccgcaagtaa

SEQ ID NO: 322034 - DNA, 390 bp, Pseudomonas aeruginosa
atggcaaaacctgctgctcgtccccgtaagaaagtcaaaaagacagtggtcgatgggatcgcccacatccacgcgtctttcaacaacaccatcgtgaccatcaccgaccgtcagggcaacgcactgtcctgggcgacctccggtggttccggtttccgcggctcgcgtaagagcaccccgttcgctgcccaggtagcggccgagcgtgccggccaggctgccctggaatacggtctgaagaacctggacgtcaacgtcaagggcccgggcccgggccgcgagtccgccgttcgcgctctgaatgcttgcggctacaagatcgccagcatcaccgacgtaaccccgatcccgcataacggctgccgtccgccgaaaaagcgtcgcgtgtaa

SEQ ID NO: 322035 - DNA, 621 bp, Pseudomonas aeruginosa
atggctcgttacattggtcccaagtgcaaactgtctcgccgtgaaggcaccgacctgttcctgaagagcggcgcccgcgccctcgactcgaagtgcaaggctgaaaacgttcctggccagcatggccagcgtcgtggccgtctgtccgactacggtctgcagctgcgtgaaaagcagaaagtacgtcgcatctacggcgtgctggagcgtcagttccgcggttactaccaggaagcttcccgtcgcaagggttctaccggtgagaacctgctgcaactgctcgagtgccgcctggacaacgtcgtataccgcatgggcttcggttccactcgttcggaatcccgccagctggtatcccacaaggccatcaccgtcaacggtcagaccgtcaacatcccttcctaccaagtgaaggccggtgacgtcgtagctgttcgcgaaaaatcgaagaaccagctgcgtatcgctcaggctctggaactctgtggccagcgcggtcgcgtcgagtgggtcgaagtcgacctcgacaagaaggctggtaccttcaagagtgctccggctcgcagcgacctgtccgctgatatcaacgaaaacctgattgtcgagctctactccaagtaa

SEQ ID NO: 322036 - DNA, 1002 bp, Pseudomonas aeruginosa
atgcagagttcggtaaatgagttcctgaccccccgccacatcgatgtgcaggtggtcagtcaaacccgcgccaagatcacgctcgagcctctcgagcgtggttttggtcacaccctgggcaacgcgctgcgtcgcatcctgttgtcctccatgcctggctgcgcagtggtcgaggccgagatcgacggcgtactccacgagtactcggcgatcgaaggtgtgcaggaagatgtaatcgagatcctgctgaacctgaaaggtctggccatcaagctgcacggtcgtgatgaagtgacgctgaccctggctaagaagggctcgggtgttgtgactgctgccgatattcagctggatcacgatgttgagatcatcaacggtgaccacgttatcgccaacctggcagacaacggcgcgctgaacatgaagctgaaggtagctcgtggccgtggctacgagcctgccgacgcacgtcagagcgatgaagacgaaagccgcagcatcggccgtctgcagctcgacgcatcgttcagtccggtccgtcgtgtctcctacgtggtggaaaacgcccgtgtcgagcagcgcaccaacctggacaaactggtcctggacctggaaaccaacggcaccctggatcccgaagaggctatccgtcgcgccgctaccatcctgcaacagcagctggcagcgttcgtggacctcaagggcgacagcgaacccgtcgttgaagagcaggaagacgagatcgatccgatcctcctgcgcccggtcgatgacctggaactgaccgtacgttcggccaactgcctgaaggcggaaaacatctactacatcggtgacctgatccagcgcaccgaagtggagctgttgaaaacgccgaacctgggcaagaagtccctgaccgaaatcaaggacgttctggcttcccgtggtctgtccctcggtatgcgcctcgataactggccgccggcaagtcttaagaaagacgacaaggccactgcctga

SEQ ID NO: 322037 - DNA, 390 bp, Pseudomonas aeruginosa
atgcgccatcgtaaaagtggtcgtcacctgagccgcaccagcgcgcaccgcaaggctatgttccagaacatggcggtgtcgctgttcgaacatgaactgatcaaaaccaccctgcccaaggccaaggaactgcgtcgcgttgccgagccgctgatcaccctggccaaggaagacagcgtcgccaaccgtcgcctggctttcgaccgtacccgttcgaaagctgccgttggcaagctgttcaacgacctgggcaagcgctacgccaaccgtccgggcggctacctgcgcatcctgaagtgcggtttccgcgctggcgacaacgcccccatggcgtacgtcgagctggttgatcgtcctgtcggcggtgaagtcgtagaagctgccgaataa

SEQ ID NO: 322038 - DNA, 1449 bp, Pseudomonas aeruginosa
atggaagagaagacccgcctgaccactgccgctggcgcaccggtggtcgataaccagaacgtgcagaccgccggtccgcgtggcccgatgttgctgcaggacgtgtggttcctcgagaagctcgcccacttcgatcgcgaagtgatccccgagcgacgcatgcatgcgaaaggttccgcggcctacggcaccttcaccgtcacccatgacatcaccccctacacccgggcgaagatcttctcccaggtcggcaagaagaccgatatgttcctgcgcttctccaccgtcgccggtgagcgtggcgcggcggatgccgagcgtgacatccgcggcttctccatgcgtttctacaccgagcagggcaactgggacctggtcggcaacaacaccccggtgttctatctgcgcgacccgctcaagttccccgatctcaaccacgtggtgaagcgtgacccgcgcaccaacctgcgcaatgcgaccttcaagtgggactttttctctcacctccccgagtcgctgcatcagttgaccatcgacttcagcgaccgcggcctgccgaagagctatcggcacatccatggtttcggcagccataccttcagcttcatcaatgcgaacaacgagcgcttctgggtcaagttccacttcaagacccaacagggcatcgagaacctgaccaacgccgaggccgccgaagtgatcgcccaggaccgcgagagttcgcagcgcgacttgtacgagagcatcgagaaaggcgacttcccgcgctggaagatgtacgtgcagatcatgcccgagaaggaagcggctacctatcgctacaacccgttcgacctgaccaaggtctggccccacggtgactacccgttgatcgaagtgggcttcttcgagctgaaccgtaacccggacaactacttcgccgaggtcgagcaggccgctttcacgccggccaacgtggtgcccggtatcggtttctcgccggacaagatgctccagggccgtctgttctcctacggcgacgcccatcgctatcgcctgggcgtcaaccaccaccagatcccggtgaacgccgcgcgttgcccgcaccaggtctaccaccgcgacggcggcatgcgggtggacggcaacaacgcccatcagcgcgtcacctacgagccgaacagcttcaaccagtggcaggagcagcctgacttctccgagccgtcgctgagcctggagggtgcggcggaccactggaaccaccgggtggacgatgactactacagccagcccgccgcgctgttccatctgttcaccgacgagcagaagcagcggctgttcgccaacatcgccgaagacatccgcgatgtaccggaacagatccagcgtcgccagatcggcctgttcctcaaggtcgacccggcctacggcaaaggcgtcgccgacgccctcggcctgaagctggactga

SEQ ID NO: 322039 - DNA, 465 bp, Pseudomonas aeruginosa
atgcaaggccatccggaagtcatcgattacctcaacacgctgctgaccggcgagctggccgcgcgcgaccagtacttcatccactcgcgcatgtacgaggactggggcttcagcaagctctacgagcgcctcaaccacgagatggaggaggagacccaacacgccgacgccctgctgcgccgtatcctcctgctcgaaggtacgccgcgcatgcgtcccgacgatatccacccgggcaccacggtgccggagatgctcgaggccgacctcaagctcgagcgccatgtccgcgccgcgctggccaagggcatcgccctctgcgagcagcacaaggacttcgtcagccgcgacatcctcaaggcccagttggccgacaccgaggaagaccacgcctactggttggagcaacagcttggcctgatcgccaggatgggcctggagaactacctgcaatcgcagatctga

SEQ ID NO: 322040 - DNA, 2838 bp, Pseudomonas aeruginosa
gtggataagatcctgattcgtggggcgcgtacccacaacctgaagaacgtcgacctcacactgccacgcgacaaactgatcgtgatcaccggtctttccggttccggcaagtcttccctggctttcgacacgctctatgcggaaggccagcggcgctacgtggaatccctctcggcctacgcccggcagttcctgtcgatgatggagaagccggacgtggacaccatcgaagggctgtcgccggcgatttccatcgaacagaagtccacttcccacaacccacgctccaccgtgggtacgatcaccgagatctacgactacctgcgcctgctttatgcccgcgtcggtaccccgcgctgcccggaccacgacatcccgctggaggcgcagaccgtcagccagatggtcgaccaggtcctggccctgccggaaggcagcaagctgatgctgctggcgccggtgatccgcgagcgcaagggcgagcacctggcggtgttcgacgagatgcgcgcgcagggcttcgtccgcgcccgggtcgacggcaagctctacgaactcgacgaagtgccgaagctggataagcagaagaagcacagcatcgatgtggtggtggaccgcttcaaggttcgcgcggacctccagcaacgcctggccgagtcgttcgagaccgccctgtccctggccgacggtatcgccctggtagcaccgatggacgaggacgaggatgtcgaggagatcatcttctcggcgcgcttcgcctgcccggtctgcggccactctatcagcgagctggaacccaagctgttctccttcaacaacccggccggcgcctgtccgacctgcgacggcctcggcgtgaagcaattcttcgacgcgcgccgggtggtcaacggcgagttgaccctggccgagggcgcgatccgcggctgggaccggcgcaacgtctattacttccagatgctcggttcgctggcccagcattacggcttcagcctggaagaacccttcgacgaactcggcgccgaacaccagaaggtggtgctctacggctccggccgggaaaacgtcgacttccgctatctcaacgaccgcggcgacatcgtcaagcgctcgcaccccttcgaaggcatcctgccgaaccttgagcggcgctaccgcgagaccgagtcggccacggtccgcgaggagctggccaagttcctcagcacccagccctgcccggattgccacggtacccgcctgcgccgcgaggcgcggcatgtgtgggtcggcgaccggacgctgccggcgatcaccgcgatgccggtcggcgaagcctgcgagtatgccgccggactcagcctgaccggccgccgtggcgagatcgcggcgaagatcctcaaggaaatccgcgaccgcctgcaattcctggtcaacgtcggcctcgactacctgaccctcgaccgcagcgccgacaccctgtccggcggcgaagcccagcgcatccgcctggccagccagatcggcgccggcctggtgggagtgatgtacatcctcgacgaaccctcgatcggcctgcaccaacgcgacaacgagcgcctgctcgccaccctcacccacctgcgcaacctcggcaacacggtgatcgtggtcgagcacgacgaggacgcgatccgactcgccgactacgtcgtcgacatcggtccgggcgccggcgtgcacggcggccaggtagtggcggaaggtacgcccgaccaggtgatgaaccaccccgactcgctgaccggcaagtacctttccgggcgcaagaaaatcgcggttccggccaagcgcaccccgcgcgacaagaagaagctgctgaagctgaaaggcgcccgcggcaacaacctgcagaacgtcaacctggaaatcccggtcggcctgttcacctgcatcaccggggtctcgggctccggcaagtcgacgctgatcaacaacaccctgttcccgatcaccgccaccgcgctgaacggcgcgactaccctggaagtggcgccgtatgactcgttcgacggcctgcagcacctggacaaggtggtcgacatcgaccagagcccgatcggtcgtaccccgcgctccaacccggcgacctataccggcctgttcacgccgatccgcgaactgttttccggcgtgccggaggcccgctcgcgcggctacggtcccggccgcttctcgttcaacgtcaagggcggccgttgcgaggcctgccagggcgacggcgtgatcaaggtggagatgcacttcctgccggacatctacgttccctgcgatgtctgcaagggcaagcgctacaaccgcgagaccctggagatccgctacaagggcaagagcatccacgaggtgctggagatgaccatcgaggaagcccgcgagttcttcgacgccgtccccgccctggcgcgcaagctgcagacgctgatggacgtcggcctgtcctacatcaagctgggccagagcgcgaccaccctctcgggcggcgaggcacaacgggtcaagctgtcccgcgagctgtccaagcgcgataccggcaagaccctgtacatcctcgacgaaccgaccaccggcctgcatttcgccgacatccagcaactgctcgacgtgctccaccgcctgcgcgaccacggcaacaccgtggtggtgatcgagcacaacctggacgtgatcaagaccgccgactggctggtcgacctcggccccgagggcggctccaagggcggccagatcatcgccaacggcacgccggagcaggtggccgagatgtcccagtcgcacaccggccacttcctcaagccgttgctggaacgcgatcgcgcctga

SEQ ID NO: 322041 - DNA, 1389 bp, Pseudomonas aeruginosa
atgcacgactcacatactgagcggatgagcggtaccgaaacgcgagcggccgtcgggctgtcactggtattcgccttccgcatgctcggcatgttcatggtcctgccggtgctggccacctacggccaggacctggccggcgcgaccccggcgctgatcggcctggccatcggcgcctatggcctgacccaggcgatcctgcagattcccttcgggaccatttccgaccgcatcggccggcgcccggtgatcgtcgtcgggctgctgatcttcgccgccggcgcggccctcgcggccaatgccgactccatctggggggtgatcgccggccgcgtcctgcagggcgccggggcgatctcggcggcggtgatggcgctgctctccgacctcacccgcgagcagcaccggaccaaggcgatggcgatgatcggcatgagcatcggcgtctccttcgccgtggccatggtgctcggcccggtgctgacccatctgttcggcctgcatgggctgttctggttcaccgccgggatggcgctggtcggcctgctgctgatcctgttcttcgtcccgcagcccgaccacatgacccagcaccgcgaatccagcgtggcgcgccaggccctgctgccgaccctgaagcacggcgacctgctgcgcctggacgccggcatcctgatcctccacgccatcctcatggccagcttcgtcgccttgccgctggcactggtgcacgagggtggcctgcccaaggagcagcactggtgggtctacctgactgcgctgctggtcggtttcttcggcatggtgccgttcatcatctacgccgagaagaagcgtcgcatgaagcgcgtgctgaccggcgcggtggcgaccctgctggcctgcgaactgttcttcctggtcttcggtcacagcctggccatgctggtggtcggcacggtggtgttcttcactgccttcaacctgctcgaagcctcgctgccgtcgctggtcagcaaggtctcgccggccggcggcaagggcacggcgatgggggtgtattccaccagccagttcctcggcgcggcgctgggcggcatcctcggcggctggatgttccagcacggcgggctgagcatggtgttcatcggatgcgcggtgctcgctgccctctggctggcgattgctgttaccatgcgcgaaccgccttatgtgaccagcattcgcctgccgctcgcgcccgccgcgctgcaggacgcggtgctggtccagcgattcagggcgttgcccggtgtggcagacgccgtggtggtggccgaggaggccgccgcctatgtcaaagtggatacccaacaagtggatcgcaccgccctcgagcgcctggcccaggccgcgccgggcggatgctga

SEQ ID NO: 322042 - DNA, 498 bp, Pseudomonas aeruginosa
atggcccgtggggttaacaaagtcattctggttggtaacgtcggtggtgacccggaaacccgctacatgcccaacggcaatgcggtgaccaacatcaccctcgccaccagcgagagctggaaggacaagcagaccggccagcaacaggagcgcaccgaatggcaccgcgtggtgttcttcggccgcctggcggagatcgccggcgagtacctgcgcaagggttcccaggtctacgtcgaaggcagcctgcgcacccgcaagtggcagggccaggacggtcaggatcgctacaccaccgagatcgtggtcgacatcaacggcaacatgcagttgctcggcggccgcccctccggcgacgattcgcagcgcgccccgcgcgagcccatgcagcgcccgcagcaggccccgcagcagcagtcgcgtccggccccgcagcagcaaccggcgccgcaaccggcccaggactacgacagcttcgacgacgacattccgttctaa

SEQ ID NO: 322043 - DNA, 1431 bp, Pseudomonas aeruginosa
atgagccggctggcgcccctgagccagtgcctgcacgccttgcgcggcaccttcgagcgcgccatcggccaggcgcaggcgctcgatcgtccggtgctggtggcggcatcgttcgagatcgacccattggacccgctgcaggtattcggtgcctgggacgaccggcaaacgccctgcctgtactgggaacagcccgagctggcgttcttcgcctggggcagcgccctggagctgcaaggccacggcgaacagcgcttcgcccggatcgaggaaaactggcaattgctctgcgccgacgccgtggtcgagggcccgctggcgccgcgcctgtgcggcggattccgcttcgatccgcgcggcccgcgcgaggaacactggcaagccttcgccgatgccagcctgatgctcgccggcatcaccgtgctgcgcgagggcgaacgctaccgggtactctgccaacacctggccaagcccggcgaagatgccctggccctggccgcctaccactgctcggcgctactgcgcctgaggcagccggccagacgccggccctcggggccgaccgctggcgcgcagggcgacgcttcggcgcaggagcgcaggcaatgggaagccaaggtgagcgacgcggtaagcagtgtccgccagggacgcttcggcaaggtcgtgctggcccgcacccaggcccggcctctcggcgacatcgagccgtggcaggtcatcgaacacctgcgtctgcaacatgccgacgcccagctgttcgcctgtcgccgcggcaacgcctgcttcctcggcgcctccccggaacgcctggtccgcattcgcgccggcgaggcactcacccatgccctggccgggaccatcgcccgcggcggcgatgcccaggaagatgcccggctcggacaggccctgctggacagcgccaaggacaggcacgaacaccagttggtggtggaggcgatccgtacggccctggaacccttcagcgaggtgctggaaatccccgatgcgcccggtctgaaacgactggcgcgagtccagcacctgaacacgccgatccgcgcccgcctcgctgacgcaggcggcatcctgcggctgctgcaggcgctgcatccgacccccgcggtgggcggctacccacgcagcgcggcgctggactacatccgccagcacgaagggatggaccgcggctggtacgccgcgccgctgggctggctcgacggcgaaggcaacggcgatttcctggtggcgctgcgctcggccctgctcacgccgggccggggctacctgttcgccggctgcggtctggtaggcgattcggaaccggcccacgagtatcgcgaaacctgccttaagctcagtgccatgcgggaagctctatccgccataggcggcctggacgaagtgcccttgcagcgcggcgtcgcctga

SEQ ID NO: 322044 - DNA, 306 bp, Pseudomonas aeruginosa
atgaaaactcccgaagactgcaccggcctggcggacatccgcgaggccatcgaccggatcgacctggatatcgtccaggccctcggccgccgcatggactacgtcaaggcggcgtcgcgcttcaaggccagcgaggcggcgattccggcgcccgagcgggtcgccgcgatgctccccgagcgcgcccgctgggccgaggaaaacggactcgacgcgcccttcgtcgagggactgttcgcgcagatcatccactggtacatcgccgagcagatcaagtactggcgccagacacggggtgccgcatga

SEQ ID NO: 322045 - DNA, 756 bp, Pseudomonas aeruginosa
atgagcgccgcctgggtccggccgttccgcctgacgccgatgccgcgcctgcgcctggcctgcttcccccatgcaggcggcagcgccagcttcttccgtagctggagcgaacgcctgccgccagacatcgacctgcttgccctgcagtacccgggtcgcgaggaccgcttcaacgaggcgccggccacccgcttggaggacctcgccgacggcgccgccctcgccctgcgcgatttcgccgacgcgcccctggcgctgttcggccacagtctcggcgcggcgctggcctacgaaaccgccctgcgcctggaaagcgccggcgcgccgctgcgccacctgttcgtctccgcccatccggcaccgcaccggcaacgcggcggcgcgttgcaccgcggcgacgaggcggcgctgctggaggacgtccgccgccagggtggcgccagcgagctactcgaggacgccgacctgcgcgcgctgttcctgccgatcctgcgcgccgactaccaggcgatcgagacctaccgacgggcgcagcccatcgccctggcctgcgccctcgacgtcctcctcggcgagcacgacgaggaagtcagcgccgccgaggcgcaggcctggagcgacgccagccggactcccgccaggctgcggcactttcctggcggccacttctacctgagcgaggggcgcgacgcggtgatcgagcacctgctgcgccgcctcgcacatcccgacgccctttcccgagaggttgcatga

SEQ ID NO: 322046 - DNA, 1644 bp, Pseudomonas aeruginosa
atgacttcctcgcccgtcaccccatcggccgtcgacgacgcccccgactggcccgccgccttcgtccgccgctatctcgacgccggccactggcaggaccaaagcttcgccgaagccctggccgccagcgccgcgcgccatccgcggcggatcgcgctctgcgacgacgaccagcggctcagctatgccgacctgctccagcgctgccgccgcctggcagccggactgcgccaggccggcctcgcacatggcgacacggtagtgctgcacctgcccaacggcatcgccttcgtcgagacctgcttcgccctgttccagctcggcgtacgcccggtgctcgccctccccgcccatcgccagcatgagatcagcggtttctgccgcttcgccgaggccaaggcctacatcggcgccgaacggatcgacggcttcgacccacggccgatggcccgtgagctgctcgccagcggcgcctgccggatggcgctgatccacggcgaggccgaggcgccgctgcaagcgctggcaccgctgtaccaggccgacgcgctggaagactgcgccgcccgcgccgaggatatcgcctgcttccagttgtccggcggcaccaccggcacgccgaagctgattccccggcgtcatcgcgagtatctctacaacgtccgcgccagcgccgaggtctgcggcttcgacgagcacacggtgtacctcaccggcttgccgatggcgcacaacttcactctctgctgccccggagtgatcggcacgctgctggccggcggccgcgtggtggtcagccagcgcgccgatcccgagcattgcttcgccctgatcgcccgtgaacgggtcacccacaccgccctggtaccgccgctggcgatgctctggctggatgcccaggaaagccgccgcgccgatctatccagcctgcgtctgctccaggtcggcggctccaggctcggcagcagtgccgcgcaacgcgtcgaaccggtgctcggctgccagttgcaacaggtgctgggaatggccgaggggctgatctgctacacccgcctggacgatccgcccgaacgcgtgctgcatacccagggccggccgctgtcgccggacgacgaagtgcgggtggtcgacgccgagggccgcgaggtcggccccggcgaggtgggcgaactgaccgtgcgcggtccctacaccatccgcggctactaccgcctgcccgaacacaacgccaaggccttcagcgcggacggcttctaccgcaccggcgaccgggtcagccgcgacaaggacggctacctggtggtggagggccgcgacaaggaccagatcaaccgcggcggcgagaagatcgccgcggaagaggtggagaacctgctgatagcccatccgcaggtgcacgacgccaccgtcgtagcgatgcccgacagcctgctcggcgagcgcacctgcgccttcgtcatcccgcgccagccggcgccctcggcgctgaagctgaagcaatacctgcacgcctgcgggctggccgcgttcaaggtgccggaccgcatcgagctggtcccggccttcccccagaccggcatcggcaagatcagcaagaaggacctgcgcgagcgcctgcgccgcgagctggaggcccgcgcatga

SEQ ID NO: 322047 - DNA, 891 bp, Pseudomonas aeruginosa
atgaccatcaccatcattgctccgccacaggccgatgccgccgcgccggcaccgggcaaccggcccggcgtcgcgcacatcgatccgaacatgaagctggtgaccggaaccttctgttcggccagcgaggactggttcgaggaaccgctggagcgcggcctgcgcctgatcctcgtgcagagcggccagttgcgctgccggattcccggccagcccgagcacctcatcgaggggccgagcctgtgcaccatcgccaacgatggcgacttcacctcggcgcagatctacggcaccgacaagccgttgcgctacactatcgtccagctcggcgtcgaagccctggacagccgcctcggctggctgcccgagcaactgatacgccgccccggcggcgatccgcggatcatgagctgcccggcgccgcgggcgatgcaggcgttggcctcgcagatcgccacctgccagatgctcggtccgacccgcgatctctacctcggcggcaaggccctggagttggccgcgctcagcgcacagttcctttccggcgaggggcgccccgtcgaggagccgcgcatcacctgctcggaggtcgagcgcatccacgccgcccgcgacctgctggtcggcgccttgcaggagccgccgtcgctggacacgctggccagccgcgtgggcatgaacccgcgcaagctgactgccggctttcgcaaggtgttcggcgccagcgtattcggctacctgcaggaataccgcctgcgcgaggcgcaccggatgctctgcgacgaagaggcgaacgtctccacggtggcctaccgggtgggctacagcccggcgcatttctccatcgctttccgcaagcgctacggcatctcccccagcgagatccgctga

SEQ ID NO: 322048 - DNA, 4317 bp, Pseudomonas aeruginosa
atggatctgccccccgattcccgtaccgccctgcgcgactggctgaccgagcagctcgccgacctgctcggtgaaccgcttgccgacgtgcgcgccctggcggacgacgacgacctgctgggctgcggcctcgactcgatccgcctgatgtacctgcaggaacgcctgcgcgcgcgtggctcgacgctggacttcgcccagttggcgcagcgcccctgcctgggggcctggctcgacctgctggcctgcgcggaccggctgtccgccccggcaacggtcgcgctgccgacggcgcaggatcgcgatcagccgttcgagctgtcttccgtgcagcaggcctactggctgggacgtggcgccggcgaggtgctgggcaacgtcagctgccatgccttcctggaattccgcgcgcgggatgtcgacccgcagcgcctggccgcggcggcggagtgcgtgcgtcaacgccacccgatgttgcgggcgcgcttcctcgacggtcgccagcagatccttccgacgccgccgctgtcctgcttcgacctgcaggactggcgcaccttgcaggtggacgaggccgagcgcgactggcaggcgctgcgcgactggcgcgcccatgaatgcctggcggtggagcgcggccaggtgttcctgctcgggctggtgcgcatgccgggcggcgaggatcgcctctggctgagtctcgacctgcttgccgccgatgtcgaaagcctgcgcctgctgctggccgaactgggcgttgcctacctggcgccggagcgcctggcggagccgccggcgctgcatttcgccgactacctggcgcaccgtgcggcgcaacgcgccgaggccgcggcgcgggcccgcgactactggctggaacgcctgccgcgcttgccggacgcgccggccctgccgttggcctgcgcgccggaaagcatccgccagccgcgcacccggcgcctggcattccagctttccgccggcgagagccggcgcctggagcgtcttgccgcgcagcatggcgtgaccttgtccagcgtgttcggctgcgccttcgcgctggtcctggcgcgctggagcgaaagcgcggaatttctcctcaacgtgccgttgttcgatcggcatgccgacgacccgcgtatcggcgaggtgatcgccgacttcaccaccctgttgctgctggagtgccggatgcaggccggggtgtccttcgccgaggcggtgaagagcttccagcgcaacctccacggagccatcgaccacgccgcattccccgccctggaggtgctccgcgaggcgcgccggcagggccagccacgctcggcgccggtggtgttcgccagcaacctgggcgaggagggcttcgtcccggcggccttccgcgacgctttcggcgatctccacgacatgctctcgcagaccccgcaggtctggctcgaccaccagctctaccgggtgggcgacggtatcctgctggcctgggacagcgtcgtcggcctgttccccgaaggcctgccggaaaccatgttcgaagcctacgtggggctgctccagcgtctctgcgacagcgcctgggagcagcccgccgatctgccgttgccctgggcgcagcaggcgcgccgggccctgctcaacggccagccggcatgcgccacggcgcgcaccctgcatcgcgacttcttccttcgcgccgccgaggcgccggatgccgacgcgctgctctatcgcgaccaacgtgtcacccgcggcgaactggccgagcgtgcgctgcgcatcgccggcggcctgcgcgaagccggggtgcgccctggcgacgcggtcgaggtcagcctgccgcgcggaccgcagcaggtcgcggcggtattcggcgtgctcgccgcaggcgcctgctacgtgccgctggacatcgaccagccgcccgcacggcggcgcctgatcgaagaggccgccggggtatgcctggcgatcaccgaggaggacgatccgcaggccttgccgccgcgcctggatgtccagcgcctgctgcgcggcccggcgctggccgcccccgtgccgctggcgccgcaggcgagtgcctatgtgatctacacctcgggctccaccggggtgcccaagggcgtcgaggtcagccacgcggcggcgatcaataccatcgacgcgctgctcgacctgctgcgggtgaacgcatcggatcgcttgctggcggtctccgcgctggacttcgatctgtcggtcttcgacctgttcggcggcctcggcgccggtgccagcctggtcctgccggcccaggaacaggcgcgcgatgccgctgcctgggcggaggctatccagcggcatgcggtgagcctgtggaactcggcgccggccttgctggagatggccctcagcctgccggcgagccaggccgactatcgcagtctgcgggcggtgctgctgtccggcgactgggtggccctggacctgcccggccgcctgcgcccacgttgtgccgaaggctgccgcctgcatgtgctgggtggcgctaccgaagcgggcatctggtcgaacctgcagagcgtcgatacggtgccgccgcactggcgttcgattccctacggccggccattgccgggacaggcctaccgggtggtcgacacccacgggcgcgacgtgccggacctggtggtcggcgagctgtggatcggcggcgccagcctggcccgcggctatcgcaacgatcccgaactcagcgcccggcgcttcgtccacgatgcccagggccgctggtatcgcaccggcgatcgcggtcgctactggggcgacggtaccctggaattcctcggtcgggtcgaccagcaggtgaaagtgcgcggccagcgcatcgagttgggcgaggtggaggccgcgctgtgcgcccaggctggcgtggagagcgcctgcgcggcggtgctcggcggtggcgtggcgagcctcggcgcggtgctggtaccgcgcctggcgccacgggccgaaggctccatggaactaccggccgcacagcccttcgccggcctggcagaggccgaggcggtactcacccgggaaatcctcggcgcgctgctggaggcgccgctggagctagacgacggtttgcgccggcgctggctggactggctagcggactccgccgccagcgcgctgccgtcgctcgacgaggcgttgcgccggctcggctggcaggccgcggggctgaccgcgatgggcaacgctctgcgcggcctgctcgccggcgaacaggcgccggccgcgctgctcctcgatccctggctggcgccgcaggcggtggccgcgcgcctgccggacggccgcgaggccctggcgcgcctgctcgaagcgctgccgacgccggctgccggcgaacgcctgcgggtggcggtgctggatacccgcgccgggctctggctcgaccagggcatggcctcgctgttgcgcccggggctggaactgaccctcttcgaacgcagccgcgtcctcctcgacgccgccgccacccgcttgccggaacggatcgtggtgcaggcgctggacgacggcctgctacctgccgagcacctcggtcgctacgaccgggtgatcagcttcgccgcgctgcacgcctacgaggccagccgcgaaggcctggcgctggcggcggcgctgctgcgcccgcagggccgcctgttgctggtggacctgctatgcgagtcgccactggcgctgctcggtgcggccttgctcgacgaccggccgctgcgcctggcggagttgccgagcctgttggccgatctcgccgctgcgggactggcgccgcgttgcctgtggcgcagcgaacggctcgccctggtcgaggcgctggcgccgggactcgggctcgacgccgccgcgctccaggccggcctggagcaacgcctgccccaggcgatgcggcccgaacgcctgtggtgcctgccaagcctgccgttgaacggcaatggcaaggtcgatcgtcgccgcctggccgagagcatgacccgcgcactcggcgagtgtcgtcacgagccctcggcggaggagccgctggaagcccatgagcaagcgctggccgagtgctgggaagcggttctcaaacgcccggtgcgtcgtcgcgaggcgagcttcttcagcctcggcggcgacagcctgctggcgacccgcctgctggccggcatacgtgagcgtttcggcgtacgcctgggcatggccgacttctatcgccagccgaccctggccggtcttgcccgccacttgcaggcgcagaccgtcgaaatcgaggaaacccaactggaagagggcgtgctatga

SEQ ID NO: 322049 - DNA, 5430 bp, Pseudomonas aeruginosa
atgagcctcggcgaactgctggaaacctgccgcagccggcgcatcgaactctggagcgaggcgggccgcctgcgctatcgcgccccccagggcgccctcgacgccggcctcgccgagcgcctgcgggccgagcgcgaggccctgctggaacacctggaaggcggccctggctggcgcgccgaacccgacctggcccaccagcgcttcccattgaccccggtgcaggccgcctacgtgctgggccgccaggcggccttcgactacggcggtaacgcctgccagctgtacgccgagtacgactggccggtcgacaccgatccggcgcgcctggaggcggcctggaacgccatggtcgagcgccacccgatgctgcgcgcggtgatcgaggacaacgcctggcagcgcgtgctgcccgaggtgccctggcagcggctgaccgtgcatgcctgcgcggggctcgacgaggccgctttccaggcgcacctggagcgggtccgcgaacgcctcgaccacgcctgcgcggcgctcgaccagtggccggtcctgcgccccgagctgagtatcggccgggatgcctgcgtactgcactgctcggtggatttcaccctggtcgactacgccagcctgcaattgctgcttggcgaatggcgccgccgctatctcgatccgcaatggacggcggaaccgctggaggcgaccttccgcgactatgtcggcgtcgagcagcgccgacgccagtcgccagcctggcagcgcgaccgcgactggtggctggcgcgtctcgacgcgctaccggggcgtcccgacctgccgctgcgggtgcagccggacacccggtccacgcgcttccggcacttccacgcgcgcctcgacgaggccgcctggcaggcgctcggcgcgcgcgccggcgaacacggcctgagcgctgccggcgtggccttggcggccttcgccgagaccatcggtcgctggagccaggcaccggcgttctgtctcaacctgacggtactcaaccggccgccgctgcatccgcagctggcgcaggtgctcggtgacttcaccgcgctcagcctgctggcagtggacagccgccacggcgacagtttcgtcgagcgtgcccgacgcatcggcgagcagatgttcgacgacctcgaccacccgaccttcagcggcgtcgacctgctgcgcgaactggcgcgccggcgcggtcgcggcgccgacctgatgccggtggtgttcaccagtggcatcggcagcgtgcagcgcctgctcggcgatggcgaggcgccgcgcgcgccacgctacatgatcagccagaccccgcaggtctggctggactgccaggtcaccgaccagttcggcggcctggagatcggctgggacgtacgcctcgggttgttccccgagggccaggcggaagccatgttcgacgacttcgtcgggctgctccggcgcctggcgcagagcccgcgcgcctggaccgacggcgatgccacggaacccgtcgaggcgccgccgcaggcgttgcccggtagtgcccggagcatcgccgccggtttcgccgagcgtgccctgctgacccccgacgccacggcgatccacgatgccgccggcagctacagctaccgccaggtcgcccagcacgccaccgccctgcgccgcgtcctggaagcgcacggcgcgggccgtggccggcgggtcgcggtgatgctgccgaaaagcgccgcgcaattggtcgcggtgatcggcatcctccaggccggcgccgcctatgtgccggtagacatccgccagcctccgctgcggcgccaggcgatcctcgccagcgccgaagtggtcgcgctggtctgcctggaaagcgatgtcccggacgtcggctgcgcctgcgtggccatcgaccggctggccgccgacagcgcctggccgccaccgcccgcggcggaggtggcggcggacgacctcgcctacgtgatctacacctccggctccaccggcacgcccaagggcgtgatgctcagccatgcggcggtgagcaacacgctgctcgacatcaaccagcgctacggcgtcgacgccaacgaccgcgtcctcggcctcgccgagctgagcttcgacctctcggtctacgacttcttcggcgccaccgcggcgggggcccaggtggtcctcccggacccggcgcgcggcagcgatccatcgcactgggcggaactgctggaacgccacgccatcaccctgtggaactcggtgccggcccaaggccagatgctcatcgattacctggagagcgagccgcaacgtcacctgccgggaccgcgctgcgtgctctggtccggtgactggattccggtcagcctgccgacccgctggtggcggcgctggccggacagcgcgctgttcagcctgggcggcgccaccgaggcggcgatctggtcgatcgagcagccgatccgcccgcagcacaccgagctggccagcatcccttatggccgtgccctgcgtgggcagagcgtggaagtcctggatgcccgcgggcggcgctgcccgccgggcgtgcgcggcgagatccatatcggcggggttggcctggcgctcggctacgccggcgatccgcagcgcaccgccgaacgcttcgtccgtcaccccgatggccgtcgcctgtatcgcaccggcgacctcggccgctacctggccgacggcagcatcgagttcctcggtcgcgaggacgaccaggtgaagattcgcggccaccgcatcgaactggccgagctggacgccgcgctgtgcgcccatccgcaggtcaacctggcggccaccgtggtgctcggcgagacccacgagcgcagcctggccagcttcgtcaccctgcatgcgccggtggaggctggcgaggatccgcgtacggcgctcgacgcggtgcgccagcgggcggcccaggccttgcgccgcgactggggcagcgaggagggcatcgccgcggcggtggccgcactcgaccgtgcctgcctcgccttgttggccgcctggctggccggcagcggtctgttcgccagtgcgacgccgctggacttcgccaccctgtaccagcgcctgggtatcgccgaggcgcgccagcgcctgctgcgccactggttgcgccagctggaggagggcggctacctgcgcgccgagggcgagggctggctgggctgcgccgagcgtcccgcgcagagtccggaggacgcctggacggcgttcgccggctgcgcgccggcggcgctctggccggccgagctggtcgcctacctgcgtgacagcgcgcaatccctcggcgagcaactggccgggcggatcagcccggcggcgctgatgttcccgcagggctcggcgcgcatcgccgaggccatgtacagccagggcctgcatgcccaggcgctgcacgaggcgatggccgaggccatcgccgccatcgtcgagcgccagccgcaacggcgctggcgcctgctggagcttggcgccggcaccgccgccgccagccgtgcggtgatcgcccggttggcgccgctggtgcagcgaggggcggaggtggactacctgttcaccgacgtttccagctacttcctcgccgccgcccgcgagcgcttcgccgaccagccgtgggtacgcttcggccgcttcgacatgaacggcgatcttctcgaccagggcgtggcgccgcactcggtggatatcctgctcagctccggggccttgaacaacgcgctggacaccccggcgctgctggccggcctgcgcgagttgctgagcgccgacgcctggctggtgatccaggaactgacgcgcgagcacaacgagatcagcgtcagccagagcctgatgatggagaacccgcgcgacctccgcgacgagcgccgccaactgttcgtccacaccgggcaatggctggagtggctggcggcacagggtggcgacctggcttgtggggtggtgccgccgggcagcgctctcgacctgcttggctacgatgtcctgctggctcgctgcaagaccgaccgcgcccgcctggagccggccgagctgctggccttcgtcgaagcgcgggtgccgcgctacatgctcccggcgcagttgcgcgtgctcgaacgcctgccggtcaccggcaacggcaagatcgaccgcaaggccctgaccggctttgcccgccagccccaggcggaccttcggcatggcgtcgcgcaggcaccggccgacgaactggagaatgcgctgctggcactctggcgggaggtgctggacaacccgtcgctgggcgtcgagcaagacttcttcggggctggcggcgactcgctgttgatcgcccagttgatcgcccgtttgcgcgaacgactggaaagcgcccgtcggcatccgttcgatcgcctgctacgctgggcgctcagccagccgacgccgcgcggcctggccgaacgcctgcgcagcgcgccggacgagggccgtgggccagccctggccgcggcgcgcggcgtcgccccggcgccggccggcatgtcgcgcgcaccgctcgccgagggcgcggtggcgctcgacccgctggtgcgcctggtgcccggcgagggcgtgccgcgggtgctggtccacgaaggcctcggcacgctactgccgtaccgcccgctgcttcgcgccctgggtgaggggcggccgttgctggggctggccgtgcatgacagcgacgcctacctggcgatccccgccgagcatctcaacgcctgcctcggccgccgctacgccgaggcgctccatcgcgccgggctacgcgaggtcgacctgctcggctactgctccggcgggctggtcgccctggagaccgccaagtccctggtccagcgcggggtgcgcgtgcgccaactggatatcgtctccagctaccggattccctaccgggtggacgacgagcgcctgctgttgttcagcttcgccgcgaccctcggcctggataccgcggcgctcggcttccccgcgccggagcgtctcggccaggcggtgcaggcggcgctcgcgcagacaccggagcgcctgggcgccgaggcgctggcggggctgccgggcctggccgatctcgtcgccctgcgcggccgcgtgctacaggcggccagcggtagcgccgacgccgtcagcgtcgaacgcgacaccctctaccgactgttctgtcactcggtgcgtgccagccaggccgcggcgccggagccctacgtcggcgcgctgcggctgttcgtgccggacgccggcaacccattggtgccgcgctacgccgaggccctggagacccaatggcgggccgccgcgctcggcgcgtgcggcatccacgaggtgcccggcgggcacttcgactgcctgggcgaagccctggcgcaatccttgtcgaaacccatgccagaggaggcgagccgatga

SEQ ID NO: 322050 - DNA, 1050 bp, Pseudomonas aeruginosa
atgagcgacgtccgttccgtggtggtcgccggttcccggttcggccagttctatgccgccggcgtcgccgccgatccgcgcttcgtcctgcgcggcatccttggccagggcagccggcgttcgcgggcgttggccgagcgcctcggggtggagacctggtgcgaggtcgaggcgttgcccgacgatgtccgcctggcctgcgtcgcggtcggcggcgcggcacgcggcgagcagggcccggcgctggccgaggcgctgatggcgcgtggcatcgacgtgctgatcgagcatccgttgctgccgcgcgaatggcaggacctgctgcgcagcgccgagcgcctgggccggcgctgcctgctcaacaccttctatccgcagttgccggcggtggcgcgtttcatcgagctgggccgccagttgcatcgccggcgcggcatccgccacctggacgcggcctgcggggtgcaggtcggtttcgccaccctggacatcctcgccgcgttgctggagggcgtcggcccctggtcgctggagtcgccctcgaacgacctgtcggcgatgcgcgggctgtccctggtgctggcggaagtgccgttgagcctgcacgtgctcaacgaactggcggccgccgacgacgggcgcatgaccttgttgcagcgcgtcagcctgaccaccgatcgcggcacgctgagcctgctcagcccccatggcccgttgttgtggacgcctgcggtggcggtaccggcagaggatgacgacggcctgttcgcgctgttcgacgagatagccggcgaaccgctgcccagcgcccagctctggtatgccgaaccgtgcagctgggcccaggtgcaccagcgcctgtggccggcggcggcggccgaggcgctggcgctgctcgccaacggcgacgaggtgcgccggcgcaaccagcgcagcctggaggtcgccgccctgtggcagcggatcggcgagcgccttggcttccccgaggcgccgccggcgtcgctggcgccggcgagcctggaacaggtgctggagcaagcctcgtga

SEQ ID NO: 322051 - DNA, 1725 bp, Pseudomonas aeruginosa
atgaccctgttcgaacgaatgcgtgcgctgcccgaagactgccgtgccgcgttgcgccgggcgagcgcctgggcggtcctggcggcgctgctggacgccgcttgcggcgtattgctggtgccgctggtcgaggcctggttcgccgaaggcgcgttgccctggcgctgggtcgccgcgttgctcggcttgagcctggcgcaggcgctgttgcagtacctggccctgcgtcgcggtttcgccgccggcggctcgctggcggctggactggtgcgcagcctggtggcgcgcttgccgcgcctggcgccgccggcgctgcgccgggtcgcgccggccgaaggcctgctgcgcggcccggtgatgcaggcgatgggcattccggcgcacctgctggggccgctgatcgccgcattggtgacgccgctcggggtgatcctcgggctgttcctgatcgacccgtccatcgccctcggcctgctcgttgccggtgccgtcctcgctgcgctgttgcgctggagcgggcggcgcaatctggcggcggaggatgcccggctggccgccgagcgcgacgctgcacggcagttgcaggcgttcgccgaacgccagccgctgctgcgcgcggcgcagcgcgaaagcgtcgcccgccaggggctggaagaggccttgcgcagtctccaccgcagcaccctggatctgttgcggcgcagcctgcccagcggcctcggcttcgccctggcggtgcaggcggcgttcgccttcgccctgctcggcggcgcctgggcggtggagcggcaatggctggacggcgcgcgactggtggccgtgctggtgctgctggtgcgcttcatcgagccgctggcccagctcacccatctcgaccaggcgttgcgcggcgcctggcaggcgctggacaccctgctgcgggttttcgccctggctccgctgcgcagccccgagccgggcgagcggccgcacgacgccagcctggcggccgaggccgtggaattgcgcctggaagatggccgcgccttgctcgaggacatttccctgaggctggagccgggttcgctgaacgtcctcgtcggaccctccggggccggcaagagcagcctgctggcgctgctcgggcggctctacgacgtcgatgccgggcgtgtcctgctgggtggcgtggatatccgccggttgagcgaaacgaccctcgccgccagtcgtaacctggtgttccaggacaacggcctgttccgcggcagcgttgcctggaacctgcgcatggcgcgagcggacgccgatctcgaagcgctgcgcgaggcggcgcgggcggttggcctgctggaagagatcgaggcctggccgcagggctgggacagcgacgtcggtcccggcggcgcgctgctgtccggcggccagcggcaacgcctgtgcctggctcgcgggctgctctcgacggcgccgttgctgctgctcgacgagcccaccgccagcctcgacgccgccagcgaggcgcaggtgctgcgcagcctgctcgggttgcgcggccggcgcaccctgctggtagtgacccaccgcccggcgctggcgcgtcaggccgaccaggtactgctgctggaggaggggcgcctgcgcctcagcggacgtcacgccgatctgctcgtccgggacgactggtatgccggtttcgtcgggctggcgggcgaggaaagttccgcgacggccgtggatcgatag

SEQ ID NO: 322052 - DNA, 2163 bp, Pseudomonas aeruginosa
atgaaaacggagacgaaggtgatcaagggacgccagggcatcgcccgcaatcggcacaccccgttgtgcctgggcctgctgctggcgctgagtccgctggccgcggccgtggccgacgcgcgcaaggacggcgagacggaactgccggacatggtgatcagcggagaaagcacgtctgccacccagccgccgggggtgactaccctgggcaaggtgccgctcaagccgcgcgagctgccgcagtccgccagtgtcatcgaccatgagcgcctcgaacagcagaacctgttcagcctcgacgaagccatgcagcaggccaccggggtcaccgtgcagccgttccagctgctgaccaccgcctactacgtgcgcggcttcaaggtcgactccttcgagctggacggggtgccggcactgctcggcaataccgccagttcgccgcaggacatggcgatctacgagcgggtcgagatcctccgcggctccaacggactgctgcatggcaccggcaacccggcggccaccgtcaacctggtgcgcaagcggccgcagcgcgagttcgccgccagcaccaccctcagcgccgggcgctgggaccgctaccgcgccgaggtcgacgtcggcggcccgctgagcgccagcggcaacgtgcgcggccgagcggtggccgcctacgaggaccgcgactacttctacgacgtggccgaccagggcacccgcctgctctacggggtgaccgagttcgacctgagccccgacaccctgctcaccgtcggtgcgcaataccagcacatcgactcgatcaccaacatggccggggtaccgatggccaaggatgggtccaatctcggactgtcccgcgacacctacctcgatgtcgactgggaccgcttcaagtgggacacctaccgcgccttcggctccctcgaacagcaactgggcggcggctggaaaggcaaggtcagcgccgaataccaggaagccgattcgcgcctgcgttacgccggctccttcggcgccatcgacccgcagaccggcgacggtggccagctgatgggcgccgcctacaagttcaagagcatccagcgcagcctcgacgccaacctcaatgggccggtgcgactgttcggcctgacccacgaactgctcggtggggtcacctacgcccagggcgagacccgccaggacaccgcacgcttcctcaacctgccgaacaccccggtcaatgtctaccgctgggacccgcacggcgtgccgcgcccgcagatcggccagtacacttcgccgggcaccaccaccaccacccagaaaggcctctatgccctgggccggatcaagctcgccgagccgctgaccctggtggtcggcggccgcgaaagctggtgggaccaggacaccccggccacccgcttcaagcccggtcgccagttcacgccctacggcgggctgatctgggacttcgccagggactggtcgtggtatgtcagctacgccgaggtctaccagccgcaggcggatcgccagacctggaacagcgagccgctgagcccggtggaaggcaagacctacgaaaccgggatcaagggcgaactggccgacggccgcctgaacctgtcgctggcggcgttccgcatcgacctggagaacaatccgcaggaagacccggaccatccggggccgcccaacaatccgttctacatcagcggcggcaaggtgcgcagccagggcttcgagctggaaggcaccggctacctgacgccctactggagtctctcggccggctacacctacaccagcaccgagtacctcaaggacagccagaacgactcggggacgcgctactccaccttcaccccgaggcacctgctgcgcctgtggagcaactacgacctgccctggcaggaccggcgctggagcgtcggcggcggactccaggcgcagagcgactacagcgtcgactaccgcggcgtgagcatgcgccagggcggctacgcactggtcaacatgcgcctgggctacaagatcgacgagcactggacggcggcggtcaacgtcaacaacctgttcgaccggacctactaccagagcctgtccaaccccaactggaacaaccgctacggcgaaccgcgcagcttcaacgtcagcctgcggggcgcgttctga

SEQ ID NO: 322053 - DNA, 282 bp, Pseudomonas aeruginosa
atgccgcgccagtcgggcttcggctgggcctggcgggttccgctggcgctcgccggcagcctggcggcggcgaccgccagcggctatctgttgactcgcgggctgcccctggacgacccgctcgagcgtctctacgccgggctcttcggcgcgctcggggtgggcttgttgctgcttgtcggcgggttggtggcgcgtgatccgggcaacttcgcctggcgcctgggcggtagcctgctggcactgggcctggcgttgtggctgctggcggggcgcggttga

SEQ ID NO: 322054 - DNA, 1662 bp, Pseudomonas aeruginosa
atgttcaaagccagtcacgtcttgcagggcgaggaccagacccggtccgcagccgaattcttccctgtcatcagcgccaactacgcggtcgacgaggaagcctacctgggcgaactgctgcagctcgccgaccccggtcccgacggcatcgaggctatccgccgcaacgcccgcgcactgatcgaaaccgtgcgcagccgggacaacgccgtcgataccctcgacgcactcctgcgccaatacagcctggacacccaggaaggcctgatgctgatgtgtctggccgaggcgctgttgcgtgtgcctgacgcggcgaccgccgacgcgctgatccgcgacaagctgtccgccgccgactggcagcgccatctcggccagagcgacaacgttctggtcaatttcgccgcctggggcctggtgatgaccggcaaggtggtgaacatcgacgaacgcaccgacggccgcgccccgagcgtcatcagccggctggtgcagcgctccggcgaaccggtgatccgcgccgcgatgaaccaggcgatgaagctgatgggcaagcagttcgtgcttggccggaccatctccgaagcgctgaagaacggtcgtccatgccgcgagcagggctacacctattccttcgacatgctcggcgaggccgcgctgaccgccgccgacgccgagaaatacatggccgactaccgccaggccatcgacaccgtcggcgccgagccgcaggtcggtccggggccgcggccgtcgatctcgatcaagctctcggcgctgcatccgcgctacgaagtggcgcagcgcgagcgggtgctcagcgagctgttcgccaacgtcctggaactggcggtgcgcgcgcgcaagctgaacgtcggcatcaccatcgacgccgaggaagccgatcgcctggagctgtccctcgaactctacgagaagctgatgcgcgacccggccatcgccggctggggcgagttcggcctggtcatccaggcctactccaagcgctgcctgccggtgctggtatggctgaccctgctcggccgcgagcttggcgcacgcatcccgctgcgcctggtgaagggtgcctactgggacagcgagatcaagcagtgccaggtgcagggcgccgatggctaccccgtctacacccgcaaggaaggcaccgacacttcctacctggcctgcgcccgctacctgctcagcgagcacacccgcggggtgatctacccgcagttcgccagccacaacgcccacaccgtgaccgccatcctcgccctggccgacgaagccagggccgccggcggcgaggagcgcgacttcgagttccagcgcctgcacggcatgggcgacgcgctgtacgacacggtgatcgagaagtaccgccgcaacgtgcgcatctacgccccggtcggcgcgcacaaggacctgctgccgtacctggtccgccgcctgctggagaacggcgccaactcttccttcgtgcacaagctggtggacccgcgcgtgccggtggagacgctgatccagcacccggttacccaactgcgccagttcaagacgctggccaacgaccgtatccctctgccccaggcgatcttcggcgccgggcggaaaaactcccagggcatcaacatgaacctgtctcttatacacatctga

SEQ ID NO: 322055 - DNA, 2064 bp, Pseudomonas aeruginosa
atgtcctcttccggccttttcccttcccgtccgctctggcctctcacgccactggcgctggcctgcctgattgtttcgggggaaacgctcggcgccgacggccgccccagcgaattgccctcccaggtgatcaccgccaacccgctgggcaacgaatctcccgccacgcccagcagcgtgctcgaaggcgacgagctgaccctgcgacagaaaggcagcctcggcgaaaccctcaacggcctgcccggggtgtcctccacctacttcggaccgggcgccagccgaccggtgatccgcggcatggacggtgatcgcatccgcctgctgcgcaacggcgtcggtgcgctcgacgcctcgtcgctgtcctacgaccacgcggtgccggaagaccccaacagcgtcgagcgcctggaagtggtacgcggcccggccgccctgctctacggcggcaatgccatcggcggggtggtgaacagcttcgacaaccgcatccccagcgaacccgtcgacggcatccacggcagcggcgaactgcgctacggcggcgccgacaccacccgtagccgctccggcgcactggaggccggcgacggcaacttcgccctgcacgtggacgccgccagccgcgagttcaacgacgtcaggattcccggctacgcccattccagccgccagcggcagatcgacggcgacaccggcaagcatcgggtgcagaacagcgacggccgccaggacggcggcgccgtcggtggctcctatcactgggagcacggttacgccggcctctcctacagcggctacgacagcaactatggctcgccggccgaggacgacgtgcgcctgaagatgcagcaggaccgctacgccttcgcctccgagatccgcgacctcgaaggcccgttcacctcgctgaagctggacgccgcctataccaagtacgagcacaaggaaatcgaggacagcgagaccggcaccaccttcaagaacgaaggctacgaaggccgcatcgaggcccgccaccgcccgctcggcccgctgaacggggtggtcggcgcgcagttcgccaacagccgcttctccgccctcggcgaggaagccttcgtgccgcacacggaaaccgacagcgccgcgctgttcgccctggaggaatggaagctcagcgaccgcctcgacctcagcttcggcgcccgcctggagcacacccgcgtggaccccgacgccaagggcaacgagcgcttcgccgagaacgacggttcgcagagcttcaccaccggcagcctgtccaccggcgcggtgtacaagctgacgccgatctggtcgctggccgccaccctcagctacaccgagcgcgccccgaccttctacgagctgtacgccaacggtccgcacgccgccaccggcacctacgaggtaggcgatgccgacgcggacaaggaaaaggcggtctccaccgacctcgccctgcgcttcgacaacggcgtgcacaagggcagcgtcggggtgttctacagccgcttctccaactacatcggcctgctcgccagcggtcgccatcgcaacgaggaaggcgaagtggtcgccgccggcgatgacgaggcgctgccggaatacctctacagcggcgttcgcgcggacttctacggcgtcgaggcgcaggaccgcatccacctgctggaaagcccgtacggcaacttcgacctggaactctccggggactacacccgcgccaagaacaaggacaccggcgaaccgctgccacgcatcgccccgctgcgcctgaacaccgcgctgatctgggagttgcagcagtggcaggcgcgggtcgacgtcgaacacgccgcctcgcagcaccgcgtgccggaggaagaactctccaccgacggctacaccaccctcggcgccagcctcggctacaacttcgacctcggcgagagccgctggctggccttcgtcaagggcaccaacctgaccaaccagaccgtgcgctacgccagttcgatcctgcgcgaccgggtgccggcggcgggacgcggcatcgaggcgggggtgaaggtggcgttctga

SEQ ID NO: 322056 - DNA, 753 bp, Pseudomonas aeruginosa
atgttcgacacccgcctcatccgtctgcccgaccagtcgcacacccacgcccacgagcatcaccaactggtgatgtcgctggccgggcgcgccgaattcgaggtcaacggctgtggcggggaagtctgccggatgcgcgcctgcctggtgccgggcgaggcgggccacgtgttcgccggggtgggcgacaaccgcatgctgatcatcgacctgggcgaggacaacccgaccccggaagaccccgacctgctcgcgcgcctgttcgaggcgccgcgctacccgaccctggacgccgacttccagaacctgctcagctacgccggcgccgaactggcccgctacggcagcgacccgctgctgacccgtgccctcggcggagtgctgatccgcgccctgcacctgcgcctgttcggcgagcagcagcccctggcggccagcgggccgctcgacctggagcgcctggacgcgcatatcgtgcggaacctggcgcggcgcatcacggtcgccgaactggcccaggtcgcctgtctcagcccgagccatttccacgcgcagttcaaggacagcgtcggcctgaccccgcaccagtacctgctcaaggtccgcctcgactgcgccgcgcggttgctgcgggaaagccgcctgcctctggtgcggatcgccgaggaatgcggcttctccagccagagcgcgctgaccacggcgatgcgccgctacctggggctgacgccgaagtcgctgcgcaagggctga

SEQ ID NO: 322057 - DNA, 2400 bp, Pseudomonas aeruginosa
atgagcgaccaggacgttaatcccgaacacatcagcgacgcgcagcccgccggcaccggcctggtgctgcccggccagaccctgccgaccaccctctacgtgatcccgatccacaaccgcccgttcttcccggcgcaggtgctgccggtgatcgtcaacgaagaaccctgggcggaaaccctcgaactggtggccaagaccgaccaccattcgctggccctgttcttcatggacaatcctccggaagacccgcgccacttcgacgtcaacagcctgcccgagcacggcacgctggtccgggtgcaccatgcctcgcgcgagggcggcaagctgcagttcgtcgcccagggcctgtcgcgggtgcgtatccggggctggatcaagcgccatcgtccgccgttcatggtggaggtggactatccgaagaccccgatcgatcccagtgacgaagtgaaggcctacggcatggccctgatcaacgcgatcaaggagctgctgccgctcaatccgctgtacagcgaggaactgaagaactacctgaaccgcttcagtcccaacgacccgtcgccactcaccgacttcgccgcggccctgaccaccgcgcccggcggcgaactgcaggaagtgctggacaccgtgccgatcctcaagcggatggagaaggtcttgccgctgctgcgcaaggaggtggaagtcgcgcgcctgcagaaggaactgtccgccgaggtcaaccgcaagatcggcgaacaccagcgcgaattcttcctcaaggaacagttgaagatcatccagcaggagctgggcatcaccaaggacgacaagagcgccgacgccgacgaattccgcgcccgcctggaaggcaaggtgctgcccgagcaggcgcgcaagcgtatcgacgaagagctgaacaagctgtcgatcctcgagagcggctcgcccgagtacgccgtcacccgcaactacctggactgggccaccgccctgccctggggcgtgtacggcaaggacaagctcgacctcaagcatgcgcgcaaggtcctcgacaagcatcacgcgggcctcgacgacatcaaggatcgcatcctcgagttcctcgccgtgggtagtttcaagggcgagatcgccggctccatcgtgctcctggtcggcccgccgggagtgggcaagaccagcatcggcaaatccatcgccgagagcctcggccggccgttctaccgtttcagcgtcggcggcatgcgcgacgaggcggagatcaagggccaccgccgcacctacatcggcgccctgcccggcaagctggtgcaggcgttgaaggaagtcgaggtgatgaacccggtgatcatgctcgacgagatcgacaagctcggcgccagctaccagggcgacccggcctcggcgctgctggaaaccctcgacccggagcagaacgtcgaattcctcgaccactacctggacctgcgcctggacctgtccaaggtgctgttcgtctgcaccgccaacaccctcgactcgatccccggaccgctcctcgaccggatggaagtgatccgcctgtccggctacatctccgaggaaaaactggccatcgccaagcgccacctgtggcccaagcagttggaaaaggccggcgtacccaagggccgcctgagcatcagcgatgccgcgctgcgcgcggtgatcgagggctatgcgcgggaagccggggtgcgccagttggagaaacagttcggcaagctggtgcgcaagtcggtggtcaaactgctggaggatcccgagtcgaaggtgaagatcggtcccagggacctcgaggactacctcggcatgccggtgttccgcagcgagcaggtgctttccgggatcggcgtgatcaccgggctggcctggaccagcatgggcggcgccaccctgccgatcgaggcgacccgcatccacacgctgaaccgtggcttcaagctcaccggccagctcggcgacgtgatgaaggaatccgccgagatcgcctatagctacatcggctcgcacctgaagaagtatggcggcgacccgaccttcttcgaccaggcgttcgtccacctgcacgtgccggaaggtgccacgcccaaggacggtcccagcgccggcgtcaccatggccagcgccctgctctccctggcgcgcaaccaggtgccgaagaaaggcgtggcgatgaccggcgaactgaccctgaccggccaggtcctgcccatcggcggggtccgcgagaaggtgatcgccgcgcgccggcagaagatcttcgagctgatcctgccggaagccaaccgcggccacttcgaagagttgcccgactatctcagggaagggctgaccgtgcatttcgccaagcgctacggcgacgtggccaaggtgctgttcccggcctga

SEQ ID NO: 322058 - DNA, 405 bp, Pseudomonas aeruginosa
atgtccttttccccctcccgtctgctgctgccattgtccatcgtggtcctggccggctgcgccgggcaacagaagccggtggtcaccctggacgacgccgacgactgttcgccgctgaagctgacgcaaggccaggaactggtgctgaccctgccgagcaatcccaccaccggcttccgctgggaactgcgcaaccctgctgccagcgtgctcaagcgccttggcccggaggtctacagcaattccgaagaagacagcggcctggttggcagcggcggcgaatcgacctggcgcttccgcgtcgccgccagcggcgacgaccgcctggaactggtctaccggcggccctgggaaaaggacgcggaaccggcggaaagcttttcctgcgcgatccaggtgcgctga

SEQ ID NO: 322059 - DNA, 753 bp, Pseudomonas aeruginosa
atgctccgcgcctccttcgtcctgctcgccctgtcctgcgccgctcctctgctctcgctggccgaaccgttgcgcttcgcaggcgacgacggctgcccctacctgtgccctggcacgccgcagcggcccggctacctggtcgaggcgctcagccaggtccttcgggagccaccgcacttcgacagcctgccctggccgcgcgccgtgcagatggtccgcgacggccatcgcgacggcctggtcggcgcctatggactcgacggcctgcgggtcggcagcgagcccatcggctgggtcgggctggccttatacacccgccacgacagcgactggcactactccggcgatgcttccctgctcggccagcgcctgggcctcgcccagggctacgtgaacaatccgcgcttcgaagcctggcgcagccaggccggcgacgacgacctgcacctgcaggtcctcggcggcgagcgcgtgctgccgcgcaacctgcagaaactgctgctcggccgcatcgacgtgctattggaagaccgcgacatcatcgagcactacctggagcatcatccgcagctcgccggacaggtccgccgcgccggcgaactgcccgggcggcagccgctgcacgtcggcctcagcccgcacctgccggaggtcgacgcgcgtctcgcggaactcgacgaagggctacgccgactgcgtcgcgaaggcaccctgaaggtcctcggcgagcgctataggctttctttcgaatga

SEQ ID NO: 322060 - DNA, 573 bp, Pseudomonas aeruginosa
atgggcaccgctcttcgttactcactgctctgggcatccactgtcttcgtttcctcctgcggcagcctgctgcccagcgaacgagcggaagtccaatcccccttcgtcgactacctcgatgccgaactgcgctattcccaggcgcaacccggcagcacgacccgttcgcagctgttcgggctgggtttcgatccattgacccagggcaacggccgcatgctgtcgttcatcgacgtgcggctcatgttcatccagccgaacatccccatcgattacctgccgggcggcctggtgcaatgcctggaagcgaaggaccgttgcatcggctacgccttcgatttcagcaagaccgacacccagcgggtcggcagcttctgggcggacgtgttcaacttccgcaagaaacgggagttgcagggctggtcgttcaaggcggtgttcgtcttcgtcaacgacgtgctggtgcacaaggtcagtaacggcgaaccgaacatccatcgcctggaagacaagaagaacccgctgggtccgctgcagggcgcgggagagtacttctccgacaagctcaggtga

SEQ ID NO: 322061 - DNA, 759 bp, Pseudomonas aeruginosa
atgcccgaggtcacccgcgtgagcgagtccgatcgcctgttcgcccaaccccagcaacgtgtcgccgacttcgtgttcaacgaagacgtggtgcgcgtgttccccgacatgatcaagcgctccgtgccgggctaccccaccatcgtcgagaacatcggcgtactcggcgcgcagttcgcccagccgaacagcgtgctctacgacctaggctgctcgctcggcgcggtcacccagtcgttgcgccgccacgtccgcaacgacggctgccgggtgatcggggtggacaactcgcacgcgatgatcgagcgctgcagtgaatacctgcatgcccaggacgccatgtaccaggagctgctgccggtcgagctgatcgaggccgacattctagccctggacctgcaacccacctcgctggtggcgatgaacttcaccctgcagttcgtcgcccccgaccagcgcctcggcctgctgcgcaggatccgccaggcactgctgcccggcggcgcgctgatcctctcggagaaactgcgcttcgccgatgcgcaggagcacgcgctgctcaccgacctgcacatcgccttcaagcgtgccaacggctacagcgagctggagatcgcgcagaagcgcagcgcgctggaaaacgtcatgctccccgacaccttcgaggaacaccgtgaacggctcctggccgccggcttcagccgggtcagccaatggttccagtgtctcaacttcgcctcgatgatcgccctgccatga

SEQ ID NO: 322062 - DNA, 969 bp, Pseudomonas aeruginosa
atgatccagcacctcgccctcgacgccctccagcgacacctcgccggctctccgctgtacggctgggcgaccagcctgcccgcgcagatcgccgcgcgcatcgaggaaggccacggcgacctggcccgttggtggagcgcggtccagcgcctgccccaggtgcccgcgccgaaggtcgaactggcccagcgcttcgccctgcacagcgcccacgatgcggcgctgcaagcgcaggtgaaggaagcgctgcaagggctgattccctggcgcaaggggccgttcgacttcttcggcgtacaggtcgataccgaatggcgttccgactggaaatgggagcgtgtctcgccacatgtcgaactgcgtggcaaacgcgtcctcgacgtcggctgcggcaacggctactaccagtggcgcatgctcggcgccggcgcggaaagcgtggtcggggtcgatccaaactggctgttcctctgccagttcctcgccgccaagcgctacctgccggagctgccggcctggcacctgccgctggccctggaagacctgccggagaagctcgaaggcttcgacacggtattctccatgggcgtgctctatcaccgtcgctcgcccatcgaccacctgctggcgctcaaggactgcctgaagcgcggcggcgaactggccctggagaccctggtggtggaaggcgacgccagcaccgtgctggtgcccgaggaccgctacgcgcagatgcgcaacgtctggttcctgccctcggtggcagccctggagctctggctgcgccgcgccgggttcgccgacgcgcgctgcgtcgacgtcagcctgaccagcgtcgaggaacaacgctccaccgaatggatgcgtttccagtcgctgccggaattcctcgatccgcaggaccgttcgcgaaccgtcgaaggcctgccggcaccgatgcgcgccacgctggtggcgcgcaagccctga

SEQ ID NO: 322063 - DNA, 747 bp, Pseudomonas aeruginosa
gtgactgaagccactcgaattctgctcggcgtgaacatcgatcacgtcgccaccctgcgccaggcccggggcacccgctatccggacccggtgaaggccgccctggacgccgaggaagccggcgccgacggtatcaccgtgcacctgcgcgaggaccgccggcatatccaggaacgcgacgtgcgggtgctcaaggaagtgctgcaaacgcggatgaacttcgagatgggggtcaccgaggaaatgctcgccttcgccgaggagatccggccggcgcatagctgcctggtccccgagcgccgcgaggaactgaccaccgagggcggcctcgacgtcgccggccaggaacagcgcatccgcgacgcggtgcgacgcctggctgcggtgggcagcgaagtgtcgctgttcatcgatcccgatccgcggcagatcgaggcctccgcccgggtcggcgcgccggctatcgaactgcataccggtcgctacgccgacgccgaagaccccgaggagcaggcccgtgaactgcagcgggtacgcgagggcgtggccctcgggcgttccctcggcctgatcgtcaacgccgggcatggcctgcactaccacaatgtcgagccggtcgcggccatcgacggcatcaacgagctgaacatcggccacgccatcgtcgcccacgccctgttcgtcggcttcaggcaggcggtggccgagatgaaagcgctgatgctggccgcggcgaccaagcgctga

SEQ ID NO: 322064 - DNA, 702 bp, Pseudomonas aeruginosa
atgtccttcgccgccgcccaagccacctacgtgctgcatagccggccgtacaaggaaaccagcgccctggtggacttcttcaccccgctgggtcgcctgcgcgcggtcctgcgcggcgcccgcggcaaggccggcgccctggcgcggccattcgtgccgctggaagcggagtggcgcgggcgcggcgaactgaagaccgtggcccgcctggaaagcgccggcattcccaacctgctcaatggccaggcgctgttcagcggtctctatctcaacgagctgttgatccgcctgttgccggcggaagacccgcagccggaaatcttcgcccactacgccgcgaccctgccgctgctggcggcggggcgacccatcgaaccgctgctgcgcgcgttcgaatggcgcctgctggagcaactgggctatggtttcgctctcgatgtcgacatcgatgggcgcccgatcgagccgcaggcgttgtaccagcttttgccagaggccggcctggagccggtggcgcagctgcaacccgggctgttccagggctccgaactgttatccatggccgacgccgactggagcgcccccggcgccctggcggcggccaagcgcctgatgcgccaggcgctcgctccccatctgggcggccggccgctggtcagccgcgagctgttcatgaaccgtaaggagtcaccccgtgactga

SEQ ID NO: 322065 - DNA, 918 bp, Pseudomonas aeruginosa
atgactgacatgcacgacgacatccccgccggcagccgttgcggctacgtggcgatcgtgggccgccccaacgtgggcaagtccaccctgctcaaccacatcctcgggcagaagctggcgatcacctcgcgcaagccgcagaccacccgccacaacatgctcgggatcaagaccgagggcgaggtgcaggccgtctacgtcgatacgcccggcctgcacaagagcggcgagaaggccctcaaccgctacatgaaccgtaccgccagcgcggcattgaaggatgtcgacgtggtgatcttcgtggtcgaccgcacccgctggaccgaagaggaccagatggtcctggagcgcgtgcagtacgtcagttgcccggtgctgatcgcggtgaacaagaccgaccgcatcgaggaaaaggccgacctgctgccgcacctcgaatggctcacccagcagttgccgaaggccgaggtagtaccgatctcggcgcagcacgggaccaacctggacgtgctggagaagctggtcgccgagcgtctgccggaaagcgagcacttcttccccgaagaccagatcaccgaccgcagcagccgcttcctggccgccgagctggtccgcgagaagatcatgcgccagctcggcgccgagctgccctaccagatcaccgtggagatcgaggagttcaagcaggaaggtcgcatcctgcatatccatgcgctgatcctggtggagcgcgaggggcagaagaagatcatcatcggcgacaagggcgagcggatcaaaagcattggccagaacgcgcgcaaagacatggaagtgctgttcgactccaaggtcatgctcaacctctgggtcaaggtcaagggcggctggtccgacgacgagcgcgccctgcgctcgctgggctacggcgacctctga

SEQ ID NO: 322066 - DNA, 690 bp, Pseudomonas aeruginosa
gtgagtaattcgctggaccgactcgagcgcaagctcggctataccttcaaagaccgggacctgatggtcctggccctgacccatcgcagctacgccgggcgcaacaacgagcgcctggagttcctcggtgacgccattctcaacttcgtcatcggcgaggcgctgttccaccacttcccgcaggctcgcgaaggccagctttcgcgcctgcgcgcgcgactggtcaagggcgagaccctggccctgctggcgcgcggcttcgaggtgggcgactacctgcggctgggctcgggcgagctgaagagcggcgggttccgccgcgagtcgatcctcgccgatgcgatggaagccctgatcggcgccatctacctggataccggcatggactccgcgcgcgagcggatcatcgcctggctcggaccgcaactgcgcgagctgaccccggtggacaccaacaaggaccccaagacccgcctgcaggagttcctgcagtcgcgtggctgcgacctgccgcgctacgaggtggtggatatccagggcgaaccccattgccggaccttcttcgtcgattgcgaagtggccctgctgagcgacaagacccacgggcacggcggcagccgccgcatcgccgagcaggtggccgcggccgccgcgctggtggccctgggcgtggagaatggccatgactga

SEQ ID NO: 322067 - DNA, 378 bp, Pseudomonas aeruginosa
atgaggttcgcgcgttcgcagaaggggatgtccctgctggggtggctggtggtgctgggcgtggtggcgttcttcgccagcgccgcattcaagatcatcccgcactacatggattactactcgctggagaaggtgatcacttccgtggagaccgacaaggcggccgaggtgcgttccgtgccggagttctacagctacgtcggcaaggggatgcagatcaacggcatccgcaacctggacctggagaaggccctggaggtgcaactggaagacaaccaattccgggcgcacctgaaatatgaaaaacgcgagccactgatcagcaacatcgacctggtggtccacttcgacaaagaattccgtgtacgcatgccgtga

SEQ ID NO: 322068 - DNA, 855 bp, Pseudomonas aeruginosa
atgacactcaatttcccgttgttgctggtcatcgccgtggctgtatgcggcgccctggccctggtcgacctggtgctgttcgcgccgcgtcggcgggccgcgatctcttcctacgaagggcaggtgaacgagcccgatccggcagtgctggagaagctcaacaaggaaccgctgctggtggagtacggcaagtcgttcttcccggtgctgttcatcgtgctggtgctgcgttccttcctggtcgagccgttccagattccctcggggtcgatgaaacctaccctcgaggtcggcgatttcatcctggtcaacaagttcgcctacggtatccgcctgccggtgctggacaccaaggtgatcccgatcggcgacccgcagcgcggcgatgtcatggtgttccgctatcccagcgaaccgaacatcaactacatcaagcgcgtggtcggcctgcccggcgacaccgtgcgctacaccaaggaaaagcgcctgtacgtcaacggcgagctggtggcggagaaactggtcggcgaggaaccgggcaccctgggcagcgtgaccctgtaccaggagaagctgggccaggccgagcacctgatccgcaaggaaatgagccgctatcgcattgagcccgaccgccagtggaccattcccgccggccactacttcatgatgggcgacaaccgcgacaactccaacgacagccgctactggaacgatccgaagatccccaaggatctgctgggcatggttccggaccgcaatatcgtcggcaaggccttcgctgtatggatgagctggcccgatccgaagatgagcaacctgccgaacttctcccgggtcggcgtgattcactga

SEQ ID NO: 322069 - DNA, 1800 bp, Pseudomonas aeruginosa
gtgagcgacctgagccatatccgcaatttctccatcattgcccatatcgaccatggcaagtcgacgctggccgatcgcttcatccagatgtgcggcggcctctccgatcgcgaaatggaggcccaggtcctggactccatggacctggagcgcgagcgcgggatcaccatcaaggcccacagcgtgaccctgcactacaaggcgcaggacggtaagacctaccagctcaacttcatcgatacccccggccacgtcgacttcacctacgaagtcagccgctcgctggccgcctgcgagggcgcgctgctggtagtggacgccggccagggcgtcgaggcgcagtccgtcgccaactgctacaccgccatcgagcaggggctggaagtgatgcccgtgctgaacaagatggacctgccccaggccgagccggagcgggtgaaagaggaaatcgagagcatcatcggcatcgacgccaccgacgccgtggcctgcagcgccaagagcgggatgggcgtgctggaggtgctggagcgcctggtgaccgccatccccgccccggaaggcgagatcgaggcgccgctgcaggcgctgatcatcgactcctggttcgacaactacctcggcgtggtctcgctggtacgggtgaagaacggccgggtgaagaagggcgacaagatcctggtgaagtccaccggcaaggtccaccaggtggacagcgtcggggtattcactccgaagcacaccgagaccgtcgacctgaaggcgggcgaggtgggcttcatcatcgccggtatcaaggatatccacggcgcgccggtgggcgatacactgaccctgaacaacacgccggacgtcgaggtcctgccgggcttcaagcgggtcaagccgcaggtctacgcgggcctgttcccggtcagctcggacgatttcgaggacttccgcgacgccctgcagaaactgaccctcaacgactcgtcgctgcaatacgagccggaaagctccgaagccctgggcttcggcttccgttgcggcttcctcggcatgctgcacatggagatcatccaggagcgcctggagcgcgaatacgacctggacctgatcaccaccgcgcccacggtggtcttcgagatcgtgcagaagaacggcgagatcatctacgtcgacaacccgtccaagctcccggacctggcgtcgatccaggaaatgcgcgaaccgatctgccgcgccaccatcctggtgcccaaggaccacctgggcaacgtgatcaccctgtgcatcgagaagcgcggcgtgcagcgcgacatgcacttcctcagcggccaggtgcaggtggtctacgacctgccgatgaacgaggtggtgctcgacttcttcgatcgcctcaagtccaccagccgcggctatgcttccctggactacagcttcgatcgtttcgagccgtccaacctggttcgtctcgacgtgctgatcaatggcgagaaggtcgacgccctcgccctgatcgtccaccgcgacaacgccccctacaagggccgccagctggtggagaaaatgaaggaactgatcccgcggcagatgttcgacgtggcgatccaggcagccatcggtgggcagatcatcgcccgctcgacggtcaaggcgctcaggaagaacgtgctggccaagtgttacggtggcgacgtgagccgtaaacgcaagctgctggagaagcagaaggctggtaagaaaaggatgaagcaggtcggtagcgtggaaattccccaggaagccttcctcgccgtgctcaaagtggatagctag

SEQ ID NO: 322070 - DNA, 1425 bp, Pseudomonas aeruginosa
atgcataccctaaaacgctgtatggctgcgatggtggccttgctggccttgagcctggcgatgacggcccaggcagaactgccggacttcacgcctttggtcgaacaggcgtcgccggcggtggtgaatatcagtacgcggcagaagctgccggatcgcgccatggcgcgcgggcagctgtctatccccgacctcgaagggctgccgccgatgttccgcgacttcctcgaacgcagcatcccgcaggttccgcgcaatccgcgcggccagcagcgcgaggcgcaatcgctgggttccggcttcatcatctccaacgacggctacatcctcaccaacaatcacgtcgtggccgatgccgacgagatcctggtgcgcctgtccgaccgtagcgagcacaaggccaagctggtcggcgcggacccgcgcagcgacgtggcggtgctgaagatcgaggcgaagaacctgccgaccctgaaactgggcgattcgaacaagctgaaagtgggcgaatgggtcctggccatcggttcgccgttcggcttcgatcactcggtcaccgccggtatcgtcagtgccaagggtcgtagcctgccgaacgagagctacgtacccttcatccagaccgacgtggcgatcaacccgggtaactccggcggtccgctgctgaacctgcagggcgaagtggtcggcatcaactcgcagatcttcacccgttccggcggcttcatgggcctgtccttcgccattccgatcgatgtcgcgctgaacgtcgccgaccagttgaagaaagccggcaaggtcagtcgcggctggctgggcgtggtgatccaggaagtgaacaaggatctcgccgagtccttcggcctcgacaagccgtccggcgcgctggtggcgcaactggtggaagacggcccggcggccaagggtggcctgcaggtgggcgatgtgatcctcagcctgaacggccagtcgatcaacgagtccgccgacctgccgcacctggtgggcaacatgaagccgggcgacaagatcaacctggacgtgattcgcaacggccagcgcaagtccctgagcatggcggtaggcagccttccggacgacgacgaggaaatcgcctcgatgggcgctccgggcgccgagcgcagcagcaaccgcctgggcgtgaccgtcgccgacctgaccgccgagcagcgcaagagcctggatatccagggcggcgtggtgatcaaggaagtccaggacggtccggccgcggtcatcggcctgcgtccgggcgatgtcatcacccacctggacaacaaggcggtgacctcgaccaaggtcttcgccgacgtggccaaggccctgccgaagaaccgttcggtttcgatgcgggtgctgcgccagggacgcgccagcttcattaccttcaagctggccgaataa

SEQ ID NO: 322071 - DNA, 456 bp, Pseudomonas aeruginosa
atgatcgaggagcaggggcgagtggtggcgaccgagccgggagcggtatgggtcgagaccgtgcgccgcagtacctgctcgtcctgctcggccaatgccggttgcggccaggggctgatgcagcgcctgggcgtcggcgcggggcgtgcccgggtgcgcgcgttgagcgacctgagcctgcgggtcggcgatgcggtcgtcctaggaattcatgaagacctgttgttgcgcgcctccgtcctcttctatcttttccctctgctcgggtttttcgtggcagcattgctggcgacccgggcgggccttgtcgaacctctgatcatcgtgtccgggctggcgggtttgctggcggcctggctattggtgcgtcggcatgctcgtcgtcatgccgatgatccagcctcgcagccggtggttctgcgagcgctgatttccgggccgtccgattcggcctga

SEQ ID NO: 322072 - DNA, 951 bp, Pseudomonas aeruginosa
atgcgcaccacctccctgttgcttttgcttggcagcctgatggcggttcccgccactcaggctgccgacgcttccgactggctgaatcgtctcgccgaggccgatcgccagaacagtttccaaggcaccttcgtctacgagcgcaatggcagcttctccacccatgagatctggcatcgcgtggagagcgatggtgcggttcgcgagcgcctgctccagctcgacggcgcgcgccaggaagtggtccgggtcgacgggcgcacccagtgcatcagcggcggccttgccgaccaactggccgatgcccagctgtggccggtgcgcaagttcgatccctcccagctggcttcctggtacgacctgcgcctggtcggcgaatcccgtgtcgccggccgcccggcagtggtccttgcggtgactccgcgcgaccagcatcgctacggcttcgagctgcacctggaccgcgacaccggcctgccgttgaagtcgctgctgctgaacgagaaggggcagttgctcgagcgcttccagttcacccagttgaataccggtgcggcacctgccgaagaccagttgcaggcgggcgccgaatgccaggtcgtcggcccggccaaggccgacggcgagaagaccgtggcctggcgctcggaatggctgccgccaggtttcaccctgacccgcagtttcatgcgtcgcagtccggtcacccccgatccggtcgcctgcctgacctatggcgatggcctggcacgattctcggtgttcatcgagccgctgcacggtgccatggttggcgacgcgcgcagccagctcggcccgaccgtggtggtttccaagcgcctgcagaccgatgacggcggccagatggtgaccgtcgtcggcgaagtgccgctgggcaccgccgagcgggtggcgctgtccatccggcccgaggccgccgcccagaaatga

SEQ ID NO: 322073 - DNA, 585 bp, Pseudomonas aeruginosa
atgagtcgtgaagccctgcaggaaactctgtccgctgtgatggataacgaagcggatgaactcgagttgcggcgggtgctcgcagcttgcggcgaggatgccgagctgcgttccacctggtcgcgttaccagttggcgcggtccgtcatgcaccgcgagcctaccctgccgaagctggatatcgctgcggcggtctctgctgccctggccgacgaggccgctccgccgaaagcggagaagggaccgtggcggatggtcggtcgcctggcggtcgctgcctcggtgaccctggcggtgctggccggcgtgcgtctgtacaaccagaacgacgccctgccgcaaatggcgcaacaggggaccaccccgcagatcgccctgcctcaggtgaaaggcccggccgtgctggccggctacagcgaagagcagggggcgccgcaggtgatcactaactcctcgtccagcgatacccgctggcatgagcagcgtctgccgatctacctgcgtcagcacgtgcaacaatccgccgtcagtggtacagagagcgcgctgccctacgctcgggcagccagcctggaaaaccgctga

SEQ ID NO: 322074 - DNA, 582 bp, Pseudomonas aeruginosa
atgctaacccaggaacaggatcagcaactggttgaacgggtacagcgcggagacaagcgggctttcgatctgctggtactgaaataccagcacaagatactgggattgatcgtgcggttcgtgcacgacgcccaggaagcccaggacgtagcgcaggaagccttcatcaaggcataccgtgcgctaggcaatttccgcggcgatagtgctttttatacctggctgtatcggatcgccatcaacaccgcgaagaaccacctggtcgctcgcgggcgtcggccaccggacagcgatgtgaccgcagaggatgcggagttcttcgagggcgaccacgccctgaaggacatcgagtcgccggaacgggcgatgttgcgggatgagatcgaggccaccgtgcaccagaccatccagcagttgcccgaggatttgcgcacggccctgaccctgcgcgagttcgaaggtttgagttacgaagatatcgccaccgtgatgcagtgtccggtggggacggtacggtcgcggatcttccgcgctcgtgaagcaatcgacaaagctctgcagcctttgttgcgagaagcctga

SEQ ID NO: 322075 - DNA, 1617 bp, Pseudomonas aeruginosa
atgagccaacattatcaacacgatgtactggtcatcggcagcggcgccgccggcctgagtctggccttgacccttccggaacacctgcgcatcgccgtcctcagcaagggcgaactgtcgcagggctcgacctactgggcccagggcggcgtggccgccgtgctggacgataccgacaccgtggaatcccacgtcgaggacaccctggtcgccggtggcggcctgtgccgcgaggatgcggtgcgcttcaccgtggagcatagccgcgaagcgatccagtggctgatcgaacagggggtgcccttcacccgcgacgagcagcacaaccacgaggaaggcagcttcgaataccacctgacccgcgaaggcgggcacagccaccggcgcatcatccatgccgccgacgccaccggcgccgcgatcttcaataccttgctggcccaggcccggcggcgaccgaacatcgagctgctgtcgcagcgggtggcggtcgacctgatcaccgagcgcaagctaggcctgccgagcaagcgctgcctgggcgcctacgtgctgaatcgggaaagcggcgaagtcgataccttccgtgcccgcttcagcgtgctggcctccggtggcgcgagcaaggtctacctttataccagcaatcccgacggcaactccggcgacggcatcgccatggcctggcgcgccggctgccgggtcggcaacctggagttcaaccagttccacccggcctgcctgtaccacccgcaggccaagagtttcctcatcaccgaggcattgcgcggcgaaggcgccctgctccgcctgcccaatggcgagcgtttcatgccgcgcttcgacccgcgtggcgaactggcgccccgggacatcgtggcccgcgccatcgaccatgaaatgaagcgtctggggatcgactgtgtctacctggacatcagccacaagccggccgagttcatcaaggcgcacttccccaccgtctacgagcgctgcctggacttcggcatcgacattacccagcaaccgatcccggtagtgccggccgctcactatacctgcggcggcgtgctcgtcgaccagcacgggcataccgacgtgccgggcctctacgccatcggcgaaaccaccttcaccggcctgcacggcgccaaccgcatggccagcaattcgctgctggaatgcttcgtctatgcccgctctgccgccgccgacatgctccagcgcctgcccggcacgcccgtgccggaaagcctgccaagctgggacgccagccaggtcaccgactccgacgaggacgtgatcatcgcgcacaactgggacgaactgcggcgtttcatgtgggactacgtcggtatcgtgcgcaccaacaagcgcctgcagcgcgcccagcaccgggtacgcctgctgctcagcgagatcgacgagttctacagcaactacaaggtcagccgcgacctgatcgagttgcgcaacctggcactggtcgccgaactgatcatccgctcggccatgcagcgccgcgaaagccggggcctgcactacacgctggattatccggacctgctgcccgaagcccgcgacactatcctggtgccgcccatctacggcgactga

SEQ ID NO: 322076 - DNA, 453 bp, Pseudomonas aeruginosa
gtgtccagccggattgagccgttcgaatgccgctggcgggtctctccgatcctgttggcggcgagcctggcactgtgggccctggcgctgctgtcgatcctgctggcggcgctgccggtctggctgaagccgccgcttgcgctggtctgcctggcctacggtgcctgggggctgtaccgccaggtactgctgcgcggctcgcgggccttccgcggcgtgcgccatgacgagcggggctggcagctgtggagcgccggaagcggctggcaagcggtgcaattgcgccctgacagcctggcgttgccctggctgatcgtactgcgcgtgcgcctgccgggccgctggcgcatccttggctgctgtatcccggccgatgcattgggcgccgacagccatcggcgcctgcgtgtccgcctgcgcttcagtcgccgtagatgggcggcaccaggatag

SEQ ID NO: 322077 - DNA, 255 bp, Pseudomonas aeruginosa
atggcagatgaaaccgaactgaaacgactctactggcacagccgtcgcggcatgctggaactggatgtgctgctggtgcctttcgtgcaggaggtttacccgggcctggacgccgaggaccaggcgcgcttccgcaagctgctggagtgcgaggaccaggacatgttcggttggttcatgcagcgcggcgagccggaagacgccgacctgcggcggatggtgcggatgatcctggaccgtgtccagccggattga

SEQ ID NO: 322078 - DNA, 945 bp, Pseudomonas aeruginosa
atggccgaccccgctttccacaccccgctagtccatgaaggcatcctcgccgtccgcggccctgacgccgccaagttcctccagggccagctgacctgcaacctcgcctacctcaacgacgagacctccagcctcggcggccgctgcaacatcaagggccgcctgctatcgagcttccgcatcctgcccgagggcgacggcctgctgctggcgatggccggcgagctgctcgaggcccagttggcggacctgaagaaatacgccgtattctccaaggccagccttgccgacgagagcgcagcctggctccgcataggcttgcgcgacgccagcgaggcactgcgcgccctggggatagacaccccggcggagagcggcaggatcgcccgccacggcgacctgctcgccgtcgccctgggcgacgcccgcgtcgagctatgggttccggcgcagcgcgccgaggcggtgcttgccacgctccgcgagcacagccgcgaggcgccgctcgacgattggctgctcggccaggtgcgcgcaggcatcggccaggtgttcggcgctacccgcgagctgttcatcccacagatgatcaacctgcaggcggtcggcggggtcagcttcaagaagggctgctataccggccaggaaatcgtcgcccgcatgcagtatctcggccgcctcaagcgccgcctgtatcgcctggcgctggacgcagacgaggtgccggcgcccggcaccgggctgttctcgccagtacattccaccagcgtcggcgaagtggtactggccgcccgtacgccggagaacagcgtggaattgctcgccgtgctgcaggacgacgccgtcgccgacggccggatcagcctcggaagcgccgaaggagcgccgctcgtcctcctcaatctgccttacacgctggacagcgaccgcgaaatccagcgctga

SEQ ID NO: 322079 - DNA, 837 bp, Pseudomonas aeruginosa
atgagcaagcttgccgacaaagtccaacaggacctgatccgcgccatcgatcaggatgaactggtgctgccgaccctgcccgaggtggccctgcaggtccgtgaggcggcggaagacccggatgtcagcatccaggccctgagcaaggtgatcggcaacgacgcggcgctgaccgcgcgcatcatccgcgtggtgaacagtccgctgctgcgcagcccgaaggaaatcaccgacctgcagatggcgatcagccggctgggcatcaactacacctgcaacctggccaccggcctggccatggagcagatgttccaggccaccaccgacgtggtcgaccgcaagatgcgcgaagtctggaacaagagcaccgagatcgccggcatctgccacgtgctggcccgtcactacacccgcctggcgccggaccaggcgaccctggccgggctggtgcaccagatcggcgtgctgccgatcctcacctacgccgaggatcacaacgagctgctgtcggactccatcagcctgagccatgtgatcgagcgcatccatccgctgatcggcgagcgcatcctcaaggcctgggatttccccgcgccgatcgccgaggtcccgcgccagcacctggacttcacccgcaactcgccgcgcgcggactataccgacctggtccaggtcgccaccctgcagagctaccttggcagcgagcatccctatacccgcctggactggagccagatcccggcgttcgccaagctcggcctcgagccgaccgtcgacatgaaggaagacgaggacctctccagcgccctggaagccgccaccagcatgctgcaatag

SEQ ID NO: 322080 - DNA, 210 bp, Pseudomonas aeruginosa
gtgctggaagtggaagacgatggtccgggaattcccgccgccgaccgcgagcgggtcttccagcgcttctaccggcgcggcgacagccccggcagcggcctggggctggcgatcgtcggcgaggtctgccgggcgcaccgggcgcagatccagctcgaccagggcgaactgggcggcttgctggtgcgggtgcgcttcccggcggagtag

SEQ ID NO: 322081 - DNA, 672 bp, Pseudomonas aeruginosa
atgcgcatccttctggtggaagatcatccgcagctcgccgaaagcgtggtccaggcgctcaagggcgccggctggacggtagacctgctgcaggacggggtggccgccgacctggccctggccagcgaggagtacgccctggcgatcctcgacgtcggcctgccgcggatggacggcttcgaggtgctggcgcgcctgcgcgggcgcggcaagaccctgccggtgctgatgctgactgcgcgcggcgaggtgaaggaccgggtgcacggcctcaatctcggcgccgacgactacctggcaaagcctttcgaactgtccgagctggaggcgcgggtcaaggccctgctgcgccgcagcgtgctcggtggcgaacagttgcagcgctgcggcgccctggtctacgacctcggcacccggcgcttcagcctcgacgagcagccgctgaccctgacctcgcgggaacaggcggtgctggaagcgatgatcgcccgtccggggcgggtgatgagcaaggagcaactggccgcccaggtcttcggcctggacgaggaggccagcgccgacgccatcgagatctacgtccaccgcctgcgcaagaagctggaaggcggcgccgtgcgcatcgtcaccttccgcggcctcggctacctgctggaggcgcagggtgactga

SEQ ID NO: 322082 - DNA, 1284 bp, Pseudomonas aeruginosa
atgtcgacttccctgccgcaggccgcaaggtctgtacgttcgtcccgcagcaccaccctgaccaccaccgccgtcgtgctcgccggcatcgcgcccctgggcaacgccgccggcttcctcgaagacagcaaggccagcctggaaacccgcaacttctacatgaaccgcgacttccgcgacggccccggccagtccaagcgcgaggagtgggcgcaaggcttcatcctcaacctgcagtccggctacacccagggcaccgtcggcttcggcctcgacgccatgggcatgctcggcgtcaagctcgactccggccgcggccgcagcggtaccggactgctgccgaaggattccgacggccgcgcgccggacacctactcgaaactgggcctgaccgccaaggtcaaggtctcgcagagcgagctgaaggtcggcacgctgattccgaagctgccatcggtacaaccgaacaacgggcggatcttcccgcagatattcgaaggcgcgctgctcacctcgaaggagataaaggacctcggcttcaccgccgggcgcctggaaaagaccaagatccgcgactccagcgactccgaggacctcgcgctgaacgacaagaacggccgcttcgccggggtcagcgccgatcacttcgacctcggcggactggactacaagctcaccgaccaactcaccgccagctatcactacagcaacctgcaggacgtctaccgccagcacttcgtcggcctgctgcacagctggccgatcggtcccggcgaactgaccagcgacctgcgcttcgcccgcagcaccgacagcggctcggccaaggccggcggcatcgacaacaagtcgctcaacggcatgttcacctacagccttggcaaccatgccttcggtgcggcctggcagcgaatgaacggcgacgacgccttcccctacctggaaggcagcaacccgtacctggtcaacttcgtccaggtcaacgacttcgccggccccaaggagcgttcctggcaactgcgctacgactacgacttcgtcggcctcggcattcccggcctgaccttcatgacccgctacgtcaagggcgacaatgtcgaactcgccgggcagcgcggcgaaggccgcgaatgggaacgcaacaccgaactgcagtacgtgttccagagcggcgcgctgaagaacctcggaatccgctggcgcaacgcgaccttccgttccaatttcacccgcgacatcgatgagaaccgcctgatcgtcagctataccctgccgatctggtaa

SEQ ID NO: 322083 - DNA, 984 bp, Pseudomonas aeruginosa
atgatgatgaaactgtcttttcgtcccctcgccttggttgccgccggcctgctgctggccggcgccgccgtggccgaacccaagcgtcccgaatgcatcgccccggcgtcccccggcggcggtttcgacctcacctgcaagctggcccagagcgccctggtcgaggccaagctgctgagcaagccgatgcgcgtcacctacatgcccggcggcgtcggcgcggtcgcctataacgcggtggtcgcccaacgcccgggcgacgccggcaccatcaccgccttctccagcggctcgctgctgaacctggcccagggcaagttcggccgcttcgacgagaacgcggtgaaatggctggccgccatcggcaccagctacggcgccatcgcggtgcgcaccgactcgccctacaagaacctcgacgacctggtgaaggcgctcaaggccgacccgagcaaggtggtgatcggctccggcggcaccgtcggcagccaggactggatgcagaccgcgctgatcgccaaggccgccgggatcaatccgcgcgacctgcgctacgtggccctggaaggcggcggcgagatcgccaccgcgctgctcggcgggcacatccaggtcggcagcaccgacatttccgactccatgccgcacatcctgagcggcgacatgcgcctgctcgcggtgttctccgaagaacgcctgccggaggcggcgatggccaacatccccaccgccaaggaacagggctacgacatcgtctggccggtggttcgcgggttctacctcgggccgaaggtcagcgacgaagactacgcctggtggaagaacgccttcgaccaactgctggcctccgaggacttcgccaagctgcgcgaccagcgcgagctgttccccttcgccatgaccggcgaggaactcgacggctacgtgaagcagcaggtccagcagtacaagcaactggccaaggacttcggcctgatccagtaa

SEQ ID NO: 322084 - DNA, 471 bp, Pseudomonas aeruginosa
atgacccgttccaacctgtaccagcgcctgttcgccgggctctggctgctcgcctgcgtcggcctggcggtcgccggctggcgttaccaggcgccgttttcctacgaaccggtcggcccgcgcgcctacccgctgctctgcctggcgctgatgggcgccggcctggcgtggctgatcgcgcggccgacgccgatccgccacgccgaggacgaacaaccgctgggcggcgccgtgctgctcaaggtgctcgcctgcatcgccctgctgctggtgttcgccggcctgttcgaaacgctcggcttcatgctcagcgccgccctggtcggctcctgcatggccattctctacggcgcccggccaatccctgcggtggtcaccgcgagcctgctcgggatcggcctctactggctgttcgaccgcgccctggacgtcccgctgccgctgggcgttctcgacttcctgccgctgtga

SEQ ID NO: 322085 - DNA, 1518 bp, Pseudomonas aeruginosa
atggaaaccttgaactacctcggccagggcttcggcgtcgcgatgacgccgaccaacctgatcaccgcgctgatcggcaccctgatcggcaccatcgtaggcctgctgccaggcctcggtccgatcaacggcgtggcactgctgatcccggtggccttcgccctcggcctgccgccggaaaccgcgctgatcctgctcgccgccgtatacctgggctgcgaatacggcgggcggatcagctcgatcctgctcaacatccccggcgaagcctcgaccgtgatgaccaccctcgacggctacccgatggcacgcaagggcctggccggcgtggccctgtcgctgtcggcctggagttcgttcattggcgctttcatcgccacctgcgggatggtcctgttcgccccgctgctggccaagtgggcgatcgccttcggtccggcggaatatttcgtgctgatggtgttcgccatcgtctgcctcggcgggatggccggcgaccgcccgctgaagaccctgctggcggcgctgctcgggctgttcctgtcgagcgtcgggatcgacgccaacagcggcgtgtaccgcttcaccggggacagcatccacctcgccgacggcatccagttcgtggtcctggtgctgggcctgttctcggtcagcgagatcctcctgctgctggagaagacccaccacggccaggaggcggtgaaagccaccggacgcatgctgttcaacttcaaggaggccgccagcgtattcctggtcaacctgcgctgcggtctgctcggtttcgtcatgggcgtactgcccggcgccggcgcgaccctggcaagcgcggtggcctatatgaccgagaagaagctggccggtgccaagggcgagttcggcaagggcgacatgcgcggcctggccgctcccgagaccgccatcggcgcctccgcctgcggcgccatggtgccgatgctgaccctcggcgtgcccggctcgggtaccactgcggtgatgatcggcgccctgaccctgtacaacatcactcccggcccgctgctgttccagcagcaaccggacatcgtctggggcctgatcgcctcgctgttcatcgccaacgtcatgctgatcatcctcaacgtgccgatggtccgcgtattcacccgcatcctcgcggtgccgaactgggccctggtgccggccatcgcgatcatcaccgggatcggcgtgtacggcgtgcatgcgaccaccttcgacctgttcctgatggtcggcatcggcgtgatcggctatatcctgcgcaagctcgacttcccgctctcgccgctgctgctgggcttcatcctcggtggactgatggagcagaacctacgccgcgcgctgtcgatctccaacggtgaactgggcatcctctggtcgagcccgatcagcctggtaacctgggcgctggtggtggtaatgctgctgttgccgctggtccgcgcctggcgccgccgcgcggcccgtcgcgcgacggggctggccgatgcctga

SEQ ID NO: 322086 - DNA, 1038 bp, Pseudomonas aeruginosa
atgcctgagcgcgtcacctggaggctgtactgggcgacgccgctggtgggcgcccttggcggctggctggcaagcctggtcggctggccgctgccgtggatgatcggctcgctgcttgcggtgatgctggtgcgttgcctggccgacctgccgctggccgaagtgccgggggcacgcaagtgcgggcaatggatcgtcggcatcggcatcggcctgcacttcaccccggcagtgatcgagcaagtgctggcgcatagcgtgatcatcgtcttcggcgccgtggccaccacgctttccagcgtgctggcgatcgccttcatgcgccgcagcggcgaggaccgcgccaccgcgttcttcgccagcatgcccggtggtgccagcgagatggtcaacctcgggcagcgccacggcgcggtgctcagccgcgtcgccgcagcgcagagcctgcgcctgttgctggtagtgctgctggtgccggcggcgttccagtacctgctcggcggcggccagccaggcccgcaccaggccgcgccggtggactggcactggctggccctgctgttcccggccggggcgctggtcgcgctgggctggcagaagttgcgccaacccaatccctggctgctcggcccgctgttgctggcggccggcgtcagcctcggcttcgacctgcatatcggcctgccggccggttccagcggcgtcggccaatggctgatcggcagcgccctgggttgccatttcaaccgcagtttcttccgcagcgctccagccttcgtcagtcgtaccctggtctgcacgctgtggatgatgttcgccgcggcgctcgccgccgagttgctcggctggctgaccaccctcgaccaccagtcgctgatgctcggcatgatgcccggcggcatcgccgagctgagcctgaccgccgaagccttgcagctctcggtgccgctggtcaccgccttgcaggtactgaggctattgctggtgctgttcctcgccgagccgtgcttccgctactggaggaagcgcgccggctga

SEQ ID NO: 322087 - DNA, 696 bp, Pseudomonas aeruginosa
atgaccgataacgacgaccgcatcaagctcgaggcgagttggaaggaagcgctgcgcgaggaattcgacaagccctacatgaagcaactgggcgagttcctgcgccaggagaaggccgccggcaaggtgatctttccgcccgggccattgatcttcaacgcgctgaacaccacgccgctggagaacgtcaaggtggtgatcatcggccaggatccctaccacggaccaggccaggcccacggcctgtgcttctcggtgcagcccggcgtgccgacgccgccgtccttgcagaacatctacaaggaactcaaccgcgacctgaacatcccgattcccaacaacggctacctgcagcgctgggcggagcagggcgtgctgttgctcaatacctccctgaccgtcgagcaggccaaggccggctcccacgccaatgccggctggcagccgttcaccgaccgcgtcatcgaggtggtcaacgagcgttgcgagcgcctggtgttcctgctctggggcagccacgcgcagagcaagcagaagctgatcgacccgcagcgccacctgattctcaagtcggcgcacccgtcgccgttgtcggcctaccgcggtttcctcggcaacggccacttcagccgcaccaacaagttcctcgagcagaacggcaagacgcctatcgactggtcgctgccggacctctga

SEQ ID NO: 322088 - DNA, 822 bp, Pseudomonas aeruginosa
atgcgcaaacccctatcgctctaccacccctggctctactggctgcgggtctggcaacgacgtctctggcggcactgccgctggcgtcttggcggccgtcgctacgtgcggttgccatcggtcgacgagcgcctgccgtaccgctacatcaagcacacctcgaagttgatccgccgcctcggcgacagcgacctcgccctgcaacgcaacaaggtggtcaacctgcgcctggcggtggactgcatgaacggcgtgagcatcggccccggcgagtacttctcgttctgccggctggtcggtcggcccagcgcccggcgtggcttcgtcgaaggtatggagttgtccttcggcgaggcgcgcagcggaatcggcggcggcatctgccaactgagcaacctgatccactggatggccctgcattccccgctgcgcgtggtggagcgggccaaccacagcttcgacccgtttcccgacgagggacggatcctgccgttcggctcgggcgcggcgatcttctacaacttcatcgacctggtgctgcacaatccgacggcggataccttccagctgcgcttccatatcgccgcccaccaactggaaggcgaactgctgtgcagcgcgccgcgccctgtgcgctaccacgtctatgagagggcccagcgctttgtccgcgacggcgatgcggtgctgaggctcaacgagatctggcgcgacatccgggaaaagggccaggccggcaccctgctggccagcgagtgcctgtaccgcaaccgggtgcgcgtgaagtatccggtggaagaggcccgcctgtcccgagattga

SEQ ID NO: 322089 - DNA, 882 bp, Pseudomonas aeruginosa
gtgaagcgttccgtacagacctccgcctggcccctgcccaaccagggtgtgcgtttcatcacgccgccccgcctgcgtcgcgccctggcccgccatccgctcggccaggcctgctacccgctggccctcggttactatccggaggcgcatggccaccacatgcagcggcgcgcgccggacgacaacctgttgatctactgccgggccggacgcggctggctggagtgtgccggcgagcgcgtcgaggtcggcggcggcgacctgctggtcctgcccaagggccgggaacatgcctacggcgccgactcgcagcggccatggagcatctactgggtacatttcgaaggcggactggcggaggatttcctgcgtccgctgggcagcgccccgcgcctgcgcctgggcatgcagccgcgcctgctggcggagttcgatgcgctgctggcgctgcgtcgccagggcctcagcctgccgcacttcatccatgccgcgcacctgttgcagggcctgctcacctcgctggcggtgcgtccggcgcgggccagcctgaaatccggacgggtgctggacatcgacgcggtgcaggcgctgatgcgcgcgcacctgcacgacagcctcaacctcgacgagctggcggcgcagttcaagctgtcgcgcttccatttcgccaagacctatcgcgccctgaccggccaggcgccgatccaggatttcatccagatgaagatggcccatgcctgccgcctgctcgacgagggcgcgctggaggtgcggcagatcgccgagcagctcggctacgccgatccctattatttctcgcggctgttccgcaaggtggtgggcatggcgcccagtcactaccgggcgctgcaccagggctag

SEQ ID NO: 322090 - DNA, 1509 bp, Pseudomonas aeruginosa
atggccaaggcaatcccccagctgatcgacggcgaatggcgcggcagccgttcccgcgagctggtcgaagtcaccgatccggcgacccaggacgtcctcgcgctggcgccgaaggccaccgccgacgagatcgagcaggccatcgccagcgcccagcgcgccttcgagacctggcgcgaagtcccggctcccgagcgagcgcggttgatgctgcgctaccagcacctgctcaaggaacaccacgacgaactcggcgaactgctggcccgggagaccggcaagaacctcgccgatgccaagggcgacgtgtggcgcggcatcgaggtggtcgaacacgccgccaacgtggccagcctgatgatgggcgagacggtggaaaacgtcgcccgcgagatcgacaccgccagttggatccagcccctcggcgtgtgcgccgggatcaccccgttcaatttcccggcgatgatcccgctgtggatgttcccgctggccatcgcctgcggcaacaccttcgtcctcaagccctccgaacaggatccgctgacacccaaccgcctcgccgagctgttcctcgaggccggcgcgccgaagggcgtgctgcaggtgatccatggcggccgcgaacaggtcgatgccctcctcacccacccggacatccgggcgatttccttcgtcggctcggtcgccgtgggccagcacgtgtaccgcaccggcaccgcgcacctgaagcgggtgcaggccttcgccggggcgaagaaccacatggtgatcctccccgacgcgaacaaggcccaggtcctcggcaacctggtcggcgccagctgcggcgccgccggccagcgctgcatggcgatcagcgcggcggtgttcgtcggcgcggcgcgcgagtggattcccgagctggccgagcggatggccgccctgcgccccggtcactggcaggacccggacgccgcctatggtccgctgatcagcccgcaggcgcgccagcgcgtgctgcgcctgatcgccgaaggcaaggcagaaggcgccgagtgcctgctcgacggctcgcagtgccaggtcgaaggctatcccaacggcaactggctcggtcccaccctgttccgcgcagtgacgccgaagatgggcctgtaccgcgaggagatcttcggcccggtgctggcttgcctggaggtcgataccctggaagaggcgattgccctggtcaacgccaatccctatggcaacggcaccagcctgttcacccgctccggcggcgccgctcggcgctaccagcacgcggtgcaggtcggccaggtgggtatcaacgtgccgatcccggtaccgctgccgttcttctccttcaccggctggaagggttccttctacggcgacctgcacgcctacggcaagcaggctgtgcgcttctataccgagaccaagaccgtcaccagccgctggttcgacgatgaaccgacggccgccgaatcgtcggccggcccgaacatgaccatccatctcaagtga

SEQ ID NO: 322091 - DNA, 1164 bp, Pseudomonas aeruginosa
atggatttcgacctcaccgaagaacaacgcctgctggtggagagcgcccgcgccttcgcccgccacgaactggcgccgaaggcggccgactgggaccgcgaccatcacttcccggaggaagtcatccgcgccgccgccgaacagggctacctcggcctgtacatcgccgaggaagacggcggtctgggcctgtcgcggctgtccacttcgctgatcttcgagcaactggccgccggctgcgtggccactaccgcctacatcagcatccacaacatggccgcctggatgctcgcctcgttcggcgacgcggcgctgaaggaggcctggctgcccggcctgatcggcggcgagtcgctcgcctcctattgcctgaccgagcccgatgccggctccgacgccgcgcgcctgcgcacccgcgcccgccgcgagggcgacgaatacgtgctggacggcagcaagtgcttcatttccggcgccggcagcacccaggtgctgatcgtcatggcgcgcaccggcgaggacggcgccaggggcatctcctgcttcctggtgccggccgacgcgcccggcatccgctacggccgcaacgaggacaagatgggctggcgcgcgcagccgacccgcaccatcaccttcgaaggcgtgcgcatccccgccggcaaccgcatcggcccggagggccagggcttcgtctatgccatgaaaggcctcgacggcggccgcctgaacatcgccagttgttccctgggcgccgcccaggcggcgctggagcagtcgatgcgctacgtcgaggagcgcgagcagttcggcaagccgctggcgaccttccaggccttgcagttcaagctcgccgacatgctcaccgaactcaccgccagccgtcagatggtccgcctcggcgcccatcggctggaccgcggcgacgccgaggcgaccctgtactgcgcaatggccaagcgcttcgccaccgaccgctgcttcgatgtctgcaacgaggccttgcaactgcacggcggctacggctatctcaacgattatccgctggagcgctgggtacgcgacacccgcgtgcaccagatcctcgaaggcaccaacgaaatcatgcgggtgatcgtcgcccgccgcctgttggagcagggcggcatgctcgatcgcctgctgtga

SEQ ID NO: 322092 - DNA, 819 bp, Pseudomonas aeruginosa
atgaacactgccgtcgaaccctacaaggcttcctccttcgacctgacccacaagctcaccgtggaaaagcacgggcacaccgcgctgatcaccatcaaccacccgccggccaacacctgggaccgcgactcgctgatcggcctgcgccaactgatcgagcacctcaaccgcgacgacgatatctacgccctggtagtgaccggccaggggccgaagttcttctccgccggcgccgacctgaacatgttcgccgacggcgacaaggcccgcgctcgcgagatggcccgccgcttcggcgaagccttcgaggcgctgcgcgatttccgcggggtgtcgatcgcggcgatcaacggctacgccatgggcggcgggctggagtgcgccctcgcctgcgacatccgcatcgccgagcgccaggcgcagatggccctgccggaggccgcggtgggcctgctgccctgcgccggcgggacccaggcgctgccctggctggtgggcgaaggctgggccaagcggatgatcctctgcaacgagcgggtggatgcggaaaccgccctgcgcatcggcctggtcgaacaggtggtggacagcggcgaggcgcgcggcgccgccctgctgctggcggccaaggtggcacgccagagcccggtggcgatccgcaccatcaagccgctgatccagggtgcccgcgaacgcgcgccgaacacctggctgccggaggagcgcgagcgcttcgtcgatctgttcgacgcccaggacacccgcgaaggggtcaacgccttcctcgagaagcgcgatcccaagtggcgcaactgctga

SEQ ID NO: 322093 - DNA, 1104 bp, Pseudomonas aeruginosa
atgaacgtgcttttcgaagaacgcccgagcctgcatggcttccgcatcggcattgccaccctggatgcggaaaagagtctgaacgccctgtccctgccgatgatcgaggccctggcggcgaaactcgacgcctgggccgaggacgccggcatcgcctgcgtgctgttgcgcggcaacggcgccaaggccttttgcgccggcggcgacgtgcgcaagctggtggacgcctgccgcgagcaacccggcgaggtaccggccctggcgcgacgcttcttcgccgatgaataccgcctcgactaccgcatccatacctacccgaaacccttcatctgctgggcccacggctatgtgatgggtggcggcatggggctgatgcagggtgccgggattcgcatcgtcaccccgtccagccgcctggcgatgccggagatcggcatcggcctgtacccagacgtcggcgccagctggttcctcgcccgcctgcccggcaggctcggcctgttcctcggcctgagcgcggcgcagatgaacgcccgcgacgctctcgacctcgacctggccgaccgcttccttctcgacgaccagcaggacgccctgctcgccggcctggtgcagatgaactggaacgagtcgccccaagtgcaacttcacagcctgcttcgcgccctcgaacacgaggcccgcggcgaactgccggaggcccagttgctcccgcgccggccgcgcctggacgcactgctcgaccagccggacctggcgagcgcctggcaggcgctggtggcgctgcgcgacgacgccgacccgctgcttgcgcgtggcgcgaagaccctggccgagggctgcccgatgaccgcgcatctggtctggcagcagatcgagcgtgcgcgctacctgtcgctggccgaggtgttccgcctggaatacgccatgagcctgaactgcacgcgccatccggacttcgccgagggggtacgcgcaaggctgatcgatcgcgacaacgcaccgaactggcattggccgcaggtggaatcgatcccgcaggcggtgatcgaggcgcacttcgagccgacctgggagggcgagcatccactggcggggctctga

SEQ ID NO: 322094 - DNA, 897 bp, Pseudomonas aeruginosa
atgaaacagatcgccttcatcggcctcggccacatgggcgcgccgatggccaccaacctgctcaaggccggctacctgctgaacgtcttcgacctggtgcagagcgccgtcgacggcctggtcgccgccggcgccagcgccgcccgcagtgcccgcgacgcggtgcagggcgccgacgtggtcatcagcatgctgccggccagccagcacgtcgaaggcctgtacctcgacgacgatggcctgctcgcgcacatcgcccccggcaccctggtgctggaatgctcgaccatcgccccgacctcggcgcgcaaggtccacgccgccgcccgcgagcgcggcctggcgatgctcgacgcgccggtgtccggcggcactgccggcgcggcagccggcaccctgaccttcatggtcggcggcgacgccgaagccctggagaaggcccggccgctgttcgaggccatgggtcgcaacatcttccatgccggccccgacggcgccggccaggtggccaaggtgtgcaacaaccagctcctcgcggtgctgatgatcggtaccgcagaagccatggccctgggcgtggccaacggcctcgacgcgaaggtgctggccgagatcatgcgccgcagctccggtggcaactgggcgctggaagtctacaacccctggccgggggttatggagaacgctccggcgtcgcgcgactacagcggcggcttcatggcccagttgatggccaaggacctcgggctggcccaggaagccgcccaggccagcgccagcagcacgccgatgggcagcctggcgctgagcctgtaccgtctgctgctgaagcagggctatgcggagcgggacttttccgtggtgcagaaattgttcgatccgacccaaggccaatag

SEQ ID NO: 322095 - DNA, 645 bp, Pseudomonas aeruginosa
ttgaacgccctgctgctgcgttaccgtttccgcctgctgttcttttccaccgtgctgttcacggcgatcctcggcctgccgtcgagcaccaagccacgggtgctcggcagcctcctgctgctggtgctggccgggatgaacaccttgcgcagacgcagtccgctggtctacctgacggccttcttcggcctgttcagcctggccctgtacaccactgcggacttcagcagtccctactccagcctgccgcccggcctgctgcgcgggctgagcctgatcctgctgtacctgaccctgttcgccgcgctgttccgccgcgtcacccaggagcgcccggtgacccacgagctgctctacggactctgcgcgctctacctgcagatggcgctggccttcgctctcgcctactacatggtcgaacagatgcagccggccagcttcatcgccagccatggcgcactcggcctggataccttcgtctactacagcctggtgaccctgaccaccgtgggctacggcgacatccaggcgatcaacccgctggcgcgcctgctggccggcagcgaaggagtgatcggggtcctgttcatcgccctcgccgtggcccgcagcctgaccctgatgagcgacagcgaggaggtctga

SEQ ID NO: 322096 - DNA, 642 bp, Pseudomonas aeruginosa
atgaaaatcgccctgatcggcgccaccggccacgtcggccactatttcctcaacgaagccctgcaacgcggccacgcggtgaccgccctggtccgcgacccgagcaagctggcggcgcgcgacggcctctgcgtagtgcaggcggacgtcagcgacccggcccaggtggccagcgccgtggcaggccacgaggtggtcatcagcgctttcaacggcggctggggtagcgccgacctccgcgcccgccacgccgccggcagccaggccattctcgacggcgtgaaacgctccggcgtgccgcgcctgctggttctcggcggcgccgggagcctggagatcgcccccggccagcgcctggtggacagcccggaattccccgagcagtggaagcagggcgccctcggcgccgccgacgccctcgaccaactgcgcggcgagcaacgactggactgggtgttcctcagcccggcgatgctcctcgaacccggccagcgcagcggcaagttccgcctcggcggcgaccaggtcctgttcgacgccaagggcgagagccggatttccctggaagacctggcggtagccatgctcgacgaggccgagcagccccgtcatcatcgccagcgcttcaccgtggcctactga

SEQ ID NO: 322097 - DNA, 1977 bp, Pseudomonas aeruginosa
atgagccgtctgcttgcactcctggcgctcgccccgctgctcgccggcgccgccgaaaccaccgcgcccaaaccgcccagtgccttcaccgtcgaggcccagcggcgggtcgaagcggaattgcccttcgccgaccgcgccgacttcgagcgcgccgaacgcggcctgatccggcgcccggagcggttactcatccgcaaccccgacggcagcgtcgcctggcagctcggtggctacgacttcctcctcgacggcaagcctcgcgacagcatcaatcccagcctgcaacgccaggccctgctcaatctcaagtacggcttgttcgaggttgccgagggtatctaccaggtgcgcggcttcgacctggccaacatcaccttcatccgcggcgacagcggctggatcgtggtcgacaccctgaccaccccggccaccgccagggcggcctacgaactggtcagccgcgagctgggcgagaggccgatccgtacggtgatctacagccacgcccacgctgatcactttggaggcgtgcgcggtctggtagagccacagcaggtcgccagcggcgcggtgcagatcatcgctccggccggcttcatggaggcggcgatcaaggagaacgtcctggccggcaacgccatgatgcgccgcgccacctaccagtacggcacgcaactgcccaacgggccgcaggggcaggtcgacatggccatcggcaagggattggcgcgcggaccgctgagcctgctggcgccgacccgcctgatcgaaggcgagggcgaggacctggtgctggacggcgtgccgttcaccttccagaacacgccgggtaccgaatcgccggcggagatgaacatctggctgccgcggcagaaggccctgctgatggccgaaaacgtggtcggcaccctgcacaacctgtacaccctgcgcggcgccgaggtacgtgatgcgctgggctggagcaagtacatcaaccaggcgctgcatcgtttcggcaggcaggccgaggtgatgttcgcagtgcacaactggccgcgctggggcaacgcggagatcgtcgaggtgctggagaagcagcgtgacctgtacggcttcctgcacgaccagaccctgcacctggccaaccagggcgtgaccatcggccaggtgcacaaccgcctgcgcctgccgcccagcctcgaccaggaatggtacgaccgcggctaccacggctcggtcagccataacgcacgggccgtgctgaaccgctacctgggctactacgacggcaacccggcgagcctcgacccgctcagcccggaggactcggcgggccgctacgtggaatacatgggcggcgccgagcgcctgctggagcaagcgcgggcgtcgtacgccaggggcgagtaccgctgggtggtcgaggtggtcaacaggctggtcttcgccgagccggataaccgggccgcgcgcgagctgcaggccgacgccctggagcagctcggctaccaggcggagaacgccggctggcgcaacagctacctcagcgccgcctacgaactgcgccacggcgtaccgcgcgaccagccgacgatgaaggccggcagcgccgatgccctggcggcgatggacaccggcctgctgttcgactatctcggcgtgcgcctggacgccggcgctgcggagggcaaggcgctgagcatcaacctgcgcctgccggacatcggtgagaactacctgctggaactgaagaactcgcacctgaacaacctgcgcggcgtgcagagcgaggacgccgggcagaccgtgagcatcgaccgcgccgatctcaaccggctgctgctcaaagaggtatcggcggtacgcctggtcttcgagggcaagctgaagagttccggcaatccgctgttgctggggcaactgttcggcatgctcggcgacttcgacttctggttcgatatcgtcacgccggcggcgaagtccgaaggctga

SEQ ID NO: 322098 - DNA, 915 bp, Pseudomonas aeruginosa
atgagcgatctacgccagttccgccacttcgtcgccctcgccgagcacggccactatgcccgcgccgccgaagcggtgaatctcagccagccggcgctgtcacgcagcatccaggcgctggagggacagttgggttgcaccctggtggagcgcggcagccgcggcgtggccctcacggcccacggccggctggtgctggaacacgctcggcgcctgctggccgggcatcgcgcactgcacaacgcggtgagccagttggccaatctcgacagcggcgagctacgcctgggcggcggtcccttccccgccgcacggctgttgcccgaggcactggccggtttctccagcgcccacccacgcgtgcgcgtcgtactgctcatcgaagactggcagaccctacgccagcgcctgctggatgacgccgtcgaactcttcgtcgccgatatccgcgagctgcaaggcgatccgcagttgcgcatccacccgctacgcgagtatcccggcgtactcttctgccgccccagccatccgttgctgcgtctggtgaggccgagcgccgagcaactggccgactacccgctggccggcccgcgcctgcccgaggcagtccgcggcgacctggcgcgcctgctgcaacgcgaagaaccgctcggcatacagtgcgacgacgtgctgatgctcaagggcctggtcggctccagcgagctgatcagcctggcgccctgggacgtggttgccgccgacgtcgaggccggccgcctggcgctgctgccctggcccgccggctccgagcccgcccgcgccaagggctccgcctacggtctggtcagccgcgccggccgcagcctgtcgccggccgcggcagtgttcgtcgagcgggtgctggaacaggaccggcgcttcgccgccacctga

SEQ ID NO: 322099 - DNA, 189 bp, Pseudomonas aeruginosa
atgcgtcgtttgctttccctgctgatcctcgtcctgccgctgtcggcctgcgtggtctacgaccgcaacgaccaccggcatcgtcccgactaccgctacgagcgctatcacgaccgcgaccgtgacaaccgcgggcgcgactggaaccgttcctggcaggagcgccgcgacgacgctcgctggcgctga

SEQ ID NO: 322100 - DNA, 246 bp, Pseudomonas aeruginosa
atgagtcattttctgtcgttcgccaagggcgccctggcgatgttctggctcgtcgcgctggtcaacctggcctacccgctgggcgagttgcatcgaccgatcctgctgttgtccggcgtgctggtgctggtccatgccgccgagatcctgctgctcaacgggcgtctcaaggcgcgcccggcaccttggctggagcgcctccaggtgctgctgttcggcgtcctgcacctgcgtagcctcggctga

SEQ ID NO: 322101 - DNA, 456 bp, Pseudomonas aeruginosa
atgtggcgcacattcctgagagtcccgcttcttctgcttctcgccagcctgggtggctgcgcggtgtatgactacgactacgatgacggcgattggcgccactatcgcggccagccctacggctacgcctacgaagtgccgcgctatcgcgtgtatgacgatggctggcgcagcgaacggcgctactactcgacgcgctactacgaccaacgctactacccggcgccacgccgctacgatggccaccgcgactaccggcgcgagcaatatcgctaccagcagcgctaccacgaatcgcgcccggcccatcgtggcgagcggcatccgggcaactggcagcgcggcggccagccgcaatggcgcgggcattctccgcaacgctggcaacaacacggtcggcaggatcgtccgggacaccagggccagcagggcgggacacctcgctggcgcaactga

SEQ ID NO: 322102 - DNA, 174 bp, Pseudomonas aeruginosa
atggtcatgcgattgttcgggctgctactggcggccttcctgatgagcggttgcagcgttcgggtgccgggcgcctacgtcgaactggatccgttcgacgatggctactacggctacgatcgcggcggcccgccccattgtcctccgggccacgccaagaaaggctggtgctga

SEQ ID NO: 322103 - DNA, 1077 bp, Pseudomonas aeruginosa
atgcaacccatcgaccgcgcccaggcacagcagcgcgccaacgacatcctggtgttccagcgcgagctgcaacgcctcgaccaggagcaggcgttccgcctcgaaccggcccaggcccggcaactcgccgactatcacctggccctgctggacagctaccgcgaccgtttcgacatcgaccacgacctgcgcagccagcaactttcgctgggcatgcgggtagcctcgttcttcggcgccctggccttcgccgccagcgtgttcctgctgttctatcgcttctggggcctgttccccaccgtcgcccaggtggcgatcctgatcggcagcgccttcgccgcgttcttcgccacgctctgggtccaggccaaggacgcctcgggctacttcagcaagctggcggcgatggtcgcgttcgcctgcttcgtcctcgacctgaccatgctcgggcagatattcaacgtcacccccagcgacctggcgctggtgccctgggcgctctacgccctgctcctggcctacctgtgcaacgcccgcctgctgctggcggcggcgatcctctgcgtgatgggtttcatcgccgcgcgcgtcggcacctggggcggcggctactggctgagcgtaggcgagcgaccggagaacttcttccccgccgccgcgctgatcttcgccgtgccgctgtgcttcgagcagcgcaacttcagcggcttcgccgtgatctaccgggtgttcgccctgctcggcctgttcctgccgatgctggtgctggccaactggggctcaggcagctacctggcgttaccgtcggcgctcatcgaggggctctaccaggtcgccggcttcgtcgccgccgcccttgtgatctggctcggcgcgcgacgcaactgggcggacgtgagcaataccgggatcaccttcttcgtcatcttcctctacaccaagttcttcgactggtggtgggaagcgatgccgaagtacctgttcttcctggtgctcggcctcagcgccctgctgatcctgctggtcctgcgccgcctgcgcacgcccctgggcatcgccgcgaggactgacgcatga

SEQ ID NO: 322104 - DNA, 816 bp, Pseudomonas aeruginosa
atgaatcgcaaccgtcgcaacgccctgatcgccggcagcctcctgctgctggcggcgaacctggccgccctcggtggcgtcgcctggaaccggtccggcgaggccgaaagcaagctggtgctcagccagcgcgagctccagcgcaactggtcctacggtttctggagcgaagagaacagtggcgtcgaactgcgcctggagcttcgctcgccgagcagcgagccgcccagtgacctcgctcccccgctgccgcccgagcagatgcgcgccctcggtttcagcatcccggacgcgctcgacgaagagagcgtacggcgctaccgccgccaacaggaaaaacaggtgctgctggtcctggagctcgacggcccggcctatcgccgcgaagtacgcctggccgaggagcgcctggccgaggccagcgcccgcagcaaggccctgcccaaggacgaaatgctgtccagccagatggaagccgctcgccaccaactgaagcatgagcagggagaggccagccgactgttcatcgtcgacgccggcctcgacctggccgccctgcgccagcgctaccccgagcgccagcgctacgccatcgtcaagggccgggtgcgtccctggtccgcggtcgacggaggcaggactctggtcggcggctacatcagccgtaccgacctcgccgcgatcaacgtgccacgacaatggcacgcggtattcgccaaggtcgacgaacaaaactaccggctagcgccgctggaactgcacctcagcttcggccagcgcctggagccctggatcaccaacgccgttcgccgctga

SEQ ID NO: 322105 - DNA, 213 bp, Pseudomonas aeruginosa
atgaacagcgaaatcgatccaggccgctgcccgctgtgccagcaatccaaccgctgcaccctggcctatcccgctagcgccacccaggcttgctggtgcttcaccacggagatcgatgcggccgtgctggagcggattcccgccgagctgcgccgccgcgcctgcctctgcccacgctgcgcgcaactgctgccgcccgacgccgacgactga

SEQ ID NO: 322106 - DNA, 693 bp, Pseudomonas aeruginosa
atgcgcctggaccgcttcctcgccaatctgcccgaactcagccgccgcgacgcgcagatgctgatcgccggtggacacttgcgcgtggacggccaggtggtgcgcgacggcacccacgaggtgcgggtgttcagccgggtggaactggacgagcggctgctccaggctggcaagccggcgcgctactacatgctgcacaaaccgatgggctgcgtcagcgccacccgcgacccgcaacacccgaccgtcctcgacctgttcccggaagacctgcgcgacgacctgcacattggcggtcgtctcgactacaacaccaccggcctgatgctgctgaccaacgatggccagtggtcgcgccgcctgaccctgccgggcagccggcgcgacaaggtctactacgtggaaaccgaggcgcccatcgaccaacgctacgtggatgccttcgccgccggcctccacttccgcttcgaagacctggtcaccctccccgcgcagctcgaaccgatcggcccacgctgcgcccgcctgaccctgcacgaaggccgctatcaccaggtcaagcgcatgttcggccacttcgacaacaaggtgctgcgcctgcaccgcgagcgcatgggcgatatttgtctcgacccacagttgccgccgggtgcctggcgccccctgaatgctgaagaaatctgttcggtgtga

SEQ ID NO: 322107 - DNA, 1044 bp, Pseudomonas aeruginosa
atgaaaagatcccttgccgtactgctgctggccttcgccgtcggcagcctccacgcggcgcccgccagcccagcgaacgcgcctttgccgccggccgacatcaaggcgcggctgaagagcatgaagcccggcgagtacctctggtacccggaggtttccccgcagggaccagtgaccatcgtggtcagccttaccgaacagaaggcctacatctaccgcaacggtatcgccatcggggtcagcaccctcagctccggcaagaagggccgggagaccccgaccggagtgttctcgatcctgcaaaagagcgtcgaccacaagtccgacctctacaacagcgcgcccatgccctacatgcagcgcctgacctgggacggcatcgccctgcacgccggcaacctgcccggctatcccgcctcccacggctgcatccgcctgcccatggcgttcgccaagaagctctacggcatcaccggattcagctccaccacggtaatcatttccaacgccagcagcgcgccgaaggaagtcgaccaccccggcctgctggcaccgacggtagcggacgggcgaccggtgacgctgccggtggagcccggagaaatcgcctggaacgaccccggcgcggaacgcggtccgttgtcggtgctgatcagccgcgccgaccagcgcgcctatgtctatcgcggcggccagcgcatcggcaccgcaccggtgcagttgccggcacgcccgcaaaccggcatggcggtgttctcgctgctggaaaagccgaccccggaagaaatcagcgagacctcgccgaacctgcgctggtcggtggtccaggtgagcaacccgggacagggcctgacaccctccgagcaactgggcaagatccgcatggacccgaccttcgtccgcgaaatgctcggtgccatggacgtcggcagcaccctggtgatcaccgactgggcctcgacccgggacacccacagcgactccgatttcacggtgatcgccacggaaacaccgaacaatccgacgaaatcgcttaaaaagtag

SEQ ID NO: 322108 - DNA, 738 bp, Pseudomonas aeruginosa
atgccaaccttcctccgtgccgccctgcgcaggctgaacctggcgggcgccaccctttgcgcactggccagcgggccggtattcgccatgccacttccctccgccaaggacctgcagaaactcgctccccaggccagcctgccgaccctcgaactggcccttaccgcctatgcctgcgcgagtgccagccagggcggcgacaacggcctgctgacggtgatcgactactcgcggccgtcgcgcgacaagcgtctctgggtattcgacctgaaggcccgcaagctgctcttcgaagagtgggtgacccacggcaagaacagcggcgatgaccttgccacctccttctccaaccggccgaacagctaccagtcgtcgatcgggctgttccagaccggccagctctataccggcaagcatggtcagtcgctgcgcctggttggcctggagccgggcttcaacgacaagagcgaagaacgcgccatcgtcatgcattccgctgcctacgccgatcccagggtggttcccgggctcggtcgtctgggccgcagccagggctgccctgcggtacgcccggccgtggcggcccggctgatcaacaccctcaagcgcggcagctacgtgttcgcctattacccgcaaccgaagtggctggaaacctcgcgcttcctcgccccgcagagctgcgccgtggcacgtgcggcgcgtacgccggaagtcatcgccagcctgctcaaatga

SEQ ID NO: 322109 - DNA, 903 bp, Pseudomonas aeruginosa
atgaggccggaaacagccatcatcgagatccacgggcaatacaggattcacaccgagttctacggcaacccctcggcgcagcagaccatcatcctggtcaacggctcgctgtcgaccacagcgtccttcgcccagaccgtgaagtacctgcagccgcattacaacgtggtgctctacgaccagccgtatgccggccagtccaaaccccataacgaaaaccacacgccgatcagcaaggaatgcgaggccaggatcctgctggaactgatcgaacgcttccgtgccgaggtagtgatgtcgttctcgtggggcggcgtcgccaccctgctggccctggcgcaacgtcccggacggatccgcagggcggtggtcaactcattctcgcctcagctcaacccggccatgctcgactacctgcatcgcggcctcgactacctcgccgcctgcgatcgcacccagatcggcaacctggtcaacgaaaccatcggccgctacctgccacagttgttcaagcgctacaacttccgccacgtcagcagcctggacgagcacgaataccaccagatgcacttccatatccgcgaagtgctgcgcctgaacgccgatagctataccgagagcttcgccggcatcgagatcccggtgctgttcatgaacggcgagctggacatctacaccacgccccacgaagcccgccagttcggccaactgatccgcggcgcggaattccacaccatccgcaatgccggccacttcatcgacgtcgagcacaaggccgcctggcaacagacccaggacgccctgctggccttcctccgcccgcagcgcacgcagccgctcaacccgatctaccgcccccagcccaacggcgccagcgtccccctcgccgccctcgccagctaa

SEQ ID NO: 322110 - DNA, 996 bp, Pseudomonas aeruginosa
atgtcgatcaccaagctccccgatggccgttggttcgtcgatgtagaaccgatcaagggcaagcgctttcgcaagcggttcaagaccaagatggaggcgcagcaattcgaggccaccgcgcgtcagaagtgtgcggaaaatccctgctggacgctcaggccgaaggaccgtcggcgtctctcggagttggtcgaactctggtatgaactgcacggccagaccctgagcaacgggcatcgttgcgtggcgattctgcggttggtggcaaaggacctgggcgacccggtcgctgtctccctggagcctgcgaaagtggctcggttgcgtagccgacagatagccaatggcatgtcgggcaagaccgcgaacaaccgtcttggctacctcaagtccatgtacaacgaattgcgccaactcggcgtcattgactatgagaatccggtagggcgcatgcggccgctcaagcttcaggaaagaccgctgtcgtacctgaccaagcatcaggtgtccgaactgcttacggccctggatgcgcgcaccacgtcgccacatccgaagatggtcgctcgtatctgcctcgcgacaggggctcgatggggtgaggctcaggcgctgacgccggaacgtctgaaaggtaatacggtgatcttcgccaacactaagtccaagcgtgtgcgctcggtgccgatctcggaagaattgggcgccgaccttcgccggcattggcagacccacgggccgttcacgaactgccttggcgtgttccgcctggtgctgctgtcgacctccatcaagctgccgaaggggcaggccagccacgtactgcgccacacgttcgccagtcacttcatcatgaacggcgggcacatcgtgacgttgcagcacatcctggggcacgcctcgttatcgatgacgatgcgatatgcgcatctatcggaagagcatctatccgaagctgtgaaattgaatccgcttaacgttatccgtgttgggtag

SEQ ID NO: 322111 - DNA, 1293 bp, Pseudomonas aeruginosa
atgaagaaaatcagccatcaaattcgcgtcagtatcgagtcggacggtcaggtcttggaaagcccgaaagggcggttgttcttcgacgacaccacggctcaattcaccgatctgtcaggcgtgcgcattctgcgttgcggcgtggatacggtgcggcagttgtacaacggcaagctccggccggaagtcatggcgctgtttgacctgtcggtggatgtggtcgagttcgccggctacgaatggtccaagggccgtatcggtcgcgactccggctatcagtaccgcctgcagaacgctgaaatgggtctgatcctgctaatcaagaatcacaacatcaaggtcgacaccattggctcgcacctcaagatcgaggtatcgcctcacgccctcgatggcgccgatccgcgcatcctccagggcgtgctggatgatttggccgctgccgtgctgagtcactgcgaaaccaaccaagccgctgtgcatatcgccctggacgtacaaggctggaaaccgcctcgcgatctggtggatcgcatgcattgtcgctcgcgtcgggtgcgccagatcagcgggatcgagcggatcgagttcgacggcaacgcctcggtctacgggcgtggcgagacgtacatgttcggctcggccaacggtctgcaactgtcgatctataacaagaccctccaggctcgggccaccgacaagctcgactattgggaaagcgtgtgggcaaccctgaacggggatccgttcggcgatggcgacccggcctataaccccctggaaacggtctggcggctcgaattccgcttccatcactccatcgtccagcagttctccgaaggctcgcgtatggcctcgggggaggtcattggctgccgcacctatgagggcctctgcccgcatctgcaaggactgtggaactacgcctgcgaaagcttcaagctgctgagccggacggcggtctacgatccgttctggagcctgatcagccaggacgcccgtgtccaagtcgagtgcgatccgctgatcgagcgcaccgagtatcggcgctactacaagaccgccaagggcttcagcgggcgcaactgcgagatgttccttggccagttcgtgagcctgatcgcgcgggagcgtgtcccggcaaaaaaggctattgagtccgcccgcaaattggagttctggcacgttatcgaagaccactatctcgccaagggttggactcgtcgcgatctggaaaggcacatacacaagctgatgtgtgatcggtatctgcggcgggggtatgccgtctaa

SEQ ID NO: 322112 - DNA, 1263 bp, Pseudomonas aeruginosa
atggcgatcaagattcatcacggcccgaacggctcctacaagacctccggcgcgatccaagatgacctgatccccgcgatcaagaagggccgcgtcatcatcaccaacgtgcgcggcctgacccgcgaacggatcttccaagtgatgccggagacgccctccagctgcgacgtcatcaacctcgacctcgaggacctggatgacatggaaaagatgcgcacctggttcatgtgggcgccgcgtggcgcgttcatcatcttcgacgaaacccaactgatctttctgaagtcctggcgcgaagccgacctcaagcgcttcgactttccggatggcccggaagcggccaaggcagccgggcggcccatgggctggctggatgcctggacccggcaccggcatttcaactgggacatcatcctcaccacgccgaacatcgcctatatccgcgacgacatccgcatgacggcggaaaaggcctatctgcactccaacctcgccgtcatcggcattcggggccgctacaaggaaagccagcactcggcgcaggacaacaaaccgccggcccgcgacgtgatcgtcgagatcaagaaaatccgccaggagaccttcgccctctatgaatcgacagccaccggctccgtcaccgacaccatcgccggcaagagcctttttagacaacctaagattcttctattcatggcaattccggcccttgctattgggtctgtggtttatgacggcggacctcgtttgctcatgggcgaccctgtatcgccgtctgctgctggaactgctgcgcctgctcaagccggtcctgctgtgggtgctgcgcgtgctactggtgcggctggtcctgatgctgctgatgatgtacctgggcacccaggcgttccgggcgctgctcctgtaggccatcccttcgccggccgcgacttcatcgtcaaggcgaccctgctgtccgcctccgggcgccgcacctatctgttcgccgtccggggccaggacggcagcgaattcactcttaccgatcgcgacctgaccgacaccggctatgccgtggtgccgcggggcaactgcgccgcggaactgagcttcaagggcggttggtccggctatgccgcctgcgccgggcgtagtgccttgggcaatgcgccgccggctcagaccgccgcgccgaacgtgccgcccgccgccgcgaacagcgccgccgtgcgggtgacggtggttcctgacaccagccgcttgccgcgttcgatcaactga

SEQ ID NO: 322113 - DNA, 351 bp, Pseudomonas aeruginosa
atggacattccctttctctccgacattctcgcctggatgcaatccctctgggacttcctctacagcggcgtctatgacttcgtcaccgacgcctttgtcctgctgaccaagatggccatcaagggctggttcgagatgcaattgttcgtcgcggaaatcggctacaaggcgttccgcgaagtcgtcggcggcatcggtatcggctcgaccatcacgtcctattactcgtccctggacggcgacctgcgctcgctgctggcgttcttcggcctgccggacgcggtgaacatgatcttcgccgccatcggcacgcgcttctccatgtccttcatccccttcataggtaagtga

SEQ ID NO: 322114 - DNA, 774 bp, Pseudomonas aeruginosa
atgtcggcgttccgcgttgccctgctgggcctgtgcctgctgttcaaccaggcccaggcccgccaggaccccgtcccctaccagcgcccgccgctgctgaccgtggtcatcgatgacctcgggcagaacctggcacgcgaccgccgggttctcgacctgccccccggcgtaaccctggcgatcatcccggaaaccccgcatgccgccgaactggcccgcgaggcgcaccagcgcgggcgcacggtgatcctgcacatgccgatggacccggccggcggtccctacgcctggcggccggagctgacccaggaagagcgtgcgcggcggctggacgcggcgctggccaaggtgccgttcgtgcaaggcctgaacaaccacgagggcagccgcatgaccgcggtgcgcccggcgatggcctggctcgccgaggaactccagcgtcgcggcctgtacctggtcgacagccgcaccagcgccgccaccgtggccgccagcgaggcgcagcggatcggcctggcgagcgtctcgcgcgatgtgttcctcgacaacgaagccacaccggaagcggtctccgcacaactgcaggccggcgtcgccctggcccgcaagcagggttcggcgttgctcatcggccacccgcacaaggccaccctcgacgtgctggcgcgggagctgccgaagctgcgcgcccagggcatcgagctggtaccgccgcagatgctcatcggcgagcgcggcaaccgcaacgtcaacccacgccaggcgccgcactga

SEQ ID NO: 322115 - DNA, 1311 bp, Pseudomonas aeruginosa
atgctgcattgcttccgtcccaccaccctggcgctggccctgctgctcggcgcgggcgcggcccaggctgccgacgccccggccgacgccgcgccactggccaacggtagcagtgccccgctgcccctcgacgagctgcgtaccttcgccgaggttctcgaccgggtgaaggccgcctatgtcgagccagtggacgacaagaccctgctggagaacgccatcaagggcatgctcagcaacctcgacccgcactccgcctacctcggcccggaggacttcgccgagctgcaggaaagcaccagcggcgagttcggcggcctgggcatcgaggtcggcagcgaagacggcttcatcaaggtggtctcgccgatcgacgacacccccgcggcccgcgccggcatccagcccggcgacctgatcgtgcagatcgacggcaagccgaccaagggccagtcgatgaccgaagcggtcgacagcatgcgcggcaaggccggctccccgatcaccctgaccatcgtccgcgatggcggcagaccgttcgacgtcgaactcaagcgcgccatcatcaaggtcaagagtgtcaagagccaggtcctcgaacccggctacgcctacctgcgcatcacccagttccaggtcaacaccggcgaggaagtggtcaaggcgctgaaccagctgcgcaaggacaacaagggccgtctcaagggcctggtcctggacctgcgcaacaaccccggcggcgtgctgcagtccgccgtcgaggtagccgacgccttcctcaccaagggcctgatcgtctacaccaagggccgcatcgccaactccgagctacgcttcagcgccgacccagccgatcccagcgacaaggttccgctggtggtgctgatcaacggtggcagcgcctcggcggcggaaatcgtcgccggtgccctgcaggaccagaagcgcgcgatcctgatgggcaccgacagcttcggcaagggctcggtgcagaccgtgctgccgctgaacaacgaccgcgccctgaagctcaccaccgcgctctactacacccccaacgggcgctccatccaggcccagggcatcgttccggacatcgaagtcggacgcgccaaggtgacccaggagcggagcagcttcgagggcttcaaggaagccgacctgcagggccacctggccaacggcaacggcggcgccgaccgccccaccggcaagcgtgccgcgccgagcgagcgcccgcaggattccgactaccagctcagccaggcccttagcctgctgaaaggcctgagcgtcacccgcggcaactga

SEQ ID NO: 322116 - DNA, 1437 bp, Pseudomonas aeruginosa
atgcccgtggccttcgtcgtcgacgacatccgccgctgccatccggctgaaatacgtggaagcgccccacagcgcgcggtgcggggcgttttttttaacggcggccacgggcatactaggccggtccaattcccaggtgcccgccaccccatgctccgcctccttcctctcctgctatccctcgcctgtctcgctccggccttcgccgacgagcgcgccgacacccaacgccagctggaacagacgcagaaggacatcggcgagctgaagaagctgctggacggcatccagcaggaaaagagcggcgtgcagaagcagctgaagtccaccgagaccgagatgggcgacctggaaaaacagatcaaggccctgcaggacgagctggacaagagcgaagccgagctgaaacggctggatggggagaaaaaaaaactccaggacgcgcgcattgagcagcagcgcctcctcgccatccaggcccgcgcggcctaccagagtggacgcgaggaatacctgaagctgctgctgaaccaggaacacccggaaaaattcagccgcaccctcacctactacgactacatcaacaaagcccgtctcgaacagctcgccggcttcaacgaaaccctccgccagctggccaacgtcgagcaggacatctctgcgcagaaagccgaacaactgagcaagcaaggcgagctggacagccgccgcgaggcgctggcagcgacccgcaaggagcgccagcaagccctggccaagctgaacagcgactaccgcgaacgcgaccagaagctcaagtcccgccaacaggaccaggccgagctggccaaggtactgcggaccatcgaggaaaccctggcccgccaggcccgcgaagccgccgccgcggcggagcgcgagcgccagcgcgcgctggccgccgaacgcgagcgtgcgcgccagcagcaggccgcccccggacgagtcaccagcccgccgcgcgaacctgcgccgggcccgctggtctcaagcactggcgcggtctacggcggcgcgttcggctcggcccgcggcaagctgccgtggccggtgaatggccgcgtcgtggcgcgcttcggcagccagcgcggcgacgatccgcgggcgaaatgggacggcgtactgatttcggcgagcgccggcagcaccgtccgcgcggtgcacggcggacgcgtggtattcgccgactggttgcgcggagccggcctgttggtcatcctcgaccacggtggcggctacctcagcctttatggccataatcaaagcctgctgaaagacgccggcgacaccgtgaaggccggagacccgatcgccaccgttggaaccagcggcggccagagtagcccggccgtgtacttcgccattcgccatcagggccgcccggcggaccctactacctggtgccgcgcacagggatag

SEQ ID NO: 322117 - DNA, 1548 bp, Pseudomonas aeruginosa
atgactgccacgcccaaacccctggtcctgatcatcctggacggcttcggccacagcgaaagccctgactacaacgccatctacgccgcgaagaagccggtctgggatcgcctcctggcaacccagccgcacggcctgatctccggctccggcatggacgtcggcctgcccgacggccagatgggcaattccgaggtcggccacatgaacctcggcgcaggccgcgtggtgtaccaggacttcacccgcgtcaccaaggccatccgcgacggcgaattcttcgaaaacccggtgatcgccggcgcggtcgacaaggccgtcgccgccgacaaggcggtgcacatcctcggcctgctctccccgggcggcgtacacagccatgaagaccacctggtggcgatggcgcagatggccgccaggcgcggcgccggcaagatctacctgcatgccttcctggatggccgcgataccccgccgaaaagcgcgcagccgtcgctggagcgtctcgacgccaccttcgccgggctcggcaagggccgcatcgcctcgatcatcggccgctatttcgcgatggaccgcgacaaccgctgggaccgcgtccaggccgcctatgaactgattgtcgacggcaaggccgagttcaccgccgactcctcggtggcagccctcgaggccgcctacgcccgcggcgagagcgacgaattcgtcaaggccaccgcggtggtcccggccggcgccgaagcggtgcgggtcgaggatggcgacgcggtgatcttcatgaacttccgcgccgaccgcgcccgcgagctgagccgcgccttcgtcgagccggcattcaatgagttcccccgcgaacgagccccgcagctggcaggtttcgtcatgctgacccagtacgcggcgagcatcccggcgccctgcgccttcccgccggagccgctgaccaacgtcctcggcgagtacctggccaagcatggcaagacccagctgcgcatcgccgagaccgagaagtacgcccatgtgaccttcttcttctccggcggccgcgaggaaccctacgagggcgaggagcgcatcctgatcccctcgccgaaggtcgccacctacgacctgcaacccgagatgagcgcgccggaagtcaccgaccgtatcgtcgaggccatcgagcaacagcgctacgacgtgatcgtggtcaactacgccaacggcgacatggtcggccacaccggggtgttcgaggccgcggtcaaggccgtggagtgcctggacacctgcatgggccgtatcgtcgaggcgctggacaaggtcggcggcgaagccctgatcaccgccgaccacggcaatgtcgagcagatggaagacgagtccaccggccaggcgcacaccgcgcacacctgcgaaccggtgcccttcgtctacgtcggcaagcgcaagctgagcatccgcgaaggcggcgtgctggccgacgtggcgccgaccatgctgaccctcatggggctggagcagccggcggaaatgaccggtcgcagcatcgtcaccctcggctga

SEQ ID NO: 322118 - DNA, 420 bp, Pseudomonas aeruginosa
atgcaattcgtttcccgtctgatcgagttcgccaccaaccactacctgctggtcgcggcgctgctggtcctgctggtcctgctgttgctgcacgagctgcgcaagggcggcaagagcctgtcgacccgcgagctgaccgcgctggtcaatgccgaccaggcggtggtcctggatatccgtccggccaaggagttcgccagcgggcacatcgtcgacgcgctgaacatcccggccgacaagctgaacagccgcatgaccgagctggaaaagtacaagggcaagaccatcatcctggtcgacgccatgggccagcactccggtacctggggcggcgtcctgaagaaggccggcttcaacgccgccaagctgtccggcgggatcggcagctggcgcggcgacaacctgccgctggtgaagtga

SEQ ID NO: 322119 - DNA, 255 bp, Pseudomonas aeruginosa
atgccgcccgtcgtgatctacaccaccgcctggtgtccgtactgcatccgcgccaagcagttgctgcaacgcaagggcgtggacttccaggagatcgcctgcgacggcaagcccgaactgcgcgccgagctggcacgcaaggcgggatcgaccaccgtgccgcagatctggatcggcgagacccatgtcggcggctgcgacgaccttcatgcactggagcgcgccggcaagctggacgcgctgctgtctgcctga

SEQ ID NO: 322120 - DNA, 492 bp, Pseudomonas aeruginosa
atgaccgagcaagctaccaacggcgctgccgacgagcagcaaccccagttctccctgcagcgcatctacctgcgcgacctgtcgttcgagtcgccgaagtccccggaaatcttccgccaggaatggaacccgtccatcagcctggacctgaacactcgccagaagcagctggacggcgacttctacgaagtggtcctgaccgtatcggtgaccgtgaagaacggcgaggacaccactgccttcatcgccgaagtgcagcaggccggcatcttcctgatcaagaacctcgatccgtcgagcatgagccatacccttggcgcgttctgcccgaacatcctcttcccgtacgctcgcgaagccctggacaacctggtggtacgcggttcgttcccggcgctgatgctgtcgccggtgaacttcgacgccctctacgcccaggaaatcgcccgcatgcaggcctccggcgagatcccgacgccgtcggtccagtaa

SEQ ID NO: 322121 - DNA, 462 bp, Pseudomonas aeruginosa
atgttccacgtcatcctgtttcaaccggagatacctccgaataccggcaacattatcaggctctgcgccaacgccggatgcagtctgcacctgatcgagccgctcggtttcgaactggacgacaagcgcttgcgccgtgccggcctcgactaccacgaatacgccagcgtacgccgctacccggatctgcagagctgcctcgaggccctcggccagccacgcctgttcgccttcaccaccaaggggtcgcgggccttccacgaagtggcctaccagcgcgacgatgccttcctcttcggcccggaaagccgcggactgccggaggacgtgcgcaacgccctgccaaccgatcggcgcctgcgcctgccgatgcgcgaaggctgccgtagcctgaacctgtccaacacggtggcggtgaccgtctacgaagcctggcgccagctcggcttcgccatggactga

SEQ ID NO: 322122 - DNA, 351 bp, Pseudomonas aeruginosa
atgctcggcaggttgttcggtcccgcttcgctgccgacgtctgcgccgcaactgctggcggtcggggagagcgagcagggcctggtcctgcgcttcgatcgccaggctgcggttacggcggcacgggtggagggtgccctgacgttgcgcatcgtcgcccggggcgcggcgcagcagggagacgggcgatggctgggccagccgttgcgctggcgcgtccgcgaggagggaaaggcgctgctgttgagcttggtctcgacccgccccttgcaggggcgctggcagtggtcggaggatggcgagggctggcgcctggtcgtcgagctgcaggagcgcgacggccgggaataa

SEQ ID NO: 322123 - DNA, 1431 bp, Pseudomonas aeruginosa
atgagccgatcagagaccgtctggatcgtcgacgacgaccgctccatccgctgggtactggaaaaggccctgcaacaggaaggcatgaccacggtgagcttcgacagcgccgacagcgtgatcggccgcctcggccgtcaacagccggatgtgatcatctccgatatccgcatgcccggcgccagcggcctcgacctgctggcgcagatccgcgaactgcatccgcgcctgccggtgatcatcatgaccgcgcattccgacctcgacagtgcggtggcctcctaccagggcggcgccttcgaatacctgcccaagccgttcgacgtcgacgaggcggtctccctggtcaagcgcgccaaccagcacgcccaggagcagcagggcctggagctgccggcgaaccaggcgcgcacgccggagatcatcggcgaggcgccggcgatgcaggaggtattccgcgccatcggccgcctcagccattccaacatcaccgtgctgatcaacggcgaatcgggtaccggcaaggagctggtcgcccatgccctgcatcgccacagcccgcgcgcagcctcgccattcatcgcgctgaacatggcggcgatccccaaggacctgatggaatccgagctgttcggccatgagaagggcgccttcaccggggccgccgcccagcgccgcggacgcttcgagcaagccgatggcggcaccctgttcctcgacgagatcggcgacatgccggccgacacccagacccgcctgctgcgcgtcctggccgacggcgagttctaccgggtcggcgggcacacgccggtgaaggtcgacgtgcggatcatcgccgccacccaccagaacctggaaagcctggtgcgcgacggcaagttccgcgaggacctgttccatcgcctgaacgtgatccgcatccacatcccgcggctggccgaccgccgcgaggacatcccggcgctggcccggcacttcctcagccgcgccgcccaggagctggcggtggaacccaagctgctgaaggcggaaaccgaggagtacctgaagaacctcggctggccgggcaacgtccgccaactggagaacacctgtcgctggatcaccgtgatggcctccggccgcgaggtgcacatcgacgacctgccgccggagctgctgacccagccgcaggacagcgcgccggcggcgaactgggaacaggcccttcgccagtgggccgaccaggcgctgggccgcggccagtcgaacctgctggacagcgccgtgccggccttcgaacggatcatgatagaaaccgccctcaagcacaccgccggccgccgccgcgatgccgccgtgctgctcggctggggccgcaataccctgacccgcaagatcaaggagctggggatgaacgtcgatggagccgacgacgaaggcgacgactga

SEQ ID NO: 322124 - DNA, 1077 bp, Pseudomonas aeruginosa
atgccgaccgataccctgcaccgactgttgctcgacaacctgaccaccgcggtgatcctgctcaacggcgaactgcgcctggagtacatgaacccggcggcggagatgctcctggccgtgagcggccagcgcagccacgggcaattcatcagcgagctgttcaccgaatcgccggaagccttgaactcgctgcgccaggcggtggaacaggcacatccgttcaccaagcgcgaagcgaccctgacctcgatcaccggcgtcagcatcacggtcgactatgcggtgacgcccatcctcaaccgcaacgagacgctgctgctgctcgaggtccatcctcgcgaccggctgatgcggatcacccgcgaagaagcgcagttgtccaagcaggagaccaccaagctgctggtgcgcgggctcgcccacgagatcaagaacccgctcggcggcatccgcggcgcagcgcaactgctatcccgcgagctgccggaagagtcgctgaaggactacaccaacgtcatcatcgaagaagccgaccggttgcggaacctggtggaccgcatgctcggctcgaacaaactgccgaacctggcgccgaccaacatccatgaagtgctggagcgggtcagcagcctggtggaagcggagagccagggcagcatcaccctggtccgcgactacgacccgagcatccccgacctgctgctcgaccgcgagcaaatgatccaggccgtgctcaacatggtacgcaacgccatgcaggcgatcgccgggcagaacgacctgcgcctcggtcgcatcaccctgcgcagccgtaccctgcgccagttcaccatcggccacacgcgtcaccgcctggtgtgcaaggtggagatcatcgacaacggcccgggcattccggccgagctccaggaaaccatcttctaccccatggtcagcggccgtccggacggtaccggactcgggctggccatcgcccagaacatcatcagccagcaccaggggctgattgaatgcgagagccaccccggccataccgtgttcagtctgttcctgcccctggaacaaggagtgcattga

SEQ ID NO: 322125 - DNA, 573 bp, Pseudomonas aeruginosa
atgatcccgcgcattctcggcgccctcctgctgtgcctggcctgcgccgcgcaagcgggggtctacacctacatcgacgccgagggcaaccgcgtctacaccgaccagccgcccagcgggcgcaaggcccaacgcgtcgaactggcgccgggcaacagcgtggcgccgccgggcatacgctatcgtccgcccgccgcgccgctggaggtgaagccgccggcctaccagctactgcgcatcctcttccccgaaccggacgcaaccctgcgcgccaacagcggcgacgtcatcgtcaccgtcaccagcgagccggcgctgctgcccggccatcgctatcgcctgctgctcgacggcaagcctgccggagtgccgggacacagcccggtgttcccgttgaagaacctcgatcgcggcacccaccaggtcgcagtggaaatcatcgatggcgacggcatgaccgtcgaaagcaccccgagccagcccttccacctgcatcgagtgagcatcgccgggcaacccctgccggaggtcgatacgccgctggtcagcgcgatagagccaagcgagcgctag

SEQ ID NO: 322126 - DNA, 522 bp, Pseudomonas aeruginosa
atgcgcctgatcaccagctgcctgctcctggccgccgccctgccggccatggcgcagatctaccaatacaccgacgccaacggcaacaaggtattcaccaaccagccgccagacggggtgcaggcgcagaccgtcgaactgcagccgaccaataccgtaggaatcgacacgccggaaaagtcctccgcgggcaatgccccggccgccgatagcgaggccgccgcctacgagatccttgccctcagcgacctccccacggaagaggcgctgcgcgccaacaacggcaccttcaacgtcagcgtcagcatccgcccggccctgcacagcggccaccagttgcaactggtgctggacggcaaaccctacggcacgcccagcagcggcacccgcttcaccctgcacgagatcgaccgcggcgaccacagcctcgcggtacaggtactcaacggcgaacgggtgctgcaatccagcccgccggtgaccttcaccgtgcagcgcgtgcacctcgggaagaagcgatga

SEQ ID NO: 322127 - DNA, 2208 bp, Pseudomonas aeruginosa
gtgccgatcatcgcccgcttcacccttcgctcccgcgtcctggcggccctgctgctgtgcctctgcgccgccctgttctactcgccgccgggcgccgcggcgctgccgaacccgttggcggggagttcctccggtggcgagaaggtcagcgatgcgcagttggaacaatcgctgaaccaggtcatccagaccctggagaacgacaggcagcgcgccgacctgctgaaaaagctgaaacagctgcgcgacgtgaccaagaaaggcaaggaaagcgagggtggggtgctggggctgatcggcgataccctgaccagcctggaaaagcagttccagggcgcgaacagcccggtcgcgttatggggcaaccagttccagctggcgcgtgccgaactcgaggagcgctttcccagctggcgcgacctgccggcgatggtcttcgatttttcggtggtgatcctcctctgggcctgcctggccagcgcgctgctctggctcagccggcgcatgcgcgagcgcttcggcctgtcggcggagttgccgcagcatccgaagacccgcgacctgctgctgttttccctgcgcaagctgggcccctggctggtggccttcctcatcaccctgtacctgtcggtggtgctgccggactccctgagcaagaccctggcgatggtcatggcctatgtgctggtctgcggcacgctgttctccgcgctgtgcgtgatttccctctcgctgctcagcggcccgcaccgccagcgcgccctggatatcctgcggcgccaggcgttccgcccgttgtggctgatcggcagcctcgccgcgctgggcgaggtcgcccacgatccgcggctgatcgccggcctcggcgagcacacctcgatctgcctgagtaccctggccaacgccagcgccgcgctgttcaccgccttgttcgtgatgcgtttccgccggccgatcgcccacctgatccgcaaccagccgctggagcgccgcctcaagcgccgtagcctgcacgacctggtgcaactggtcggctcgctgtggttcgtgccggtgctggtgctggtggggatttccctgttcgccaccttcgtttccgccggcgacagcagttcggcgttgcgccgggcgctggtctgcgcggtgctggcggtggtggcgatgaccgtgatcgggctgatccgccgccgttccagtcgggtcggcgccggcccgcgccgcagcgcgccgtacatcgagcagttgcagagcttcggctacaccctgctgcacatcttcgtggtgctgttcttcatcgaggtcgccttgcgcgtctggggcatgtcgctgattcgctatgcggaaggcgagggcgagcagatcagcatgaaggtagtcagcttcggcaccaccctgctggtcgcctggctgatctggatcctcaccgataccgcgatccagcacagcctcggcctgggcggcaagagccggccgaacacccgcgcgctgaccatgctgccgctgatccgcaacgtgctgttcgccaccatcgcggtgatcgccctgatcgtcgccctggccaacatgggcatgaacgtcaccccgctgctggccggtgccggcgtgatcggcctggccatcggcttcggtgcgcagtcgctggtggcggacctgatcaccggcctgttcatcatcatcgaggactcgctgtcgatcgacgactacgtcgacgtcggcggccaccttggcacggtcgagggcctgactatccgtaccgtgcgcctgcgcgacctggacggcgtggtgcataccatcccgttcagcgagatcaagagcatcaagaactactcgcgccagttcggctacgcgatgttccgctggccggtgccggcgagcatgccgatcgacgacgcggtggcgctggtgcgcgaggtcgcgatggagctgcgcagcgacccggcggtctaccgcaacctgtggtcgccgatggaattgcagggcgtggagagtttcgacaacggccaggcgatcctgcgcttccgcttcaagaccgcgccgatcaagcagtgggaggtccagcgggcgttcaacctgcgcctgcgtcggcgcctcgaccaggccggcctcgaactgtccatgccgcgtctcaacgtacagttgagccgggcgcccaaggcgaaatccgcggaaccggacgagcagggcacgccggcggacggcggcatctag

SEQ ID NO: 322128 - DNA, 405 bp, Pseudomonas aeruginosa
atgcgtcactctctctggctcctgcttgccgccatcctcagcctgcccgcccaggccggcaccgaatgccgcgatatccacgaccgcgacctgcggcgcatgtgcaacgcactggaacgcggcgacagcggggattgcggcgacatcgacagccgcgacatgcggcgttactgcggcgcgctgctggcgccgggacagcgctacgactgcgacgacatccgcgacggcgacacgcgccgccagtgccgcgccatcgtccgcggcgaccgcaagcgctgcgacgacatcgacagccgcgacatgcgccgccagtgccgggccgtggtatcgcgtgcgccgtggcagtgcgacggcatcgacgaccgcgacatgcgccgcatctgccgggtcatcctgtcgcgctag

SEQ ID NO: 322129 - DNA, 1410 bp, Pseudomonas aeruginosa
atgtcgtacaagtcgcaccaactgatcaaagaccatgacgtgaagtgggtagacctgcgcttcaccgataccaagggcaagcagcaacacgtcaccatgccggctcgcgacgcgctggacgatgagttcttcgaagccggcaagatgttcgacggctcctccatcgccggctggaaaggcatcgaagcctccgacatgatcctgatgccggacgacagcaccgccgtcctcgatccgttcaccgaagagccgaccctgatcctggtctgcgacatcatcgagccgagcaccatgcaaggctacgagcgcgacccgcgcaacatcgccaagcgcgccgaggagtacctgaagtccaccggcatcggcgacaccgtgttcgtcggcccggagccggagttcttcatcttcgacgaagtgaagttcaagtccgacatctccggctcgatgttcaagatcttctccgagcaggcttcctggaacaccgacgccgacatcgagtccggcaacaagggccatcgcccgggcgtgaagggcggctacttcccggtaccgccggtcgaccacgaccatgaaatccgcaccgccatgtgcaacgccctggaagaaatgggcctggtggtcgaagtccaccaccacgaagtggcaaccgccggccagaacgagatcggcgtgaagttcaacaccctggtcgccaaggccgacgaagtgcagaccctgaagtactgcgtgcacaacgtcgccgacgcctacggcaagaccgtgaccttcatgccgaagccgctgtacggcgacaacggttcgggcatgcacgtgcacatgtcgatctccaaggacggcaagaacaccttcgccggcgaaggctatgccggcctgtccgagaccgccctgtacttcatcggcggcatcatcaagcacggcaaggccctgaacggcttcaccaacccctcgaccaactcctacaagcgcctggtcccgggcttcgaagctccggtgatgctggcctactcggcgcgcaaccgttccgcctcgatccgtatcccctacgtatccagcccgaaggcccgccgtatcgaagcgcgcttcccggacccggcagccaacccctacctggccttcgccgcgctgctgatggccggcctggacggcatccagaacaagatccaccccggcgatgccgccgacaagaacctgtacgacctgccgccggaagaggcgaaggaaatcccgcaggtttgcggcagcctgaaagaggcgctggaagaactcgacaagggccgcgcgttcctgaccaagggcggcgtgttcaccgacgagttcatcgatgcctacatcgagctgaagagcgaagaagagatcaaggtgcgcaccttcgtgcacccgctggaatacgacctgtactacagcgtctga

SEQ ID NO: 322130 - DNA, 1455 bp, Pseudomonas aeruginosa
atgaaactcatcgtcaagaccttccaggaaatcaccatcaagagccggccggtgcgcaagcgcttcatccggcagttggcgaagaacatccgcgcggtgctgcgcgacctggacccggagctgaaggtcgagggcgagtgggacaacctggaggtagagaccgccgtggtcgacgccaaggccaggcgcgagatgatcgagcgcctgacctgcaccccgggcatcggtcatttcctcgaggtccacgagtatccgctgggcgatttcgacgacatcctcgccaagtgcaaggcgcatttcggcgaccagttggccggcaagaccttcgccgtgcgctgcaagcgcgccggcaagcacgcgttcacctcgatggaggtggagcgttacgtcggcagcggcctgcgccgcgaatgcggggctgccgggatcgacctgaagcagccggaagtcgaggtgcggatggaaatccgcctcgaccgcctgttcgtcatccatcgccagcatccgggcctgggcggctatccgctgggcgcgctggaacaggtgctggtgctgatgtccggcggcttcgactcgaccgtggcggcctaccagatgatgcgccgcgggatgatcagccacttcgtgttcttcaacctcggcgggcgcgcccacgaactgggggtgatggaagtcgcccactacctgtgggagaagtacggccgctcgcagcgcgtgctgttcgtcagcgtgccgttcgaggaagtggtcggcgagatcctcaccaaggtcgacgacagctatatgggcgtgaccctcaagcgcatgatgctgcgcgccgccagccgcgtggccgagcgcctggagctggacgcgctggtgaccggcgaggcgatctcccaggtgtccagccagaccctgccgaacctctcggtgatcgaccgggttaccgacaccctggtgctgcgcccgctgatcgtcagccacaagcaggacatcatcgacaccgcccggcagatcggcaccgccgagttcgcccggcacatgccggaatactgcggggtgatctcggtgaacccgaccacccaggccaagccctaccgcgtcgagcacgaagagtcgaaattcgacatggcggtgctcgagcgcgccctggagcgcgccacccagcgcaccgtcgaccgggtgatcgacgaactcggccaggacctgcaggtggaagaggtcggcgaggtgctgcccggtcagattgtcatcgatatccgccatcctgatgcccaggaagacgaacccctggccctggaaggcgtcgaagtccaggcgctgccgttctacgcgatcaacagccgcttcaaggaactggacgccaaccgccagtacctcctgtattgcgacaaaggggtgatgagccgcctgcatgcccatcacctgctcaacgaggggcacaccaatgtgcgtgtttatcgtccggcttaa

SEQ ID NO: 322131 - DNA, 1818 bp, Pseudomonas aeruginosa
gtgatcgaaaatctgcgcaacatcgccatcatcgcccacgtcgaccatggcaagaccaccctggtggacaagctgctgaagctgtccggcaccctcgaccgcaaagaagcggaaagcgagcgggtgatggactccaacgaccaggaaaaagagcgtggcatcaccatcctggcgaagaacaccgcgatcaagtggaacggctacaacatcaacatcgtcgacacccccggtcacgccgacttcggcggcgaggtggagcgcgtgatgtcgatggtcgactccgtgctgctggtggtcgacgcccaggacggccccatgccgcagacccgcttcgtgacccagaaggccttcaaggccggcctgcgtccgatcgtggtggtgaacaagatcgaccgcccgggcgcgcgtccggactgggtcatcgaccagatcttcgacctgttcgacaacctcggcgccaccgacgagcaactcgacttcccgatcgtctacgccagcgccctgaacggcatcgccggcctcgaccacgagaagatggacgacaacatggacgcgctgttccaggcgatcatcgaccacgtcccggctccggtggtggacaccgagggtccgttccagatgcagatctcgcagctggactacaacagcttcctcggcgtgatcggtatcggccgcatcacccgcggcaaggtcaagtccaacaccccggtggtggccatcagcgacgacggcagcaagcgcaacggccgcatcctgaagatcatgggccaccacggcctgcagcgcgtcgaggtggccgaggcggaagccggcgacatcgtctgcgtcagcggcatggaggagctgttcatctccgataccctgtgcgacccgcagaacgtcgaggcgctgccgccgttgaccgtcgaccagccgaccgtgagcatgaccttccaggtcaacgattcgccgttcgccggccgcgaaggcaagttcgtcaccagccgcaacatcaaggagcgcctggagaaggaactgctgcataacgtggcgctgcgcgtcgagccgggcgacagcccggagaagttcaaggtttccggccgtggcgaactgcacctgtcggtactgatcgagaccatgcgccgcgaaggcttcgagctggccgtgggccgcccggaagtggtgatcatcgagaaggacggcgagaagcaggagccctacgagaacgtcaccatcgacatcgaggagcagcaccagggctcggtgatggagcagatgggcctgcgcaagggcgacctgagcaacatgattcccgacggcaagggccgcgtgcgcctggagtacaccattccggcgcgcggcctgatcggcttccgcaacaacttcctgaccctgacctcgggcaccggcatcctgacctcgaccttcagccactacggtccgatcaaggccggcgaagtcagcaaccgccagaacggcgtactggtctccatggccaccggcaccgccctgacctactcgctggagaccctgcagagccgcggcaagctgttcctcggcccgggcgacgaaatctacgaaggccagttggccggcatcaacagccgtgacaacgatctggtgatcaacccgaccaagggcaagaagctcgacaacatgcgcgcttccggcaaggacgaagtcatcgccctggttccgccgatccgcttcaccctcgagcaggcgctggagttcatcgccgacgacgagctggtggaagtgacgccgaagtcgatccgcctgcgcaagaagatgctcaacgagaacgaccgcaagcgctacgagcgcagcaaggtctaa

SEQ ID NO: 322132 - DNA, 426 bp, Pseudomonas aeruginosa
atgcggcaactggacataggcgaggtcgcgcgacgatccggggtaccggcctcgaccctgcgctactacgaggaaaagggactgatcgcctccagcggccggcacggcctgcgccggctgttcgatgcaggcgtgctggagcggctggcgctgatcgggctgggccgcgccgccgggttgtcgctggacgagattgccggcatgggcgcagccgacggcgcgctgcggatcgaccgcgcggcgctggcggccaaggccgacgaactggaccggacgatccgccgcctcgccgccatgcgcgacggcctgcggcatgccgcggcctgtccggcgcgcgagcacatggactgcccgacgttccgccgcttgctgcgggccgctgccgcgggggccatcaagccacgccggaaagcgcccggcgcatag

SEQ ID NO: 322133 - DNA, 585 bp, Pseudomonas aeruginosa
atgtgggacgaacgctatgccgccgaagagtatgtctacggaaccgaacccaacgctttcctgaaggagcatgcgcagcggctagccgggccggtgctgagcgtcgccgagggcgaggggcgcaacgcggtgttcctcgcttcgctggggctggaggtgcttggcgtggacggctccaccgtcggcctggccaaggcgcgccggctggccgaggcgaaaggcgtgtcgatcgacaccctggtggtcgacctggcggactacgaaccgccggcagcggcgttcggcgcggtggtgtcgatcttcgcgcacctgcccagtcgcgtgcgcggcagactcaaccgcctgctggagcgttcgctgcgaccgggcggtctcttcctgctggaggcctatcggccggaacagctcggccgcggcaccggcggcccggcggacgtcgacatgctggtgagccgcgcggcgctggaggctgagctgccggagtgcgaagtgctgctggcgcgggaaatcgagcgcgaggtggtcgagggccgtttccacaccggcgcggcctgcgtggtccagttcatcgccaggaagaggtag

SEQ ID NO: 322134 - DNA, 3606 bp, Pseudomonas aeruginosa
atgcaatggattttcatgctggtgggcctgatcctcggcggcttcgccggggaatcgctggtcggcgccctcctcggcggcctttccggcctggccctgggacaggccgtctcgctgcagaacctggcgcaacagaacgagcgcctgcgcaagcagatgagcgaattcgccgaacgcttcgagcgcggcaccgaggtcatccaccagcgcttgctgcgcgtggagcgccaggcgcaggaccttcccgaaagcgttcccgagccggccgccggcatcgaccagccgctcgcagacacgcctcccgctcctcccgccgaggttgccccgccgctggactgggacatcgagctaccggccgtcgaggctgcgccgcctccgcctcgtccccccgaacccgtccagcccatcgagcgtcagccggcgttccagcctgacaccctgccagcgccgcgccgtgccgcccctccagcgcctccacgcgaaccctcgctggtcgagcgtggcttcgccgcggccaagggctggctgttcggcggcaacacggtattgcgcatcggcgtggtgctgctgttcatcggcctggccttcctcctgcgctatgcctcggaacgggtggcggtgccggtggagtaccgctacgccggggtggcgctggcagcgatggcgctgctcggcgtcggctggtggttgcgcgagcggcgcgccgcctacggcctgatcctgcaaggcaccggtatcgcggtgctgtacctgaccatcttcgccgccatgcgcctgcatccgctgatctctcccggcgcggcgctggccctgctggtggtggtgacgatctgctcggcgatcctcgccgtgctgcagaacgccatgggcctggcggtggtggcggcgctcggcggcttcgccgcgccgatcctgacctccaccggcagcggcaaccatgtagcgctgttcagctacttcgccctgctcaacgccggcatcttcgccatcgcctggttccgcgcctggcggccgctcaacctggtcggcttcgtcggcaccttcggcatcggcttcgcctggggactgcgctcctatacaccggagctgttcgccagcaccgagccgttcctggccctgttcttcctgatgtacgtcgggatcggcctgctcttcgcccgccgcaagctgctggaggccgcgcaggcgcctgccgagcgcggcgaactgctgcgctggtcggcgcgacaggccgactacatcgacgccaccgtgctgttcggcccgccactggtggggttcggcctgcaatgcgcggtgatcggccacatcgacttcggcatggccttcagcgccctggccctgggcctcttctacatggtcctggcgcgggtgctgcgcggccatgcttcggccggacgcaccagcctgctggtggaaatctgcctggcgctgggggtggtcttcggcaccctggccattccgctcggcctggacgcgcgctggacctcggccgcctgggccgtcgagggcgccggcatctactggctcggcctgcaccagcaacgccgcctggcgcggctcttcgccctgctgttgcagggcggtgcggcgttggcctacctgaatggcgtgcgcccgggtgagacgacgttgctggagggttcgccactgggcgcgctgatgctcggtgcagcggcgctgttcagcttctggcagctgcgtcgcgcgccggcgaaagcgctggccgactgggagccggcctgccggcctttgctggcggccgccggcctggccttcctctacctggtcgcaccgctctgcctggccgtcgacggcaccgccatcgcctgggccgtggccggcctggcgagcttgttcgccggcttgcgcctgggctcgcgtaccttcctgttctgcgccttcgccgtgcaactgctgggcggtgcgctgttcctcctgcatttgcagggcggcgatggccagggtggggtattcgactcgggctggcgtggcttgatgaccgcctcgctgattggcctggcgctgatcggcggcatgctgctggcggcgcgcgacccgctggtgaaggacgacagtcggctgctcatgggcttgagcctggtgctgctggccggtctggcgttcgtcaacctggcagtgctgttcgtcctgccttggcgcagcgccagcgcggtatgggccggtagcgggctgctgatcatctggctgagcctggtgctgcgccagcgcctgagcttctacttcggcctcgccttgcaggtagtgggcggcctggcgttcctcctcgccgggccgtcgctgttcggctcgctgagcggcgaaggcctgcggcccctggcccattccgggttctggacgccggcagtgctggccctggcggcgctggtcggcgcctggcggctgcgccgcgccggcgagcgcgagcgggcgctgggtatcggtaccctcggcctggccgagctgtcgcacttgctgctgctctggggagccggctggtgggcgctgaccgcgctgtgcgaaaccgtccgcttcgtgccttatggcctgcgcgagcatgcgttgctgctggtggccgcggcgacagtggcgtcgtggatgctgctggcgctgcgcgagcgctggcgcgaactggccctgctgtgcctggcgctggtcccggtggcgctgttggccctggccagtgcctggcgtttcgattaccagccgttcggcgaattcggctggctggcctggccgctgctgttcgccacgcacctgctgtcgctgcgacgccttgccccgttgctgccggcgaaggccctgagcgttgcccatgtgctcggttgctggctgttgctaggggtgctggcgctggagctgcgctacctgttcgccctgctcgccgaacagtacaacgcctggcgttggttgggctgggcgttggtcccgagcgcctacctgctgctggtggctggcgggcggagcctgccctggccgctgcgcgacttcccgcgggagtatcggctgctcgccgctgcgccggtggcgctgttgctgctcggctggttctggagcgccaacctgctcagcgacggcgctgccgagccgctgccttacctgccgctggccaacccgctggaactggggctgctgatcgtgctgttcgccctctaccgttggagcgacgccagcctggcctcgctcgtcgatggcaatgccagcgcgcgcctggggcgccaggcgttggccggcgcctcgctgttcgccctgctgaccctggcggtgtgccgcgccgcgcaccacctggccggcgtaccgttccaggccgaggcgctgaccgcgtcgatgctggtgcaggcggggctttcgctggtctggacgctctgtgcgctgggcctgaccatcgccggtacccgtctcggccggcgcgacctgtggatggtcggcgcggcgctggtcggcgtcgtggtggtcaagctgttcttcgtcgagctgggcaacagtggcagcctggagcgaatcatctccttcatcggggtcggcgtcctgttgctggtcgtcggctacttctcacccttgcctccgcgtcgcgccgaggtcgcatcggaggccgagcagccatga

SEQ ID NO: 322135 - DNA, 1395 bp, Pseudomonas aeruginosa
atgacgcgctccttttcgttcagaaccgccggcctgctcctgctgggcgcctgcctgtccctgccgctgtcggcgaaggagtctgccgaaggtttcagccgccaggtggcgctgtcgctgcagggcgaaggtccctggtatcgcctgagcatcccgatgagcgtgcagttgtcggctgcccatgccgacctgcgcgacctgcgggtcttcgatgccgaaggcgaggccttgccctacgccctggtggccggcagcgagcgccaggccagcacgccgcatgaggccgaggtgcggctgttcccgttgcgaggcacgtccgccgccgatgcgacgcaaccgaacctgcgggtgcagcgcaacaccagcggcaccatagtcgaggtgctgccggaaaacgccgggccggctgccgagactttgcgcggctggctgatcgacgcgagcgcggtgacgtttcccctggagcgcctgcggctggactggagcagcccggaggagggcttccagcgcttctccgtggaagccagcgacgacctcgagcattggcaggcctggggtgacggacagatcgcccgcttgaccttcaacggcgaacgcatcgacgtcagcgaggtcaagcttcccggccgccaggcccgctacctgcgtctggcctggccggccggggcaaccgcggcagacctccaaggcgcccgcctgcaaggcagcacgcggagcaccgagccggcgccgatgatctggtccgagccgctggccgggcgccaggcgggggacggcgagtaccgctggcagttgccgctggcgttgccgttgcagcgggtgcgggtgtccctggagcaggcgctgacccacaccatcgtcccggtggaactgtccggccgtgatcgtacggagaacgcttcgccgcgccgggaggccgcctggagcagcctggcacgcggggttctctaccggctgccgatcgacggccgcaacgtacagcagaacgagctggaactgccgggctgggcggtgcgcgagctgcgtctgcaggtggaccaacgaggtaccggcctgggcccggaggtcccgtccctgagtgtcggcctgccggccagcgaactggtgttcctggtgcgcggcagcccgccgtaccggctggcgttcggcaagcccggcgcgcagtcggcggcgctgccgctcggcgtactgattcccggctataccgagagcaagcgcgccaccctgggtagcgccagcctgggcgaaccgctggaggtggccatggcggtcgcggcgccggcaccgggtagcgactggaagaagatcggcctgtgggcggtacttctgctgggggtcgctctgctggtaataatggcaatgagcctgctgcgttcctcgccgaacaagccatga

SEQ ID NO: 322136 - DNA, 1941 bp, Pseudomonas aeruginosa
atgatcagaatggcgctcaagccactggtagcggcctgcctgctggcttcgctgtccaccgccccgcaggctgctccttcgccctattcgacgctggtggtgttcggcgacagcctcagcgatgccgggcagttccccgatcctgccggccccgccggaagcacctcgcgtttcaccaaccgggtcggcccgacctaccagaacggcagcggcgagatcttcggaccgaccgcgcccatgctgctcggcaatcagctcggcatcgccccgggcgacctggctgcctcgacctcgccggtcaacgcccagcagggcatcgccgacggcaacaactgggcggtgggcggctaccggaccgaccagatctacgactcgatcaccgcggccaacggctcgctgatcgagcgcgacaataccctcctgcgcagccgcgatggctacctggtggaccgtgcccgccagggcctgggtgccgatccgaacgcgttgtactacatcaccggcggcggcaacgacttcctccaggggcgcatcctcaacgacgtccaggcacaacaggccgccggtcgcctggtggatagcgtgcaggccctgcagcaggccggcgcgcgctacatcgtggtctggctgttgcccgacctgggcctgaccccggctaccttcggtggtcccttgcagcctttcgccagccaactcagcggcacgttcaacgccgagctgaccgcccagttgagccaggccggcgccaacgtcattccgttgaacatcccgctgctgctcaaggaaggcatggccaacccggcttccttcggcctggccgccgaccagaacctgatcggcacctgtttcagcggcaacggctgcaccatgaacccgacctacgggatcaacggcagcacgcccgacccgagcaaactgctgttcaatgacagcgtgcacccgaccatcaccggccagcgcctgatcgccgactacacctattcgctgctgtcggcgccctgggagttgaccctgctgccggaaatggcccacggcaccctgcgtgcctaccaggacgaactgcgcagccagtggcaggcggactgggagaactggcagaacgtcggccagtggcgcggcttcgtcggcggcggtggccagcgcctggacttcgactcccaggacagcgccaccagcggcgacggcaatggctacaacctgacccttggcggcagctaccgcatcgacgaggcctggcgcgccggggtcgccgccggtttctaccggcagaagctggaagccggcgccaaggattccgactaccggatgaacagctacatggccagcgccttcgtgcagtaccaggaaaaccgctggtgggccgacgcggcgttgaccggcggctacctcgactacgacgacctgaagcgcaagttcgccctgggcggcggcgagcgcagcgagaaaggcgacaccaacggccacctgtgggcgttcagcgcgcgcctgggctacgacatcgcccagcaggccgacagtccctggcacctgtcgccgttcgtcagcgccgactatgcacgggtcgaggtcgacggctattccgggaagggcgccagcgccaccgcgctcgactacgacgaccagaagcgcagctcgaagcgcctgggcgccggcctgcaaggcaagtacgcgttcggcagcgatacccagctgttcgccgagtacgcccacgaacgcgagtacgaggacgacacccaggacctgaccatgtccctcaacagcctgccgggcaatcgcttcaccctcgaaggctacaccccgcaggaccacctcaaccgcgtctccctcggcttcagccagaagctggcaccggagctgtcgctgcgcggcggctacaactggcgcaagggcgaggacgatacccagcagagcgtcagcctggcgctgagcctggacttctga

SEQ ID NO: 322137 - DNA, 531 bp, Pseudomonas aeruginosa
atgagtttcaacaccgaagtacagcccggcatctgcatggagccggacgccatcacccaggaatacgtgttcaaccacaccatgttgcgggtcaaggatccgaagcgctcgctcgacttctactcgcgggtgctcggcatgcgcctgctgcgtcgcctggatttcgaggaaggccgcttctccctgtatttcctcgccatgacccgtggcgaagaagtgcctgatgcggtcgacgagcgccagcgatataccttcgggcgccagtcggtcctcgagctgacccacaactggggcagcgagagcgacgacagccagtaccacaacggcaaccaggacccgcgcgggttcggccatatctgtttctcggtgcccgacctggtggcggcttgcgagcgtttcgaaacgctcggggtgaacttcgtcaagccgctggaccgaggcatgaagaacgtggccttcatcagcgatcccgacggctactgggtggaaatcgtccaggccagcctgaacggcgcgatggggcgcggctga

SEQ ID NO: 322138 - DNA, 1011 bp, Pseudomonas aeruginosa
atgtcccgcgttaccctgagccgctatctgatcgagcagacccgcagccacaacaccccggccgacctgcgcttcctcatcgaggtcgtggcgcgtgcctgcaaggaaatcagccatgcggtgtccaagggcgcgctgggcggcgtgctcggcagcatgggcaccgagaacgtgcagggcgaggtgcagaagaagctggacgtgatgtccaacgagatcctgctggaagccaacgaatgggccggcaacctggccggcatggcctccgaggagatggaccacccctaccagattccggggcgctatccgaaaggcgcctacctgttggtcttcgacccgctggacggctccagcaacatcgacgtcaacgtctcggtcggcaccatcttctcggtgctgcgctgccccaacgagtacctgaaccagaacgataccctgcgcgaggaagccttcctccagccgggcaccacccaggtcgccgccggctacgccatctacggcccgcagaccatgctgatgctgaccctcggcaatggcgtcaagggcttcaccctggatcgcgagctgggcagcttcgtcctcacccacgacaacatcagcgtgccggaaagcaccgccgagttcgccatcaacatgtccaaccagcgccactgggaagcgccggtgaaacgctacgtggaagaactgctggccggcaaggaaggcccgctgggcaagaactacaacatgcgctggatcgcctcgatggtcgccgacgtccaccgcatcctgacccgtggcggcgtcttcatgtacccgcgcgacgcccgcgagccggagaagcccggcaagctgcgcctgatgtacgaagccaacccgatgtcgttcatcatcgagcaggccggcggcgccgccaccaacggcacccagcgcatcctcgacatcaagccggagaacctgcaccagcgtgtcgcggtgttcctcggctcgaagcaggaagtcgagcgcatcaccggctaccacgcggagtag

SEQ ID NO: 322139 - DNA, 603 bp, Pseudomonas aeruginosa
atgagcgcgccctgggagaccttgctcgactggtggttcggcacctccagcgatgccgccgaggtggttgcccagcgcaacggcctgtggttcggcaagaacgtctgccaggacgccgatgccggcggccgtttcggcgacctggtgaaccaggcgctggacggcggcttgcaggagtggacggccgaggccgatggctggctggcgctgatcctgttgctcgaccagttgccgcggatgatctaccgcgacacgccgcgcgcctacgccggcgacgcccgggcgcaacgggtggtgcgcgagggcctggaaaaaggcttcgaccgccagttgccgccggtgcgccgggtgttcgcctacctggtcctggagcacgccgaggacctgcccagccaggagcgggcggtagcctgcttccgcgacctgcgcgatcaggtcgggggcagcgtgcgcaagcccttcgacgatttctacgactatgccgagcggcatcatgcggtagtcgcccgcttcggtcgctttccccatcgcaacgccattctcggccgcccctccagcgaggaggagacggcgttcctcagggaacccggttcgcgtttctga

SEQ ID NO: 322140 - DNA, 258 bp, Pseudomonas aeruginosa
atggcgtcgttccgtaccctggccgtggtcgctttctgcgtcgtcctggccgcctgcagcaagatcaaccaggaaaactattccaagctcaaggccggcatgagcaaggccgaggtcgaggcgatcctcggcaagcccaccgagtgctccggcgcgctgggcatgtccagttgcacctggggcgacgagaaggctttcatcagcgtgcagtacgcggccgacaaggcgctgctcttctccggccaggggctcaagtga

SEQ ID NO: 322141 - DNA, 570 bp, Pseudomonas aeruginosa
gtgatcggtctgccgatccgggtgctctgcaccctgtggctgggcttgctgctggtcggttgcgcgggctcgccgaagaatccgccggccaccgagcaggtcgacctccagcgctaccagggcacctggtacgaactggcgcgcttgccgatgttcttccagcgcaactgcgcgcaatcggaggcgcattaccgcttgcaggaagaccagagcatccaggtgatcaatcgctgcctgaccctggatggcgactgggagcaggtggaggggcgggcagtcgcccagcagccgggtcgcaccgacaagttgtgggtgcgcttcgacaactggttcgccaatctcttccccaacgtggcgcgcggcgactattgggtgctggcggtggacgacgactaccgtaccgcgctggtgggcaatccgaaccgtgaatacctgtggctgctgtcgcgtaccccgcaggtttcgcagcagacccgcgaacgtctgctggaagaagcgcgcagccgcggttacgcggtggacgagctgatctggcgggtacccgacggccagttgaagcggagccagtga

SEQ ID NO: 322142 - DNA, 1362 bp, Pseudomonas aeruginosa
atgtccgcaattttcgctgaacgtgcgttgctgccggaaggctgggcgcgaaatgtccgtttcgagatttccgcggacggagtcctcgccgggattcgtcccgacgccaacgccgacggcgccgaacgcctcggcggcgccgtgctgccggggatgcccaacctccattcgcacgcgttccagcgcgccatggccgggcttgccgaagtcgccggcaatcccaacgacagtttctggacctggcgcgagctgatgtaccggatggccgctcgactgtcgccggaacagatcgaggtcatcgcctgccagctctacatcgagatgctcaaggccggctacaccgcggtggcggaattccactacgtccatcacgacctcgacggccgctcctacgccgaccccgccgaactttccctgcgcatctcccgcgccgccagcgccgcaggtatcggcctgaccctgctgcccgtgctttacagtcacgcaggcttcggcggccagccggccagcgagggccagcggcgcttcatcaatggcagcgaggcctacctggaactgctccagcgcctgcgcgcgccgctggaggcggcaggccactccctgggcctgtgcttccactccctgcgcgcggtgactccgcagcagatcgccacggtcctcgccgccggccacgacgacctgccggtccacatccatatcgccgaacagcagaaggaagtcgacgactgccaggcctggagcggacgccggccgttgcaatggctgtacgagaacgtcgcggtcgaccagcgctggtgcctggtccatgcgacccacgccgaccccgccgaggtggcggcgatggcgcgtagcggcgcggtggccggcctgtgcctgagcaccgaggccaacctcggcgacggcatcttcccggcgacggacttcctcgcccagggcgggcgcctgggcatcggctcggacagccacgtctcgctcagcgtggtcgaggaactccgctggctggaatacggccagcgcctgcgtgaccggaaacgcaaccggctgtaccgcgacgaccagccgatgatcggccgcacgctctacgacgctgctctggctggcggcgcccaggcccttgggcagccgatcggtagtctcgccgtgggccgtcgcgccgacctgctggtgctcgacggcaacgacccctacctggccagcgccgagggcgacgccctgctcaaccgctggctgttcgccggcggcgaccgccaggtgcgcgacgtgatggtggccggcagatgggtggtgcgcgacggccggcatgcaggggaagagcgcagcgcacgggcattcgtccaagtgctgggggaactgctcgactga

SEQ ID NO: 322143 - DNA, 753 bp, Pseudomonas aeruginosa
gtgacgtcctcttcctccgatcgttccccgctggcctcgcaactcggcgaggtaccggcgccgctctacgcgcgggtcaagcagatgatcgtcagccagatccagtcgggcgcctggccgccgcaccaccgggtgccgtccgagagcgaactggtcagccagctcggcttcagtcgcatgaccatcaatcgcgccctgcgcgaactgaccagcgacggcctgctggtgcgcatgcagggggtaggaaccttcgtcgccgagcccaagggccagtcggcgctgttcgaggtgcacaacatcgccgacgagatcgcggcccgcgggcatcgccatcgttgccaggtgatcaccctcggcgaggaggtcgccggccccgagcgcgccctggcactggacgtgcgcgaaggccagcgggtgttccactcgctgatcgtgcactacgagaacgatatcccggtgcagatcgaggaccgctacgtgaacgccgcggtggcgccggactacctcaagcaggatttcacccggcaaacgccctatgcctacctgacccaggtggcgccgctcaccgagggcgagcatgtggtcgaggcgatcctcgccgagccggccgagtgcaagctgttgcagatcgaacgcggcgagccgtgcctgctgatccgccgccgcacctggtccgggcgtgtcgcggtgaccgccgcgcggctgctgcacccgggttcccgccaccgtctggaaggacgtttcagctcatga

SEQ ID NO: 322144 - DNA, 591 bp, Pseudomonas aeruginosa
atgagcgaactccgcatcctgcgtgccgtcgactacccgagaatgccgtggaagaacggcgccggctccaccgaggagatcgcccgcgacggcggcgacggcctggacggctttggctggcgcctgtcgatcgccgatgtcggcgagtccggcggcttctcccgcttcgccggttaccagcggatcatcagcgtgctggagggcggcggcatgcgcctgcgggtggatggcgcggaatccgcgccgctacgcgcccggcaggccttcgccttttccggcgacagcgaggtgcactgcaccctgctcgatggagctatccgcgacttcaacctgatctatgcgccccggcgccatcgcgcgcgcctgcaatggctgcgggtcgagggcgagctggactggcacggcacggcgagcacgctgctgctgttcgcccagcaggacggggtagcgatttccttgcaagggcaacctcgcgggcaactggctgcccacgactgcctgtgcgccgaggggctgcagggcttgcagcattggcgcctgacggcccacgagccggcgtgggtctgtgcggtggaactcgattcgctgtga

SEQ ID NO: 322145 - DNA, 1023 bp, Pseudomonas aeruginosa
atgcccccgcttcgccagatcctcgccgtcctcgccctgggcgccagcctcgccagccagaccgccgtcgcggcggaatgcccgtacccgggcaaagtggtgttcgccgggctgaactgggaaagcggcatgttcaccaccgacctgttgcgctacgtactggaaaaaggctacggctgcgagaccgacgcgctgccgggcaataccgtgaccatggaaaacgccctgcgccagaacgatatccaggtcaccggggagcaatgggccgggcgtagcccggtgtggcgcgcggcggaggaggcgggcgaggtgttctccgtcggcgagacggtgaagggcgccaccgagggctggtgggtgccggagtacctggtcaagggcgacccgcaacgaggcatcgaggcgaaggcgccggagttgaggtcggtcgccgacctgccgcgctacaaggcgctgttccgcgatcccgaggagcccgccaaggggcgtttctacaactgcccgaccggctggacctgcgagatcgtcaacagccagaagctcaaggcctacaggttgcaggacagctacacgaacttccgcaccggcaccggcccggcgctggatgcggcgatcagtgcggccttccggcgcggcgagccggtgcttttctactattggtcgccgactccgttgatgggccgtttcaagctggtgcaactggaagagccgccgttcagcgagaaggcctgggccaccctgtccgatccgaagaaccccgatcccatcggttcccgctcgttgccggcgaagatcaccattggcgtttcccgcgatttccatgacaaggcgccggcgttgatcgagctgttccgcaaggtcgagatccccttgccgctgttcaacgagctgctcgccgacatggcgcagaatcatcgcgaggtcggcgaggtgcgtgcgcagtttcttcgccagcatcgcgaaatctggagccactgggtgccggccgaagtcgccgcgcgcctcgatacctccctgaagtaa

SEQ ID NO: 322146 - DNA, 939 bp, Pseudomonas aeruginosa
atggcgcactacctgagcgggcgtcagcgcaccctggtgcggcggctccaggataccttccaggcgcgcagcgaatggccgacctggctgctgatcgcctgcctgtacggcggttgggcactgctcgccagccagtatgagcgctggggttggccggtactggcgggactggtgccgttcgcctccctctacatgtcgttgcagcatgagctgatccatggccacccgacccgctggccgaggttcaacgccatgctcggctacctgccactgaccgtctggtatccctatccgctgtaccgtgacagccacttgcggcaccacctcgacgagcaactgacctacccggggctggaccccgagagtcgctacgtcagtctgtccgagtggccgcgcctgggctcctggcggcggcgctggctctgcctggacaagaccctgctcggtcgcgccaccctcggcccgctgctggccctggcggcgatggcgcgcctggaaggttcgcggttgcgccggggagagggtgccgcctggcgcctgtgggccctgcatgccgtgctgctgggcgggttgctggccgggctttggcgctgggcgggcatctcgccctggctgtacctgccggcggtggcctatccggccctcggcctgagcatgctgcgctctttctacgagcaccgtccggcccgcgagccggcgcagcgcagcgtgctggtcgaggcggggtggccgtggcggctgctgttcctcaacaacaacctgcatctggtccaccacgatctgccgggcctgccctggtacctgctgccgcgcgtgtatagcgcaagccgccgtgcctaccggcgacgcagtggcgatttccacctgcccggctatggtcgtctatggcggcgccacggttggcggccggtggatgcgccggtgcatcccgagcattga

SEQ ID NO: 322147 - DNA, 798 bp, Pseudomonas aeruginosa
atgatcgataccccggtggtggcggcgctggacatgtatgtcgagccggactgcgtcaggcaggccggcgcaaccttcatcggcgaggtctgccggcgcctgggcgtgcgccgttacgcgtcggccgccaccgatctggcggtgcagtggcgacagcctaacctgttgttcgcgcagacctgcggctatccgctgatgacccagttgcgcggccaggtggcggtgctcgcggtgcccagctacgacttgcccgattgtgctcccggcgagcattgcagcctgttcgtcgccgccgaaggacaggcgcgccagcgcctcggcgacttccgcaatacccgcctggcgctcaacgaccacgactccaacagcggcatgaacctgctgcgccatgcgctggcgccgctggggcgagactcggcgttcttcgccgaggtgcacatcagcggcggccacctgcgcagcctggcgatggtggccgcgggtgaggtcgagctgacctcggtggatgcagtgaccttcggctacctgcaacgccacgcaccggagcgcctggacggcctgcgcgtgctcgggcgcagcgcgccgagcccggccttgccgctgatcacctcgctgcactggagtgcggcgcaacgccgcgagctgttcgaagcgctgaacctgacgctgatcgagtgcccgcacctggccgcgacactggcgctgaaaagcttcctcccggccggcgaggagcattaccggattctcctcgactacgagcgtcaggcgcagggctggggttacccgcaattgcgctga

SEQ ID NO: 322148 - DNA, 1680 bp, Pseudomonas aeruginosa
gtgaccaccccgagcaaattccgcgatattgaaatccgcgccccgcgcggcactacgctgaccgccaagagctggctgaccgaagcgccgctgcgcatgctgatgaacaacctcgacccggaggtcgcggagaaccccagggaactggtggtttacggcggcatcggccgtgccgcgcgcaactgggagtgctacgacaggatcgtcgagaccctcaagcaactgaacgacgacgagaccctgctggtacagtccggcaagccggtcggcgtgttcaagacccacgccaacgcgccgcgggtgctgatcgccaactccaacctggtgccgcactgggcgacctgggaacacttcaacgaactggacgccaagggcctggcgatgtacggccagatgaccgccggttcgtggatctacatcggcagccagggcatcgtccagggcacctacgaaaccttcgtcgaggctggccgccagcattacgacggcaatctcaagggtcgctgggtgcttaccgccggccttggcggcatgggcggcgcccagccgctggcggcgaccctggccggcgcctgttcgctgaacatcgagtgccagcagagccgcatcgacttccgcctgcgcagtcgctacgtcgacgagcaggccaaggacctggacgacgccctggcgcggatccagcgctacaccgccgaaggcaaggccatctccatcgccctgctgggcaatgccgccgagatccttccggaactggttcgccgcggcgtacgcccggacatggtcaccgaccagaccagcgcccacgatccactcaacggctacctgccggccggctggagctgggaagagtaccgcgaccgcgcgcagaccgacccggccgccgtggtcaaggccgccaagcagtccatggcggtacacgtgcgggccatgctggcgttccagcagcagggcgtgccgaccttcgactatggcaacaacatccgccagatggccaaggaagagggggtggccaatgccttcgatttccccggcttcgtcccggcctacatccgcccgctgttctgtcgcggcatcggtccgttccgctgggccgcgctgtcgggcgacccgcaggacatctacaagaccgacgccaaggtcaagcaactgatccccgacgatgcccacctgcaccgttggctggacatggcccgcgagcgcatcagcttccagggcctgccggcgcgcatctgctgggttggcctggggctgcgcgccaagctcggcctggccttcaacgagatggtgcgcagcggcgagctgtccgcgccgatcgtcatcggccgcgaccacctcgactccggctcggtggccagccccaaccgcgagaccgaggccatgcaggacggctccgacgcggtgtccgactggccgctgctgaatgccctgctgaataccgccagcggcgccacctgggtctcgctgcaccacggcggcggcgtaggcatgggcttctcccagcactccgggatggtgatcgtctgcgacggtagcgacgaggccgccgaacgcatcgcccgcgtgctgaccaacgacccggggaccggggtgatgcggcacgccgacgccggctaccaggtcgccatcgattgcgcgaaggagcagggcctgaaccttccgatgatcaccgcccagcgctga

SEQ ID NO: 322149 - DNA, 1443 bp, Pseudomonas aeruginosa
atgacccagggcagcgacagcaagccactgatcgaacggcgctcgatcgactacatcccggcgaacgagcgccacggccgcctctacagccagttcaccctctggctgggggccaacctgcagatcaccgccatcgtcaccggcgccctcgccgtggtcctcggcggcgacgtgttctggtcgctggtcggcctgctcatcggccagctcctcggcggcgcggtgatggccctgcacgccgcgcaggggccgcgcctggggctgccgcagatgatttccagccgggtgcagttcggcgtctacggcgcctgcatcccgatcgccctggtgtgcctgatgtacctgggcttcaccgccaccggcacggtgctttccggccaggccatcggccagctcaccgggctcagcgacagcgccgggatcttcatcttcgccgccttcatcgtcctggtgacggtgctcggctatcgcgtcatccacatcatcgggcggatcgccagcgtcctcggcatcatcgccttcgcctacctgttcagccgcctgatgctgctcagcgacatcggcgacctgctcgccatccgccatttcagctgggcctcgttcctcctcgcggtgtcgctggcggcgtcctggcagatcgccttcggcccctacgtggccgactattcacgctacctgccggcgtccacctcgtcgtggaagaccttcctcgccgtcggcctcggctcggtgctcggcgcccaggcctcgatggtcctcggggtgttctccgcagccctggccaacggccagttcgccggccgcgaggtggcctacatcgtcggcctgggcagcagcgggaccgtcgccgcgctgctctacttcagcatcgccttcggcaaggtgaccatttccacgctgaactcctacggcagcttcatgtgcatcgcgaccatcatcagcagcgtacgcggccaactggagatcaaccgcgtgcaacgcctgttcttcgtcctcgcgatcgtcggcgcctcgacgctcatcgcgctgctcggccagcactcgttcctcgctgcgttcaagtccttcatcctgttcctgctgaccttcttcaccccgtggagcgcggtgaacctggtcgactactacttcatcacccgcgagcgctatgacgtgcccgcgctggccgaccccgacggccgctacggtcgctggaacctgccgggaatcgccgtctataccctcggcgtgctggtgcagatgccgttcctggcgaccacgctgtacaccggaccgatggtcgagcacctcggcggcgtggatatctcctggatcatcggcttgctggtgccggcggtcctctactacctggtggcgcggcgcaaggccacgcgccaggccccggcgcgaatgatcctgccggccgatcccggcgccttcgaacgtcccgcgcacggggcctga

SEQ ID NO: 322150 - DNA, 1530 bp, Pseudomonas aeruginosa
atgagtctgcatctgaaacccggccagttgaccctggccgacctgcgccaagcctacctggcccccgtgcgcctgagcctggatcccagcgccgacgcgccgatcgccgccagcgtcgcctgtgtcgagaacatcatcgccgagggccgcaccgcctacggcatcaacaccggcttcggcctgctggcctcgacgcggatttccccggccgacctggagaagctccagcgttccatcgtcctgtcccatgccgccggcgtcggcgaggcgctggacgacgccatggtgcggctggtcatgctgctcaaggtgaacagcctggcgcgcgggttctccggcatccgccgcaaggtgatcgacgcgctgatcgcgctgatcaacgccgaggtctatccgcacatcccgctgaaaggctcggtgggtgcgtccggcgacctggcgccgctggcgcacatgtcgctggtgctgatcggcgaaagccgggcgcgccatcgcggtgagtggctgccggccgccgaagcgctggcggtggccgggctggagccgctgaccctggcggcgaaggaaggcctggccctgctcaatggcacccaggtgtccaccgcctacgcgctgcgcgggttgttcgaggccgaggacctgttcgccgccgccaccgtctgcggcgggctcagcgtcgaggccatgctcggttcgcgggcgccgttcgatgcgcgcatccatgccgcgcgcggccagcgcgggcagatcgacgtggccgcggcctatcgcgacctgctcaccgccagcagcgaggtggcgcgttcccatgagaagtgcgacaaggtccaggacccctattcgctgcgttgccagccgcaggtgatgggcgcctgcctgacccagatgcgccaggccgccgaggtgctggagatcgaagccaacgcggtgtccgacaacccgctggtattcgccgccgagggcgacgtgatctccggcggcaacttccacgccgaaccggtggcgatggccgccgacaacctggccctggcgttggccgagatcggttcgctgtcggaacggcgcatctcgctgatgatggacatgcacatgtcgcagttgccgccgttcctggtggccaacggcggggtcaactccggcttcatgatcgcccaggtcaccgccgccgcgctggccagcgacaacaaggccctggcccacccggccagcgtcgacagcctgccgacctcggccaaccaggaagaccatgtgtcgatggcgccgaacgccggcaaacggctctgggcgatggccgagaacgtccgcgggattctcgccgtggagtggctgggtgcctgccagggcctggacttccgcgagggcctgaagagttctccgaagctggagcaggctcgccgcctgctgcgcgacaaggtgccgtactaccaggaggatcgcttcttcgcccctgacatcgaggcagccagccagttgctcgccagcggttgcctgaacgcgctgctgccggcccggctgttgccgagtctttga

SEQ ID NO: 322151 - DNA, 1404 bp, Pseudomonas aeruginosa
atgacgcacgacacggggcttcggcgcggactgaacgcccgtcatattcgtttcatggcactggggtcggcgatcggcaccggcctgttctacggttccgcatcggccatccagatggccgggccggcggtgctgctggcctacctggtcgccggcgcggcggtgtacatggtgatgcgcgcgctcggcgagatggcggtgcacgagccggtgtccggctcgttcggccattacgccagcagctatctcggccccctggccgggttcgtcaccggctggacctacgctttcgagatgatcatcgtctgcctcgccgatgtcaccgcgttcggtatctacatggggttctggtttcccgacgtgccgcgctggatctgggtactgtccatcgtgctgttcatcggcgggctgaacctctgtcatgtcaaggtcttcggcgagctggagttctggctgtcgctggtcaaggtcggcgccatcgtcgcgatgatcctcgccgggctcggcatcatgttcttcggcttcagcctgggcggcgcggcgacgtccgccaccggcgtgcacaacctgtggcagcacggcggcttcctgcccaacggctgggccgggctggtcgcctcgctgtcggtggtggtattcgccttcggcggcatcgagatcatcggcatcaccgccggcgaggcgcaggacccgcagcgggtgatcccgcgggcgatcaatgcggtgccgctgcgcatcctgctgttctacgtgctgaccctgttcgtgctgatggcgatcttcccctggcagcagatcggcagcaacggcagtcccttcgtgcagatcttcgacggcctggggatcgagtcggccgcggcgatcctcaatgtcgtggtgatcaccgcggcgatctcggcgatcaacagcgacatcttcggcgccggtcgcatgctctacggcatggcccgccagggccaggcgccggtcggcttctcgcgggtgtcgcggcacggcgtgccgtggatgaccgtgctgctgatggcggtggccctgctgctcggcgtggcgctgaattacctgatcccgcagagcgtattcctgttgatcgcttccatcgccaccttcgccaccgtgtgggtctggctgatgatcctcctggcccaggtcggcatgcgccggcgcatggggccgcgccaggtcgccgcgctgaagttcccggtgccgctgtggccattcgcgccggcggcggcgatcgtcttcatgctgttcatcttcgtggtgctcggctatttcccggacacccgcccggccctgtgggtcggggctatctggatcgccttgctggtgatcgcctaccggcgctggggcaggccgaagggcgatgccgcgcatggcgtgcttcaggcccagggagggctgtga

SEQ ID NO: 322152 - DNA, 969 bp, Pseudomonas aeruginosa
atgcgatacaagaagtcgatgttgagtgttctctgtgccctcggcctgctcgccgccgcggcgggcgcccaggcggaaggctggtgcgagtccggcaaggcggtgaagttcgccgggctgaactgggagagcgggaccctgctcaccgaactgatgcagttcgtcctggccaagggctacggctgtaccaccgacagcctgccgggcaactcgatcaccatggagcaggcgctgagcaccaatgacatccaggtcttcgccgaggagtggatcggccgcagcgacgcctggaacaaggctgccgcggccggcaaggtggtcggcgtcggcgaacccatcgtcggcgcggtggagggctggtacgtgccgcgctacgtgatcgagggcgacccgcagcgcaagctcgaggcgaaggcgccgaagctgcgctctatcgccgacctggcgcagtacgccgaggtcttccgcgacccggaagagccgggcaaggggcgcttctacaattgcccggccggctggacctgcgagctggagaacagcgagatgctgaaaagctacggcctggaggagacgttcaccaatttccggccgggcaccggcccggcactggacgcggcggtgctgtcgagctatcggcgcggcgagcctatcctgttctactactggtcgccgacgccgctgatgggccgcgccgacctggtgcgcctggaggaaaggcccggcgtcgacaagcgcatcaggatccaggtcggcctgtcgcggaccttccacgaccaggcgccggagctggtggcggtgctggagaaggtcaacctgccggcggagctgctgaacagcgacctggcgcggatggccaaggaccggatcgatgcggcgcgcctggcgcgcgagttcctcaaggagcaccccgaggtctggcacgcctgggtcgacgaggacgcggcgaagaagatcgaagcggcactctga

SEQ ID NO: 322153 - DNA, 852 bp, Pseudomonas aeruginosa
atgtttcccgaacgcctgacattttccatcgccgactgggtcaacgcttgggtcgacgccctggtgaccaactacggcgacctgttccgcaagatctccgacaccctgctgtgggccatcgtcaacctcgaagggctgctccgcgccacgccctggtggctgttgctggcgatcgtcgcggcgatcgcctggcacgccacccggcgcctgctgccgaccctggtgatcaccggcctgctgttcctggtcggcgccgtcggcctctgggacaagctgatgcagaccctcgcgctgatgctggtggcgaccttcatctcggtgctgatcggcatccccctgggcatcctcgccgcgcgcagcaaccgcctgcgcgcggtgctgatgccgctgctggacatcatgcagaccatgcccagcttcgtgtacctgatcccggtgctgatgttgttcggcctgggcaaggtgccggcgatcttcgccaccgtgatctatgccgcgccgccgctgatccgcctcaccgacctgggcatccgccaggtcgacagcgaggtgatggaggcggtcaacgccttcggcgccaaccgctggcagcagctgttcggcgtgcagttgccgctggccctgccgagcatcatggcggggatcaaccagaccaccatgatggccctgtcgatggtggtgatcgcttcgatgatcggcgcccgcggcctcggcgaagacgtactggtgggcatccagacgctgaacgtgggcaagggcctggaagccggcctggcgatcgtcatcctcgcggtggtgatcgaccgcatcacccaggcctatggccgttcccggcacgagacgagcaaatga

SEQ ID NO: 322154 - DNA, 831 bp, Pseudomonas aeruginosa
atgagcggtgcgcagatgaacaagatcgaagtgaagaacgtgttcaagatcttcggcccgcgcgccgatgccgcgctggcccttatccgccagggacgcagcaagggcgaagtgctggcgcagaccggctgcgtggtcggcgtcaacgacctgtcgctgaccatcggtgctggcgagatcttcgtgatcatgggcctgtcgggttccggcaagtcgaccctggtgcgccatttcaaccgcctgatcgaccccaccagcggcgagatcctggtggatggcgaggacatcctgcgctacgacatggaagccctccggcaattccgccggcgcaagatcagcatggtgttccagagtttcggcctgctgccgcacaagagcgtgctcgacaatgtcgcctacggcctgaaggttcgcggcgaaagccgggcgcagtgccacgagcgggccctgcactggatcgccacggtgggcctgaagggctacgagaagtcctatccgcaccagctttccggcggcatgcgccagcgtgtcggcctggcccgcgcgctggccgccgacaccgagatcattctcatggacgaggccttcagcgccctcgacccgttgatccgcgcggacatgcaggaccagttgctggaactgcagaaaaccctgcacaagaccatcgtcttcatcacccacgacctcgacgaggcggtacgcatcggcaaccgcatcgcgatcctcaaggacggccaactgatccaggtcggcacgccacgggaaatcctccaccagccggccgacgactacgtcgaccgcttcgtccagcggcgggtggcgaacctatga

SEQ ID NO: 322155 - DNA, 1533 bp, Pseudomonas aeruginosa
atgagcgacctaccgagcgtcgtgttcggcgacggcccgctgcgttggcaggaactggtcgcggtggcccggcacggtgcgcgcctggaactgtcggcggcggcctgggcacggatcgacaacgcccgcgccatcgtctgccgtatcgtcgccaacggcgagcgtgcctacggcatcagtaccggcctcggcgcgctgtgcgacgtcctgctggaaggcgagcagctcgccgagctgtcgcgcaacaccttgctcagccatgcctgcggggtcggcgagccgctgcgcgacgaacagacccgggcgatcatctgtgccgccgtcgccaactacagccagggcaagtccgggctcgaccgttcgctggtggaaggactgctggcgctgctcaaccacggcattaccccgcaggtgccggcccagggctcggtgggctacctgacccacatggcgcacgtcggcatcgccctgctcggcatcggcgaggtcagctaccgcggcagcgtcgtgccggccgccgccgcgttggcggcggaaggcctggcgacggtgcgcctgggagccaaggacgggctctgcctggtcaacggcacgccgtgcatgaccggcctcgcctgcctggccctggacgacgcgcagcgcctggcgcagtgggccgacgtgatcggggcgatgagcttcgaggccctgcgcggccaactggcggcgttcgacgccgagatcgttgcgctcaagccgcatcccgggatgcagcgggtcgccgccaatctgcgggccttgctggctggcagccaggtgctggagaacgcccgcggcatccgcacccaggatgccctgagcatccgctcgataccgcagatccatggcgcctgccgtgaccagttggcccatgcggcgcggcagatagagaccgaactcaactcggccaccgacaacccgctgctgctgggtacgccggaggcctaccgggtggtatcccaggccaatccccacggcgaatcggtggcgatggccgccgacctgctggcgatcgccgtggccgagctgggcggggtcgccgagcggcgcctggatcgcctggtcaacccgctggtcagcggcctgccggcgttcctggtgggcaagccgggagtcaactcggggatgatgatcacccagtacgtcgccgcctccctggccggcgagaaccgccagctggcgcagccggcggtggtcgacaacttcgtcacctcggcgctccaggaggaccacctgagcctcggcaccagtgccgcgctcaagcttggcagggccctggagaacctccggcggatcctcgccatcgagtacctgctggccgcccaggccttcgaattcctcgccccgcaacgcttcggccagggcaccgcggcggcctggggcatcctgcgcgagcgcgtgcccgcgtacgacaccgaccgctggctggctcccgacatcgccagcgcggcggccatcctcggcgagcggaagagtctcgcccggctggccgcgagcataggagacctgcaatga

SEQ ID NO: 322156 - DNA, 1209 bp, Pseudomonas aeruginosa
atgaaacgactctggcagcattgccatgccgccaccctcaagggcggcaagtactcgatcgtcgaggacgccgccctggtcaccgacggtccgctgatccactggatcggcccgcgcgccgaactgccgcccgacgactacgccgaacgcatcgacctcgatggcgcctggctgaccccggggttgatcgactgccacacccacgcggtgttcggcggcaaccgcagcggcgaattcgagcagcgcctggagggcgtcagctacgccgagatcgccgccgccggcggcggcatcgccagcaccgtacgcgccacccgcgaggccagcgaggaagaattgctggtcagtgcgcgcaagcgcctggagcccttgctgcgcgacggcgtgacggcgctggagatcaagtccggctacggtctcgacctggccagcgaacgcaagatgctgcgggtcatccgccgcctcggcgaacgcctgccggcgaccgtgcgcagcacctgcctggctgcccatgcgctaccgccggaatacgccgggcgcgccgacgactacatcgagcatatctgctcgacgatgctccccgcgctggccggagagggactggtggacgcggtggacgccttctgcgagcacctggcgttttccccggcgcaggtcgagcgggtattcatcgccgcccgcgagctgggcctgccggtgaagctgcacgccgagcagctatcctcgctgcacggttccagcctggcggcgcgctaccgggctttgtcggccgaccacctggagtacatgaccgaggacgacgcccgcgccatgggcgaggcgggcaccgtcgcggtgctgctgccgggcgccttctacctgctgcgcgagacccagctgccgccgatcgatgccctgcgccggcacggcgtggccatggccattgccagcgatctcaatcccggcacctcgccggcgctgtcgttgcgcctgatgctgaacatggcctgtaccctgttccgcctgaccccggaggaggcgctggccggtgtcaccctgcacgccgcccgggcgctggggctggaagccagccacggcagcctggaggttggcaagctggccgacttcgtcgcctgggacatcgagcgtccggcggagctggcctactggctgggcggcgatctgccgaaacgcgtcattcgccacgccgaggaggtataccgtggatga

SEQ ID NO: 322157 - DNA, 801 bp, Pseudomonas aeruginosa
gtggatgaagtcctgagtttcaagcgcggccgcgtgccgctactgatcagcatgccgcaccccggcacgcgcctgaccccggcggtggacgccggcctggtggaggaggcgcgggcgctgaccgataccgactggcacattccccggctctacgatttcgccgaggaactgggcgccagcaccctggctgcccactattcgcgctatgtggtcgatctcaaccgcccttccgacgacaagccgctgtacagcaccgccactaccggcctgtatccggacaccctgttcgacggccggccgctctaccgcgaaggcatggcgccgtccgccgaggaacgcatgcgctacctggccgaagtgtggacgccctaccaccggaccatcgccgaggaactggcgcggctgaaggccgagttcggctacgcgctgctctgggacgcccactcgatccgttcccacgtgccgcacctgttcgacggccgactgcccgacttcaatctcggcaccaacgccggcgccagttgcgatccagcgctggcggcccgcctggaggcggtctgcgctgccgccgaaggctacagccatgtgctcaacgggcgcttcaagggcggccacatcacccgccactacggccagccggagcagcacgtccatgccgtccagctggagctggcgcagtgcacctacatggacgagcaggccccgttcgcttaccgcgcggacctcgccgaagcgacccgcgcggtcatccgcgaactgctggaaagcctcctcgcctgggggcacgagcgctacgcctga

SEQ ID NO: 322158 - DNA, 2373 bp, Pseudomonas aeruginosa
atgttcgcccccgccaaccagacgcacttcagccttcgcatcgaaaacctccggcacgacttccaggtactcgccttccgcggtcgcgaagccatcagccagccctttcgcttcgacctggatctggtcagcgagcgatccgatctggacctcgacgcgctgctgcaccagccggccttcctgatcctctcgccgagcgggcaaggggtccacggacagctcaccagcatcgcccagggggactccggcaagcgcctgaccggctatcgcgcgaccctggagccgcgcctggcctacctggggctgtgcagcgaccaacgcatcttccagcgcctcagcgtgccggaaatcatcggccgggtgctggagggccacggcattctcgccgacgcctaccgcttccagctgggtccgacgccgtacccggcccgcgaatactgcacgcagtacgacgaaaccgacctggcgttcctcagcaggctctgcgaggaggagggcatccattaccaccatgagttttctgcccagggccatgtgctggtcttcggcgacgaccagacctcttttccgcggctgcaacgccccgtcgcctacgtgcaggacgccgggctggtcgccgaccagccggtggtcaagcgcttcggcgtgcgcttcgacacccgtgccagccgggttacccggcgcgactacgacttcgagcaacccgcgttgcagatgcaggccgcccatggcccgcagctcgtggcgcagcaaccggacctggaggactacgactatcccggccgcttcacccaccgcgagcgcggcaagcacctgagccggcgcgcgctggaacggcatcgcgccgactacctacaggccaggggcgaaagcgacgaaccggcgctgctcagcggacacttcctgacgctgtccgcgcatccccgcggcgaatggaacgatctctggctgcttaccgaggttctccacgaagggcggcagccgcaggtactggaagagtcgatcgacagcgacgtcgcgcagggccagggcgatttccgccagggctatcgcaaccatttcgtcgccactccctggagcgcgcatttccgccccccgctggagcatcccaggccacgcgtgctgggctgccagacagcggtcgtgaccggccccgccggcgagaccatccactgcgaccaatacggccgggtcaaggtgcagttcttctgggatcgcctcggccaggccgacgacaacaccagttgctggttgcgcgtcgcctccaactgggcgggcaaacgctatggcggcgtcgccatcccgcgggtgggcatggaagtcctggtgggtttcctggagggcgatccggatcagccgctggtcaccggctgcctctaccacagcgaaaaccgggtgccctacgagctgccgcagaacaagacccgcagcgttttcaagaccgacagctaccccggcggcggcggtttcaacgaactgcgcatcgaggaccgcaagggccaggaacagatcttcgtccacgcccagcgcgactgggacgagaacatcgagcacgaccagaagatccgcgtcggccatgagcgccacgacacggtcgagggcgatagctacagcgagttcagggccgaggaacagcgcacggtccacgccgaccgcaaggtcgaactgaaggcggtcgaccacctcagcgtcgccgacgcgttgcacctgaggatcggcaccggccagttcgtcgaggcgggtgacgagatccatttcaaggccggcgacaaggtagtgatcgaggcaggcatggagctgaccctaaagggcggtggcagcttcgccaggctcgacccgggcggtgtcaccctcgacggcgcccaggtgatgatcaacagcggcggcagccccggcatcggtagcggcgttcgcgcgctgtcgccgctgcaaccgctcgcggccgacgccgcggcggcgggaggcgccttgttgggagccatcgcccagaagatcggcgaagcgccgcagaaactcctgcgtttcgaactcagtccgttgcccggcgtgccatcggcggccaggcaaccgtatcggctctacgccaacggtgccttcaaggaggagggcatcgccgacgaaggcggcgcaatcagcttcgaaccgctgccgggcgaacgcacctatcgcatcgagaccgccaatggccacgcctacgaagtggaaatggtcgaccagccggacgcactgcaggccgacgatcggctcgcccagcaggggttccgcgactaccgggcggaaatgccccagcacaagccgcgttccgccccggacgcctaccggcgcgacgcctcgcggcccggcgccgccgacaaggatgaccccacgccatga

SEQ ID NO: 322159 - DNA, 2238 bp, Pseudomonas aeruginosa
atgagcgacctgtacaaaccgcagaccctcaagctatacgcgcaacaggccggcagcgtccggctgaccctcgactggttcgccaacaaggctttctacccgccgcgcgcgggtgtgcacatcaagccgctgatcaatggccaggcggccttcgacgcggtgcatgcggcgatggaagcggcccggcacagcatcgacatcatcacctggggcttcgacccggccatgcgcttcaaacgccccgacggaccgcgaatcggcgaattgctgcagacgaagggccgcgaaggagtgcaggcgcgagtgctggtctggagcaaccaactcgccaggctcaaggaaaacaccatccccggggccggcgtcggcggttccggcggcacctgggcgggctcgggcgtcgccagcggcagcgcagtggacaacgaggtgctgcgactggagcagcggcgccagcataacctcaacctcatcgcgcggcagcaggaagccctggagcgctcggaacggctgcaccgcgaaggcaggctgccgagcttcgacccgcggggcgccgcccacgcgcggacgcgcatcgccgagctggaggcggagaacgccgagatccagcgcactctcgacagcagcggggcccagggctacggcggcaagcgcggttccggcggcacccgccaggatccctgggggcagatattcacccgcgactggttcaaggcggtacgcggcggtgggttgcagaacgtcgagttccgtacccgcgacttcgagcagacggccagaccggtgatgaacggcgagcaagtgcgcctcgtcaatgggcgactgcaaagcctgatccacctgctgcgcgccgatggcatcgacgatctgggcatcggccagttgctggtactcacccagttcgccagccatcaccagaagatggttctggtcgactatggcagcccgcaggccatcggcttcgtcatgggtcacaacatgcaccgcaactactgggacaccagcgcccacctgttcgacgaccgcgccgccggtcgcgatcccgggttcgggccctggcaggatatctccatgcaggtccagggcccggtgctggccgacctcagccgcaacttcagcgaggcctgggacctcgagacgccgtggtacaagcgctggttctcgacgccatcgctgaccgccgagcgcgacgccttgccgctgccgaagatcgccacgcccgccagcaacagcgtcgcgcagatttgccgaacccagccgcaggacgacgagcgctcgatcctggagcactatctcaaggccctgggcaatgccaccgactacgtctacatggaaaaccagtacttccgttatgccggcttcgccgagcgcctgcggaagactgcgcaggtgcgcaaggcccggggcgtgcccggcgacctgtacctgttcgtcgtgaccaacacccccgactccagcgacgcctcgaagaccacctacgacatgatgaaaggcctgggccaggagcaactgatgccgcaggtacagcgcgacctggcgcatgacttgcgggaaaagcgggagcagttgaagcaggtcagggaaaacctacatcccgatccctatgtccggcgcggccaggaaaacaacatcgaacggctggagcgcaagatcgaggcgctcgaagagaaaggcgtgacgccggaagtcgagcaacgcctcggcgatctcggcgcgcaggagattcccggactggcgaagaacaccggcgaggacgacaagccctatcaactcgtcgaagtacccggcctcaaggtggtcgtcgccaccctggccaccagcgaccctgcccccggcagcccgccgccagcgcgcctgtccgccgaagccgaggccgccctcggggcgccgccgctgaaggcgcgctacaagcacatctacgtgcactccaagctgctgctggtggatgacctctataccctgctcagctcggccaatatcaatgtccgcagcatgcatggcgacagcgagttggggattgcccagcccaatccggatttggcgagggcgatgcgggaggagttgtggggggcacatgcttatgaagttgccaaaacgatcgaagacaacttcgaactgtggagtcagaagatggatgataactggaaggcccaagtggcagatgagccttttacctcgcacttgctgcgtttctgggatgtcaccacgccctatagtcccaatcttacggtggactga

SEQ ID NO: 322160 - DNA, 819 bp, Pseudomonas aeruginosa
atggccgacagtaagccgttcgtctgtgttaatgagaaagaccatttaccacctctcgatccccaggccgatacctggtatcgggaagcagttgcgctagctaagcctgacaccttgcgtccttggggacgtattgtgaacttatacagtaaggcagttgagcgtgggcattggaaggcgatgcataatttggcgaatctttatcgcacggggtggcccggaggggtagaaaaagatacgcagaaggcactggacctctatcaaaaaatgatcgatctggaggtgccccaagggttctatgatatgggagcaatgatcggcaatcgtgcaggggtcaagaatcctgcaactgacgggcttacttttcttgataaggctgctagcctaggaaatccgccggcactaaccgaactaggtaagctttatatatatgtggccaaaaaaaaggatttggggttggcgtatactcactgtgctgctagccagggctatgcgccggctaattatgagttgggagcgtattataagatagtagagcacaatttcccaaaggcactggtttattatcaggcgtcagtctctcaggggggcaagagcgcggcttttttcctatcacgagtcttcggaagtgagactcctcctgcaagtgcaatgtggtacgcccccgacgaaaagttgcaagaagcgtattattcaatctacaaaaagcttgaggccgaccctgacttacgtttcccccatctgatagaagaccatcctctgcctccacatccaacgcaaggctatgatgccgatcggcctgactggaagccagagtga

SEQ ID NO: 322161 - DNA, 822 bp, Pseudomonas aeruginosa
atggctgttagcaagccttttgtctgcgttaacgaaaaggaccatctaccccctctggacccgcaggccgatgcttggtatcgcgaagcggcgaccctggccaagcccgataccttgcgtccgtggcctcgtatcgtcgatctatacagtaaggcagttgagcgtggtcactggaaggctatgcataacttggcgagcctctatcgtaccggttggccaggcggtgtggagaaggatactcagaaagctctagatctctaccagaagatgatcgatttgaaggttcctcaaggtttctacgatatggcggcaatgatcgggagtcgcgctggcgtcaagaatcctgcgactgatggacttacttttctcgataaggctgcaagcttgggtaatccaccagcattaactgagttaggaaggctatatatatatgttgctggtcaggatgagttggggctgaaatatacgaactgtgctgcaggccagggctatgctcctgccaattacgaactggcgatgtactatcgtttggtggcacataactacccaaaggcggcaggctattaccttcttgctgcaagccaaggaaataatgatgctgccttcttcatgtccggagtttttgataagactagtcccgatgttgacagaatgtggtacgcccccgatgagaggctacacaaactatatgatggtatttacgaccaactttccgctgatcctgatttgcgttttcccaacttgataaaggaccatcctctgcctcctcacccgacccagggctacgacgcagatcggcccgactgcaaatcggggcagtga

SEQ ID NO: 322162 - DNA, 3075 bp, Pseudomonas aeruginosa
atgagcgcctacgccgaactgcattgcctgtccaacttcagcttccagcgcggcgcctccagcgccacggaactcttcgcccgtgcagcgcgcctgggctatcgggccctggcgatcaccgacgaatgcagcctggccggtatcgtacgggcctggcaggcggcgcgggagcaccaggtacaactgatcgtcggcagcgaaatccgcctcgaacaggggcccaagctggtcctcctggcggaggacctggagggctaccagaacctctgtcgcctcatcacccgcggccggcgacaagccgacaagggccactaccggctgctgcgcgaagacctgcaacagccgctcgccggcctgttggcgatctggttgccgaacgaccatggggacgagcaggctgcctggctccgcgaacgcttcccccagcgcctttggctgggcgtcgagttgcatcgcggcgccgatgacgatgcccgcctggacaaactgctcgcgctcgcctcgcatctccggctaccgcccgtggcctgcggcgacgtccacatgcacgcccgcggcaggcgagccctgcaggactgcatgacagcgatccgcaaccatctgccggtcagcgaggccggcgcctatctcttccccaacggggaacgccacctgcgcaccctggaggccctgcaggggatctacccgcaagccctgctggcggaaaccctgaagatcgccgaacgctgccggttcgatctggaacagctgaaataccagtatccacgcgaattggtaccggccggacacgacccggcgtcatggctccgccatctcaccgaacagggcatcgccaggcgctggccgaacggcgcgagcgccaaggtccgcaagcagatcgagagagaactcgagctgatcgccgaactgggctatgaaagctatttcctcaccgtgcaggacatcgtcgccttcgcccggggccgggaaatcctttgccagggccgcggctcggcggccaattcagcagtgtgcttcgccctcggcatcactgagttggacccggaccggaccaacctgctgttcgagcgcttcctttcccgcgagcgcaacgaaccaccggacatcgacgtggatttcgaacacgagcgccgcgaggaggtcatccagtacgttttcacacgctacggacgccagcgcgcggcgctgaccgcggtggtcagcacctaccacggcgccggcgcggtgcgcgacgtagccaaggccctgggtctaccgcccgagcaggtcaacgtcctggccaactgctgcggccgctggagcgaccaggcccccagcgccgaacgcctggaagaggccggcttcgatccgcagagtccgatcctgcgccgggtgctggccctgaccggcgagttgatcggttttccgcgccacctctcgcagcaccccggcggcttcgtcatctccgagcagccattggacaccctggtcccggtggagaatgcgagcatggccgaacgcacggtgatccagtgggacaaggacgatctcgacgcggtcggcctgctcaaggtcgacgtcctcgccctgggcatgctcagcgccctgcgccgcagcttcgacctgatccacgcgctgcgcggcggcaagcggttgagcatcgccagtatcccgagcgaagacccggctacctacgaaatgatcagccgcgccgataccatcggcgtgttccagatcgagtcgcgcgcccagatggccatgctgccacgcctgcgcccgcagaagttctacgacctggtgatccaggtcgccatcgtccgcccagggccgatccagggcgacatggtgcatccttacctgcgccggcgaaacggagaagagccggtggcctatccgtcagccgaactggaggaagtcttcgaacgaaccctgggcgtcccgttgttccaggaacaggtcatggaactggcgatcgtcgccgccgactacacaccgggcgaggcggacgaactgcgtcgctcgatggccgcctggaagcgtcatggcggcctggaacaccaccgcgagcggctgacccgaggcatgctcgccaacggctacgaggccgacttcgcagcgcgcatcttcgagcagatcaaaggcttcggcagctacggtttccctgaatcccacgccgccagcttcgccctgctcacctacgccagcagttggttgaaacgtcacgagccggcggccttcgcctgcgccttgatcaacagttggccgatgggcttctacagccccgaccagttgctccaggacgcccgccgtcacgccctgcagacacgcccggtggatgtccgccacagcggttgggattgcagcctggagtcgtttggccaggcgcaaccggccatacgccttggcctgcggatgatccgaggctttcgcgaggaggatgccaggcgtatcgagcaggtccgggaggccgagccgttcctcgacgtgcacgatctcggccgacgcgccaggctcgacgcccgggccctggagttgctggccgatgccggcgccctgcgcggtctcgccggacaccggcacaaggcgcgctgggccgtcgccagcgtcgagccgcaattgccgctgttcgccgaagggaccgtcatcgaagagagcacggtcagcctgccactgccttcgcgcggcgaggaactgctgagcgattacgctctcctcggcaccaccctcggcccgcatccgctgaaactcttgcgtggacagctcaaggcccgccgctgccgcgactcccgcgaactggcgaaactgggacatgggcgaccgatacgggtcgccggcctggtggtcggccggcagcgcccacaaaccgccagcggcatcaccttcatcaccctggaagacgagttcggcatgctcaacgtggtggtccggcacgaccttgccgaacggcagaggcggccattcctcgagtcccggctgctgcaggtggagggcatcctggagtcctccggcgaggtgcgccacgtcatcgcagggcgcctgcatgacctgagccctctactcaccggcctggacgtccgcagccgggatttccattaa

SEQ ID NO: 322163 - DNA, 1416 bp, Pseudomonas aeruginosa
atgctctgggcttgcattctcctgccgcaactggccatggacagcgcgctgcgtcaacggagcaatcccgacgcaccgctggcgctgctcggcggcccagcgcagcgccggcagttgcaggcggtcaacccagcggcacgcgcgctcggcctgaagcccggtcaatcgctgatcgccgcccaggccctgagccgggacttcgccacggcggaatacgacctcgccgccgtggagcgctggcaggccttcctcgccgcctgggcctacggtttcagctcgcaggtcagcctgcactatccgcgtgcgctgctgctggaagtgcagtccagccttgccctgttcggcccctggccacgcttcgaggcccgcttgcgcaaggaactcacggcgctgggcttccgccatcgcctgtgcctggcgccgaacccggtggcggcgagggtcctggcgaacagccacgacggcctggccatcgaggacgagacagcgctgcaacgccagttgtccgcccttccgctggaccgcctgggactctcgcgggagctggctgtcgccctcggacgcatgggactgcgccatctgcgccaggtcctcgagttgccgcgcgccgccctggcccgtcgcttcccggccgaactgctgttgcacatcgaccgcctctgcggccgcagcccactggcgctggagcactaccggccgccggacaccttcgacctgcgcatcgaactcaatttcgacgtggaatcgcaccagaccctgctcttccccctgcgacggctgagcgccgatctcgccgcctttctcgccggacgcgacagcggcgtgcagcgcttcaccctgcatctggagcatcacgggcgcgccgacagccaggtcacggtcggcctgctcagcgccgaacgcgaggcggccatgctcttcgaactgacccgcggccgtctcgaacagctgcaactgcccgcccccgtgcatgccgtgcgcctggaggcccgcgagctgcctcctttcacgccgcagcaccgcgaactgttcgacgagcgcccacagcagtatctcggctgggaacagttgcgggaacgcctgcgcgcgcggctgggcgacgaggcggtacagggcctgagcgccgtcgccgaacaccgtccggagcgaagctggcggccgcacagctgcgacagggcgcaatcgccggcagcctgcggcctccgacccggctggctgctggcggagccacgcctcctcggcgaggccttgcccaccgtgctgaccggcccggagcggatcgagtcgggctggtgggatggcgaagacatccgccgcgactattacctggtggaaacccgcagcggacaacgtgcctgggtctatcgcgaggtcggtagcgaggggccgctgtggctgcatggctggttcgcatga

SEQ ID NO: 322164 - DNA, 672 bp, Pseudomonas aeruginosa
ttggcctccctttcatccgtagccgacatctccccacccgcagccgtcgccggacgaggcaatggcatagcgctgagtgcgctgctcgacgcacgtaggatctggaaaggccagtccgccgtaccggccggcgcttccctgcccaccgggcatgcgcgcctggacgcactgctgcccggcggcggttggccggagcatgccctgagcgaaatcctccatgcccgcgacggtgtcggcgaactgcaactactgatgccgaccctcgctcgcctgacccaggcgcaacgtcgtgtcgtcctggtcggcgccccctatgtaccttatccgcaggcctggctggccgccgcggtcgacctgcgccacctggtcctgttgcaggccagcggacgcgacgccttgtgggctgccgaacagtgcctgcgctcgggcagttgcgccgcagtgctgtgctggccgcagcaggccgacgaccgcgccctgcgccgcctccaggtcgccgccgaaagcggtcaggccctgggtttcgcctatcgccccctgcgcgaagcggtcaacccttcgccggcagcgctacgcctgtgcatcgaaacccgccccccacgcctgcgcatcctcaagtgccggggcggcctcgcgccggcgaccgccctgccggccagcgcctggcaatga

SEQ ID NO: 322165 - DNA, 597 bp, Pseudomonas aeruginosa
atggataccctggcccctgaatccactcggcaaaacctgcgttcgcaacgcctcaacctgctgaccaacgagccgcaccagcgcctggagagcctggtgaaaagcaaggaacccttcgccagccgggacaatttcgcccgcttcgtcgccgcccagtacctcttccagcatgacctggagccgctttatcgcaacgaagcgctggcccgcctgttccccggcctggcttcccgcgcccgcgacgacgccgctcgtgcagacctggcggacctcggccatccggtgccggagggcgaccagagcgtgcgcgaggccgacctgagcctggccgaggcactgggctggctgttcgtttccgaaggttcgaagctgggcgctgcgttcctgttcaagaaagccgccgcgctcgaactcgacgagaacttcggcgcccgccatctggccgagccggaaggcggccgcgcgcaaggctggaagagcttcgtggcgatcctcgacggcatcgagctgaacgaggaagaagagcgcctggccgccaagggcgccagcgatgccttcaatcgtttcggcgacctgctggagcgtaccttcgcctga

SEQ ID NO: 322166 - DNA, 321 bp, Pseudomonas aeruginosa
atgcaccgttcatcgcaggttctgccggccctgatcctgggcctggccatgaacgccaccctggccgacgagccgacgccgccggcgaactgcatcaacaccgaggtcaacggctaccaggctttgtcctatgaatgcctgagccagcagatgaccgatcctgacagcgcggccaggacccgccgcgaacaggagctggattccgccgccatcgtccggcgtccgccaaaccagctcggcctgtacaaccaatcggcgacgcgcattcgcctgggcacctcgttcggcaactcagtggaagcgcagcggccgcctcgctaa

SEQ ID NO: 322167 - DNA, 717 bp, Pseudomonas aeruginosa
atgtcgatcctcggggtggcaaggtcgtgcgcagtgtcgttgctcggtctcggcatgctgctgccggcgtccggcgccgtgccgggcgatggcggcaggccgccgttgcgcctggcggtgcacgcgttcgatattcctccgcagagcctggcatcggcgctggtgacctacagcggggtgacgggaatggcggttctggtggatggcgagctggcccgtggacggcgctcggcccgcttgcaggggcgcttcaccgccagcgacgccctgacccgactgctcggcggaaccggcctgatggcgcgctacaccagccaggaagcgttcaccctgctgccggcgcaggccgtcaggaacgctgcgccgctgccggcagagatgccgaaggtcgagcagccgctggatcggcgctacgcgggagcggtccaggcggcgctggaagaacagttgtgccgctcgccgcgcactcgtccgggtacctatcgcgcggtgctgcaactctggatcggtcgcttcggcgaggttcgccacagtcgcctgctcggttcgaccggcgacccgcagcgggacagcgccctggtggaaagcctgcgcggcgtgcgggtgatgcaggcgacgcccgctacgctggcccagccgctgaccatcctgttgctgccgaagacgacgggcaaggccatggaatgcaagctgacggagggagtgggagggtcatga

SEQ ID NO: 322168 - DNA, 546 bp, Pseudomonas aeruginosa
atgagcgattcgcggcaaagcgcgatggtgaagctgttcctcgcctcctacgacgacttcaaggcgcgcttgaaacggcgcctgggctccgaggacctggcgtgcgacgtgctgcacgaaacctacctgagagtcgaccggctggatgatgccctggaggtcaagaagccccaggcctacctgttccgtattgccctgaacattgccgccgaccgccgcgagggcgacgcccgcctgctcaccggggaggaggtggcggagctgttgcaggtggccgacgaaggcctcgacccggagcgcatcgtcggcggtcacgccgagatccgtcgcctgctggaggcgctctgcgaactgccggcgcggcgccggcagattctcatcgcctcgcgcctggaggagacgccgcatgcggaaatctcccgtcgcttcggcatttccacccgcaccgtggagaaggaactcaaggccgccctgtggttctgcgcggagcgcctggaaagaaaagtcatccagaggttcggtcccggggccggaaaaccgtcataa

SEQ ID NO: 322169 - DNA, 960 bp, Pseudomonas aeruginosa
atgacagcctcagactccgccgccgatgaaaccggcgaccttcgccacgaagcgcacgcctgggtgatcagcctgacctccggacgcgtcacccagggcgacgcgcgggccttccgccagtggtgtgcgcgcagcccgcaacacctgcgagcgttcgtcgaggcgcgcgatctctggcaggcactcggcagtgccgccgctctgccgctggagccgccggccgtggcgcagatcgcgccgaggcgtttcggtcgtcgctggttcgtcggcggtgcgctggccgcctcggtggcgttgttcgtcttgcgcccgtcgctgctcgaccatggcctgggcggcgccgactacgtcacggcggtcggcgagcaacgccaggtgcaggtgagcggcgagacgcggatcgagatgaacacccgcacccgcctgaacgtgcggcgcaatcaagagcagcaggaaaccatcgaactgctcggcggcgaggccgagatcatcgccagccacccgccgcagagcagcctgcgggtgatggccgggagcgcctggctgagcgccagccgggcccgcttcaatgtgcgcagcagcggtgacgtctgcgtggtgacctgcctggagggcagcgtgcggctcgaacacctcggccagcgcctggacctccaggccggccagcagctgaccttcgacgagcgacgcaacggtccgccggtgcctttcgacgttgccgaggtgatggcctggcgcgagcgcatgctggtgttcaacgacgtaccgttggccacggtgatcgacgaaatcaaccgctaccgtcccggcatgctcctgctgctggacaaggcccttggccgacgccgggtccaggcccgtttcagcctcgaccaactggccgacgtggcgaccctgatccgcgatgcctatggcatcgaggtcacccgcctgccgggcggggtggtgctgctcggctga

SEQ ID NO: 322170 - DNA, 642 bp, Pseudomonas aeruginosa
atgtccgggtacgctgaacgcgcgacgacgcggcgccggcaagccggcttcaccctgatcgaggtgatggtcgcgatcatgctcatggccatcgtcagcctgatggcctggcgcggcctggacagcatcgcccgggccagcgcgcacctggaggacagcaccgagcagggcgccgcgctactgcgcgcgctgaaccaactggagcgcgacatcgccctgcacagcgccatccgggaggagtccggcctgcccagcggcgacgagccgatccgggccggcgacagcctgccgcccggactcgcactgaagcgcctgagcgagatcccattgcgcctggacatcgtccgcgccagtaccgagccaggcgcgccgctgcagcgcgtgcgctggtggcgacagggcaaggtcctctaccgcgccgcctcgcccagcggcgaccgcctgccgttgccgccgctggcggagcgggtggctgtgctggacgacgtgagtcggttcgagatccgtgcctgggtgccgggaaagggctggacgcgcctgccggcacgcagcaaagtccgcgccagcggactggagatcagcctggcgcgggtcacccgcaacggcgtggagcgctatcgacgggtggtggccctgcaatga

SEQ ID NO: 322171 - DNA, 450 bp, Pseudomonas aeruginosa
gtgaggcgaccccggcaaggcggtttcaccctgatcgaactgatggtggtgctggtaatcgtcggcatcgccacggcggccatcagcctgagcgcccgccccgacccgacgggcctgctgcgccaggatgccgcgcgcctggcgcggttgctggaaatagcccagggcgaagcgcgggtacgaggtacgccgatcctctggcagcccagcgccaagggctatcgcttcagcccgcaggcctatcgcggcaagaccgacgccttcgccgccgacaccgaattgcgcgcgcgcgactggcaggccgcgccgctgcgggtcagcgtgcgcccgccgcgaccggtgttgctggacgccgaatggatcggcgcgccgttgcggataacgctctccgacggccaacacagcgtcaccgtgctgcgcgaggcgaacggccatgtccgggtacgctga

SEQ ID NO: 322172 - DNA, 432 bp, Pseudomonas aeruginosa
atgccggccatgccccgtatcgatccgccccgcctggtccagttcgccgccgtgctggcgatcctcgccggcctgctgttctggggctatctgttgctggcgccgattcccggcgtggtccaggccgaggtcgccgatgttccgccgcccagcggcgaggacgccgctcaacgctggttcgcgacgccttccagtgaggtcgaggtgcaactggcgggattgatcagcggtggtcccgcggcgatcgccatcctctcggtgaacggcgcgccggcccaggcctatcgcgagggcgaggtcctggcacgtgcggcgaaggtgcggcggatagaggccgatgcggtactcatcgagcagaacggcgaggttcgccgggtgcccatgcagcggctcgccgaaccgccgccgctggctaccctcaagcgcggttga

SEQ ID NO: 322173 - DNA, 375 bp, Pseudomonas aeruginosa
atgtccacgcgcctgtcttcccgcggtttcaccctgatcgaagtgctggtcgcgctggccatcgtcgccatcgccctggccgcggcgatccgcgcggtgggcctgatgaccgacggcaatggtctgttgcgcgacaagtcgctggccctgctggcagcggagagccggctcgccgagctacgcctgggcgtcggcgcggctccgggaaacagcgatttcgaatgttcccagggccgcctgcggttgtactgcgaacaacgcgtcgaggccaccgacgaccccgcgctactgtgggtggaaatccgtgtgcgcacgcagcgcgaacaggcggtgccgctggcgcgcctgaacaccctgctgagccgctcccggtga

SEQ ID NO: 322174 - DNA, 450 bp, Pseudomonas aeruginosa
atggatgtcgtgcagttcagctccagcccgaaaggacatcggggacagcgaggcttcaccctgatcgagatcatggtggtggtggtgatcctcggcatcctcgccgcgatggtggtgcccaaggtgctcgaccgtcccgaccaggcccgcgccaccgcggcgcgccaggacatctccgggctgatgcaggcgctcaagctctaccgcctcgaccagggccgctatccgagccaggcgcagggcttgaaggtgctcgcggagcgccctgccgatgcctcggcgagcaactggcgctcgtacctggagcgcctgcccaacgacccctggggcaagccctaccagtacctgaatcccggcgtgaacggtgagatcgacgtgttctccctcggcgccgacgggcagccgggcggcgagggcatcaacgccgacatcggctcctggcagctctga

SEQ ID NO: 322175 - DNA, 966 bp, Pseudomonas aeruginosa
atgaacggtcatcgccagcgcggcatggcgatcatcagcgcgctgctgatcgtcaccgtggtcgcggtcatagccgccggcctgatcgcccgccagagcgcattcatccgcgccctggaaagcgagcagctacgcatccaggccggctggatgctgcgcggcggcctggaatggagccgccagttgctgctcgaggacagccgccgcgacccgctgacccgcctcgaccagcgctgggcgcaaccgatgcgtggcttgcgtctgagcagcgccgaattgccgttcaacggccaactggaagacgagcagggcaagttcaacctgcgcaacctgttggtcgaccagcgccccgatctccaggaacgagcgaacttcgaacgcctcgccggtctgctcggcgtgcgcccgaaggaggcgcggctgatcgtcgagcgggtactcgattcctatgcacggctgcccgccgaagcgccgccggccgagacgcaacccgcaggcttcgacagcggccgcgagacttcgccgggcgccgtgttgcgtgcgcttccggcgcgcatgccggcgctcaggcgtctcgacgacctggcgcggctgggcattccgccggcgaccctggaacgcctgcgaccctacgtcaccatcctgcccgaaaccacctggatcaacggcaacaccgcgcgcgccgaagtgctcgccgcctgtgtccccggcctcgggctggaccaggcgcggcgggtgctcggcgagcgcgaccggggccgctggttcctcaatcgcggcgacttcgtcaaccgcctgaacatgccgcaattgcaggcgcagtcggtgaaggtcgggatcaccagcgactggttcctgctcaccgcctatgctcggcgcgaccggcaagaggtgcgcctgcaagccctggtgcagcgcaaggccggtgaaagcacggcggtcaactggatgagggtgggctcatga

SEQ ID NO: 322176 - DNA, 1212 bp, Pseudomonas aeruginosa
atgaaggccgcctggcgttgcctgctgccgccgctgagcgagttcgccgaggcggcgccgctgcattgtttgcgcctggatgcgcgcggcgcggtgcaggaacgaatcgaggtctcgctcgcggaactggcgcggcggcgccaggggttgccggtggcgctgttcctgcatccgcgcgattgccgcctggtcagtctcgaactgccggcgctgcctgcggcgaagctcgccgccgcggtgaactgcgcggccgaggcgctggtcctcggcgatccggcgcagctacgcctggcccacggcccgcgcggcgccgacgggcgcctgaccttggggtggctggaggcgtcggcgctggcctcgctggagcaggccgtacagcggctgcggctcgacgtgcgggaggtgcaggccgcgccgttcctcctgccgttgcgcgatgacgcttgggtggccggcgagtgggacggccatctgctgttgcgccgctcgctgagcgacgctgtggtccatcccttgccggagcagggcctcgctgaggtcccgcaggagttgcggctgttctggctgggcgagcgtccggcgtggcgctccgcagccctggagcgggccgaggcgctggacgaagcgctgcgctggagcgggcccgccagtccgtggggattggcgctgaaagcgccggcgacgagcgccggcaacggcacctggaagatgcccctggtctgcgcggccctggccttgctggtgtgggtcgccggcctgaacctgtacgccgggcaactggccgggcagggccagtccttgcaacggcagagcagtcaacgcgtgcagcaggccttcccggaactgccggtggtgctcgatccgttgcgccaggctcgcgagcgacgcgacgcctatctggccggcaaggccgatggcgatgccgtaccggggctggccgcgctgctgcatggcgccggcgaggcgatgccgttcctcgccggacgcctgcaacgactggactaccacgccggcgaactggacctggagctgctgccgggaccgccaggcggcgatgccgctgcctggcagggcgagttgggcaagcacgggttgcaggccgatgcctccgacaagggctggcaggtgcgcgccatggaagcgccgccagcgccggccgctggcgcggcagacagtggcactgccgaggcggctgccgatgaagatgaataa

SEQ ID NO: 322177 - DNA, 594 bp, Pseudomonas aeruginosa
atgaagatgaataagcgcctggcgggcctgctgaataccccggcgcagcgctggagtcccctgctgctgcggctgcaggcctactggcggcaactggcgccgcgcgagcgcaagattctcgccggcggtggcctggcgctatgcctagcgctgacctggcaagtgttcatcgatccgccgctggcgcggatcgagcattggcaagccgagctgccgcgcctgcgtgcgcaggccgcggcggtggacggcgtgttgcgcgaggtcgaggcgttgcgcggtccgaccctgagcggtacggcggacgccgaggcgatccgtcgcagcctgcgcgatcagggactcgacggtttccaactggacgccccgcaaccgggccaatggcaactggacttcgccagcgtgtccggcgaggccttgctgcgctggctggcgcgcagcccggcggcgttgcgcctgagcgtcagcgaggcgcaggtgacgcgtcttgacgctccttccgaggagcgctctggctcttcgagcgagccgtccggcgggctggtgtccgcctcgatccatttgcagtcgtcttccgctcccaaggattccccatga

SEQ ID NO: 322178 - DNA, 2412 bp, Pseudomonas aeruginosa
atgaggcaatcagctttccaccatgcccggcgtcgttggcctgtactgggcgtggcgctgggcgcgctgctggtcgcggcgtgtagcgagacgccgaaggtccccggcgtgcccccggccgacgaggaagtcggccggccgctgagcagtgtccgctccggtgcgccgttgcgcagcgccgacgtccgcgagcggccccaggccgagcaggcccgccgcgcgctgagtgccgggcgcggcgtagcgcgctccggtggcgtggctccggtctcagcggtagcggccgaactcggcgagcagccggtcagcctgaatttcgtcgataccgaggtggaagcggtggtgcgcgcgctgtcgcgcgccaccggccggcagttcctggtcgacccgcgggtgaagggcaagctgaccctggtttccgaaggccaggtgccggcgcgcaccgcctaccgcatgctcaccagcgccctgcgcatgcagggcttcagcgtggtcgacgtcgacggggtcagccaggtggtgccggaggccgacgccaagctgctcggcgggccggtctacggcgccgaccggccggcggccaacggcatggtcacgcggaccttccgcctgcgctacgagaacgcggtgaacctgatcccggtgctgcgcccgatcgtcgcgcagaacaacccgatcaatgcctatccggggaacaacaccgtggtggtcaccgactacgcggaaaacctcgaccgggtcgccgggatcatcgccagcatcgacatccccagcgccagcgacaccgacgtggtgccgatccagaacggtatcgcggtggacatcgccagcaccgtctccgaattgctcgacagccagggcagcggcggcgccgagcagggccagaagaccgtggtgctcgccgacccacgctccaacagcatcgtgatccgctcgccgagccccgagcgcacgcaattggcgcgcgacctgatcggcaagctggacagcgtgcaaagcaatcccggcaacctccatgtggtctacttgcgcaacgcccaggcgacccgcctggcccaggccctgcgcgggctgatcaccggcgacagcggcggcgagggaagcgagggcgaccagcagcgcgcgcgcctgagcggcggcggcatgctcggtggcggcaacagcggtactggtagccagggcctgggaaccagcggcaataccacgggcagcggttccagcgggttgggcggcagcagccgcagcggcggcgcctatggtgcgatgggcagcggccagggcggcgccggacccggtgcgatgggcgaggagaactcggcgttctccgccggcggggtcaccgtacaggccgacgccaccaccaacaccctgctgatttccgcacccgagccgttgtaccgcaacctccgcgaagtcatcgacctgctcgaccagcgccgcgcccaggtggtgatcgaaagcctgatcgtcgaggtcagcgaagacgactccagcgagttcggcatccagtggcaggccggcaacctcggcggcaacggcgtgttcggcggggtcaacttcggccagtcggcgctgaacacggccggcaagaacaccatcgacgtgttgcccaaggggctcaacatcggcctggtggatggcaccgtggacatccccgggatcggcaagatcctcgacctcaaggtgctcgcccgggcgctgaagagccgcggcggcaccaacgtcctgtcgaccccgaacctgctgaccctggacaacgagtcggcgagcatcatggtcggccagaccatacccttcgtcagcggccagtacgtcaccgacggcggcggtaccagcaacaacccgttccagaccatccagcgcgaggacgtcggcctgaagctgaacatccgtccgcagatctccgagggcggcacggtcaagctcgacgtctaccaggaggtcagcagcgtcgacgagcgcgccagcaccgccgccggggtggtcaccaacaagcgcgcgatcgataccagcatcctcctcgacgacggccagatcatggtcctcggcggcctgttgcaggacaacgtgcaggacaacaccgacggtgttcccggactctccagcctccccggcgtcggttcgctgttccgctaccagaagcgctcgcggaccaagaccaacctgatggtcttcctgcgtccctacatcgtccgcgacgccgccgccggccgcagcatcaccctcaaccgctacgacttcatccgccgcgcccagcagcgcgtgcagccgcgccacgactggagcgtcggcgacatgcaggctccggtgctgccgccggcgcagcagggcatcccgcaggccgcctacgacttgcgcccgagcccgcggccgctgcgcgcggtaccgctgggcgaggcggcgccgctatga

SEQ ID NO: 322179 - DNA, 1410 bp, Pseudomonas aeruginosa
atgagcctgctgccctacgcctgggccaaggcgcagcgcgccttgctgcggccgggcgagcatggcgcgaccctgctggtcagcccgcgcacgcccggctgggcgatcagcgaggtgcgccagcggcatgcgccggccagcctggagagcgtccgcgacgacgagctcgacaccctgctggccagcgcctactccgataccggcagcgccgcggcggtggtcggcgcggcggagagcgaggtcgacctcgaccgcctgatggacgatatccccgaggttaccgacctgctcgacacccaggatggcgcgccagtgatccgcatgatcaacgcgctgctgacccaggccgcgcgcgatgaggccagcgacatccacatcgagcccttcgagacccattcggtggtgcgctatcgcgtcgacggcgccctgcgcgacgtggtcgcgccgcgcaaggcgctgcacgcggcgctggtgtcgcggatcaagatcatggcgcagctggatatcgccgagaaacgcctgccccaggacggccgcatcgccttgcgggtagccgggcggccgatcgacattcgcgtctccaccgtgcccaccggccacggcgaacgggtggtgatgcgcctgctcgacaagcaggccggacgcctgaggctggagaccctgggcatggctcccggcgtgctggcgccgctggacaacctgatccgccagccgcacggcatcgtgctggtcaccgggcccaccggcagcggcaagaccaccaccctctacgccgccctggcgcggctcgacgccagcaccagcaacatcctcaccgtcgaggacccggtggagtacgacctgccggggatcagccagatccaggtcaacgcgcgcatcgacatgaccttcgccgtagccctgcgggcgatcctccggcaggacccggacatcatcatgatcggcgagatccgcgacctggagaccgcgcagatcgccgtgcaggcctcgctcaccgggcacctggtgctggccacgctgcacaccaacgacgcggtgtcggcagtgacgcggctggtggacatgggcgtcgagccgttcctgctcgcctcgtcgatgcttggcgtactcgcccagcgcctggtgcggcgcctgtgcacgcattgccgggtcgaagaggacggcggctggcgcgcggtcggctgcccggcttgcaaccagaccggctacagcgggcgcaccggcatccacgaactgttcgtgatcgacgacgagatccgccgcctggtccaccagggccgcaccgagcaggatctccgcgaagccgcccgcgccgccggcatgcgcagcatgcgcgaggacggcgagcgctggatcgccagcggctccaccaccctggaggaaatcctccgcgtgacccgggacgcctga

SEQ ID NO: 322180 - DNA, 1215 bp, Pseudomonas aeruginosa
atgcagaccttccgctacgaagccgccgacgcccagggccggatcgagaccggcaccctggaggcggacagccagcgtggcgccctcggccaactgcgcgcccgcggcctgaccccgctggaggtccgcgagcaggctggcggcgggaccgggcaaggggcgggcgcgctgttcgccccgcgcctgtccgacggcgacctggcctgggccacccgccagctggccagcctgctggccgccagcctgccgctggaggcggcgctgagcgccaccctcgaccaggccgagcgcaagcacatcgcccagaccctgagcgccgtgcgcagcgacgtgcgcggcggcatgcgcctggccgacgcccttgccgcacggccgcgggacttcccggaaatctaccgggcgctggtggctgcgggcgaggagtccggcgacctggcccaggtgatggagcgcctggccgactacatcgaggaacgcaacgccctgcgcggcaagatcctcaccgcgttcatctacccggcggtggtcggcgtggtctccatcggcatcgtcattttcctcctcggctacgtggtgccgcaggtggtcagcgccttctcccaggcgcgccaggacctgccggcgctgacccgggcgatgctccaggccagcgacttcgtgcgcgcctggggctggctctgcgccggcgccatcggtagcgcttactggggctggcgcttgtacctgcgcgacccgcaggcgcggctcggctggcaccggcgagtgctgcgcctgcctctgctcggtcgcttcgtgctcggggtgaacaccgcgcgcttcgcctccaccctggcgatcctcggcagcgccggcgtaccgctgctgcgcgcgctcgatgcggcgcgccagacgctggccaacgactgcctcgcgcaggcggtggaggaggccaccgcgcaggttcgcgaaggtgtctcgctggcctcggcgctgcgcacgcggcaggtgttcccgccgatcctcacccacctgatcgccagcggcgagaagaccggtgcgctgccgccgatgctcgaccgcgcggcgcagaccctgtcgcgcgacatcgagcgccgcgccatgggcatgaccgcgttgctcgagccgctgatgatcgtggtcatgggcggggtggtgctgaccatcgtgatggcggtgctgatgccgatcatcgagatgaaccaactggtccagtag

SEQ ID NO: 322181 - DNA, 1107 bp, Pseudomonas aeruginosa
atgttcaagcgctctctgatcgctgcctcgctgagcgtggccgccctcgtatccgcccaagccatggccgtcaccggcggtggcgcttccctgccggccgagctgtacaaaggctccgccgacagcatcctgccggccaacttcagctatgccgtgaccggcagcggcaccggcaagaacgctttcctgaccaacaactcctcgctgttcggcaccaccggtaccgttcactatgccggtagcgactcggtcctcagcggtagcgaactgaccacctacaacagcaactacaacggcacctacggtccgctgatccagatcccgtcggtagccacctcggtcaccgtgccctatcgcaaggacggcaacaccacgctcaacctgaccagcgcccaactctgcgacgccttctccggcgccaagaccacctggggtcaactgctgggcactaccgacagcacgccgatccgcatcgtctaccgcaccggtagcagcggcaccaccgaactgttcacccgccacctgaactcgatctgcccgactcgcttcgccaccaactcgacctttaccaacgcccgtctgccggccggcggtacgttgccgagcaactgggttggcgtcgccgccacttccaccgtggtgtcgaccgtcaaggcaaccaacggctccctcggctatgtcagcccggatgcggtgaacatcaacagcaacgccgaggtttcccgtgtgaacggcaacctgccgacccaggctaacgtttccactgccctgggcagcgtggctccgccggccaacgccgccgaccgtgcggaccccagcaagtgggttccggtgttcaccaatccgagcgccggctactccatcgtcggttacaccaacttcgtcttcggccagtgctacaaggacgccagcgtttccaccgacgtccgcgccttcatcaacaagcactacggtggcaccaccaccaacgccgcagttgccgcccatggcttcatcccgctgactccggcctggaagagcgccatcgtgagcgccttctacaccggcaccagcgaaaacctggccatcggcaacaccaacgtctgcaacaccaaaggccgcccgtaa

SEQ ID NO: 322182 - DNA, 1113 bp, Pseudomonas aeruginosa
atgctcaagccaatgtttggcgtcgttgctctgacgctcttgaccagtcatacaacgctgggcgctacggtgaccggcggtggtgcttccatgccggccaagttgtacaaaggttctgccgacagcatcctgccaatcaacttcagctatgccgcaagcggcagcggcattggcaagaccgctttcctgatgaataaccccatgctgcttggcgctactaccggcaccgtccactacattggtagtgactcgatcttgagtagcagcgaactgagcgcctattcaaccaactatagaggcgcatatggtccactgatccagattccattggcgggtaccgcagtaaccattccttacaagaagcccgatattaccgacctgaacctgaccagtgcccagctctgcgatgccttttccggcgccaaggtcacttgggggcaactattggggaaccccgccgaccgtacgccgattcgtatcgtctaccagcggggcggcagtggagccaccgagttgctgacccgccacctgaactcggtctgcccgactcgcttcgccaccaactcgatcttcacgaacgcccgtctgccggccggcggtgcgctgccgagcaactgggtggcagtacagccttatgaaagtgtcaggaatgccgtcgacaatgtgtcaggctcgatcggctatgaggggcctgatggtgtggacctgagcgacaattcaaagatcgcgcgagtgaatggcttgctccctactctagccaatcgcgtgatcgctgttcgtagcgtggctccgccgggtgtcgctgcagatcgcgccgatccgagcaagtggataccggtcttcgtcaacccgaacgcaggctactccatcgtcggctataccaactttgtctttggccagtgctacaaggatgccactgttgccgccgacctgcgcgccttccttacccagcattatggcggcaccactacaaatagagcggtagctgaccaccgtttcgtacccctggtcgcttcctggaagagcgccatcatgagcgccttcatcactggtaccagcgaaaacctcgcgatcaacaatccctccgtctgcaacggcaaagggcgtccatga

SEQ ID NO: 322183 - DNA, 12543 bp, Pseudomonas aeruginosa
atgccgtcccgttcgccgtcgtccgcccgttcctcccgcgcgctttacgcgccgcgcctgaagccgctggcccaggccatcgccctgctgctggtcgcagggggcgcccaggccgccgggcagccgttcagcgccgcctggttcgccgccaagggcgcggctcagggcggcgctgccggggcgccgcgaccgggagcgcagttgccgggggcgccgccgccgctggcgcagcagcagcgggtcaaccagcagttgcagcgttcgatggccaacctgaacaacaccgtcgccgccattgccgcccagcaggccgcccaggccgccggacgccaggcggcgctgaacctcccgcaggatgttccggacgggctcggcgagggcggcctcaaggtcgacgcctcgctgccgttcgagcaggcctggcagaacgccaagggaccggtgcagacccaggccgccggcaagaccacggtgagcatcgagcagaccgccgacaaggcggtgctcaactgggagaccttcaacgtcggccgcaacaccaccgtggacttccagcagcacgccgactgggcgctgctcaaccgggtcaacgaccccagcgcgcggcccagccagatccaggggcagatcaaggccgacggcacggtgatgctggtcaaccgcaacggcgtggtgttttccggcagcagccaggtggacgtgcgcaacctgacggtggcggcggcgaacatctcggacgaacagttccgtcagcgcggcctctactacgacaacgccggcagccgtccgaccttcaccgacgcggccggcgccgtgcgcgtggagcagggcgcacagttgcgtacggcagcgccgtccggctcgaccaggggcggcggctacgtcctgctgctcggcagcgaggtggacaacgccggcagcatcgtcacaccgaaggggcagacggtcctgtccgccggcgacagcttcgtcatccgccgtggccagggcaccgacggcaacctgacctccaccacccgcggtaacgaggtgctgccgggcttcgccgccgacagcagtgccggccgggtgcgcaacagcggcctggtgcaggccgccaccggcgatatcagcctcagcggccgcgaggtggagcaggccggcgtattgctttccagcagttcggtggacagccgcggcaccctgcacctgaaggccagcgagcggatcaccctggccgaaggtgccaccagcgccatcctggtggatagcagcggcagcgccgccctcgacagccagcgcgaggccttgctcaagccgttgaacggctccagtgccgccgtcagtcggggcgacgacgaccgccgcgacctgtcgcgggtggagatcgactccgccggcagcgtcgatttccgcgacggctccatcaccctcgccagcggtggccaggtggcggtcaacgctggccagcgcgcgctgctgcgcgacggcgcggtgatcgatgtctccggcgcgcaaggcgtgcaggtggcgatggagaccaacaacatcaaggtcaacgtgcgcggcaacgagcagcgcgacgcctcggtcaaccgcgagggcggcggtctgaacagccaggacgtgtgggtcgacgtgcgcgacctggtacgggtgcctgccggcaccaacggctatgccagcgaccgctggtacaccgctggcggcctgctggaggtcggtggctacctgggcacccagggccactcggcgggcgagtggatggcccagggcggcatcgtcagtttcaccggcaacgtcgtggtgacccaggccggttcacagatcaacctgtccggcggaaccctcgatgtgcagggcggctacatccgccagacctggctgaaggggtcggacggacgcctctacgaactcggctcggcgccgggtgacctgctctacgacggcatctaccgcggctacgaggcacacagcgagcgctgggaccagacccgttatttctacaatccgctgatcgcgccgacccagcgctacgagagcggctacagcgttggccgcgacgccggcagtctggtgatcggcagcgccaatgcgcggctcgacggccaggtggtcggcgatacctatcgcggcgagcggcagaccgaagcgccacaggccggcctggacggctacaaccagtcgcagaatgccgtggcgcgcggcgcgcagctggtcgtcgggcgctacaccccctactacgtgaagagcagcggcctgctggagtacgctctcggcgccgatgccggcagcctcaagcaggtggtcatcggtgccggcgaggtggcggccgaggagccgaccctggacgctccggtggccgccgagcgccagggccgcctgagcctggacagcgaactgctcaacggcttccagctgggcggcctgaaggtggcggccggcgagagcatccgcgtcgacagcgcgctgaccctggccaatggcggcgaggcgatcctgttcgccaacgacgtggcgatcgacgccgacatcaccgctcatggcggcagcctgcaggccggcaacgtactggcgcagatttccccgaacgggacgatcgatggtttcgtcgatgccggccgcgaagccggcatcttgcgcgtgggcgatggtgtacgactggatgccagcggcttgtggagcaacctgctgctggcgccggaggacaacgatacgttggcctaccgcgacggcggacggatttccctgcgcagcggcggcgacctgagcctgggacagggcagtctgctcgacgtgtcgtccggggcggcgctgctggccgacggcaaacgactgggcggacgcggcggcgacatcgccttgcacgccagtgccgggctggcgcaggccagcgatggccaattgcagttgggcggcacattgaatggtctcggcacgagtggcgccggcacgctgtcgctgcagagcggcaaggtgcggatcggcggcggcgacctcggggatggcagcctgcaactggccgaagatttcttccagcagggcttcgccagctaccgggtggtcggtcgctccggattgagggtagccgaggatgcccaggtgcgggtcgcgcggccggtctaccgtttcgccagcggggccggcgaggtcgcggctggcgaggcgccgcgagaggcgctggaggcctggacaccgccgctgtacctggaggatgccttggccggacgcttgatccaacgcgaaggggcggacctgtacctgcaggcaggcggcgacggcaatatcctcgggcagctcgatcccgccagccagacgctggagctggggcgcggttcgctggtcgaggtcgatccggggcgcgccatcgtcctgcgcggtcccggacagatcaccttggatggcactctgaacgcttggggcggacgcatcgacgtgcgccagcagcagttcggcgcgctcgacgttacccaggacaatcagcccaaggcccaaggccagccccatgcacgctccatctggattggagagcaggcattgctggatgttgccggccgcgctgtcactgccgtggatgggcgcggtcgccgctatggagaagtacagtccggcggcagcatcgtcatcggcggcgagatcgatccgggcaaggcgatcgcgacctcggcggatgcgttcgtcatcgtacgccccggtgcacgactggaggcctccggcagccaggcacagctggatgtaccgggactgggaagggttttgctggccggcgacggcgggcgcatcgctctcagttcctacaatgggctgtatctagacggctcgttgcgcgccgcagccggcggctcgggagcggcgggcggcagcctggagatcattgcggacgctcccctgtaccaaggttttactgtggtggatgaccgggtattggccatgcgtgagctgatcctgacggcagggcacgccgattcgggattaccgaccttgctgcaaccgggaatggacgattcggctctgcgctatggccagagccgagttgggactcagtcgctgacgggcggcggattcgaccaactttcgttgttcagcaacggtccgctgtcgttcgaggggaacatcgatcttgcgatggggcgcagcctgaatctgtacgcggggacgatagccgccacaggtggtgggccgagcgaggtgaagttgcaggcgccctatgtccgcctttccggcatcgggatgtatgggcggcaggcctctggcgagtttcgtccgcgtctcacgtacgggccgaccgcgacagcggagcaggttcgcttgcaggtttctgccgggcgcctgctggatatcgccgggcgcttgtcattcggtagcgacggggtgatcaatggggtcaacgcagaggctgtccgctatcagcgaccaggtttcgagaaggtaacgctgcgcagcgagggcgacctgcgtttcgctggcgactatccagagaatggcgatccgtcggggcgcttgataacccacggcgatctgcaactgactgcggcccaactctatccggtgacgggagcgagttcgaccctctatgccgggtatggactggatgagggggggcaggctgtcttcgatgccgaacggcatttggctatcgaacgtagcggcgagtccttgccggacactccgctgtcggtattcggcagtctggcgttcatggcatcgaatatcgagcagggtggcgtggtgcgtgcgccgctggggctcatccagttcggcagcaatctggatcgtgccccgggcacggtaaggttgttgccgggtagcctgacctcggttagcggcgctgagctggtcatgccctatggaggcacgaccgatgggatcaactatctggtcaaccaggtccccattcaactgaccggtgccgggggcgctctcgctgctgggacactggttgcgggagtcggcctttatgccagcgaggtcgatgtgcaacagggcgcgcggctggacctgtccggcggcggcgaactcgcgggggctggattcatctccggcagagggggttcgaccgatgcgcgttttcatcccctggtgcagcaggacaatgatgggttccgtctgccggagctgtccagcaacccggtgtatgccatcgtgcctggacaccaggccgttagtgcgccattgggcggcgaggcgggcgccatccagccgttggtcgggcaacaggtcaccatcggggatggcgttcccggcctggccgccggtacctacaccttgctgccttcgacctatgccctgttgccgggcgctttccgcgtcgagatcaacggtctggcggggcaaggcgcgcccatggcgacgcaggggttgcgcaatggctcctgggcgacgtccgggcagttgtcgattgccggcacgtccatccgcgacagtctgagccgtcaggtcatcctgtcttccgccgatacgctgcgccgctactcgcagtacaacgaaatgagctatgcggatttcattcgcgccgatgccgcgcgcaagaacatccccagagcgatgttgccagtggatgccagatccctctacctgggattgcgcgcggatgaggagcttcgggaaaacgccctgagcttcgaggggaaggtcgacttcacgccggaagaaagcggatatggcggcagcctcatcgtggatgccgaggcgggcatcgagattctgcctgaaggtgggctgcccgactccgatttcgctggcgtgtcgttggttgcggacgatctgaatgcaataggcgccagccgtatcgccattggcacgctgccctacgtcgaatacggcgagcaaggaaacttcgtccagttcggcgggagcaaccggctctttcccgttgtgctgcgaaagggcgcgcacctttccgcaccggaggtgatcattggcagggatatcacccttgaaggcgggagtggcatcagcactctggggaaaggcaagactgcatacgattcgtccgatggtttcatctatcaacccggcggccgtaacctgctgctcttgtccaacggatggctgaacctgctggcacccgcagcggatagctcgttaccggttcgtctcggaggttgtgcggaaggggcgggctgcgccgacaccgaactctattcggagggcactctgggtatcgccaccaatggtacggtgacgtttggcgacaacgttcgttacgggacacgcaatctcagcctggcgctgagtacgatcaatatcggctccagccagtcgctggccgacgcggccgctcgcggcgtgttgccgaacggcctggcgctggaccagacggtgctccagcgcctgctgcgcggcgagcgcggggcgggtattccggccctggaaaacctgatcctcagtgcccgcgatgcggtcaacatatacggtagcgtcagcctcgacacctacgacccggccaccggcaaatccagcctggccaacctggtgctgggcaccccggccatctacggccatggcaccggcgaggatgtcgccagcattcgcaccgccagcctggtctggagcggctccagccagccggccgcagcaccggtcgccggcggcgccggtagcggtagcggaaccctgcgggtggatgccgagcgcatcaccctgggctacggcgcgaatacccagccggccggcgagaccgacgaggcacgcctggcgctgggcttcgccgaggtgcaactgaacgccagcgagcggatcagcgccaaccacaagggcagcttgcgggtctaccagcgcctggacggctacgtcgccggcgaaggcctgcgctacagtggcggcgacctgcgcctgagcacgccgttgctgaccggcgaggccggctcgctgagtcggatcagcagcggcggtagcctcagcctggcggcgccggcgggcgctgccgcggtgaccttcgacagcggcaccgccgggcttggtgccgagttgtccctcagcgcccgcgagatccgcctggatagcgcggtctcgctacccagcggcaagctgagcctgagcgccgaagacgacctggagctgggcgatggcgcgcgcattgacctggccggacgcaaggccagcttcaacgatgtggataaatacagctggggtggcgacctgctgctgggcagtcgcgccggcgacatccgccaggccgccggttcgctgatcgacctgtcggcgcgcaacaaccgcggcggtaccctgagcgccgtggcgttggccgaggacgccggggtggtggacctgcagggccgcatactgggtggcgccagcggcgactacgatgccggcggcacccgcgtgccgttcctcggtggcgagctggagatccgcgcccagcgcctgggcgacggcggcagcctgagcgagcagttcaccgccttgaaccagcgcctgaaccagggcgaggtcttcggcgcgcggcgcttccagctcaagcaaggcgacctgcagatcggcgacggcctgaaggcgcatcgcatcgaggtgtccctcgacaatggccagctcggcgtgagcggaacggtggacgccagcggcgcgcaggtcggcgagatccgcctggccggcggccgcggcctgagcctgggtggcaacgcgctgctggatgcgcatggaagcctgctgcggcgcgacagctacgggcagatcatcgacagcccgaaccgggcgatggtcgagctgagttccggcagcggcaccttggtcctggccggcggcgcgcgcatcgacctgcgccatggcaccgcggcgccagcggaacaggttgatggcgtcgcccgtggcacgttggagttgaacgcgccacgcctgggcggagtcagcgccggcgacatcgccatcgatgccagcggcgcgctggatatccgcggcgccggcagcatcgccctgaacgcgatgcagcgttacgacgatgcgccctggggcaacgatccggcggccggcgggcggtcctaccaggtgatcgaccaggcttacctcgatgcgcggcatgccgagagcagcgcgttcatcgccgcggcgctggccaaccgcgagttgctcgacggcaagctggccggactgaccaatgccacctacgcggatgctttccacctgcgtccaggggtggagatcgtcagcgcaacggcggacggcgacctggtggtgcagggcgatctcgatctgtccggctaccgctacgccagcctcaatccgaacacgccgctgaccgaggtctacggttccggcgaggtcggcgcgctggtgctacgcgccggcggtgacctgaacctctacggcagtatcaacgacggcttcgcgccgccgccggactcgccggacgacaagggctggatcctcaccccgggagtgcagccgttcggtggcgacctggtggttcccggcccgggcgtggtgctcggcgacggtaccgcgttcctcggcggccgcaccctcaactacgacctgccgatcaagggcaccaccctggccgccggcacccgtctggccaccgaggcggtactcgaacagccctataccctggccgccggcagcgtgctggtagcggacatccacgatgccgccggcaacctgctgtacgccgcgggcagcctgctgcgcgacggggtgacgctggaggtcggcagccggctgggtgccggtaccctgctggctgcaccggccagcgtgcaggcgatgacctggcctgcgggcgtgcccttgccgagcatcctgcgcgaggggccaagcagacccaatgtcctgctgctcaatggagagctggccttggcacgtggttctctgatcccttcgcagaccgaggtggtactggctggcgatgcgcctttcatcgaattgcggcccagcgacggtgtccgccagggacgcaactgggcattggccgagatgctgccggccggtagccagtcctggtccatgcgcctggtcgccggtgccgatctcgcggctgccgacaaccgtctggtgcgtccggactcctcggccagcctgaacctggccgatacgcactatcaggcgaagatcgaacagagctcgggagggctggtgttcaccgatcaggctaccgactgggggatcaccccgggaactccggtcgacgagagcaatgaatggatctgcgggctggggccgtattgtgccgagcctccccgctggacctgggcgcccggcaattacctgggcatgcctgctggtacggcgatcggcgagggcgatctgtggtggtgcagtgtcgatccgtccctgtgtatcgagaatctcggcaaaaccgtggtcacaccgcagaaccagttgttcagtgtgctgcgcaccggcactggcgatcttgacctggccagtgccggtaaccttacgcaatggtcgccgtacggcgtctataccgccggaacgcaggccgccgatgtcgcgacgggattcaatcagcctcgcggtctgttcaatgggtcggtactgggcgccggtggcgcggattacgaagtgctctcaaccagccagtaccaggcctggtatccggaacatggcggcaacctcgatatcgccgttggcggtgatgtggttggtgatcaatgggccgagaaactgacaagtagcgatcccattcgccccttgccccccagcgctgcagtcggcaactggctctggcgccagggcagcgccgacagggaaggagtgccgacggcctggtgggtcaatttcggcagctatgtgcgtggcgcggagggagatgctccctatctggtcggcttcaccggtttcggcactctgggaggcggcaatctcagcatgcgaaccggaggtgatgccggcaatatcgcgccacgcggagatggttcgataccttcatccggtaaccttaatccgcgcagccagggactggtcttggcggttgctggcactggccggctcacctccgacggcgcgctgcaacttggcggcggcggtgacctgaatgtgagaattggcggggaggtgaacccgagccgggaggcgcgggctacccagacctactcgagttcggggtttgacggtctttacagcggcggcaccattcacgatctgcagggggccctcatcaatctgcgcggttccgcgagcttgtacagtggtgcgctgggaggcatcgatcctcgctacgacactctactgcgggaccccgccgaagtgcgcagcagggatgcgttcagcccgacgctggctagctccacgggcggcctcaccctggtggccggagatactggcatgcgtctggaaacccgtggcgacctggtcctgggcggggtgactgatcccggtagggtgggggtgccgaataccgttggcttcacggctcccgatggcagcgtctaccaagggggcgggatcggttggttcagtctctggactgcacacacctcgatcgatctgtttgcggcgggcggcaacctgacgcccagcacccaattggtcgaggcaaccaacgctattcccatggcaggccgaaacctgtcgcctagcgatgggcgattcatctatccatcgatagtacgtgcggcggccccggaaggaagtatctatctcggtccttccagcggttacatgggaggcgtgagcctgaatgtctcgaccactccctactccttgttactggcaccgtcactcaacggtgaactggagttgctggctggagactccatttatgccggtggctattcggtgcaacgctcaggtgccgatcctgcgaacctgccatcgatctggacgccggcatttgccggctactccgatgccgcgctgctcaacccgatagccggcaacggcagtccggacgggaatccggccgtcattggcggattgcctctgttctacttcggccccgatagcgctgcgagcctggcgcgcgatctgcaaccggcgcgtttctatgcgttgacaggagatatcgtcgggctcaatagcggtgcgcagattcgtttcggcgagcaggcggggaaccgcgccgggcaaacctggtatgaaggtgcgggtcccgtctggatgcgcgccgggcgcgacatcgttgcctccggaaccccattgggacagcgtatcagcgctcccagtcagatcagtacggatgcctcgttcaccggcaacctcttcgtccacgacgaccccaacgacctctcgctggtccaggccggccgcgacatcctctacggcaacttcaacgtcgccggccccggtaccctggagatcagcgccgggcgcaacattctcatggaggatcgcgcggcgatcaccagtctcggcgcggtggtgccgggcgacagccggctgggtgccgatatcgtgctccaggccggcgcggcgggggccgactatcaggccttcctcgagcgctacctggatccggccaacctggcgcagggcggcaccccgctggccgagcagccgggcaaggtggtcagggcctacgaaagcgagttggccaagtggttgaacgagcgcttcggcttcgccggcgacgcggaacaggcccaggcgttcttcgccggcctgcccgccgagcagcagcggatcttcgcccgccaggtgtacttcgccgaactcagggccggcggccgcgagtacaacgaagtcggcggggtacgccagggtagctacctgcgtgggcgcaacgcgatcgccgcgctgttccccgagcgcgatccggcgggcaatccgatcagctacgaaggcgatatcgtcatgtatggcggtgccggcgtgcacaccgacttcggcggcgacatccagttgctcagccccggcgggcgccaggtgttcggtatcgagggcgaggcgccgccgtccaccgcaggcatcgtcacccagggccagggcgatatccaggcctattcgcgggacagcatcctgctcggccagagccgcatcatgaccaccttcggcggcagcatattggcctggtcggcggaaggcgacatcaacgccggtcgcggttcccagaccaccgtggtgtacaccccgccgcggcgcatctacgacgcctggggcaacgtcagcctgtcgccgcaggtgcccagcaccggcgccggtatcgccaccctcaacccgattcccgaagtggcaccgggcgacatcgacctgatcgccccgctcggcaccatcgatgccggcgaggcgggcatccgggtttccggcaacgtcaacgtggcggcgctgcaggtggtcaacgcggcgaacatccagacccagggccagtccagcggcattccgctggtggcttcggtgaataccggggcgttgacctccgccagcgccgcggcgagttccgcgacccaggcggcggaggacgtcagtcgccagcagcaggccgccgcgcggcagcgcatgccgtcggtgatcacggtgcaggtgctcgggttcggcaacgagcgcctggagccttcgcgcgacggcgccagtcgttcgccgggctacaacccggacagcgccgtgcaggtgctcggcgccggagccctcggcgaacaggcgcgcagccaattgaccgatgaagagcgcggcaacctgatcctgtaa

SEQ ID NO: 322184 - DNA, 603 bp, Pseudomonas aeruginosa
atggaaagttactcgaaagtcggtatgcaggaacttgaccagcgcctatcgaagatcgtcgaagccgcacgcaagaaaccggtatcggtttatcgatatggggcgccatgggtctggatagtgtcccaggaagattggcagggtgcgctcaaggaagtgtccagctatataccgccgggacattccctggcgttgctgaaaccgcaaatagaaagtctccttggcaaagaggcgaaagtcctctcggcgctcgcccgcgaacatggcatgcagttggccccggagccgctgatccacgcgctgctgctgcaactgctgtacgcgattcccagcgagcagcagttgtacgagcaattgaactacaacctgctgtatcgctggttcgtcggcctggaaatgaagcagaagatctggaattttccggttttcgtcagcgatataaccgtcctgctgaacagcgcggaggcggtaaggataataggcaggattatcggggaagtgatttccggggatctcatgcagatgccagagttctccctgaacttcgccttgttgcatacatggcaagcgcgccatggcggagcgcgacggctgaatatctag

SEQ ID NO: 322185 - DNA, 1635 bp, Pseudomonas aeruginosa
gtgaagcgttcgctgttcaattgtgcgcacccgtttcgccagcgctggtcgatcggttgcctggctgtcgcattgtcgtgcgcttcgctggccgacgaggcccctcccgccgcggcgggagccgagacccagcgtctggtggacatcaacgagtacgtggtacgcggcaacaccgtgctggacaaccgcgccatcgaggcggcggtgtatcccttcctcggaccgcagcgcagcctgggcgacatcgagggggcgcgcgatgcgctgcaggccgcctaccaggagaagggctaccagtcggtctacgtcgagctgccggagcagcaggtgagcggcggggtggtctacctgcaggtcaccgagaccactgtcggtcgcgtccgggtggtcggcgccaagcactattcgccggtggagttgcgcgaggaagtgccggccctggaggagggcaaggtgcccgacttcgcccaggtccagcgcgagttggcgcaggtcaaccgcacccccggccgccaggtgctgccgatggtgcgcgagggccagcggcccggcaccatggacgtcgacctgcaggtggaagacaagaatccctggcacgccagcatcggcctgaacaacgactacagcgccgacacccgtcacttgcgctcggtggtttcgctgggctacgacaacctctggcaactcggccacgccatctcgctgacctatttcaccgcgccgcaggaccaggacaacgccaaggtctggtccggctcctataccgcgccgctgagccagcgctggagcgtgcagctgtccggctaccagtccgacagcgacgtggccacggtgggcagcatgaatgtggtcggccagggccattcctatggcgtggcggcgatctacagcctgccggtcaccggcctctggtcgcactcgttctccttcggcgtcgacttcaaggacttcgaggaacagacccggatcggcggcaacaacgacagggtgccgatcaagtacgccccgctgaccctcggctacaacggtttccgctacaccgaacgttcccagttggcccttggcctgagcctggtggccggtaccggcagtctcctcggctacggcgacgacgacgaggaattcgaccgcaagcgttatcgcgccaagtccggcttcggcgtgctcaagggcgatctcaaccacaccctgaccttcggcggcgactggcaggtggcgaccaaggcggccttccaactcgcctccgggccgctgatttccaacgaacagttcgccgccggcggtgccaccagcgtgcgtggctacctggcggcggagaacaccgccgacgacggctacctgctctcccaggaatggcgtacgccgtccctcggacgcttcctcggcaagcgcgccggcggctacgtcaacgactggcgcttctacgtgttcgccgagggcgcgcaactgcgcctgcaggatgcgctgcccgagcaggacgacgacttcagcctggccagcgtcggcatcggcacccgcgcgcaactcgccgactggctgtccggcagcctcgactgggccttcccgctgctggaagggacgaacaccgacaaacacgactcgcgcctgcatttcagcgtgcaggcgagcttctga

SEQ ID NO: 322186 - DNA, 1848 bp, Pseudomonas aeruginosa
atgtatcgcttattgctgacatcgctgatctgcctgggcctgctggccccggccagcgccagtgcctggtggcaggacgactggcagtaccgcaagcaggtctcggtcgataccaccccgcaaggcgcggcgatcaacgagagtctcggtcgcctgccgttgctggtgcgcctgcataccggcaacttcaccttcgacggggtcaacgagaacggctcggacattcgcttcgtcgccgccgacgacaagaccgtgttgcgccaccaggtcgagagcttcgacccgctgatgggcatggccctgatctgggtcgacgtgccgcgggtggagggtggccagcgccaggacatctggatgtactacggcaacgccaaggcgccggagagcggcaacggccagtcggtgttcgacccggactacaccctggtctatcacttcgacggtgcgccgggcactccgccgcgggactccaccgcctacgccaacaatgcgcagaccgccgccggcagtccggtggagggcgtcatcggtcgctccgcgcaactgctgggccagccgctgctgctgccggccagcccatcgctggcggtgagcgccggtggcaccttcagcttcagcggctgggtgcgtcccgaccaactggccggcgaacaggtcctgctgtcgcgccgcgaaggcggcaacgccctgttggtcggcctggcccagggcgcgcccttcgtcgagctgaacggtcagcgcgctgccgccagccaggccctggcgcaggggcaatggcagcatctggcgctggtcgccgacggtacccggctggcgctgtatctcggcggtcgcgaagtcgccagcctggcggcggcgctgccggcgttcagcggcgcgatcgccatcggcgcggaaggccagggcgcgcctgcggtcgccaccgaagcggcaagcggggaaggtgaggcgagcgccgcggcgccgaccctgcaacccttccagggcgccatcgacgagttgcgcctgtcgaagatcgcccgcccggcggcgctgctcctcgccgacgccaccgcccagggcgccgagtcgcgcctggtggcctacggggtcgacgagaagcagtccggcttcggcttcggcaagctcggcttcctgctcaacgcagtgccgctggatgcctgggtgatcatcgcgatcctggcgctgatgatggtccagtcgtgggtcatcatgtaccgcaagaaccagaacgtcggccgtgtcagtcgcgccaacgggctgttccgcgagcgcttcgccgaggtcggcacgcgcctggaactgctcgccgacgaccgcgagctggccgcccgcctgcaacactcctcgctgtggcgcctgtaccaggtggcggtgaaggagatccgcacccgccgcgagcagggcgccgacacctcttccgtctccgcggccaccatcgaggcgatccgcgcctccatggacggcgtgcgcaccaaggagaaccagcagctcggctcgcgcctgtcgagcctgtccaacgccatcgccggcggcccctacatcggcctgctcggcaccgtgctggggatcatggtggtgttcctcggcaccgccatggccggcgacgtcaacatcaatgccatcgccccgggcatggccgccgccctgctggccacggccatgggcctgttcgtcgcgatccccgcgttgttcggctacaaccgcctggtcacgcggaacaaggaagtcagcgcggacatgcgggtgttcgtcgacgagttcgtcacccgcctcgccgaggtgcatggcgaaagccagctcagcgaagtggcccatcgtcgcaacggccagccgttgccggcctga

SEQ ID NO: 322187 - DNA, 420 bp, Pseudomonas aeruginosa
atggcttccgtgaacagcagccacgacgatgacgacgacggcgccgtcgacagcatcaacatcaccccgctggtggacgtgctgatggtggtgctggtgatgttcatcctcaccgccaccgcccaggtcgccgggatccagatcaacctgccgaaggccagtgccaccgtggcgctgtcgcagcccaagaccaaggcgatctcggtgaacgacgccggccaggtgttcctcgacgcctacccggtgaccctgcccgagctggaggaccgcctgcgtacggagaaggccctcaaccccgacttcccggtagtggtccgcggcgacgccacggtgcagtaccagaaggtcatcgaggtcctcgacctgctgcgccgcctggagctgtcccaggtcggcctggtcaccggcaaaccgacctga

SEQ ID NO: 322188 - DNA, 747 bp, Pseudomonas aeruginosa
atgaacatgtccgccgatcccaagcacacccccgagccgaaaaatgccgcgccgctgtccatcgacggccgcccggcgaacccgaccctgcgctacctcaagtggggcctcggcgcgctgctgctcgccggcctcgcctggctggtctgggagtgggccaacgacatgagcggcgtgcgccgcgaggcgcccaaggtgccggcgatcatcccgctgccgccaccgcctccgccgccgccggaaaaaccgccggaaccggagcagccggtggaagaggaaaagatcgtcgagccggaaccgcaacccgaactggaggaggtcaagccgcaggaggaagcgccgccgtcgccggccgacgacctggccgacccgatgcagatggatggcgacgcccagtccggctccgacgctttcaacatcggcgccggcaagggcggcgggatggccggttccggcggcggtcgcgccggcaacgccagctatagccagtacctggcctacgccttccagcgcctgctgcgggacaacccggagctgcgcaacctggcgttccgcctgcaggcggagatctggctgagttcctcgggggatatcacccgggccgaactgacccgctccagcggcgaccccgagaccgaccagaaggtgctggccgcgctgcgcgccgccggccgcctggaagaacgcccgccggcttcgctgaccctgccggtgcgcatcgccctgcagggcaagcggccgggatga

SEQ ID NO: 322189 - DNA, 1707 bp, Pseudomonas aeruginosa
atgaacgcgaaagtgaaccgactggcgctggggatgggcgtcatgctcgccgcgctggccggccaggcgcaggcccagccgccggcgccctcggagaacgccacgatcaacctgatccgcctgctggtacagcagggcgtgttgaagaaggaacaggccgatgcgctggtcaggcaggccgaggccgaggcgcagcaggcccagcaggcgcgccaggccgtggcgcccgcggcggccgttgccgcggtccccggggaggtccgcgtaccctatatcccgcaggtggtgcgcgaccagatccgcgacgaagtgaaggccgaggtaatgacccaggccaaggcggagaattgggcgcagcccaacgccttcccggactgggcctcgcgcatcagcttcgacggcgacgtgcgcttgcgctacgagtcgcgctccttcggcaacggcaacagcaaccagatcaccgacttcgccgaactcaacgacgacggtccctatgacgtcaacccgaataccagctcgggcctgccgccgctgctcaatacccgcgaggaccgcgacagcctgctgcgcctgcgcgcgcgcttcggcctcaaggcggcgctgtcggaaagctggagcgccggcatccgcatcggcaccggttcggacaacaacccggtgtcgaccacccagaccctcggcggcggcttcggcaagaaggacctctggctcgaccagggctacctgacctggaagcccagcgagcgcctgagcctgaccggcgggcggatcgccaatccgttcctgtccaccgacctgctgtattccaacgacctcaacttcgacggcgtggcggcgatcttcaaccagccgctgagccgcgatgtcgcgctgttcggcacggtcggcgcgttccccgtggaatacagctcggacaccgcctcgtcgaacggcttcgacaaggaagacagcgacaacaagtggctctacggcgcgcaactgggcgccacctggaagatcaacccgcagcacagccttaccggcgcgctggcctactaccgcttcgacgatatcgaagggcggcgttccagcccttgccggccctgggccggagatccggagtgtgacaccgacggcagccgtccgaccttcatgcagaagggcaacacggtgttcctcctgcgcgacatcgtgcccaacccggccgacccggcgaacacgccgaacccgcagtacgtcggcctggcctcggagttcaatctgctcgacctgaacctcggctgggatgccgagctacccaacgacttcaagctgcgggtggccggcaactacgtgcacaacctgggctacgacgagggcgacatgcgcaagcgcgccggcggtgtggcgcagatcgccaacaacctcggctccgacggcgacatcaagagcggggcgaacgcctggatgctccagttcaccctgggcaacgccctggacatgcgcgacgccggcgactggcaggtcttcgccgcctacaagtacatccagccggatgccctgccggacggtttcaacgattccaccttccaccttggcgggaccaacgccaagggctacatcctcggcgccagctatggcttcgacaagcgcgtctacggtaccgcgcgctggctcagctccgacgaggtctacggcgcaccgttctccatcgacgtcctgcaactcgaggtcaacacgcgcttctga

SEQ ID NO: 322190 - DNA, 678 bp, Pseudomonas aeruginosa
atgaagaggcagaccatgaacacgcgacctttctcattaccgatctgggcccaggcgctgctcgccggggccgccttcgccgcctacgccagccaggcggcctacgccgacagcctggaggaacgcctgcgcacccagttgcgcagcaccacccagcaactccaggcgctgcagaccgaacaggcccaggccgccgcggcgaaagctgcgctggagagccagcgcgatgcggcgctggcccaggtcaagcaactgagcgccgagctgacccgggccaagggccaggccgagcagctctcggcccagcaacagggcttgcacgaccgggcgcggcagatggtcgaggcgagcaacgagcgactgggcaagtacaagcaggcctacgacgagttgctggtcatggcgcgagccaaggaggccgagcggcagaagctcgacctggcgttccgcgagcacgaccagcagttgcagcagtgcaccgcgaagaatcgggagatgtatggcgtggccaaggagatcctcggcgcctacgagaacgtcagcgtcgccgaggtgatgaagatccgccaaccgttcgccagcggtgcgcgggtgaaattcgaagagatggcgcagaagctcggcgacgacctctacaagacccaggtcgagaaccgccaggcggcgctcgcccagtga

SEQ ID NO: 322191 - DNA, 480 bp, Pseudomonas aeruginosa
atgaacgacatcaccctgatcgaacacctttccgtcgacagcctgaccgaggccttgcaggacgccggctaccgggtcaaccgcagcgagcagaacggcgtcgtgcaactgctcagtgccagccagggaatcggctacgcggtgcgcttcggcaatccggcggcgacgccggcgagctacctcgacttcaccttcagctgcgccctgcgcgtgcagggcgaattgcccgccgggctgaccgagcgctggaatctcagccggcgcttcggccgcctgtcgcagcagggcgagttcctggtgatggaaatggacgtgatcgtcgccggcggcgtcagcccggccaacctgcgtagccatatcgaactgtgggatcgcctgctgcaggagttcatcgcctatctgcgcgactacagccgcctggccgcggagcagcagggcatggcgcaggatgccggtcaacccgtcgatggcgaggcctga

SEQ ID NO: 322192 - DNA, 945 bp, Pseudomonas aeruginosa
atgcggccggcatttcgttgcggcgtcctggcgttcgcgcttgccgttctcgccggctgtggccagcgcgaggacggcggcgcgggccaggcccaggccgcgcttgccaagccatctgccagcgccgccgcggaacccgcggtggcccgcctcggcgccttgcaggtggcgccggacgaactgaaggcgctgctggccgaggtgccggcggaaacccgcgcgcagttgagcgagaaccgcgacgcactggaacgctggatgcgtgcgcggctcgccgagaaggcgctctacgaacaggccagcgcccaggactggcaacagcgtccgcaggtgaagacgttgatcgatgcggcggcgcggcagatcgtcctgcgtacctacctggagtcggtgagcacggtgcccgaggactaccccagcgatgccgaactgcaggccgcctaccaggcgaacaaggcgcaactggctgtaccggcgctgtaccgggtcagccagatcttcatcgccgcctctgcggccggcgggcttgccgaagcgcgcaagcgcgcccaggaactctaccggcaggccgcggacggcgacttcgccgaactggcgcgcaagcattccgacgacccgcagaccgcccgcaacggcggcgacatcggtgggttactggcgcaggcgcaactgctgccggcgatccgtccggcgctggaacggctaaaggtcggcgcggtgtccgagccgatccagggcgccaacggtttccacctggtcaagctgaccgagcgtcgcgacgcccgcctcgccaccctcgacgaggtccgtggtcgcctgcgcgaaagcctgcgcgcgcaacgccaggagcagatagccaaggcctacctggatggcctggtgaacaacgctaccctgagcatcgacggcgcgttgctcggcaagaccctggcggaactgcactga

SEQ ID NO: 322193 - DNA, 426 bp, Pseudomonas aeruginosa
atggacggcatcccggaggccaggcgtgggccgcgcgcgagccgctggcggcacctgcgcagctggctgttcggcgagcccgagcggttccgcgacgaacgccagcggctctggggcgcctatgccgcatggctcggcgagcaggtccagcagcgcctgggcgaagacgccgaaaccgcgccgcggctgctggccttcctggagtcgcggcgcgcggcggggcagttgccgaataccgacatcgacctgcgggtctggctcgacgaacgcggctggatcgtccgtctcgcctgcctgcgcagcgacgccgagccgatcgagaatgaactgcggcgcgcgctgatggaccgttcgttgcgcctgccgccgccggaacacatgccgcagccgatcgaactgcggattcgcctcatgcctggacgctag

SEQ ID NO: 322194 - DNA, 987 bp, Pseudomonas aeruginosa
atggccctatcggagtccgccgggcagcgcccggcactgctcaggcccgcgcagggacgcgacgaccgtgcctattggcacgagctgttcggttctctggaggtggtgcatttcttcctggtcactgcccgttgcggctgtttcatgcaggctgcgcgcagcctggacgtcaagccgacactgctgcgcaagaccctggcccggctcgaggagcgcctcggcctgcatctgttcgtgcatgagggcaacgccctctcgctgacccgcgagggccgcatcgtccaggccgccgggcagcgcctggtcgaggacagccagagccatgccgatcttcaccggcaacagctgctggtgcgcctggcggtggccgaaagcgtcctgcacgatgtgctcagtcgcgagctgtggggctacctgcgcaagaacgccaacctgcgcgtagccctcgccgagttgcgcgagggctggccggaaagcgcagggccggcggagatcgccatctggatcgccgatccggggcagccgcatccggcgatggaaggccacttcgccgcaccggcgcgcatcgccgagctggagtaccagccgcacatcggcaagcgctattcgcgcgagcgcacgcggccggccagcgaggacgagctggacgactacctgctggcgcagctccacggtcacgccgccagcgccgccctggcgccctggaaccggcgggtggcggctcgccagtcgggagtgatcgaggtacagagccacgacctgctgctacaggcgatcctctggggcgcctgcatcggcctgctgccgcattacgccggacgcctggagcgcaacctggcggcgttgccgcaggtcttcgacgagccgatgcggcgggaagtctggatgagcgtgcagccggaagcggagaaccgcgtggaggtgcgtgccttgctcgatctgatcgagcacgccttcgacgatcggcgcgactggttcggacgctga

SEQ ID NO: 322195 - DNA, 666 bp, Pseudomonas aeruginosa
atgacggagcggcattggcagggcgaggtctggctggcgcgggaccacgcgctgttcgccggggtcaacggcgatacccgcgagcacgcgcactatgcccaccagttgctgctggcggagacgccgctgcgggtgcgcgtcgctggccaggtactggaggcccggcgcttgctggtgccctcgctgcaagcccattgcgtcgaagcgtcgcagccgttgctggcgctgtacgccgagccgctggcgttcgacagcgacgacctgcgtcagcttctcgaggacgctcccggcgagcccgaggcgttgctggggcggcttgcgcggctgcctcgtcgacggctcgaccgccgcgtcgaaaaggccctggcggcgctcgacgagcaactcgcggcgcgggtcgaggcggaaagactggcgcgcagcgccagtctttcgctgagccaactggagcggctgttcgccgtccaggtcggcctgtcggtacgccgcctggtgctctggcgccgcctgtacctggccttcgccctggccttgcaggggcgcagcctgaccgaggcggcccatcacgccggctttgccgacgctgcgcacctgtcgcgcagcgtacgcagcctgctcggtatccgcgccggcctgtcgctgccgcacctacgcctggccggctga

SEQ ID NO: 322196 - DNA, 906 bp, Pseudomonas aeruginosa
atgcagttcttcctgcgctacgcctacgcgcccctcttctggtccggcttcatcggcctggcgacctggcaggtcggctatcgccaggcttcccacgcctggctggtcgccctgttcctcggggcgctcggcctgtcctttctcgccgaacgacgactgccctaccagccacgctggaaccggccgcacgccgaccgcctgcgcgatgtcctgcacgcgtcggtcaacgaaagcctgaacgcacttggcatcctcgccctgccactgctggccggagtcctgggcttctggccggtatggccgcaggcctggccgctgtggctgcaactgctgctggcgatcgtcctggccgatctcggcatcaccctggtgcactacgccagccaccgttcggcgctgctttggcggctgcacgcggtgcaccatagcgtgcagcgcctgtacggtttcaatgggctgatgaagcatcccctgcacctgggcctggaagcgctcggcggcaccctgccgctgttgctgctcggcgtgccgcagacggtcgccgcgctgctcgccttcgccatcggcatccagttgctgctgcaacacagcaacgtcgacatgcgcatcggcgggttacgccatgtgttcgcctgggcaccgctgcatcgcctgcaccacatccgctacgggcgcgccggcgacgtcaacttcgcgctgttcttcagcgtctgggaccgcctgctcggcaccgccctccatcgtcccgactaccgcctggacagcaccgacatgggcatcggcgaccagcctgactatccccgcgactatgccggccagttgctcgcgccattccgcgacctgccacgcagcaggcacgtcccacagccgccggaaggattgggacgttcagccggccaggcgtag

SEQ ID NO: 322197 - DNA, 1317 bp, Pseudomonas aeruginosa
atgcgctcccccacccgccccccggcggccgccgatccggccagccgccgcagcgtctttgccgtggtcctcggcaacgccgtggagttcttcgacttcggggtctatgccaccttcgcggtgatgatcggacggactttcttcccctccgacagcgccttcgtcagcctgctcctgtcggtcaccgcgttcggcgtcggcttcatcatccgccccctcggcgcgatccttatcggcgcctacgccgaccgcgccgggcgcaagccggcgatgctccttaccctgttcctgatggcgctgggcaccggcggcatcgcggtgctccccggctacgacagcatcggcccggctgcgccgctgctgctggtgctgacccgcctgctgcaaggcctggcctggggcggcgaggccgggccggcgaccacctacatcctcgaggtggcaccgccgcacaagcgcggcacctacgcctgctggcaggtcgtagcgcaaggcatcgcggcggtcgccgccgggctgatgggctacctgctcaccctctggctcgacgagcgccaactgcaggaatggggctggcggattcccttcgcggccggcctgctggtcctgccgatcggcctgtacatccgcctcaacctggccgagacctttgccggacgcggccgccaggccagcacccggagcctgctcggcgaattgttcggcaatcatcggcgggccctgctgctcggcctgctgatcctctccggaagcaccatcacccagtacttcctcaactacatgaccaccttcgcccttaccgagctgcacctgccggcgggcatcgcgatgctctcgacgctggtcgccggcgccgcactggcgctctcggcgttgctcggcggcgtgctctgcgaccgctacgggcgccgctccgtgctgatcctgccgcgcctggcgctgctcgcggtgctgttcccggcactgcaggcaatgacccgtcaccccgagccggcagtcttcctcgcagtcctcgccctgctctcggccctgcatggcatgagcggcgcggcgctgatcgtgctgctggtagaaagcttcccccgggcgctgcgctccaccggtttttccctggtctatgcgaccggcgtcgccgcgttcggcggcaccgcgcagatcgtggtgacctggctgatcggcgtcaccggcaatccgctgtcgccggtgggctacctgctgctggccaacctggtctgcctgggtggggcctggctggcccgcgagacctggccgggtcgcggggacatgggaggcgcgccgctggtgctgcgcgactga

SEQ ID NO: 322198 - DNA, 1395 bp, Pseudomonas aeruginosa
atgaccgcgctgcacgacctcccgggaacccgcctgctggcactgttcgcccgccgggaactctcgcctggcgagtactacgagcatctgctggcccacatccagcgctgggaaccgcatctcaacgcgctgtatcgcttcgacccgcaacgggttcgcgaacaggccgcggcggccaccgagcgctggcgcaagggacagcccaaaggcccgctggacgggctgccggtaaccatcaaggagctgatcgccaccgctggcgaacctatcccattgggcagcgccgccaccgccctgcaacccgcgccctgcgacgcgccgccggccgctcggctgcgcgaagccggcgcgatcgtcctggccaagactacggttccagacttcggcatgctttcatccggcctctccagcttccacggagtcacccgcaatccctggaacctggccaacaataccggcggctccagttcgggcgcggcagcggcggccgccgccggctacggaccgctgcacctgggcaccgacatcggcggctcggtgcgactgccggcgggctggtgcggcctggtgggcttcaagccaagcctcgggcggatccccatcgacccttactacaccggtcgctgcgccggtccgatgacccgctgcatggacgactgcctgctgctgatgcgctacctcgcgcagcccgacgcccgcgacgccaccagcctgccgccggaagcgctggactggagcgccgagccgctgtcggtgcgcggcctgagggtcggcctgcaactcgaccccggctgcggcctgcagcccgacgcggaaatccgcgccgcgatcgaggccgcggcgcggctgttcgaggagcacggcgcccagctcaggatcgtcgaaccgctgatggaccggagcctgctcgacggcctgaacgacttctggcgcgcccgcctgtggagcgaactgctgctcctcgacgagacgcggcgggccagggtgctgccctatgtccacgcctgggccgagggcggcgcacgggtcagcggggtcgatgcggtgcgcggtttcaaccagaccttcgagatgcgccggcgcgccgcccggctgttcggcgagatcgacctgctgctgacgccgaccaaccaggtcgaggccttccccgccgactgggcctcgccgctgaacgatccgcagcggccgttcgagcacatcgtcttcaccgtgccgtggaatatgggcgaacagcccgcgctctcgataaactgcggcttcacggccgccggcatgccgatcggcctgcaactggtcgcgccgcgcttcgccgatacctggctgttgcgcatcggcaagacctacgaaggctggcgcggtccgatccacggctggccccggccgccggctgactga

SEQ ID NO: 322199 - DNA, 621 bp, Pseudomonas aeruginosa
atgaaattcctggaaaaactgaaaaaacgcaaagagcggaagtacttccgtggctgggaaaagatcttcaaggccccggagaagatccgtcttgcctacccacattacgaggtcggcgtgggcacctacgggatcccggaggtcaccgagttcggcgacaaggccaccctaaggatcggcgcctacacctcgatcgctgccggcgtgaagatcctcctcggcggcgagcaccataccgactggctcaccacctaccccttcccgaagatgatcgatgaggtcgccgacatccctgacagcaccacgacccgcggcgacgtggtcatcggtagcgactgttggatctgcacgaacgcgctgatcctctccggggtcaccatcgggcatggtgcggtagtcgccgccggcgcggtggtgacccgcgacgtgccaccgttcgccatcgtcggcggcaacccggcccggcagatccgctggcgcttcgaggaagacatccgcgaagccctgctggcttcggcctggtgggactggccggtggacgaggtgaagcaggtcgcccggaccctgtgcagtaccgacatgacagccttcctgcgctacatcgagcaacgcaagggctga

SEQ ID NO: 322200 - DNA, 903 bp, Pseudomonas aeruginosa
atgattgaagaagccacttccagcaagcactcaggcacgacggacgccccgctggtatccgtcgtagcgccctgcttcaacgcggaaaagtacctggaagaagccctgcgcagcatctacgagcaggactacccgaatttcgaagtgatcatcgtcgacgacggttccaccgacaacagctacgccatgctggagcagttgcagaaagtccacggtttccagctctaccgccagcagaaccagggcgtcagcgcagcgctgaacttcggtctgcaacacgcccgcggcgactacgtagccacgccggacctggacgacatcatgctgccgcactcgttgagcgtgcgcgccgcgtacctcgaccagcacccggaagtcggctgcgtcggcgccctggtgatctacatcgacagcgaaggccaggaaaccaagcggcagaacggcaaccgcatccgccagctggacttcgactacctgctcggcaacgcctatgtctgcggcgccccggtgtccctgtaccgcatggaggccctgcgcgccgccggcttctacgatcccgagatcaaggtgcaggacttccagatgaccctgcgcatcgccagccagggctaccagatccacaagctgccggtgctggtcacccgctaccggcgccaccccgacaacctgtcgcggcgctacaaggtgctgctcgatgccgacctgcgcaccatcgcgccctaccagtcgcatcccgcctacgagcgcggccgcacggatctggtcaacaaggccctgaagtacgccgtggtcgcggacaagcggcatgcctggcaactgctccgctcgctgccgctgcggcagtggaaccgcaccaccttccgccggttgaagcgcttccttctccatcacgagaccacctga

SEQ ID NO: 322201 - DNA, 639 bp, Pseudomonas aeruginosa
atgggcaactatttcgagagccccttcaggggcaagctgctctcggaacaggtcagcaacccgaacatacgggtggggcgctacagctactactccggctactatcacgggcattccttcgacgactgcgcccgctacctgatgccggaccgcgacgacgtggacaagctggtcatcggcagtttctgctcgatcggcagtggcgccgccttcatcatggccggcaaccagggacaccgcgccgaatgggcgtcgaccttccccttccacttcatgcacgaagagcctgtcttcgccggcgccgtgaacggctatcagccagccggcgacacgctgatcggccatgacgtctggatcggtaccgaggcgatgttcatgccaggcgtacgggtcggccacggagccatcatcggcagccgcgcgctggtgaccggcgatgtcgagccctatgccatcgtcggcggtaacccggcccggaccattcgtaagcgcttttccgatggcgatatccagaacctgctggaaatggcctggtgggactggccactggccgatatcgaggcagccatgccactgctgtgtactggggatatccccgccttgtaccggcactggaaacagcgccaggccacggcctga

SEQ ID NO: 322202 - DNA, 780 bp, Pseudomonas aeruginosa
atgactgcgacagacagaacgcccccgccattgaaatggctctgcctcggcaaccgtgatgcgaacgacggattcgagctcttcgcccatggcatctatgcgaggaacggcgcgttggtcggcagcaagctctccctgcgcgaacggcgccagcgcgtcgacctgtcggccttcctttccggcgcaccgccgctgcttgccgaggcggcggtcaagcacctgctggcacgcctcctgtgcgtgcaccggcacaacaccgacctcgaactgctcggcaagaacttcattcccctgcatgccagcagcctgggcaacgccggggtctgcgagcggatcctggcctcggccaggcaattgcagcagcaccaggtcgaactctgcctgctgctggccatcgacgagcaggaacccgcctcggcggagtacctggcgtccctcgcccggctacgcgacagcggcgtgcgcatcgcgctgcacccgcaacgcatcgataccgacgctcgccagtgcttcgccgaagtcgacgccggcctctgcgattacctgggcctggacgcgcgcctgcttgcccccggcccgctgacgcgtaacctgcgccagcgcaagagcatcgagtacctgaaccggctgttggtggcacaggacatccagatgctttgcctcaacgtcgacaatgaggaactgcaccaacaagccaacgcactccccttcgccttccgtcacggcaggcactattcggagcctttccaggcctggccgttcagcagtccggcctgctga

SEQ ID NO: 322203 - DNA, 855 bp, Pseudomonas aeruginosa
gtgaaactctcccaactcggattcttctgcgcggtggtcgaacgcggcaccatcgcagccgcggccgaacagttgcattgcgtgccgtcgaacatcactacccgcttgcgcgaactcgaaggacaactcggcgtagccctgttcaatcgcgaaaggaatcgcctgctggtcacccccgagggccgcctgctgtaccgccacgccacgcgcctgctggcgctggccgacgagaccgctgcgctgttcgccggcgaccaggcgcacggcgcgctacgggtcggcgcactggacgtggccctggccaatcatctgccccagcgcctggcccgctaccgccgcgagtcgccgggcgttgaactgcacatccgcccggagcattcgctgctgctcgagcgcctgctgatggagggagagctggacctgatcgtcaccgacggccccatcgaacacccgttgctggccagccgcctggccttccgcgagcgcctgttgcgggtcactcccgccgacctgccggcacccactcccgaggacctcgccagcctcgaactctatgtgttcggccacacttgccactaccgccgccaggtcgaccgctggctggcggaaagcggtatccagccgcgtgcaaccctggaaatcgagtcctacccgagcctcttcgcctgcatcgaggccggtctcggcttcgcctgcgtgccggagagcttcgttgcacgcatgccctccgcgcgacggggtttccatgccgaaccggtagccggcctggactccagcgatatccatttcgtctggcgcaaacagcaagcctcgccgctgatccagggcttcatcgacagcatcggcgccgactga

SEQ ID NO: 322204 - DNA, 297 bp, Pseudomonas aeruginosa
atgacctaccacgtactggttcagttcgacgttccctccgacaagcgcgaagcgttcgccgcggcaggcctgttcgatgccaatggctcgttgcagaatgaaccgggcaccctgcgcttcgaggtgatccgcgacgagaacaaccgcaaccgcttctacctcgacgaggtgtacgaagacgaggcggcgttcctccagcattgccgcaacgaaaccatcgcgcgcttctatgaactgatcgacagctatgccttcggtccgcttttcctgttcaagggctaccgcgtcgagggttga

SEQ ID NO: 322205 - DNA, 396 bp, Pseudomonas aeruginosa
atgcgaatcctgcacagcatgctccgcgtggccgatctcgaggccgcgctggagttctacacccgcgccctggacatgcgcctgctgcggcgccgggactatcccgaaggccgcttcaccctggccttcgtcggctaccaggacgagtgcgcggccgctgccctggagttgacccacaactgggaccgggacggctacacccagggcgacggctacggccacctggccatcgaagtcggggatgccgccgtcacctgcgcccgggccagggcgctgggctatcgggtcacccacgaggccgggccgatgcagcacggacgcagcgtgatcgccttcctcgaagacccggacggctacaaggtggaactgatccagaagggtacccagttcgattga

SEQ ID NO: 322206 - DNA, 507 bp, Pseudomonas aeruginosa
atgaatatttccatccgtgcggagacgcccggcgacatcgacgccatcgcccgcctgaccgaagccgcgttccgcaacgaaacgcatagcagccataccgagcagtacatcgtcgatgccctgcgccgtgccggcgcgctgacgttttcgctggtggccgaagcgaacggccaggtgatcggccatatcgctgcctcaccagtgaccatcgatggcgaagcgggcggctggtacggcctcgcgccgctatcggtggcgcccgggcgacagcgccagggtctcggttcgcagttggtccggcgcctgctcaccgagttgcgactgctgcccgcgggtggctgcgtggtactgggcgaaccgacctactactcgcgcttcggctttcgggtggaaagcggcctggcgttgcccggcgttcccgccgaatacttccaggcacagtccttcagtgggcgcatggcgcgaggaatagtggccttccacgccgcattcgacgccagcgactga

SEQ ID NO: 322207 - DNA, 258 bp, Pseudomonas aeruginosa
atgaacgtttccaagccggaacaacggacgcttcacgccttggcccagggcggccatatcgccttccttcgcgacgcttcgggcaagatcacccgcgtcgagtgctacaaccgcgacggccacctgctgctcgactgcaccctggcggtgttctccaggctgaagaacaagggcctggtccactcccgccagggcaggccctaccggatatccatggccgggctgaaagccgtgcgcccgcaggcggacaatcgctga

SEQ ID NO: 322208 - DNA, 294 bp, Pseudomonas aeruginosa
atgtttcgcacggcgctgatgctgttcatgtcttcgttggcaattcctgccctcgcctcgatgagatgcggcacgcacctggtggacgagggcgacagcgtcgagcaagtcctggaaaggtgcgggcaaccgctgagcaggatcgtcaacgagcctgccctgcgcaacaacggcgtgcccaagttgaatgccgcacgcaccgaattctgggtgtatggccccagtggaggcgtctaccgacacttgcgcttcatcgatggcaagctggtcgagattcggctcgagcggaagtga

SEQ ID NO: 322209 - DNA, 423 bp, Pseudomonas aeruginosa
atgggagagccagggggggcggatgggttttccgctgtcgcagcggtcgatccgggagcgaaccccgaagcgcaactggacgaggagcctcaggaggtcagcgaagcgccggcctatcgcgtggatgacctcaccttcctgtacctcacccatgaggtctatctggaaccctacgtttcctgccgtccgaaagtcctgggcgaacgttcgtacgtcgcctgctggaacgaaacctattccggccgctccccgctgaatttctgggaatacgacgggggcgacttcctcgccctcaacgacccggcacgtgtgttggccgagggaaagttcgccagcgagcagcgcatcggcgaagcgcccctgccgctgcccctggatatcgatctggaccagttggagcgggcctactcgctgatgatgtaa

SEQ ID NO: 322210 - DNA, 711 bp, Pseudomonas aeruginosa
atgactgcccacgacctgccccgccaagcctttctccgcggcgccgtcgccatcctcccattgtccctggccgtcgcgccctgggggctgctggcgggatcgatggccatcgaagccaacctcaccccggccgagggccagggcctgtccgccatcgtcttcgccggcgccgcccagttggtggcgatcggcatgctcaagggcggtgccgggttcttttcgatcatcttcaccaccctcctcctgacctcgcagcacctgctctacggcatgagcttgcggccggtcctgtcacctctgccgggacgctggcggatcggcctgggcttcctgctcaccgacgagttcttcgccctcgccagccagcacgaccggcgcaacttcaaccgctggtacgccctcggcgtcggcctgaccttctatatcgcctggaacctgttcaccctcgccggcatcctgcttggccgcagcattcccggtctcgaacacctgggcctggatttctccatcgccgccaccttcatcgcgctggtcgcgccgctggtgcgcaacgtaccgacgctggtctgcgtggccacctcgctgttctgctcggtgctgttcagccactggcaatggagttcggcgctggtcctcgccggtctcgccgggatggccgccggtttcatctgcaacaagctgtatcgggaggcgccatggtctgggcagtga

SEQ ID NO: 322211 - DNA, 312 bp, Pseudomonas aeruginosa
atggtctgggcagtgatcttcgggatgggcgcgatcgtcttcctcaaccgctacctgttcctcgaaccgcgcctgccgatccgcctcggcagcaacctgcggcagttcctcggtttcgccgtgccgggaatgctcacggcgatctgcggccccatcgtgttcatgcccgaggggcgcatcgacctcggctacgacaatccctacctggtcagcggcgcagtcaccgtggcgctggtgctctatacccgcaataccctggcgagcatgctgctgggcatggcgttcttcttcctgttcaagtggttggtctga

SEQ ID NO: 322212 - DNA, 1659 bp, Pseudomonas aeruginosa
atgtccgactcccttccccagcgcaacggcgggcagatcctggtagaggcattgcggcgcaatgccgtcgataccgtctactgcatccccggggaaagctacctgccggtgctcgacgcgctgtacgacgccgacggcatccgcaccatcgtcacccgccacgagggtgccgcctcgaacatggccgatgcctacggcaagctgaccggccgaccaggcatctgcttcgtcacccgcggccccggtgccacccatgcggcgaatggcgtgcacacggcgcagcaggactcgacgccgatgatcctgttcgtcggccaggtggaaagcgccttcaagggccgcgaggcgttccaggaagtcgactacgtgcagatgttctcgggcctggccaagtgggccgtggaaatcgaccgtatcgaacgcatcccggagatcgtcggccgcgccttcagcgtcgccacctcgggccgaccgggcccggtcgtggtcgccctgcccgaggaaatcctcttcggtttcgcgcaggtcgccgatgcgccggagccaagggtgcttccggggcggccgggcgccacggcgatggcggaactgcgcgaactgctggcgaacgccaggcgccccctgctggtacttggcggcagcggctgggacagtgccgccaggaaacggctaggcgccttcgtcgaggccaatggcctgccggtggccacctcgttccgtcgccaggacctgttcgacaaccgtgacccgcactacgccggacaactgggcttcggcgcggcgccggcgctattggagcggctgcgccaggccgacctgctgctggtggtcggggcgcgcctgggcgaaacgccgagcgccggctacagcctggtgcgtagtccggcccccgcgcagacgctgatccacgtgcatccggacagcgcggaactgaaccgcgtctacctggcgcgattgccgatccaggccaccccgtgtgccttcgccgaggccctggccgacctcgcgccgttgccctcgagcacctggcaggagtggcgcgaagccgcccatgccgattacctggcctactcgaccccggccgcgagcgaccccgccgtccagggcgtcgacctggcgtccgtggtcgcgtacctcagcgaaaacctgccggacgacgcggtgatcgccaacggtgccggcaactatgccgtctgggtgcatcgcttctaccgctatcgccaggcccgcacgcagttggcgccgaccaacggcgccatgggctacggcctgcccgccgcgatcgccgccagcctgcgcgatccgcagcgcagcgtggtgtgcttcgccggcgacggctgtttcatgatgtatccgcaggagctggcgaccgccgcgcagttcggcgcgacgccggtggtgatcgtggtcaacaacggcatgctcggcaccatccgcatgcatcaggagcgcgaatatcccgggcgggtatccgccacccgcctggacaaccccgacttcgtcgccctggcgcgagccttcggcgcccacgccgaacgagtggaatgcagcgccgacttccccgccgcattccgccgcgcccgcgaaagcggacgcccggcgctgctggagctgctgaccgacccacgccagatcacgccgcaggcgcgcctcgcctga

SEQ ID NO: 322213 - DNA, 675 bp, Pseudomonas aeruginosa
atgggccgcttcgtcgggaaacaggcggacggctacgagacgcggatcggccgcctgttgccgggctacgagttgctgcacctgctcagtcgcgcgcagttgctggcccgtctgccggaacgggcgcgcctgctcagcgtcggctgcggcgccggcggcgaactggcggagctggccgggttgcgtccaggctggcgtttcgtcgcggcggacctgtcggccgacatgctcgccctggcccgccagcgctgcgccaggctcggcctgctggagcggatcgagctgcactgcggcgacgtcgccgggctaccgcctgcgccgccttgcgatgcggcgctggtcctgctggtgctgcatttcctgcgcggcgaccaggccaagcggcgctttctcgaggcggtcgccgagcgtctggcgccagcggcgccgttgctgctggccaacctgatggaagcccgggacgccttcgaacgtccggtgcaggccgaggcctgccgcttggccgggctttccccggaggacagcgacggcatgctgcaacgcttgcgcgaggatttcgatccgttgtccgagcagcgcctcggcgaactgctggaagacaccggcttcgtcctgcccagccgctatttccaggccgtgggctaccaggcctggatcgccttccgcgccggctga

SEQ ID NO: 322214 - DNA, 909 bp, Pseudomonas aeruginosa
atgtcgcaacccgcctatcgtctgttcaatgtcgaactcaagcgccgtgagcaactcagcccggcgctgacccgcttcgtcttcggcggtccggaggtcgccgagatgaagacccttgccgccgaccagcggatcaagatcttcttccccgatgccagcggccagccgcccagcctgcccggcggcagcgagtggtaccaggcctatcgcagcgtcgagccggcccgccggccgccgatgcgtacctacaccatccgtgcgctgcgcgccgagcaggaagaggtcgacgtggagttcgtcctccacggcgagaacggcccggcctcggcctgggcgacccacgcgcggatcggcgaccgcctgcaactggccgcgcccaaccggcaatacggcgatgaccccggcggctacgaatggaaaccgccggctggcgtccgccatatcctgctgatcgccgacgaaaccgccttgcccgcggtggcgggaattctcgaggagctggccggcgaaaccgagccgccggtggtcgaggcctttctcgaagtgccgggagaagccgacatcctcgacctgccggcgattcccgctgcgcgcctgcactggctgccgcgccaccaggccggtatccattcgcgcaacggcgagcggatgatcgaggcggcgcgccaggcgcggctgccggaacgcgaggtggcgggtggtgcggcccaggaactggaggacatcgatatcgacgaggagatcctctgggaactggcgagccccgagagcggcagtttctacgcctgggtcgccggcgagtcggcggcggtgatggcgatccggcgctacctggtgcaggagcgcggtatcgacaagcgtcatctgaccctgatgggctattggcgcctgggcaaggtgttcgactga

SEQ ID NO: 322215 - DNA, 1425 bp, Pseudomonas aeruginosa
atgaccctttatctgcaactcgccgagaccctcggttcgcgcatcgaacagggcctctaccgtccgggcgaccggctgccctcggtgcgggccatgagcatcgagcacggcgtcagcctgagcaccgtgcaacaggcatacaggctgctggaagatcgcgggctggccgagccgcggccgaagtccggctatttcgtaccggtcgcgcgacagatgccgccgctgccggcgatcgcccgcctggcccagcggccggtggaaatctcgcaatgggagcaggtgctggccctggtcagcacggtaccgcggccggacgtggtccagctcggccgcggcatgccggacatctccagcccttcgctgaaaccgctgacccgcagcctggcccggctcaaccgccacgccgacgcccgtgcgctggcctacgacgggatccacggctcgccgttgctgcgcgaggaagtcgcccgcctgttggtggactccggctgtcgggccaccgccagcgacgtggtgatcaccaccggctgccacgaggccctgtcggtgagcatccgcgcggtgtgcgaaccgggcgacatcgtcgcggtggagtcgccgagcttccatggcgccatgcaatcgctgaaaggcctcggcatgaaggccctggagatccccaccgatccggtcaacggcatcagcctggaagccctcgaactggcgctggaacagtggccgatcaaggccatccaggtgaccccgaactgcaacaacccgctcggctacatcatgcccgagtcgcgcaagcgggcgctgctggccctggcccagcgctacgacgtggcgatcatcgaggacgatgtctatggcgacctggcctacacctatccgcgcccgcgcaccatcaagtcgtacgacgacgatggccgggtgctgctctgcgggtcgttctccaaggtcctggcgccgggcctgcggatcggctggatggtacccgggcgctacgccgaccgcgtgctgcacatgaagtacatcagtaccggcgccagcgccctgcaaccgcaactggcgatcgccgaattcatcggcaacggccactacgagccgcacttgcggcgcatgcgcgcccagtaccagcgcggacgcgacctgatgatcgactgggtggcgcgctatttcccggagggcacccgcgccagccggccccagggcggtttcctgctctgggtcgaactggacgaggcgttcgacaccctgcgcctggacaaggccttgcgcaaccgcggcgtacaagtcgcggtgggctgcatcttttccgcttccggcaagtatcggaactgcctgcggatgaactacgcggcgttgccgaccccggccatcgagcaggcggtcaggcgagtaggggagagcgcttgcgagctgctggagccttgcgaggcctga

SEQ ID NO: 322216 - DNA, 255 bp, Pseudomonas aeruginosa
atgacgcgactcagtgcgaaatccgagcgccgccaacgcctcgatggccccttcccactcgccgcgatggacaacctggcgcaggccctgcgtcgcggctatcgcctggcccggcaacgccagctgacccggcgcgcgctgctggacctggaagcggcggaactgaaggatatcggcctgagcgccgagcaggcccgcgaggaagcctcgctggcgttctggcaggcgggaaaatccggcgggaggaaggcatga

SEQ ID NO: 322217 - DNA, 258 bp, Pseudomonas aeruginosa
atgatccgctgtcgcaactgtggcgaacgcccagccagcgaagggcatatctgtatggtctgcaagcgccgatccgacatcgacccatacaaggcgctgatcgccatggccctgctggtctactgcggcgtcagcctggcggcctacctcaagccgcatatgccggcaccgccgcctaccgccggcagcagcgtccagcccgccgaggagctggcccagcgcgcccgccaggccaccctggaacagcgcggcatctga

SEQ ID NO: 322218 - DNA, 300 bp, Pseudomonas aeruginosa
atgaccatcagcaagaccaagtccagcttctaccgccgcctctacgtcgcctacctgatcgacagcggcaccgccagcgtgccggagatcatggccgccaccggcatgccccggcgtaccgcacaggacaccatcgccgcgctggaggaactggacatcgtctgcgagttcgagcagcgggagggtgcgcgcaaccaccagggcggctatgtcatccgcgactggggggcggtacggcgggagtgggtggtcgagcagcatcggctaatcgcggcggcgctggagtatccggcggaatga

SEQ ID NO: 322219 - DNA, 474 bp, Pseudomonas aeruginosa
atgtccattccattggatatctacgatcagcgtattcttgcgttgctgcaggaggaatcctcgctttccaccgccgagatcgccgagcgcatcggactttcccagtcgccctgctggcggcgcatccagcgcctgaaggaggagggggtgatccgcaagcaggtgaccctgctcgaccgcaagaagatcggcctgaatacccaggtattcgcccagatcaagctcaacgcccatgggcgcaagaacctcaccgatttcgccgaggcgatgcaccagtttcccgaggtgctggagtgccacgtactgatgggcgcggtggacttcatgctgcgtatcgtcacccgcgatatcgaatcctacgaacgctttttcttcgagaaactgtcggcggtgccgggcatccaggaagtgaactccatcgtcgccttgtcggaaatcaaatccaccactaccttgcccctgctcgctccctga

SEQ ID NO: 322220 - DNA, 393 bp, Pseudomonas aeruginosa
atgtcaaccctcgccccccttttcctggccaaacaccctgacggcgaagaacgccaggtgatccgcccgaacgtctgggaaacctcctgcgcagataccgagaccctgtcgatcttccatatcgagggcatggccgatccggacctgctgtgccgggtgctcaacctgttcgccgtgcaatccttcaccccggagcgggttcgcgccgaccgcgaggaccacaagatccgcctgctgctgaccttccccggcctcagccagcaccgcgccagcgtgatcgcggagaagctgcgctcgctggtcaccgtgctcgccgtccgcctggagttctctccccatgccggcaaggtccgtcccagcgtcagcgagccgctgctggccagcgtcgtctga

SEQ ID NO: 322221 - DNA, 1002 bp, Pseudomonas aeruginosa
atgtcccgaccgcgtttccttccggataacttcaccctggcgctgatcgccaccgtccttctcgccactttcctgccctgcagcggccagaccgccgtggtcttcgaatgggtgaccaacatcggcatcggcctgctgttcttcctccacggcgccaagctgtcgcgccaggcgatcatcgccggcatgacccactggcgcctgcacctgctggtgttcgcctgcaccttcgtgatgttcccgctgctcggcctggcgctgaaaccggcactgtcgccgatggtcaccccggagctgtacctcggcatcctgttcctctgcgccctgccggccacggtgcaatcctccatcgccttcacctcgctggcgcgcggcaacgtgccggcagcggtatgcagcgcttccgtgtcgagcctgctcggcgtattccttaccccgctgctggtcaagctgctgctcggcgccgaaggcgagaccggcaacgcgctggacgccatcggcaagatcaccctgcaactgctggtacccttcatcgccggccaggtcctgcggcgctggatcggcgcctgggtggagcgcaacaagccggtgctgcgctatgtcgaccagggctcgatcctgctggtggtctacaccgccttcagcgccgcggtgatccagggcctgtggcacgaagtaccctggctggcgctgctcggcctgaccgtcgcctgctgcgtgatcctcgccctggccctggtgctgacaacggtgctggcgcgacgcctgggcttcagcaaggaagacgagatcaccatcgtcttctgcggttcgaagaagagcctggccaccggcgtgcccatggccaaggtgctgttcgccaccagtgcggtgggaccgatggtgttgccgctgatgctgttccaccagatccagctgatggtctgcgcggtactcgcgcaacgctacgccaggcgccgcgacgacgcagcggcggcgctggccgaggccccctcgcgctga

SEQ ID NO: 322222 - DNA, 1356 bp, Pseudomonas aeruginosa
atgtctttcgatttcgatctgttcgtcatcggcgccggctcagggggcgtacgcgccgcccgcttcgccgccggcttcggtgcccgtgtcgcggtggcggagagtcgctacctgggtggcacctgcgtcaacgtcggctgcgtgccgaagaagctgctggtctatggcgcgcatttcagcgaggacttcgagcaggcccgggcctatggctggagcgccggcgaggcgcagttcgactgggcgaccctgatcggcaacaagaaccgcgagatccagcggctcaacgggatctaccgcaacctgctggtgaacagcggggtgaccttgctcgaaggtcacgcccgtctgctcgatgcgcacagcgtcgaggtggacggccagcgcttcagcgccaagcacattctcgttgccaccggtggctggccgcaggtgccggacattcccggcaaggaacacgcgatcacctccaacgaagcgttcttcctcgagcgcctgccgcgccgcgtgctggtggtcggcggcggctacatcgccgtcgagttcgcctcgatcttcaacgggctcggcgccgagaccaccttgctctaccgtcgcgacctgttcctgcgcggcttcgaccgcagcgtccgcgagcatctgcgcgacgaattgggcaagaagggcctggacctgcagttcaacagcgacatcgcccgtatcgacaaacaggccgatggcagcctggccgcgaccctcaaggacggccgggtgctggaggcggactgcgtgttctacgccaccgggcggcggccgatgctggacgacctgggcctggaaaacacagctgtgaagctgaccgacaagggcttcatcgcggtcgacgagcactaccagaccagcgagccgtcgatcctcgccctgggcgacgtgatcggtcgcgtccagttgacccccgtggcgctggccgagggcatggcggtggcacggcgattgttcaagccggaggagtatcgcccggtggactacaagttgattcccaccgcggtgttcagcctgcccaacatcggcaccgtcggcctgaccgaggaggaggcgctgagcgcccggcacaaggtgaagatcttcgagagccgcttccggccgatgaagctgacccttaccgacgaccaggaaaagaccctgatgaagctggtcgtggatgcccacgacgacagggtgctgggttgccacatggtcggcgccgaggccggcgagatcctccagggtattgcggtggcgatgaaggccggggcgaccaagcaggcgttcgacgagaccatcggcatccacccgaccgcggcggaagagttcgtcaccctgcgcacgccgacgcgctga

SEQ ID NO: 322223 - DNA, 423 bp, Pseudomonas aeruginosa
atgtcccccaccctcacccacctggcgctgcacgtccccgacctcgacgcctgcatcgccttctacgaaaccttctgcggcatgcgggtgatccaccggcgccccggcaaaggctcgcagatcgtctggatggccgaacccggccaggaacaacgcttcatcttcgtcatcatgcccggcggccagccgcgcaacctggccagcgacgattacagtcatttcggcttcgccctctccagccgcgccgcggtagacgatctggcgcgccgcgccgaggccgccggctgcctggtctgggcgccgcgcgacgagccctatccggtcggctactactgcggcctgcgcgatcccgcgggcaactatgtggagttcagctacggccagccgctgggcccgggttccgaggcgctgccgattccctga

SEQ ID NO: 322224 - DNA, 840 bp, Pseudomonas aeruginosa
atgatcaagaaatgtcttttcccggccgccggttacggcactcgtttcctcccggccaccaaggccatgcccaaggaaatgctgccggtggtgaacaagccgctgatccagtacgcggtggaggaggcgctggaagccggcctttccgagatcggcatcgtcaccggccgcggcaagcgttcgctggaagaccacttcgacatcagctacgagctggaacaccagatccgcaacaccgacaaggaaaagtacctggtcggcatccgtcggctgatcgacgagtgcaccttcgcctacacccgccaggtggagatgaagggcctcggccacgccatcctcaccggtcgtccgctgatcggcgacgagccgttcgccgtggtcctggccgacgacctgtgcctgaacctcgaaggcgacagcgtgctgaagcagatggtcaagctgtacaaccagttccgctgctccatcgtggcgatccaggaagtgccgccggaagagaccaacaagtacggcgtgatcgccggcgagatgatccgcgacgatatcttccgggtgaacaccatggtcgagaagccgaagccggaagaggcgccgtcgaacctggcgatcatcggccgctacatcctgaccccggacatcttcgacctgatcgagcagactgaaccgggcaagggcggcgagatccagatcaccgatgccctgatgaagcaggcccaggacggctgcgtgctggcctacaagttcaagggcaagcgtttcgactgcggcagcgccgagggctacatcgaggcgaccaacttctgctacgaaaacctctacaagaccggcaaggctcactga

SEQ ID NO: 322225 - DNA, 1362 bp, Pseudomonas aeruginosa
atgcggctatgcgtgattggtgcgggctatgtgggactggtgacggcggcctgtttcgccgagatgggcaaccaggtgcgttgcgtggagcgtgaccgcgagcgggtcgcgcggctgagacgcggcgagatgccgatctacgaaccgggcctggaaagcatcctgcgcgatcagctggacgccgcccgcctgaccttcaccgccagcctggcggaaggcctggccgacgccgaagtggtgttcatcgccgtcggcacgccgtgcggcgaggacggctcggccgacctcagccacgtgctggcggtcgccgagcaacttggcgcgcaactgcgccaggcctgcatcgtggtcaacaagtcgaccgtgccggtgggcaccgccgaacgggtcgaagagatcatccgcctgggcctggcgcgccggcgcaagcgcttccgggtggcggtggcgagcaatccggagttcctcaaggaaggctcggcggtggacgacttcaggcgcccggaccgggtcatcatcggcagcgccgagacgcaggccggggaaaccctgcgccagatctacgcgccgttcctgcgcaatcacgaacgggtcctgctgatggggcgccgcgaggccgagttcagcaagtacgcggccaatgccttcctcgccaccaagatttccttcatgaacgagatggccgggctgtgcgccctcaccggcgtcgacatcgaggacgtgcgccgcggcatgggtagcgacaagcgcatcggtacccatttcatctacgccggctgcggctacggcggctcgtgctttcccaaggacgtccgcgcgctgatccgcagcgccgagcaacagggcttcgacagccagatactgcgtgcggtggaagcgcgcaacgcgcggcagaaggaactgctcttcgagaccctcggcgaactgttccagggacgctggcaagggcgcacggtggcgctctgggggctggccttcaagccgggtaccgacgacctgcgcgaggcgccgagcctggtcctgctggaggcgctgctgcgccacggggtgcgggtcagggcccatgacccggtggccaacgccggggtcgcggcacgctatccggacgcgctggcgtgcgcccagttgacgctccacgactcgccctacgcggccgtcgagggcgccgatgccctggtgctggtgaccgagtggaaacagttccgccagccggacttccagaaaatccgtggatccatgcgaactcccctgttggtcgacggtcggaatctctacgcaccggcgcggatggcggaactgggcttcatctaccagggcataggacgtccaagggccgggcattgtaaggcgagcgcagcctga

SEQ ID NO: 322226 - DNA, 225 bp, Pseudomonas aeruginosa
atgtccatcgaaatcgattcggaacaaggcgtctgcagcgtggagatcgaaggcagccggcatcgcgcgccggtcgacagcctgcgcatcggtaccgacgccgaggcgcgcctgtcggtgctctacatcgacggcaagcgcctgcacatcagcgaggaagacgcccagcggctggtggtcgccggcgccgaggaccagcgcaggcacctgatggcggacgattga

SEQ ID NO: 322227 - DNA, 633 bp, Pseudomonas aeruginosa
gtggccaggaaaaccaaagaggaatcccagaaaacccgcgacggcatactcgatgccgccgagcgggttttcctggaaaagggcgtgggcactactgccatggccgacctggcggacgccgccggggtttctcgcggtgcggtctacggccactacaagaacaagatcgaggtctgcctggcgatgtgcgaccgcgccttcggccagatcgaggtacccgacgaaaacgccagggtgccggcgctggatatcctcctgcgcgccggcatgggctttctccgccagtgctgcgagcccggttcggtgcagcgggtgctggagatcctctacctcaagtgcgaacgcagcgacgagaacgagccgctgttgcgccgccgcgagttgctcgagaagcaggggcaacgcttcggcctccggcagatccgccgggcggtggagcgcggcgaactgccggcgcggctggacgttgagctggccagcatctatctgcaatcgctctgggacggcatctgcggcaccctggcctggaccgagcgcctgcgcgacgatccctggaaccgcgccgaacgcatgttccgcgccggactcgacagcctgcgcagttctccctacctgttgctggcggacgcctga

SEQ ID NO: 322228 - DNA, 1191 bp, Pseudomonas aeruginosa
atgcacatccaatggaccggctcgctgcgcgggctgctggcggccctggtcgccctattcctgatgggctgcgaagaagcagcggacgccgggaagactgcggaggcccccgccgaggtcggcgtgatcgtcgccaggccggcgcctatcggcatcaccagcgagctgcccggacgcctggaagcgtaccgccaggctgaagtgcgggcgcgcgtcgccggcatcgtcacccgtcgcctgtacgaggaaggccaggacgtccgcgccggcaccgtgctgttccagatcgaccctgcgcccttgaaggcggccctggacatcagccgcggcgccctggcccgggccgaggccagccacgcggcggcggccgacaagctcaagcgctacgccgacctgatcaagtaccgcgccatcagcgaacgcgagtacaccgaagcgcagaccgacgcgcgccaggccctggcgcagatcgcctcggccaaggccgaactggagcaggcccgcctgcgcctgggctacgccacggtcaccgcgccgatcgacggccgcgcgcggcgcgcgctggtcaccgaaggcgcgctggtcggcgaggactcgccgacacctctgacccgcgtcgagcagatcgatccgatctacgtgaacttctcccagccggccggcgaagtcgccgccatgcagcgggcgatccgcgaaggccaggtgaagggtgtcgccgacaaggacatcgccgtgcgcctggtcctggccgacggcagcgagtacccgctggccggcgagttgctgttctccgacctggcggtcgaccccggcaccgacaccatcgccatgcgtgccctgttccgcaatccgcatcgcgaattgctgcccggcggctacgtgcaggtgcgcctgcagcgcgcggtgaacccgcaggcgatcaccgtcccgcgcgacgcgctgatccgtaccgcccagtccgccgtggtcaaggtggtcaacccacagggcgtggtggaagacgtggaggtccgcgccgacaccctgcagggccgcgactggatcatcagccgcgggctcaagggcggcgagcgtgtgatcgtcgagaacgccgcccagcatgccgccggctccagcgtccaggcggtggtccgccagccggccagcgccgacgctccctcaccgctggccgcctcgccggcgggccagtga

SEQ ID NO: 322229 - DNA, 3138 bp, Pseudomonas aeruginosa
atggctcgtttcttcattgaccggccggtcttcgcctgggtgatctccctgctgatcgtgctcgccggggtcctggcgatccgcttcctgccggtcgcccagtacccggacatcgcgccgccggtggtcaacgtcagcgccagctatcccggcgcctcggccaaggtggtcgaggaagcggtgaccgcgatcatcgagcgcgagatgaacggcgcgcccggcctgctctacaccaaggccaccagcagcaccggccaggcctcgctgaccctgaccttccgccagggcgtgaacgccgacctcgccgcggtggaagtgcagaaccgcctgaagatcgtcgagtcgcgcctgcccgaatcggtgcggcgcgacggcatctacgtggagaaggcggcggacagcatccagctgatcgttacccttacctcctccagcggccgctacgacgccatggagctgggcgagatcgcctcgtccaacgtgttgcaggcgctgcgccgggtggagggcgtgggcaaggtcgagacctggggcgccgagtacgccatgcgcatctggcccgacccggccaagctgacctcgatgaacctcagcgccagcgacctggtcaacgccgtgcgccggcacaacgcccgcctcaccgtgggcgacatcggcaacctcggggtccccgactcggcgccgatcagcgccacggtgaaggtcgacgacaccctggtgacgcccgagcagttcggcgaaattccgctgcgcatccgcgccgacggcggcgcgatccgcctgcgcgacgtggcccgcgtcgagttcggccagagcgagtacggcttcgtctcgcgggtcaaccgaatgaccgccaccggcctggcggtgaagatggcgcccggctccaacgcggtggccaccgccaagcgcatccgcgccaccctcgacgagctgtcgcgctacttcccggagggcgtgagctacaacatcccctatgacacctcggcgttcgtcgagatctcgatcaggaaggtggtcagcaccctgctcgaggcgatgctgctggtgttcgccgtgatgtacctgttcatgcagaacttccgcgccaccctgatcccgacactggtggtgccggtggccctgctgggcaccttcacggtgatgctcggcctgggcttctcgatcaacgtgctgaccatgttcggcatggtcctggcgatcggcatcctggtggacgacgcgatcatcgtggtggagaacgtcgagcggctgatggccgaggaaggcctgtcgccgcacgacgccacggtcaaggcgatgcgccagatcagcggggccatcgtcggcatcaccgtggtgctggtctcggtgttcgtgccgatggcgttcttcagcggcgcggtgggcaacatctaccgccagttcgcggtgaccctggcggtctccatcggcttctcggcgttcctcgcgctgtcgctgaccccggccctgtgcgccaccctgctgcgcccgatcgacgccgaccaccatgagaagcgcggcttcttcggctggttcaaccgcgccttcctgcgcctgaccggacgctaccgcaacgcggtggccggcatcctcgcccggccgatccgctggatgctggtctacaccctggtcatcggcgtggtcgccctgctcttcgtgcgcctgccgcaggcgttcctgccggaagaggaccagggcgacttcatgatcatggtgatgcagcccgaaggcacgccgatggcggagaccatggccaacgtcggcgacgtcgagcgctacctggtggagcacgaaccggtggcctacgcctatgcggtcggcggcttcagcctgtacggcgacggcaccagctcggcgatgatcttcgccaccctgaaggactggtcggaacgccgggaggccagccagcacgtcggcgccatcgtcgagcgcatcaaccagcgcttcgccggcctgcccaaccgtacggtgtatgcgatgaactcaccgccgctgccggacctgggctccaccagcggcttcgacttccgcctgcaggaccgtggcggggttggctacgaggccctggtcatggcccgcgaccagttgctggcgcgcgccgccgaggacccgcgcctggccaacgtgatgttcgccggccagggcgaggcgccgcagatccgcctggacatcgaccggcgcaaggcggagaccctcggcgtgagcatggacgagatcaacaccaccctggcggtgatgttcggctcggactacatcggcgacttcatgcacggcagccaggtgcgcaaggtggtggtccaggccgacggcgccaagcgcctgggcatcgacgacatcggccggcttcacgtgcgcaacgagcagggcgagatggtccccctggcgacgttcgccaaggccgcctggaccctcggcccgccgcaactgacccgctacaacggctatccctcgttcaacctcgagggccaggccgcgccgggctacagcagcggcgaagccatgcaggcgatggaggaattgatgcagggcctgcccgagggcatcgcccacgagtggtccggccagtccttcgaagaacgcctgtccggcgcccaggcgccggcgctgttcgccctctcggtgctgatcgtgttcctcgccctggccgccctctacgaaagctggtcgatcccgctggcggtgatcctggtggtgccgctgggcgtgctcggcgcactgctcggggtgagcctgcgcggcctgcccaacgacatctacttcaaggtcggcctgatcaccatcatcggcctctcggcgaagaacgccatcctcatcatcgaggtagccaaggaccattaccaggaaggcatgagcctgctgcaggcgaccctggaggccgcgcgcttgcgcctgcgaccgatcgtcatgacctcgctggcgttcggtttcggcgtggtcccgctggcgctctccagcggcgccggttccggcgcccaggtcgccatcggcaccggggtgctcggcgggatcgtcaccgccacggtactcgcggtgttcctggtaccgctgtttttcctggtggtcgggcgcctgttccggttacgcaaggcgccgcgcaccggcacctcgccccagatccccacggagcaagcctga

SEQ ID NO: 322230 - DNA, 219 bp, Pseudomonas aeruginosa
atgcccctagcgaaactctcgctccccaccctggcactgtgcgtcgggctgctcggcgcctgcccgccgacgcctcgccagccgcgcgcggcccccatcgttccggccaacggccccgaccttcggggcaagctggacgactggcaacagcagttcaccgacccgttgctgcgacagatgatcggctacgcgccggcgctatccggcgcgcaagcctga

SEQ ID NO: 322231 - DNA, 930 bp, Pseudomonas aeruginosa
atgagtcggctgatgacctacaggacgctgctggcttgcctgctcgccgcgttgcttgcgctgctggtggcgggtcagcagcagcgcgcgttcgagcgcatctggttcaagctggagcagcgctacggcggcgatgttgcgcgcgagaacgccctgcgcctggccgactatcgggtcgatatcgaagcccgcgtgctgggcgcggagtccaacgtctcggcgctgtccttcgaccccagccggcgcagcctggtcagcgtgaccaaccaggacccgcatttcctcgagctgtcgctggacggcgaattgctgcgacgcatccccctgcgcggtttccaggatccggaggctatcgagtacatccggcccggcgtctacgtggtcgccgaggagcgtcgccaacgcctggtagagatccatgtcgacgccgacacccgggtgatcgacatcgacgatccgcgcaacgcccggaagttctccctgggcagtgcaaacaagcgcaacaagggcttcgaggggttggcctacgacccgctgcgcgagcgcctgttcgtggcccgggaaaaggcgccggtgggcatcatcgaggtaaacggcttcttcaacgaccgcggcgaggcgctcgacctgagcgtcggcggcgacccgcagcgcgatcgcgggttgttcctcaccgatctgtcgagcctctactacgacaaggccagcgatcacctgctggtgctttccgacgagtcgcgggtggtcatcgaactggatcgcgccggggatccgctcggcagcctgaccctgcgtggcggcaaccatggcctgacggacgacgtgccgcaggccgaagggttggcgatggacgaccggggcagcctgtacgtggtcagcgagccgaacctgttctaccgcttcagccgagcgctgccagcggccgactag

SEQ ID NO: 322232 - DNA, 405 bp, Pseudomonas aeruginosa
atgtccaccacctacaccatctccgatctcgcccgcgaactggacatcaccacccgcgccatccgcttctacgaggagcaaggcctgctctcccccgagcgacgcggccaggaacgcatctattcgccgcgcgacaaggtcagcctgaagctgatcctgcgcggcaagcgcatcggtttttccctcgccgaatgccgcgagctgatcgagctctacgacccggacccgagcagcggcaaccagaagcagttgaacaccatgctggagaagatcgccgagcgccgcgcccagctggaacaacagttgctggacatcgaacagatgcagctggaactggatactgccgaggagcgctgtcgagcggcgctgatcaaaagctataacaaacaaacagttgcaacataa

SEQ ID NO: 322233 - DNA, 1164 bp, Pseudomonas aeruginosa
atgacctatcccagcctcaacttcgccctcggcgaaaccatcgacatgctccgcgaccaggtccgcggcttcgtcaccgccgaactgcagccgcgcgccgcgcagatcgaccaggacaaccagttccccatggacatgtggcgcaagttcggcgagatgggcctgctcggcatcaccgtcgacgaggagtacggcggttcggcgctgggctacctggcccacgccgtggtcatggaagagatcagccgggcctcggcctcggtggcgctctcctatggcgcgcattccaacctctgcgtcaaccagatcaagcgcaacggcaacgccgaacagaaggcccgctacctgccggccctggtgtccggcgaacacatcggtgcgctggcgatgagcgaacccaacgccggttccgacgtggtctcgatgaagctgcgcgcggaccgggtcggcgaccgcttcgttctcaacggcagcaagatgtggatcaccaacggtcccgacgcccatacctatgtgatctacgccaagaccgacgcggacaagggcgcgcacgggatcaccgcgttcatcgtcgaacgcgactggaaaggcttcagccgcgggccgaagctggacaaactgggcatgcgcggctcgaacacctgcgaactgatcttccaggacgtcgaggtacccgaggagaacgtcctcggcgcggtcaacggcggggtcaaggtactgatgagcggcctcgactacgagcgcgtggtgctttccggcggcccggtgggaatcatgcaggcgtgcatggacgtggtggtgccgtacatccatgaccgccgccagttcggccagagcatcggcgaattccagctggtccagggcaaggtggccgacatgtacaccgccctcaacgccagccgcgcctacctgtacgccgtggccgccgcctgcgaccgcggcgagacgacccgcaaggacgccgccggggtgatcctctacagcgccgagcgcgccacccagatggccctggacgcgatccagatcctcggcggcaacggctacatcaacgagtttcccaccggccgcctgttgcgcgacgccaagctctacgagatcggcgccggcaccagcgagatccgccgcatgctgatcggccgcgagctgttcaacgaaacccgctga

SEQ ID NO: 322234 - DNA, 1608 bp, Pseudomonas aeruginosa
atggccatcctgcacacccagatcaatccacgctccgccgagttcgcggccaacgccgcgaccatgctggaacaggtcaacgccctgcgcaccctcctcggccgcatccacgaaggcggcggtagcgccgcccaggcccggcacagcgcgcgcggcaagctgctggtgcgcgaacgcatcaaccgcctgctcgaccccggctcgccgttcctcgagctttccgccctcgccgcccacgaagtctacggcgaagaggtcgccgccgccggcatcgtcgccgggatcggccgggtcgaaggggtggaatgcatgatcgtcggcaacgatgccacggtgaagggcggcacctactatccgctgaccgtgaagaagcacctgcgggcccaggccatcgccctggagaaccgcctgccatgcatctacctggtggactctggcggcgccaacctgccgcgccaggacgaggtgttccccgaccgcgagcacttcggccggatcttcttcaaccaggccaacatgagtgcccgcggcatcccgcagatcgccgtggtcatgggctcctgcaccgccggcggggcctacgtgccggcgatgtccgacgaaaccgtgatggtgcgcgaacaggccaccatcttcctcgccgggccgccgctggtgaaggccgctaccggcgaggtggtcagcgccgaggaacttggcggcgccgacgtgcactgcaaggtctcaggggtcgccgaccactatgccgaggacgatgaccatgccctggccatcgcccgccgctgcgtcgccaacctcaactggcgcaagcagggccagctgcaatgccgtgcaccgcgcgcgccgctgtaccccgccgaggagctgtacggggtgattcccgccgacagcaagcagccctacgacgtgcgcgaagtgatcgcacggctggtagacggctccgagttcgacgaattcaaggcgctgttcggcaccaccctggtctgcggcttcgcccacctgcacggctatccgatcgccatcctggccaacaacgggatcctcttcgccgaggccgcgcagaaaggcgcgcacttcatcgagttggcctgccagcgtggcatcccgctgctgttcctgcagaacatcaccggtttcatggtcggccagaagtacgaggctggcggcatcgccaagcacggcgccaagctggtgacctcggtggcctgcgcgcgggtgccgaagttcaccgtgctgatcggcggcagcttcggcgccggcaactacggcatgtgcggacgcgcctacgacccgcgcttcctgtggatgtggccgaacgcgaggatcggcgtgatgggcggcgaacaggccgccggggtgctcgcccaggtcaagcgcgagcaggccgagcgcgccggccagcagctcggcgtcgaagaggaggcgaagatcaaggcgccgatcctcgagcagtacgagcaccagggccatccctactactccagcgcgcgactgtgggacgacggcgtgatcgatccggcgcagacccgcgaggtgctcgccctggcgctttccgccgccctcaacgcccccatcgagccgaccgccttcggcgtgttccgcatgtga

SEQ ID NO: 322235 - DNA, 798 bp, Pseudomonas aeruginosa
atgagcgaattccagaccatccagcttgagatcgacccgcgcggcgtagccaccctgtggctggaccgggcggaaaagaacaacgccttcaatgccgtcgtgatcgacgaactgttgcaggccatcgatcgcgtcggcagcgacccgcaggtccgcctgctggtgctgcgcggccgtggccggcacttctgcggcggtgccgacctggcctggatgcagcagtcggtggacctcgactaccagggcaacctggccgacgcccagcgcatcgccgaactcatgacccatctctacaacctgcccaagccgaccctggcggtggtccagggcgcggtgttcggcggcggggtcggcctggtcagttgctgcgatatggccatcggcagcgacgacgcgaccttctgcctgtccgaggtacgcatcggcctaatcccggcgaccatcgccccgttcgtggtcaaggccatcggccagcgcgccgcgcggcgctattcgctgaccgccgagcgcttcgacggacgccgcgccagcgaactgggcctgctcagcgaaagctgtcccgccgccgaactggaaagccaggccgaggcctggatcgccaacctgctgcaaaacagcccgcgcgccctggtcgcctgcaaggcgctctaccatgaggtcgaggccgccgagctgagcccggcgctgcgccgctacaccgaggcggccatcgcccgcatccgcatcagcccggaaggccaggaaggcctgcgcgccttcctggagaaacgcacgcccgcctggagaaacgacgcatga

SEQ ID NO: 322236 - DNA, 1968 bp, Pseudomonas aeruginosa
atgaacccggactaccgcagcatccagcgcctcctggtcgccaaccgcggcgagatcgcctgccgggtgatgcgcagcgcgcgcgccctcggcatcggcagcgtcgccgtgcacagcgacatcgaccgccacgcccgccacgtcgccgaagccgacatcgccgtcgacctgggcggcgccaagcccgtcgacagctacctgcgcggcgacaggatcatcgccgccgccctcgccagcggcgcccaggcgatccaccccggctacggcttcctctcggagaacgccgacttcgcccgcgcctgcgaggaagccggcctgctcttcctcggaccgccggcggcggccatcgacgccatgggcagcaagtcggccgccaaggcgctgatggaagaagccggcgtgccgctggtgcccggctatcacggcgaagcccaggacgccgagaccttccgccgggaagccgggcgcatcggctacccggtgctgctcaaggccgccgctggcggcggcggcaagggcatgaaggtggtggagcacgaggccgagctggccgaggccctttcctccgcccagcgcgaggccaaggccgccttcggcgacgcgcggatgctggtggagaaatacctgctgaagccgcgccacgtggagatccaggtattcgccgacagccatggccactgcctgtacctcaacgaacgcgactgttcgatccagcgccgccaccagaaggtcgtcgaggaagcccccgcccccggtctcggcgcggaactgcgccgggccatgggcgaggccgcggtacgcgcggcgcaggcgatcggctacgtcggcgccggtaccgtcgaattcctcctcgacgaacgcggccagttcttcttcatggaaatgaacacccgcctgcaggtggaacacccggtcaccgaggccatcaccggcctcgacctggtcgcctggcagatccgcgtcgctcgcggcgaggcgctgccgctgacacaggaacaggtgccgctgaacggccacgccatcgaagtgcggctctacgcggaagaccccgagggcggcttcctccccgccagcggccgcctggcgctgtaccgcgaagcgcccgccggccccggccggcgggtcgacagcggggtacgcgaaggcgacgaggtctcgccgttctacgacccgatgctggccaagctgatcgcctggggcgaaacccgcgaggaagcccgccaacgcctgctggcgatgctggcggaaacctcggtcggcggcctgcgcaccaacctggcgttcctccgccgcatcctcggccatccggcgttcgccgccgccgaactggacaccggtttcatcgcgcgccaccaagacgacctgctgccggcgccgcaagcgctgccggagcatttctggcaagccgccgccgaagcctggctgcagagcgaaccgggccaccgtcgcgacgacgacccgcattcgccgtggagccgcaacgacggctggcgcagcgccctggcgcgggaggccgacctgatgctgcgctgccgcgacgaacgccgctgcgtccgcctgcgccacgccagccccagccagtatcgcctggacggcgacgacctggtcagccgggtggacggtgtcacccgtcgctcggcggcgttgcgccgcggacgccagttgttcctcgaatgggagggcgaactgctggccatcgaagccgtcgacccgatcgccgaggccgaggccgcccatgcccaccagggtggtttgagcgcgccgatgaacggcagtatcgtgcgggtcctggtcgagcccggccagacggtcgaagccggcaccgccctggtggtgctggaggcgatgaagatggaacacagcatccgcgcgccccacgccggggtagtgaaggcgctgtattgcagcgagggcgaactggtagaggaaggcacgccgctggtggagctggacgagaaccaggcctga

SEQ ID NO: 322237 - DNA, 903 bp, Pseudomonas aeruginosa
atgaacctgccgaagaaggtccgcctggtggaagtcggtccgcgcgacggactgcagaacgagaaacagccgatcgaggtggccgacaagatccgcctggtcgatgacctgagcgccgccggcctggactacatcgaagtgggcagcttcgtctcgcccaagtgggtgccgcagatggccggctcggccgaggtgttcgccggcatccgccagcgtcccggcgtgacctacgcggcgctggcgccgaacctgaaaggcttcgaggcggcgctggagtcgggggtgaaggaagtggcggtgttcgccgccgcgtcggaagccttctcccagcgcaacatcaactgctcgatcaaggacagcctggagcgcttcgtaccggtgctggaggcggcgcgccagcaccaggtgcgggtgcgcggctacatttcctgcgtgctcggctgtccctacgacggcgatgtcgatccgcgccaggtcgcctgggtcgcccgcgaactccagcagatgggctgctacgaagtgtccctgggcgacaccatcggcgtcggcaccgccggtgccacccgccggctgatcgaggcggtggccagcgaggttccccgcgagcgcctcgccgggcacttccacgacacctacgggcaggccctggcgaacatctacgccagcctgctggaaggcgtcgcggtattcgacagctcggtggccggcctcggcggttgtccctacgccaagggcgccaccggcaacgtcgccagcgaagacgtcctctacctgctgaacggcctggagatccataccggggtcgacatgcacgccctggtcgacgccggccagcgcatctgcgcggtgctcggcaagagcaacggatcgcgagcggcgaaggcgttgctggccaaggcctga

SEQ ID NO: 322238 - DNA, 804 bp, Pseudomonas aeruginosa
atggaaaagaacagcagtcccgccgaaacctccggcaagcagaaggtccgctccgccgaagtcggtaccgatatcctcaaggccctcgccgaactctccccggcgacctcgctgtcgcgcctggcggagcatgtggggatgccggcgagcaaggtccatcgctatctgcaggcattgatcgccagcggcttcgcggtccaggacgcctccaccaatcattactcgctggggcgcgaggccctgcgcgtgagcctggcggcgctggacagcatggacgtgctgaagagcgccgccgcgccgctggccgagctgcgcgacgagctcaacgagacctgcttcctcgccgtctggggcaaccgtggcgccaccgtggtacaggtggaacaggcggtgcgcgcggtgacggtggtcacccaggtcggctcggtgctgccgctgctcggttcgtccaccggcctggtgttcgccgcgttcctgccggaacgcgaggtggccgagctgcgcgaggaagagttggccgggcgcgccgaccatccgctggccgacccggcggcctacgcggtgctgctggagggcatccgcgcgcgcggcctgcatgcgatccatgggctgctgatgcctggggtggaggcgctctcggcaccggtgttcgacgcccgcgggcgggtggcggcggtgctcacggtggtcggcccggcgagcatcttccaggccgaggagcaggggccggcggcggaacggctgcttgcgacgactcgggctatcagttggcggatggggtatgacggcacccagggtggatga

SEQ ID NO: 322239 - DNA, 1299 bp, Pseudomonas aeruginosa
atgaacctcgactccactgccctcgcctatcaatcgggcttcggcaacgaattcagcagcgaagcgctccccggcgccctgccggtcggccagaactccccgcagaaagcgccctacggcctgtacgccgaactgctctccggcaccgccttcaccatggctcgcagcgaggcccggcgcacctggctgtaccgcatcacgccgtcggccaagcatccgccgttccgccgcctggaacgacagatcgccggtgccgaactggatgcgccgactcccaaccgcctgcgctgggacccgctggcactgcccgagcagcccaccgacttcctcgacggcctgctgcgcatggccgccaacgcgcccggcgacaagcccgccggcgtgagcatctaccagtacctggccaaccgctcgatggagcgttgcttctacgacgccgatggcgaactgctgctggtcccgcaattgggccgtctgcgcctgtgcaccgaactcggcgcgctgcaagtcgaaccgctggagatcgcggtgatcccgcgcgggatgaagttccgcgtcgagctgctcgacggcgaggcacgcggctatatcgccgagaaccacggcgcgccgctgcgcctgcccgacctcggcccgatcggcagcaatggcctggccaatccgcgcgacttcctgaccccggtggcgcgctacgaggacagccgccagccgctgcaactggtgcagaaatacctcggcgagctgtgggcctgcgagcttgaccactcgccgctggacgtggtcgcctggcacggcaacaacgtgccctacaagtacgacctgcgccgcttcaacaccatcggcacggtcagcttcgaccacccggacccgtcgatcttcaccgtgctgacctcccccaccagcgtccccggcctggccaacatcgacttcgtgatcttcccgccgcgctggatggtggccgagaacaccttccgtccgccatggttccaccgcaacctgatgaacgaattcatgggcctgatccagggcgcctatgacgccaaggccggcggcttcgtgcccggcggcgcctcgctgcacagttgcatgagcgcccacggcccggacgcggaaagctgcgacaaggccatcgccgccgacctcaagccgcacaggatcgaccagaccatggccttcatgttcgagaccagccaggtcctccggccgagccgtgccgccctcgagacgccggccctgcagaatgactacgatgcctgctgggcgtcgctcgtatccaccttcaacccgcaacggagataa

SEQ ID NO: 322240 - DNA, 1299 bp, Pseudomonas aeruginosa
atgaaccagccaacccccactcgtagctgggtcgcctccgccaatgggcatgccgactttcccctgcagaacctgccgctgggcatcttcagccgtgccggcctgagcccgcgttgcggcgtggccatcggcgactcgatcctcgacctggacgcggcgctggccgccgggctgttcgagggtgccgccggcgaagccgccgaagccacccgcggcggcgcgctgaacgccttcttcgccctcggcaagccggcccgcgtggcgctgcgccagcgcctgctggagctgctcggcgaaggcgccgcggagcgcccggaactgctccatccggccgccgagtgccaaatgcacctaccggccaggatcggcgactacaccgacttctacgtcggcatccgccatgccgagaacgtcggcaagctgttccgcccggacaacccactgttgcccaactacaagcacgtgcccatcggctaccacggccgcgcctcgaccgtgcgcgtctccggcagcgaagtgcgccggcccaacggccagaccctgccggccggcgccagcgagccggtgttcggcccctgcgcgcgcctggactacgaactggagctgggcatctggatcggccagggcaacgccctcggcgaagccatcccggtttcccgcgccgccgagcacatcgccggcttctgcctgctcaacgactggtcggcgcgcgacatccaggcctgggaataccaaccgctcggcccgttcctgtcgaagagcttcatcaccagcgtctcgccctgggtggtcaccgccgaagccctggagccgttccgccgtgcccagccagcgcgccccgaaggcgacccgcggccgctgccgtatctctacgacgacaacgaccaggcccacggcgccttcgacatcgagctggaggtcctgctgctcaccgagggcctgcgcgagaaaggcctgccgccgcagcgcctgaccctgagcaacagcctgagcatgtactggacggtggcgcagatggtcgcccaccacagcgtcaatggctgccagttgcagcccggcgacctgttcggctccggcaccctgtccggcgccgagcccggccagttcggctcgctgctggagatcaccgctggcggcaagcagccggtgcaactggcctccggcgagacccggcgcttcctcgaggacggcgacgaggtcatcctccgcgcccgctgcaagcgcgagggacatgtctcgatcggtttcggcgaatgtcgcggcaaggtgctcgcggcccttccgggggcgcgcggatga

SEQ ID NO: 322241 - DNA, 639 bp, Pseudomonas aeruginosa
atgaagctctatacctactaccgttccacctcctcctaccgggtgcgcatcgccctggcgctgaaggggctggactaccagtcgctgccggtcaacctggtccgcgacggcggcgaacaccgccaacccgcctacctggcgctcaacccgcagggccgcgtaccggccctgcaggtcgacgagggcgagctgctgatccagtcgccggcgatcatcgagtacctcgaggagcgctacccgcaacccgccctgctctccagcgatccgctgcgccgcgcccgcgagcgcggagtcgcggcgctggtcggctgcgacatccacccgttgcacaacgccagcgtgctcaacctgctgcgtcagtggggccacgacgaagagcaggtccggcagtggatcggccactgggtcggccagggtctcgccgccgtcgagcaactgatcggcgaccagggctggtgcttcggcgaccggccgggcctggccgacgtctacctggtcccgcagctctacgccgccgagcgcttcggcgtggcgctggacgcctggccacggatccgccgggtcgccgacctggccgccgcccatccggcgttccgccaggcccatccggccaaccagccggacaccccggccgcctga

SEQ ID NO: 322242 - DNA, 1293 bp, Pseudomonas aeruginosa
gtggctctgttgctgctgctcctcgccctgttgctggtcaccgatggctacgatgcccaggtgctcggctacgtggtgccgaccctggcccaggaatggggcctggacaaggccgcgttcggcccggtgttcagcgccaacctgttcggcctgaccgtcggttcgctgctggtgacgccgctggcggaccgcttcggcatccgccgggtgctgctctgctgcgtgctgatctacgccagcctgaccgtcctgatggtcttcgccggttccctggaaagcctgatgctggcgcgcttcgtctgcggcatcggaatgggcggggcgatgcccagtgccatggcgctgatggccgagtattcgccaccgcgcctgcgtaccctgatggtcaccctggcggcctgcggtttctccttcggcggcgccgccggcggtttcgtcgccgccgccttcatggacggcttcggctggcaggcggtgttcctcgccggcggcgtcaccccgttgctgctgttccccttcctcctcctgttcctcccggagtcgctgccgcgcctgctccgcgacgcaccgccctatgcccgcctgcgccagctcagcgagcgtatggcgccgggctggcagccgccgccggcacaggccgacgccgagccggcggcgagcctgaccgtgctggagctgttccgccacggttacgcgcggccgaccctgctgctctgggcgaccttcttcgtcagcctgatcctgctctacttcatggtcagctggctgccctcgctgctccaggaaagcggcctgacacgcaatgcggcgaacctggcgacctcgatgttcctcttcgccggcaccctcggcgcgatgctcctggcctggctcgccgaccgcctgcgcagcaaggtccgcctgctggcggcgattctcgccggcgccgcgctgttcaccctgctcctcggcctcaaccacgaccagccgcgctggctgctggcgttcgtcttcgccgccggcttctgcatcatcggcgggcagttgaccctgaacgccttcgccagcaacttctacccggcccaggtacgcgccaccggcaccggctgggcgctgggcgtgggccgcttcggttcgatcctcggcccactgttcggcagcctgctgctgggcatgcacatatccgtggagaacatcttcatgcttgcggcgattcccgccgggctcgccgcgctactgatcctccaggtccgctcgcccgccgcccaggcgcagcgggaaagcgccgccgcgctggccgtcgaggaatcctga

SEQ ID NO: 322243 - DNA, 1446 bp, Pseudomonas aeruginosa
atgaacgacgccgacagcctccaggattaccaacgcgtgcgccagcaggcgatccgttcgctgttcgagatcgtcgaaggctccagcgaaggcacggtgatcgtcgaccgcgaggcccgcatcgtctggatcaaccagcgctacgcccagcgtttcggcctcgccgacccggcgcaggccatcggccggccctgcgaaagcgtgatccccggtagcctgctgcgcgaagtggtaggcagcggcaagccgatcctgctggacatgatggacagcgcgaaggacccgctggtggtgatgcgcctgccgatccacgacgacgccggcgaagtgatcggcgccatcggcttcgccctgctcgacgaactgcgttcgctgtcgccgctggtgacccgctacctgagcatgcagcgcgaactggcctcgacccgctcgcaattgcaggcgcgccaggccaagtacagcttcagccacttcgtcggcaccagtccggccagcctggaagtcaagcgccgcgcccgtcgtggcgcggccagcgaagcgccggtgctgttgctcggcgagaccggcaccggcaaggaactgctcgcccacgccatccacagcgcttcgccgcgggcgcacaaggccttcgtcagcgtgaacgccgcggcgatcccggaaagcctgctggaggccgaattcttcggtaccgccccgggggccttcaccggtgccgagcgcaagggccggccaggcaagttgcaggtggcccagggcggcacgttgttcctcgacgagatcggcgacatgccgctggccttgcaaggcaagctgttgcgcgtgctacaggagaaagagttcgaagcggtgggttccaacgaagtgatccgcagcgacatccgcctggtcgccgccacttccatcgacctgcagcaggcgatgcgcgaaggccgtttccgcgctgacctctactaccggctgaacgtcctgccgatcgagatcccgccgttgcgccagcgcctggacgacctcccggcgctctgcgagtcgatcctcgacagcctcgaccacggccgtctccacgaactcggcggcgacgccctggcgctgctcgcccggcatgcctggccgggcaacgtccgcgaactgcgcaacgtgctggaacgcgcgctgctgctggccgaccaacggttgctggacgccgccgccctcggcgcggcgctggggcccctgcaaccgctgccggagctgcctcgagcggcggacgacaggccggtcggggatttccaacaggcccgcgaagccttcgagcgcgacctgatcggacgggccctggcgcagagtgccggcaatgtggtggaagcggcgaaacgcctgggcctgggtcgctcgaccctgtacaagaagatcgtggcgctgggcatgcgtctcgatagcgggactcgtctcgaaatagagacgaactga

SEQ ID NO: 322244 - DNA, 1431 bp, Pseudomonas aeruginosa
atgcgaagcgcgccccgcagcgccgtggagatatgcccgatgagcgtgatcatcgcccttgccgccctgggcctgctgatgctggccgcctaccggggctacagcgtcatcctgttcgcccccctcgccgccctcggcgccgtcctgctcaccgatcccagcgcggtcgcgccgaccttcaccggggtgctcatggagaagatggtcggtttcatcaagctttacttcccggtattcctgcttggcgcggtgttcggcaagctgatcgagctggccggcttctcccgctccatcgtcgcggcggcgatccgcctgctcggcacccgccaggcgatgctggtgatcgtactggtctgcgcgctgctcacctacggcggcgtctcgctgttcgtggtggtgttcgcggtctacccgttcgccgcggagatgttccgccagagcgacatccccaagcggttgattccggcgaccatcgccctcggcgcgttttccttcaccatggacgcgctgcccggcaccccgcagatccagaacatcatcccctcgaccttcttcggcacccacgcctgggccgcgccctggctcggcaccctcggcgcgctgttcgtcttcgccgtgggcatgctctacctgcgacgccaggcgaacaaggcgcggcgcaacggcgaaggctacggcagcgacctgcgcaacgagccggagaccgccgatgacctgcgcctgccgaatccctggctggcgctctcgccgctggtgctggtcggggtcgccaacctgctgttcacccactggatcccgcaatggtacggccaggtccataccctgcaactggccggcatggccacgccgttgcaaaccgaggtcggcaagctcaccgcgatctgggcagtgcaggcggccctgctgctgggcatcctgctggtgctggcgagcggcttcgcggcgatccgcagccgcctcgccgaaggcacccgcagcgcggtggccggctcgctgctggcggcgatgaacaccgcctcggaatacggcttcggtgcggtgatcgcctcgctgccgggcttcctggtgctggccgacgcgctcaagagcattcccaatccgctggtcaacgaagcgatcaccgtcaccctgctggccggcatcaccggttccgcgtcgggcggcatgagcatcgccctggcggcgatgtccgataccttcatcgccgccgccaacgccgcgcagatccccctggaagtcctccaccgggtcgccgccatggccagcggcgggatggataccctgccgcacaacggcgcggtgatcacccttctggcggtcaccggcctgacccatcgggaggcgtacaaggacattttcggtattaccctgatcaagaccctggcggtgttcttcgtcatcgggctgttctacgccaccggcctggtctga

SEQ ID NO: 322245 - DNA, 771 bp, Pseudomonas aeruginosa
atgaccctgaaaggcaagaccgccctggtcaccggttccaccagcggcatcggcctgggcatcgccctgagcctggccgaggccggcgccgacctgctcctcaacggcttcggcgaggtcgacgcggcactggcgcaggtccgcgcccgcggcgtgcgcgcagagcaccacccggccgacctctccagcccggagcagatcggcgaactgatggccttcgccgagcggaccttcggcggcgtcgacatcctcgtcaacaacgccggcatccagtacgtggcgccggtgcaggaattccccacggaacgctgggacgcgatcatcgcgatcaacctgtcctcggtgttccataccacccgcctggccctgccgggcatgctcgcgcgcggctgggggcggatcgtcaacatcgcctcgacccacggcctggtcgcctcggccgggaagagcgcctacgtcgccgccaagcatggcgtgctcggcctgaccaagagtgtggcgctggaaacggcgcgcacgccggtgacctgcaacgccatctgccccggctgggtgctgaccccgctggtgcagaagcagatcgacgcgcgcatcgccgagggcgtctcgcccgaacaggcggaacacgacctgctggcggaaaagcaaccctcgctggccttcgtcacccccgagcaactcggcggactgacgctgttcctttgcagcgaagccgccgaccaggtgcgcggcgcggcctggaacatggatggcggctgggtggcgcagtag

SEQ ID NO: 322246 - DNA, 1425 bp, Pseudomonas aeruginosa
atgaccgctatccttcccatccaagaaagccgctccgcgcgcttcgccatgcgttgctcgaactgggccgagcgctggtttcccgactcctgggtgttcgccgccctggccatcctcatcgtcagcctggccgcgctggccatgggcgccggaccgaccgccacggcgaaagccttcggcgacggtttctggagcctgatcccgttcaccatgcagatggccttcgtggtcatcggcggctatgtggtggccagttcaggccccgcctcgcgtctcatcgacctgctcgcgcgggtgccgaagaatggccgctcggcggtctgctgggtggcgctggtgtcgatgctcgcctcgctgctcaactggggcctcagcctggtcttcggcggcctgctggtacgcgccctggcgcgccgcagcgacctgcgcatggactatcgcgccgccggcgccgcggcctacctcgggctgggcgcggtgtgggcgctgggcctgtcgtcgtcggccgcgcagttgcaggccaacccggccagcctgccaccgtcgatcctggcgatcaccggggtgatcccgttcaccgagaccatcttcctctggcagtccggggtcatgctgctggcgctgatcctggtctcgctggtgatcgcctacatgaccgcgccgagcgccgccagcgcccgcgacgccaaggattgcggggtcgacgtgagcttcaccgctccggccaggctggcgccgacccggcccggcgagtggctggagcacagcccgttgctgatcatcctgctggtactgctggccggcggctggctggtacacgagttctcgaccaagccggcgatcctggcgatctccgggttgaacacctataacctgctgttcctgatgctcggcgcgttgctgcactggcgcccgcgcagcttcctcgacgcggtggcgcgcgcggtgccgaccaccaccggggtgctgatccagttcccgctgtacggctcgatcgcggcgatcatgaccacggtcaacggcagcgacggcgagaccctggcccaccatatctcgaccttcttcgtacagatcgcctcccacgacacctacgcgctgctgatgggcttgtactcggcggtgctgggcttcttcattccctccggcggcggcaagtggatcatcgaggcgccgtacgtgatgcaggtggccaacgagctgcaataccacctcggctgggcggtgcagatctacaacgccgccgaggcgctgccgaacctgatcaacccgttctacatgctgccgttgctcggcgtgctggggctgaaggcgcgcgacctgatcggcttctcgttcgtccagttgctggtgcacatcccgctggtgctggtgctgctctgggccctgggcagcaccctggcgtacatcccgccggtgatgccgtag

SEQ ID NO: 322247 - DNA, 1182 bp, Pseudomonas aeruginosa
atgcaagacgtcgtcatcgtcgccgctacccgtaccgccgtcggcagcttccagggctcgctggccggcattcccgcccccgagctgggcgccgcggtgatccgccgcctgctcgaacagaccggtctcgatgccggccaggtcgacgaagtgatcctcggccaggtgctcaccgccgggtccgggcagaacccggcgcgccaggcggcgatcaaggccggcctgccggtcggcgtgccggccatgaccctgaacaaggtctgcggctccggcctcaaggccctgcacctgggcgcccaggcgatccgctgcggcgacgccgaggtgatcgtcgccggcggccaggagaacatgagcctggcgccctacgtcatgcccggcgcccgcaccggcctgcgcatgggccatgcgaagctggtcgacagcatgatcgaggacggcctatgggacgccttcaacgactaccacatgggcatcaccgccgagaacctggcggagaagtacggcctgacccgcgaggagcaggacgccttcgccgccgcttcgcagcagaaggccatcgccgccatcgagggcgggcgcttccgcgacgagatcacgccgatccaggtcccgcagcgcaagggcgagccgctgagcttcgataccgacgagcagccgcgcgccggcaccaccgtcgaggccctggccaagctcaagccggccttcaggaaggacggcagcgtcaccgccggcaacgcctccagcctcaacgacggcgccgccgcggtattgctgatgagcgcggccaaggccaaggccctgggcctgccggtgctggcgcggatcgccagctacgccagcgccggggtcgacccggcgatcatgggcatcggcccggtctccgccacccgtcgcgcgctcgacaaggccggctggagcctggagcaactggacctgatcgaggccaacgaggccttcgccgcgcagtccctggcggtgggtcgggaactgggctgggatgccgccagggtcaacgtcaacggcggcgccatcgcccttggccacccgatcggcgcgtccggctgccgggtgctggtgaccctgctgcacgagatgatccgtcgcgacgcgaagaagggcctcgccaccctgtgcatcggcggcgggcagggcgtcgccctgaccctggcccgcgactga

SEQ ID NO: 322248 - DNA, 657 bp, Pseudomonas aeruginosa
atggcacttacccgcgaacagatggcgcagcgcgtggcgcgcgaattgaaggacggctactacgtcaacctcggcatcggcatcccgaccctggtggccaactacgtgccggaaggcatcgacgtcatgctccagtcggagaacggcctgctcggcatgggcgcgttccccagcgaggcggaagtcgacgccgacatgatcaacgccggcaagcagaccgtgaccgcccgcgtcggcgcgtcgatcttcgactcggcgcagtccttcgccatgatccgtggcggccacgtcgacctcaccgtgctcggtgccttcgaggtggacgtgcgcggcaacatcgcctcctggatgatccccggcaagctggtcaagggcatgggcggcgccatggacctggtggccggcgccgagaacatcatcgtcaccatgacccacgcctccaaggacggcgagtccaagctgctgccgtactgcaccctgccgctgaccggttgcggctgcattcgcaaggtgctcaccgacctggcctacctggagatcgaggacggcgccttcatcctccgcgagcgcgcccccggggtcagcgtcgaggagatcgtggcgaagaccgccggcaagctgatcgtccccgagcacgtgccggaaatgagtttctga

SEQ ID NO: 322249 - DNA, 699 bp, Pseudomonas aeruginosa
atgcgcggactcgacaagcgagtaggcagttacgaagaggccctcgaaggcctgaccgacggcatgaccgtcctcgccgggggcttcggcctctgcgggattcccgagaacctgatcgcggaaatccgccggcgcggggtcagggacctcacggtggtctcgaacaactgcggcgtcgacggtttcggcctcggcgtgctgctggaagaccggcagatccgcaagatgatcgcctcctacgtcggcgagaacgccctgttcgagcaacaactgctcagtggcgagttggaagtcgaactgaccccgcaaggctcgctggccgagaagatccgcgccggcggcgccggcatcccggccttcttcaccgccaccggctacggcaccccggtcgccgagggcaaggaggcgcgcgagttcaatggccgccactacatcctcgaaccggccatcaccggcgacttcgccatcgtcaagggctggaaggccgatcatttcggcaacgtcgtctatcgccacaccgcgcagaacttcaacccgctggtcgccaccgccgggcgcatcacggtggtcgaggtggaggagatcgtcgagcccggcgaactggacccgacgcagatccacacccccggcatctacgtcgaccggatcatccagggtcgcttcgagaaacgcatcgagaaacgcacgctgcgcgcctga

SEQ ID NO: 322250 - DNA, 921 bp, Pseudomonas aeruginosa
atgaccgtcaagcagttgcgcgccttcctcgccgtggcgcagagcctcagcttcgcccaggccggcgaacgcctgcacctctcccagccggccctgagcctggcgatcaagagcctggaggaaagcctcggcggtccgctgctggaacgtaccacccgcagcgtcagcctcacccccgagggcgagaccctgctgccgctggcgctgcgcctgctggccgactgggacaataccgaggaattgctgcgccagcacttcaccctgcaactgggcaaggtctccatcgccgccatgccctccttcgccggcaacctgctgccgctggtcttgaagacctttcgcgaacgccacccgcgggtcaacgtggcggtgcacgacgtgatcaacgagcaggtgctggagatggtccgcaaccgacgcgtcgagctgggcatcgccttcgagccggagtccctggaaaacctcgagttcaccccgttctacagcgaccgcttcgtcgccgtggtgccgaccggctcgccgctgtccgggcaggagcggatcagttggcgcgaactgctcggcgagcccttcatcaccctgcaacgcccctcggcggtgcgcctgctcctggaagaaagcgtggccgccgagcacggtcgcttgccggtggcgttcgagagccaccaactggtcacggtcgggcggatggtcgcccagggactcggtgtcagcgccgtgccgaccctgtgcatccagcagatgcaggaactcggcgcgcgctgcctgccgctctacgcgccgcaggtgcagcgacgggtcggcctgctgcggctgagcgagcacaagctgtccaccgccgcccaggccctcagcgacgtgctgctgcatggcaccgactggcgctcgctggcgctgccgcaggaccagtccacggagtga

SEQ ID NO: 322251 - DNA, 1956 bp, Pseudomonas aeruginosa
atgcccgcaccgctctggagcccttccgccgaacgcatcgccgccagtcgcatggaggccttccgacgcttcgtcaaccagcggcacgccctcggcctggtcgactacccggcgctgcatgcctggagcgtgcagcggcgcgaggcgttctggcaggccatcgtcgacttcttcgaggtgcgcttccagcaaccgccgcgtgcggtcctcgaggaaggcgcgcagatgccctcggcgcgctggttccccggcgccacgctgaatttcgccgaacacctgctgcgccgccgcgatgatgccccggcgctgatctcggtgagcgaagacggtcgccgcgaggtgctcagccacgccgaactggcccgtcacgtggcgggcctgcagaagcgcctcgccgccctgggcataggccccggcgaccgggtcgccgcgctgatgccgaacacctggcagaccgtggtcggcatgctcgccaccgccagcctcggcgcgacctggtcgagctgctcgccggacttcggtacccagggcgtgatcgaccgcttcggccagatcgaaccgcgcgtgctgatcgcctgtgccggctaccgctacgccggcaagtcgctggacctgaccgccaagctcaacgaggtgctcgccggcctgcccggcctggagcaactgctggtggtgccctacgaccgtccgcaggcgcagccgcaggactaccgctgccaggcgcaggtcgcgctgtgggacgggttctaccaggccgagggcgagccggtcttcaccccggtgcccttcgagcagccgctgtacatcctctattcgtcgggcaccaccggggtacccaagtgcatcgtccatgccaccggcggcgtgctcctgcaacatctcaaggagcacggcctgcacaccgacctgggcgacggcgaccggctgttctactacaccacctgcggctggatgatgtggaactggctggcctccggcctggcggtgggcgccagcctggtgctctatgacggctcgccgttccaccccggccccgagcgcctgctggacctcgtcgacgccgaggacatcgccgtgttcggcgccagcgccaagtacctggcggcgctcgagaaggccggcatgcgcccgcgccacagccaccgcctggacagcctgaggacactgctctccaccggttcgccgctggcccacgaaagcttcgactacgtctaccgcgagctgaagagcgacctctgcctgtcgtcgatctccggcggcaccgacatcgtttcctgcttcgccatcggcaacccggtgctgccggtgtggcgcggcgaactgcaatgcaaggcgctgggcatggccgtggaaatctgggacgacgacggccgccgcctcgccagcggcaagggcgagctggtctgcacccggcatttcccgtcgatcccgctgggcttctggaacgacccggatggcaccaggttccacgacgcctacttcgccagctttcccggcgtctgggcccatggcgactacgccgaggaaaccgtccacggcgggctggtcatccacggccgctccgacgcggtgctcaatcccggcggcgtgcgcatcggcaccgcggaaatctaccgccaggtggaaaaggtcgaggaagtcctcgagtccatcgccatcggccaggactggcagggcgatgtgcgtgtgctgctgttcgtccgcctgcgcgacggcgtgcgactcgacgagccgctgcgcgaacgcatccgccagaccatccgcgccaacgccacgccgcgccacgtaccggcgaagatcatccaggtcgccgatatcccgcgcaccctgagcggcaagatcgtcgagcttgcggtgcgcaacgtgatccacggccgcccggtgaagaacaccgacgccctggccaacccgcaggcgctggagctttatcgcgacctcgccgaactgcgcgactga

SEQ ID NO: 322252 - DNA, 279 bp, Pseudomonas aeruginosa
atgcccgtcgccatggcccgccacatcctggtcaagaccgaagccgaggccgcgcaactgaagcagcgcctggccaagggcgaggacttcgccacgctggcgaagaagcattcgacctgcccgtccggcaagcgcggcggcgacctcggcgaggtgcgcccggggcagatggtcaggtccatcgacaatgccatcttcaggaaacccgttggcgtgctccagggtccgctgaagagccagttcggctaccatctcctggaagtgtatttccgcgactga

SEQ ID NO: 322253 - DNA, 357 bp, Pseudomonas aeruginosa
atgaccgccgaccagatcgccgccttctgcctgcaactgcccggcgcccgggaagacctcaagtggggttcgaaccgggtgttctcggtggccggcaacaagatgttcgccatcctcgacttcgtcgacaaggacggcggcctggccttcaaggtcggcagcgagctgttcctcggctatgtcgaccgccccggcatccgtccggcgccctacctggcgcgcgcgcactggatcgtcatggcccgcccctacccgatgaaggcggcggagttgcgcgaggccctggtccgttcccatcagttggtggtggcgcgcctgcccaagcgccagcgcctcggcctggtactcgacgcatga

SEQ ID NO: 322254 - DNA, 564 bp, Pseudomonas aeruginosa
atgagtcgcgaccgtctgtacacctgggccggcctgtggcgctcgccgtcgtccagctgggaggccctgcgcctggaggacgaccaggcggaaagccagttgcgcgcgccggacgaacgcagcggcctgccctaccaattggactaccggctgcgctgggacgccgactggcatctgcgtgaggcggtgttccacgtcgaaagcgaaaccggggtgcgcaagctgcacctgctcgccgatggccgcggccactggcaggacggcgacggcgaagcgctaccggcattcgacggttgcctggacatcgatatttggccaagccccttcaccaacaccttcccgatccgccgcctgggcctggccgatggccagcgcgcggaaatccgcgcgctctacatcgaggccccggccctggagccgcgtagcatgcgccaggcctacacccgcctggacgccagccactacctctacgagaacctcgaaggcagcgcgttcaaggcggtactgctggtggacgaacagggcctggtgatcgactacccgggtctcttccagcgtctctga

SEQ ID NO: 322255 - DNA, 1209 bp, Pseudomonas aeruginosa
atgtccgtcgatatccgccccaccccgccggcgcaggacagcgcccggcaaaacgtcaccctgcagatcgtctcggtggtgatgttcaccttcatcggctacctgaccatcggcatcccgctggcggtgctgcccggctacgtgcacgacgacctcggctacggctcggtgctggccggcctggtgatcagcgtgcaatacctcgccaccctgctcgcccggccctacgccgggcgcgtcatcgacggcctcgggccgaagcgcgcggtgctctacggcatggccggcagcgccgcgagcgggctgttcatgctgctctcggtggcgatccagggctggccggcgctgagcctggccagcctgctggtcggccgcctggtactcggcgcggcggaaagcctggtcggctcggcggcgatcggctggggcatcggccgggtcggcgcgccgcacaccgccaaggtgatttcctggaacggcatcgccagctacggcgccattgccctcggggcgccgctaggggtgctgctggtgcagtggctggggctgtggagcatgggcgcgtccatcgtcctgctcggggcgctcggcttcgccctggcctggccgaagttgccggcgccgctggtgcacggcgagcgactgccgttccaccatgtgctcggccgggtcaccccgcacggcatgggcctggcgctgggggcgatcggcttcggtaccatcgccaccttcatcaccctctactacgccagccgtggctgggccaacgcagtgctctgcctgagcgccttcggcggttgcttcatcggcgcccggctgttgttcgccaatagcatcaaccggctcggcggcttccgcgtggcgatcgtctgcctcggcgtcgaaagcctcggcctgctgttgctgtggagcgcgccgaatccctgggtcggcctggccggcgcggcgctcaccggcttcggcttctccctggtgttcccggcgttcggcgtggaagcggtgaacctggtaccggcttccaaccgtggcgcggcgctgggcgcctactcgctgttcgtcgacctgtcgctgggcatcaccgggccgctggtgggcttcgtcgccaacctgttcggcttccgctcgatgttcctcttcgcctgcctggcctcgctcagcgggctggccctggccattgcgctgcaccgacgcagccgccggccgggctag

SEQ ID NO: 322256 - DNA, 1785 bp, Pseudomonas aeruginosa
atggcgaggccctctgagcagcagcaggaggccctggccgggttactcggcctgggcagccactccgcgcgcaagagccactacccggagctgctggcgcgcctggaggagctggaggccgagcgcaaccgctacaaatggctgttcgagcacgcggtgcacggcatcttccaggccagcctcggccaggggctgcgcgccgccaatccggcgctggcgcagatgctcggctacgacgatccgcaacaggtgctctggtcgctggaggacatggccgggcaactgttcgtcggcggcgaggccgagatgcgacggatccgcgcgctgctgcgcgagcgcggcggcctgttcggctacgagacgcgcctctggcgcagggacggcagtcacatcgaggtattgatgaacctgctgctcaggcacgacgaggaagaattggtcgaaggtttcgtcgccgacatcaccgagcgggtccaggcccagcagcgcctgcagaccatgaacgaggagctggagcggcgggtagccgagcgcacccacgagctggaagagctcaaccgccagttgcgccaggcgcgcgacgccgccgaagccgccaaccacagcaaggacaagtacctcgccgccgccagccacgacctgctgcaaccgctcaacgcggcgcggctgctggtcgacaccctgcgcgaacggggcctgccggccgccgaactgcaactggtggagcgcacccacctggccctggaaggtgccgagaccttgctcaccgacctgctggaaatcgcccggctcgaccagagcgcgatccgtccggacctggacgactattccctcgacgaactgctcgctccgctggcctcggagttcgaggaagtcgcgcgtgccgccggcctggccctgcgtgcgcggatcccgcgactggcagtgcgcaccgacgcgcgcctgctgtcgcggatcctgcgcaacttgctcagcaacgcctgccgctacaccgagcgcggcagcgtgctgctgggggcgcgccggcgtggcggcaaggtacgcctggaggtgtgggacactggccggggcatccccgccgaccagttgcaggcgatcttcctcgagttcaaccaactggacgccgggcgcgcttccgagcgccgtggcgtcggactcgggctggccatcgtcgaccgtatcgccggcatcctcggctaccgcatcgaggtgcattcgactccaggccgaggctcgctgttcgccatcgaggtgccgctggtccgcaagccggcgcggccagcacccggcgaggcgactgcgcggctttcggccggcgatccgctgccgggacggcggctgctggtggtggacaacgagaccgagattctcttcagcatgtccgcgctgctcggccagtggggctgtgaggtgcttaccgccaccgacctggaaggcgcgcgcaaggcgctcgatggccgcgcgccggatgcgattctggtcgactaccacctggaccacggcgctaccggttgccagttgctgggcgcgttgcgcgaggactacggcgcggagatcgccgcggtgatgatcaccgccgaccgcagcgacgattgccgccgcgcgctggcccgcctgggcgtgccgctgctcaacaagccgctgaagcccggcaagttgcgcgcggcgctaagcgccttgctcggcgaggcccagggcgctccccgcggcgccggagaaggtgcaggtcctagcccggccggcggctgcgtcggtgcagcgcaatggccagggccagcccgctga

SEQ ID NO: 322257 - DNA, 1164 bp, Pseudomonas aeruginosa
atgagccacgacctcagccaactgcgtaaattcgtctcgcccgagatcatcttcggcgccggctgccggcacagcgtcgccaactacgtgaagaccttcggtgcgcgcaaggtcctgctggtctccgaccccggcgtgctcgccgccggctgggtcgccgacatccaggcaagcctggaggggcagggcatcgactactgcctgtataccgacgtttcgcccaacccccgggtcgacgaggtgatgctcggcgccgagttctatcgcagcgagggctgcaatgtgatcgtcgcggtgggcggcggcagcccgatggattgcgccaagggcatcggcatcgtcgccgcccatggccgcagcatcctcgagttcgaaggcgtcgaccggctgcgggtgccgagtccgccgctgatcctgatcccgaccaccgccgggacttcggcggacgtctcgcagttcgtgatcatttccaaccaggacgagcgcatgaagttctccgtggtgagcaaggcggttgtgcctgacgtctcgctgatcgacccggaaaccacgttgaccatggatcccttcctttcggcctgtaccggcatcgatgcactggtacacgccatcgaggcgttcgtctccaccggccacgggccgctgaccgatccccacgcgctggaagcgatgcgcctgatcgatggcaatctggtacagatgatcgccaatcccggcgacatcgccctgcgcgagaagatcatgctcgggagcatgcaggccgggctggccttctccaacgccatcctcggcgcggtgcatgccatgtcgcacagcctcggcggctatctcgacctgccccacggcctgtgcaacgcggcgctggtcgaacacgtggtggcgttcaactacagcgccgcgccggaacgcttcaaggtgatcgccgagaccttcggcatcgattgccgcggtctgacccaggggcaggtccgccagcgcctggtggaccacctgatcgccttcaagcacgccgtgggtttccacgagagcctcgccctgcacggggtcggcagctccgacattcctttcctctcgcgccacgcgatgcaggacccgtgcatccttaccaacccgcgcgagtcgagccagcgcgatgtcgaggtggtctatggcgaggccctctga

SEQ ID NO: 322258 - DNA, 1827 bp, Pseudomonas aeruginosa
atggtcgactacggcgactggccgagcgactggagcgccgagcgcgcggtggccgccgggcgcgatttcagcgagctgaaggcggcccatggcgggctggcctgggtggaattcgatccggccagtgcgcgctcgcgcctgtacctgtggcgcgacggcgtgctggaggagcccaccgcgccggacggctcggtgcgcagccgggtctacgagtacggcggcggcgcctgctgcgtgacgctcgacgggctggcctgggtcgacgaaaccgaccagcaggtacgccgctggcgagcgggccgcgcagcccaagtgctgggcggcggggcgcagtgtcgctacggcgacctggcctacgtcgatgcctgggatgccctgctggcggtggaagagagccatgggccgaccggggtcgtgcatcgcatcgtgcgcctggacgccgatggcgcgcgccgggtgctggtcgagggcgccgatttctacgccgcgccgcgtgccgccggccaggggcggcggctggcctggatcgaatgggaccgtccgcaccagccctggaccgagacccgcctgggcctggcggagaatgggcgtacgcgctgcctggccggagccggaggcggcgagtcgatccagcaaccacgcttcgatcccgccggccgccttcactggctgagcgaccgcgacggctggtggcgtccctgcgccgaggtagcgttggccggccgcttcgccgatgccgactacgctggcgcgccctggcaattgggcgcttgcagctacctgccgctgggagagggaaggctgctgctcagtcgcgtcgaggccggcggcgggcaactgttcctgcgcgaagcggacggcagcgagcggcgcctggccgcggactggaaccggttcgccggactggccgcggatgcccgggcgttctactgcatcgcggcggcggccgggcgcctgccggcgctgctggcgatccatcgcgacgagctgcgtgtcgaggtgctgcgtggcggcgagcgaccgctggcggaggacgacctgtcgcatccgcaggccttcgtctatgggctgggcaacggcgaaaacggccacggtttcttctatccgccgcgcaatgcccgccgccgcgtcgatccccgacgaccaccgccgctgctggtgtggctgcatggcggaccgacctcgatgcattcgccggcgttcgatgccggcctgcagttctggacccagcgtggtttcgccgtggccgcgctgaactaccggggcagcagcggctacggccgcgcctatcggcagcgcttgcgcggccagtgggggcgcctggagttgcgcgatatcgaggccgcgctggcgcagctggacgcggagggacggatcgaccgcgcccgggtcttcgtccgtggcgccagcgccggaggctacagcgcgttgcgcgccctggcttgcctcgatggcctgcgcggcggcgccagtctctatggggtcagcgatccgttggcactggcgcgttgcacccacaagttcgagggtgactacctcgactggctgattggcgacccgctgcgccagcgccgtcgctacctggtgcgcagcccggtgcttcaggtcgggcgtatccgcgcgccggtagtgttcttccagggcgggctcgacgcggtggtggtgccggagcagaccgaggcgatggtcgccggcctgcggcgcagcggcgtgcgcgtggagtgccaccgctatccgcaggagcgccacggtttccgccagccggccaatcgcgcccatgcgctgctggcggaatggcgcttctacctgggcctgctggaggattga

SEQ ID NO: 322259 - DNA, 1146 bp, Pseudomonas aeruginosa
atgcgcaattctggatcgagctgcagtgaaagcgtggggccgccgctctggctgctggctgagctgacctatcgctgtccgttgcagtgcccgtactgctcgaacccgctggaattcgcccgcgagggcgccgagctgagtaccgcggaatggatcgaggtgttccgccaggcccgcgagctgggcgccgcacagctcggtttctccggcggcgagccgctgctgcgccaggacctcgccgaactgatcgaggcagggcgcggcctgggcttctacaccaacctgatcacctccggcatcggcctcgacgaggcacgcctggcgcgcttcgccgaggccgggctggaccacgtgcagatcagcttccaggccgccgacgaagaagtgaacaacctgctcgccggctcacgcaaggccttcgcccagaaactggcgatggcccgcgcggtgaaggcgcacggctatccgatggtgctcaacttcgtcacccaccggcacaacatcgacaacatcgagcggatcatccagctgtgcatcgagctggaagccgattacgtcgaactcgccacttgccagttctacggctgggccgcgctgaaccgtgccgggctgctgccgacccgcgcccaactggagcgcgccgagcggatcaccgccgaataccgccagcggctggccgccgaaggcaatccgtgcaagctgatcttcgtcacccccgactactacgaggaacggccgaaggcctgcatgggcggctgggccagcgtattcctcgacatcacccccgacggcaccgcgctgccgtgtcacagcgcgcggcaattgccggtgcagtttcccaacgtgcgcgagcacagcctgcgccacatctggtacgaatcgttcggcttcaaccgttaccgcggcgacgcctggatgcccgaaccctgccgttcctgcgaggagaaggagagggaccacggcggctgccgctgccaggcgttcctcctcaccggcgatgccgacgccaccgacccggtctgcgccaagtcggcacggcacgacctgatcctcgcggcccgtcgccaggccgaggaggcgccgcttggcctggacgcgctgacctggcgcaaccagcgcgcgtcacgcctgatctgcaaggcctga

SEQ ID NO: 322260 - DNA, 279 bp, Pseudomonas aeruginosa
atgagcctgccgtcgctcgacagcgtgccgatgctgcgccggggcttccgcttccagttcgaaccggcccaggactgccatgtgctgctctaccccgaaggcatggtcaagctcaacgacagcgccggggaaatcctcaagctggtcgatggccgccgcgacgtggcggccatcgtcgcggcgctgcgcgagcgtttccccgaagtccccggcatagacgaagacatcctggcgttcctcgaggtggcccatgcgcaattctggatcgagctgcagtga

SEQ ID NO: 322261 - DNA, 753 bp, Pseudomonas aeruginosa
atgagccgtgccgccatggatcgcgccgaattcgaacgggcgctgcgcgacaagggacgctactaccatatccaccatccgttccatgtcgcgatgtacgagggccgtgccagtcgcgaacagatccagggctgggtggcgaaccgtttctactaccaggtcaacatcccgctgaaggacgcggcgatcctggccaactgtcccgaccgcgaggtccgccgcgagtggatccagcgtatcctcgaccacgacggcgcccccggcgaggcgggcggcatcgaggcctggctgcgtctggcggaagcggtgggcctggagcgcgagcaggtgctgtccgaggagcgggtgctgcccggcgtgcgcttcgccgtcgacgcctacgtcaacttcgcccgtcgcgccagttggcaggaggcggcgagcagttcgctgaccgaactcttcgccccgcagatccaccagtcgcggctggacagctggccgcgccactatccgtggatcgaggcggccggctacgagtatttccgcagtcgcctggcccaggcccggcgcgacgtcgagcacggcctgcggatcaccctggagcactatcggacccgcgaggcacaggaacgcatgctggatatcctgcaattcaagctggacgtgttgtggagcatgctcgacgcgatgagcatggcctacgaactcgaacgcccgccgtaccacacggtgacccgcgagcgggtctggcatcgggggctggcatcatga

SEQ ID NO: 322262 - DNA, 915 bp, Pseudomonas aeruginosa
atgcacatccgtattctcggttcggccgccggcggcggcttcccccagtggaactgcaactgccgcaactgtcgcggggtccgcgacggcagcgtagcggcccagccacgcacgcaatcctccatcgccctgtccgacgacggcgagcgctggatcctctgcaacgcctcgcccgacatccgtgcccagatcgccgccttcccggccctccagccgacgcgtcggccgcgcgatacggcgatcggcgcgatcgtcctgctcgacagccagatcgaccacaccaccggcctgctcagcctgcgcgaaggctgcccgcacgaagtctggtgcacgcagatggtccaccaggacctcagcgaaggcttcccgctgttccccatgctttcccactggaacggcggcctgcgccaccggccgatcgccctcgatggcgagcctttcgccattccggcctgtccgcgcctgcgcttcaccgcgatccccctgcgcagcagcgcgccgccgtattccccgcatcgcggcgacccccatccgggcgacaacatcggcctgttcgtcgaggacctcgatagcgccggtaccctgttctatgcgccgggcctcggcgaggtggacgaggcgctgctcgaatggatgcgccgcgccgactgcctgctggtggacggtacgctctggcgcgatgacgagatgctggtctgcgaggtcggcgacaagctcggccggcagatggggcacctggcgcagagcgggccgggcggcatgctcgaggtgctggcgaaggtgccggccgcgcgcaaggtgctcatccacatcaacaacaccaatcccatcctcgacaccgcttcggcagaacgcgccgaactggatgccagtggcatcgaagtggcctgggatggcatgcacatccagctgtag

SEQ ID NO: 322263 - DNA, 126 bp, Pseudomonas aeruginosa
atgtttaactcgacctgccggaatcgcccggccccaccagagaggatcgaccccatgtggaccaagcccagcttcaccgacctgcgtctcggtttcgaagtgaccctctacttcgccaaccgctga

SEQ ID NO: 322264 - DNA, 891 bp, Pseudomonas aeruginosa
gtggattcccgattgagcgattttcttgcccgcgccgaaagcgtgctcgcgcgcctggagccgctgctgccggccgtacgcgaagccgtcgactgggagcgcagcctggcggcgcgctggcaccgcgacggccgtagctgctacctgcagccgctggaggtcagcctcgacctgcgcctggccgacctgctgggcgtagagcggcagcgcgagcaactggaacgcaacacccgccagttcgtcgccggccagccggccaaccacgccttgctctggggggcccgcgggaccggcaagtcctccctggttcgtgcgctgctggccgagctggccggcgccgggctgcgcctgatcgagatcgagcgcgaccacctggccgacctgccgcgcgtggtggagcaactgcaaggcctgccacagcgcttcgtgctgttctgcgacgacctctcgttcgatgccggggaaggcgactaccgggtactcaagagcgtgctcgacggctcgctggaacaggcgccggagaatgtgctgctctacgccacctccaaccgccggcacctggtttcggagaagcagagcgacaacgagaactggaagatggtggacggcgagctgcatcccaacgaagcggtggaggacaagatcgccttgtccgaccgtttcggcctgtggctgtcgttctatcccttcacccaggagcatttcctcagcgtggttcgccactgggtggacgtgctcgcggagaaggccgggctggcctggagctggagcgaggaactggagaaggaagcgatccgctgggcgcttggccgcggcaaccgcaacggccgttgcgcctatcagttctcccgctactgggtgggcaagcaactgctggagcgccaggcatga

SEQ ID NO: 322265 - DNA, 483 bp, Pseudomonas aeruginosa
atgatcgatctgcagcaatctggcgccgggctggccggctacgccctgctggcggcgcaggccgaggcgctgttcgccgacgagcgcgatttcatcgccaacgccgcgcagttctccgcctttctcttccatgagctgggcgacctgaactgggccggcttctatctgaaccgcaacgaggaactggtcctgggaccgttccagggcaaggtcgcctgcgtccgcatccccttctccaagggcgtctgcggcgccgcggcgcgtacccggctgacccagcgggtcgacgacgtccacgcgtttcccggccacatcgcctgcgacagcgcttccagcagcgaactggtggtgcccctgctcaaggacggccgcctggtcgctgtgctcgatctggacagcccgagcgtgggacgcttcagcgccgaggaccaggccgggatcgaaggcctggtggagatattcctgcgcctgacggactgctga

SEQ ID NO: 322266 - DNA, 663 bp, Pseudomonas aeruginosa
atgagcctgacactctacggagccccgctgtctccgttcgtccgcaaggtccgcctgctcctggccgaaaagggcctcgactaccagttggaagcgatcgccccgttcggccagccggcctggtatcgcgagatcagtccgctgggccgcatcccggcgttgcgcgacggcgacctggccctcgccgactccagcgtgatctgccagtacctggaagaacgctatcccgaaccgccgaatctccagggcgacgcccccgccggccgcgcagcggtgcgctggctggaaaaatacgccgactacgagatcgctcccctggccacgctgacgatcttccgcaaccggatactcaagccggcgatgggccaggcctgcgaggaaaacgacgtgcgtcgcgcgctggaggaaaagctgccagcgcacttcgattacctggaaaaccatctcgacggccgggccttcttcgtcggcgagcgactgaccctcgccgacctggcgatcgccagccagttggtcaacctgcgtcacgccggcgaaaacctggacgagcaacgctggccggccctcgccgcgcatttcgcgcggatgctcgaacgcccggcgatgcaagcgctgctgccgggggaacgacggaccctcgacaagctcgcagcgaaagcctga

SEQ ID NO: 322267 - DNA, 774 bp, Pseudomonas aeruginosa
gtgtcgccactcctcattaccgccctcatcatcggcgggatcgccctcctcatcgccattggctatatcaaccacgtggtggaaaacagcaagctggagaaagcgcgcctgaaggccgaactcaacgaccgggtccggcgctgcgcgcagatttccgagagccttcccggccagttcgtcagcccgtcgctgaagctgttgatgagccagatcgagctcagcctcagcgagcagcaactggcgctggagaagaaagccgatgccgggctcaaggctcgtatagaagagttgcgcgcgctggtcgccaagggcgagtcgatcccggtgcgcaatccgccccaggcgatcctgaccgaggacaaggccaaggaagtccgcttcctcttcgaagccctgcatgcccagctcacccgtttcacccaggacggccacctgccgcgcagcgaggcgcagatctgggtcaaggagattcgccacctcctggtgcgcctgcatatcgagttcttcggcaatctcggccagcaggccctgcagcagaacgaaccgcgccaggcgcgcctggccttcgaacgcggcgcccagtacctgcgcaagcagcccgagctggcgcgctaccaggcggagctgcagcagatggaagcgcagctggcccgcgccaacgcgatggtgctgaacaacagccagccggcgagcgaggagcccagcgaactcaacgagggattgaaggccctcgatgcagacgacctgtggaagaagaagaacgtctacgactga

SEQ ID NO: 322268 - DNA, 321 bp, Pseudomonas aeruginosa
atgagcttcccaaccgcagtaaacaaccagatcaccgatgccgtcacccagtccaacgtcaaggtgatcggtgaagccccggccatggcgctgggctcgatcttccagaccatggcccactccaccggcatcctgttcgagaattcggtagctgcccagcaacagcagaacgcccttgccctagccgcttccaacatgggcgtgatgcagatctacagtctggataccagcgccgccggcggcgccaccgagaagatcggccagctgggcgtggccgacaacctcaccagcctgctgacggtgctcaaagcgctgccctga

SEQ ID NO: 322269 - DNA, 321 bp, Pseudomonas aeruginosa
atgagttttccgaccgcagtcaacgaccagatcaccgatgccgtcacccagtccaacgtcaaggtcgtcggtgaggcgccagccatggcgctgggcaccatctaccagaccatggcccactccaccgggattctcttcgagaacgcggtgagcgcccagcaacagcagaacgccctggccctggccgcctccaacatgggcgtgatgcagatctacagcctcgacaccgccgccgatgccggagccaccgagaaagtcggccagttgggcgtggccgacaacctcaccagcctgctgaccgtactgaaatccttcacctga

SEQ ID NO: 322270 - DNA, 546 bp, Pseudomonas aeruginosa
atgtcgatctcggaagaattgggaaggaatctggtccagctggcgcaacgctggctgaaacgccccctcaccagcgaagaacacgagcagttgagacagttccagctcggcctcggcaacgacgccagcagcgatccggccgtgcacgcgcgacagcaggccgaacaggtgatcgagaacggccggcagcgttccgaaggctccatccgccagatcctgcagaacgtccagcaggcctcgacccaggccctccgcgcccaggacagcggcgagcaggcgattcttgaggcggtcaatgccgccggcagcctggccgaactgcgtcccagctacctgcagagcggccaggcaagcgccaaccagttggtgatgtcgcagattgccgaccgcctggccaacctagtgaagagcgaggtacgcctgtgcttcgagcagaacttcggctcgctcaagcagcaactggagaacgctatcgccatcttcaaccagagcaaccacaacacgtccgcaccgccgccggacaagcccgacccgcccgccgcatga

SEQ ID NO: 322271 - DNA, 240 bp, Pseudomonas aeruginosa
atgaaggaagaactcgaaaccctcgtcacccaggtcaaggcactcctcaccgaatgcctgcaaggctggctccaggccctgtcccagggagacagcgtggacgacccggccagccttggacagttggcggtgcagttgagcaccgcctacagcaccctgcaggccgctgccgccgcctaccccggcgataccggcggcagcgcgcaggccccctcggcggacggcacgcagcagtactga

SEQ ID NO: 322272 - DNA, 195 bp, Pseudomonas aeruginosa
atgagcgcctacgcacgctacatcagacgccgcgcgctcgccgccgcggaccgcccggcgcagcgttcgccggacgccagcgaggagacacgggaccaaccgccccccagcaggccggcgagcggaaagcgcctgctggaaatatcggacagcgatgcggccaagctcttggccgtgctgaaactgctcggatga

SEQ ID NO: 322273 - DNA, 633 bp, Pseudomonas aeruginosa
atgttcggcttcggcaagaaatccgcgcccgcgcccgcgccatccggcgacagcgagcaagccgccgcccctggcgaggccggccggcagacgccagccagcggcggcagggcgtccgccaacggcgacgtgaagctgccgtcgcgcccttcgccgctggccggcatgagcgagcgcctgctcaagcagaccgaggcgccgccaccggacaccagcgccctgaacagtcaagtcgtgcaggcggtgcagatgagcaacagcgaaaccgccggctatgcgccgtcgcagatcgccatcgcgccgaacatgatgatcagccaggcctccgggctggtggcgcaatccgccgccagctacttcgacggagtcagcaagatcgccctggccagccaggcgatcctgctccggcagatgacccagaacatcgccgaaaacaagctggcccaggctgccgaggacgcgctcggcgcccttgccaccgacctgctgatgggcgctgccgccgcggtagccgcggcggccggggcgatcgaggcagaatcggccagcttcgccatcgacaagatcgaccagagcatcgccaagtacagcgagaccctcgccagtcgcggcggcaaggacacccaatcgtag

SEQ ID NO: 322274 - DNA, 243 bp, Pseudomonas aeruginosa
atggctgaccccacggctgtgaatgcccagatcaccgatgccgtcacccagaccaacgtcaaggtggtcgccgaagccccggcccaggccatcgccgcgctctaccagatcgccagccattccgccggcctgtccctgcagaacgcagtctacagccagcaggccctgaaccagatctccaccgcggtggtttccaaggcggtgtcgatgatcatggcgatagaagacaagaaaggtatctga

SEQ ID NO: 322275 - DNA, 594 bp, Pseudomonas aeruginosa
atggatcgtccgaatcagccaggcggcaacgaaaccggttccgatcgcctgttcgaggaaagctggcgtgccgcgcaggctggcctgcgcaaacgcgcgcaacgccttgcgcgcggcaacagccatcgggccgaagaatggctgtcgagcaccgcggtcaaggcgatgctgttcctgcgccagtcaccggagcgggtacgcgacccccagggcttcctgttcctggtcctggaacacgtctacctggacagcgcgcgccaccagatccgcgaggaccgcctcatcgaccgcggcatcgacctgcacgatggccagttggagcgcttcgccgccgtcggctcgccgctggaacgcctggagcagctggaacgtctcgaccaggtggacaaggccctggcctcgctgtcgcgccaacagcagcagctcttcgagctgcgcttcatcgaagaactgccctatgccgacatcgccagccaactcggcatcgccccgccgctggtgcgcaagcgcgtgcagttgctgcgctcgcggctgagcgccgactttttcgccggcgacgtttcacaagacagacgcagccgcgttcattcctga

SEQ ID NO: 322276 - DNA, 726 bp, Pseudomonas aeruginosa
atgcactcgaacgagtcaacggaagaccgctgttcacgccactacaccctgctgcaacggtgcccgctgctgcacgggctgcccgatctgctgcggcacgtggcgacccatgcgtcggagcgccggttgcgcgacaaggacgtcctgttcctcaagcacgaccctgaagacttcatcggcctggtcctcggcggacacctctataccgtgctctacgggccggacgggcgggaactgatcgtcaatgacatccgtcctggcgaagtgatcggggaaaccgcgctgatccagccgaaccgccgcgagacctccgcctacgcctccggcgcggcgtcggtgctgatcctccaccgacgtcacttcgccccgttgatcgccgacacggaattcctcaaccgcgcgctggccctcctctgttcgcgcctgcgcgaagcctccggtttcgtcgagagggtctgcctgcatcgcctggagtcgcgcctggcgcgccatctcctggccagcctggcgagcgaacagcccgagggagcctgcgcgacgctaccgaccaaccagagcatcctagcagcgatgctcaacgccagccgcccgaagctcaacgcgcaactgcaaatatggaaacgcgaagggctgatcagctgccacaacgaccggatcctgatcaacgacctcggtcgcctacgacgcaaggccgaactgccggccgcgcccctgtcacccaggtaa

SEQ ID NO: 322277 - DNA, 411 bp, Pseudomonas aeruginosa
atggccaactcctacctcgagcaccacctcgccctgctccagcacctgcgcaacatcctcggcgccctgggcgaggccgagcaggtgccggaagaaaaccacgggctgttcctcgagcgtttcgacgaactgatggacgaactgccgcgcgacccggaaggcgcccaatacctcggccaggacctgatttcccaggtcttccaccgctatccgcagatcgcccacctggtacctcgcgacctgctgtggttcttcggcggcgattgcctgcacttcatgccggacgaagagatcgacctgttccagcgcctcgacgagcgccgctacgaagccgaagagcgcggcgaaacgttcgactggaaccgcgaaaagcagttgctcgcgctgcccgaggacagcccgcggcactga

SEQ ID NO: 322278 - DNA, 381 bp, Pseudomonas aeruginosa
atgctcaagctacttgccaccggcctggcagcctcgtttctcctcctgcccccggcgcaggccgcaccgcctgcgccctatggcgtgcagccgcaccagcaggcggtgcagcgcgccggcgaacagcgccaacgccagctccaggaacagcgccagcgcttcgacgaacaacgcctgcaattgcagcaggatcaactgcaacgccagcagcagaacctgcagcggcaacggcagcagcgacagatgcaggacaacctgatccgccagcagcaactggaccagcagcgctggcgcctggagcaggaccagcggcgcctcgacagcgaacgccggcaactggaaaaccgccggcgccagagccagcccccggcgatccgctga

SEQ ID NO: 322279 - DNA, 2448 bp, Pseudomonas aeruginosa
atgttgttgctctggttagtcgtactggtactcggtgtcgcttacctcgcccatcggcgtaccccacccgctcccgcgctcggcatcagcgccgcctacctgatcctgatgggcgtgttcagccacgcgcccggctggctgctgctggtcttctggctgctctggctggcggtggcgcttcccctcgccctgcccgacctgcgccggcgcgtgctcagcggtccgctgttcgcctggttccagaaagtcctgccgccgatgtccgacaccgagcgcgaggccatcgaggcgggcaccgtctggtgggatggcgaattgttcagcggccgcccggactggcagaaactgctcgactaccccaaggcgcaactcaccgaagaagagcaggccttcgtcgacggcccgaccgaagaactctgcgccatggtcagcgactgggacatcggccagcgcatggacctgccggaagaagcctgggccttcatcaagcagcacggcttcttcggcctgatcattcccaaggagtacggcggcaagggcttctccgccttcgcccactcacaggtagtgatgaagctcgccacccgtagcggcgacctggcctcgacggtgatggtgccgaactccctcggcccggccgagctgctgctccactacggcaccgacgaacagcgccagcgctacctgccgagcctggccaagggcgacgacatcccctgcttcgccctcaccggcccctacgcgggctccgatgccggcggcatgaccgacgtcggcatcgtctgcaagggcgaatgggaaggtcgcgaggtgctcggcctgcgcctgacctgggaaaagcgctacatcaccctcggcccggtggccaccctcctcggcctggccttcaagtgccacgacccggaccatctgctgggcgacgaggaggacctgggcatcaccctggcgctgatccccaccgacacccccggggtcgagatcggccgccgccacgtgccgctgggcgccgccttcatgaacggtccgaactccggcaaggacgtgttcgtgccgctggagtacatcatcggcgggcaggaaatgatcggcaaaggctggatgatgctgatgaactgcctgtcggtcggacgctccatctcgctgccggcggtgggcaccagcgccggcaaggccagcagctacgtcagcggtcgctacgcccaggtccgcgagcagttcaacgtgccgatcgccgccttcgaaggcatccaggaggcgctcgcccgcatcggcggcaacgcctggctgatggacagcgcgcgaatcctcaccgccaacgcggtggacctcggcgagaagccctcggtgctttcggcgatcctcaagtaccacctcaccgagcgcggccgcgagtgcatcgcccatgccatggacatccatggcggcaagggcatcatcatgggtccgaacaactacctgggtcgttcctggcagggcgcgccgatcttcatcacggtggaaggcgcgaacatcctctcgcgcaacctgatgatcttcggccagggcgcgatccgctgccatccgtacgtgctcaaggagatggaactggcccagcgcgaggacaaggaccaggccgcccgcgagttcgacgcgctgctggtgaagcacatcggcttcgccgtcggcaacgccgccagcagcttcctcctcagtctcagctgcggccacctcggcaacgcgcccggcgaccgcatcagccgtccctacttccgcgcgctgaaccgcctggcggcgtccttcgccctgctcgccgacttcagcatgatgctgctgggcggcgaactgaagcgcaaggaacgcctctccgcgcgtctcggcgatgtcctcagctatctctacctgggctcggcggcgctcaagcgctaccacgacctgggcaacccggactacctgcatccgctgctgcgctgggccatggaggaaaacctcggcaaggccgaggcggcgctggaggacctgctgaacaacttccccagccgcttcttcggctgcgcgctgaaggtcctggtactgccgttcggccgccggcacaaagggccgggcgacgaactggacgccgagatcgcggaaatcctcggccgtccggacgacgacccggcgttgcaggcgatcctcgctggcgcgttcctgccgaaggacccgcaggacccggtcggtgccctcgcccacgccttcgacgcggtacgcgaaagcgccgcgctggagaaaaccctgcacaaggcgatcaaggaaggcagggtccagccgcaagcggggcagaacccgatcgatgccggcgccgccgccggcgtgctgagcgccgagcaggcgcaggccctgcaccaggccgaagcggcacggcgcaaggtgatcgacgtcgacgacttcgccaaggaggaactgcaactggccgacggcaggatccgctga

SEQ ID NO: 322280 - DNA, 672 bp, Pseudomonas aeruginosa
atgcagtcctacctacaatccggccgcttcgtggatagtgaccacccggtggtggtggagttcgcggaaaaatcccgggggaattcggcgaaaccgcgtgaccaggcggtcgcgctgtactacgcggtacgcgacggggtgcgctacaacccctacgtgttcagccgcgatccgcagaccctgaaggccagccacgcgctgcagcagggcgagtcctattgcgtgcccaaggccatcctgctcgccgcctgtgcccggcattgccggattccggcgcggatcggcctggccgacgtgcgcaaccacctggccacgccgcgcctgctggaggcgctgcgcagcgaggtgttcgccatgcacggctataccgagctgtacctcgagggccgctgggtgaaggccaccccggcgttcaaccgtgccttgtgccgcgccttcgacgtcgctccgctggagttcgacggcgtcgccgacagcgtcttccatccattcaaccgccagggcgagcgctacatggagtacctggccgatcacggccagttcgccgacctgccggaggaactgttcttctcccacttgcagcagcactatccgcacctgttctccggccgcccgctggccctggacggcgatttccaggccgaggccgggcaagatgaagggcgtcgatag

SEQ ID NO: 322281 - DNA, 621 bp, Pseudomonas aeruginosa
atgttgaccatctggggccggaagaactcgagcaatgtgcgcaaggcgttgtggtgcgccgaggaggctggcctggagtaccggacggtggatgccggcggggcgttcggcctggtggatgagccggcgttccgcgcgatgaacccgaacggtcgggtgccggtgatcgaggacgacggcttcgtcctctgggagtccaacgccatcgtccgctacctggccgcccgctatgcgccgggcgacctctatccgcaggacccggtgcaccgcgccgacgccgacaagtggatggactggaccacctcgactctcgccgggccgttccgcgacctgttctggggaacgctgcgtacgtcgccggagcaacgcgacgaggccctgatcgcaaaggcgttgcagacctgcggcgagttgctgcgggtgccggaccagaccctggccggccaaccctggctgtccggcgaacgcttcggcatgggtgacattcccctgggctgtttcatctacgcctggttcgagatgcccatcgagcgcccgccgctgccccacctcgaggcctggtacctgcgcttgcgcgagcgcccggcgttccgcaccgcggtaatgaccgaactgacctga

SEQ ID NO: 322282 - DNA, 933 bp, Pseudomonas aeruginosa
atgagttccgccctgtccatccgtcaattgacgaaaacctacggcaacggtttccaggccctcaagggcatcgacctggacgtcgccgaaggtgatttcttcgccttgctcggccccaacggcgcgggcaagtccaccaccatcgggattctctcgaccctggtgaacaagaccagcggttcggtctcggtgttcggccacgacctcgacaaggacccggccggcctcaagcgttgccttggcgtggtgccgcaggagttcaacttcaaccagttcgagaaggtcttcgacatcgtcgtgacccaggccggctactacggcatcccggcgaagatcgccaaggagcgcgccgagcgctacctgacccaactgggcctgtgggacaagcgcaacgaagcctcgcggatgctctccggcggcatgaagcggcgcctgatgatcgcccgcgcactggtccaccagccgcgcctgctgatcctcgacgagcccaccgccggggtcgacatcgagctgcgtcgttcgatgtggagcttcctcaccgaactcaaccaggaaggcatcagcatcatcctcaccactcactacctggaagaggcggagcagctctgccgcaacatcgccatcatcgaccacggcgagatcgtgcagaacaccagcatgcgtgacctgctgatgaccctgcattcggaaaccttcctgctcgacctgaagaacgtccaggccctgccgccgactctcgacggctacccgacgcggctggtggacgatcacaccctcgaagtgcaggtggagaaaagccagggcatcaacgatctattcgcccagttgggcgcacaaggcatcgaggtactgagcctgcgcaacaagaccaatcgcctggaggagctgttcgtgtcgctggtggagaagaacctgacgaggatcgcccgatga

SEQ ID NO: 322283 - DNA, 780 bp, Pseudomonas aeruginosa
atgagcagcgagctgagcgccaacctggtcgccctgaacaccatcgtctaccgcgaggtgcgccgcttcacccggatctggccgcagaccctgctgccgccggcgatcaccatggtcctgtacttcgtgatcttcggcaatttgatcggccggcagatcggcgacatgggcggcttcacctacatggaatacatcgtgcccggcctgatcatgatgtcggtgatcaccaacgcctacggcaacgtggtgtcgagcttcttcggcagcaagttccagcgctcggtggaggagctgctggtgtcgccggtatcgccgcacaccatcctcctcggctacaccatcggcggcgtactgcgcggcctggcggtgggggtgatcgtgaccatgctgtcgctgttcttcaccaagctgcaggtgcaccacctgggcatcacggtgctggtggtggtgcttaccgcgaccattttctccctgggcggtttcatcaacgcggtgttcgcgcgcaacttcgacgacatctcgatcatcccgaccttcgtgctgacgccgctgacctacctgggcggggtgttctactcgatcaacctgctgccgccgttctggcagaccgtgtcgctggccaacccgatcctgcacatggtcaacgccttccgctacggcatcctcggcgtctccgacattcgcatcggcgtggccatcggcttcatgctgctggccaccgcggtgctctatctcggctgcgtaaggctgctggtgagcgggcgcggcatgcgccaatga

SEQ ID NO: 322284 - DNA, 1332 bp, Pseudomonas aeruginosa
atgagcgccgggttcggctcgcggatgtccctcggcgtccgcctgagcctgctgttcgccgcctgcacggcggcggtctcgctgatcgccggattgatcttcagcagggccatcgacgagcatttcgtcgagctcgaccatatggcgatgtccgccaagctcgcggtgtttcgcgatgagctgcgcggcctcggctcggaacaacagatgcgccgccgcgaagcggaactgctgcgcgaactggcacgccatcccgacctcggcctgcgcctgaacggcccggatggcagcctctggttcgagcgcctgccgcagcctgcgcatcccggcctgcccgccaaccgcgaactcggcgccccgctggagcccggcaacgacgcttcgccgcaactcacagtgatcctcgacatcagtcatcaccagcacttcctgcaacgcatgcgccagttgatctggctgaccatgagcctgtcggcgctggccacggcgctgctcggcgcctgggccaccggcgccagcctggcgccgctgcgacggatgcgcgaagtcgccgcgcgggtttccgccaactccctcaccacccgcctcgacgccagccggatgccagaggagctgcgcggactggccggcgagctgaacgccatgctggcgcgcctggaagaagccttccagcgcctctcggcgttctccgccgacatcgcccacgagttgcgcaccccgctcaccagtctgctgacccagacccaggtggtattgtcccgcccacgctcgctggaggattatcgcgaggccctgcacggcaacctcgaggagctggaacggctcaccgcgatggtcaacgacatgctgttgctggccaaggccgaccacggcctgctggcgcccagccgccaggccctggacctgagcgcggaagtcgactcgctgctggagttctaccagccgctggcggaagaccgcgacatccgcctgctgcgcgaaggcagcctgagcctgcccggcgaccgcggcatgctgcggcgggtgctggccaacctgctggacaacgccctgcgcttcaccgccgatggcggcgagatacgtatccgtctcggcgaccgacgcctgagcgtggagaaccagggtccggcgattcctcccgagcgcttgccgcgcctgttcgaccggttctatcgtgccgatccggcgcgccgcgaaggccagggtgaacacgccgggctcggcctggcgatctgccgctccatcgtccaggcccgcggcggcgagatccgctgcgagtctgccgacggctggacccgtttcgtcatcgatttcgctcgcccgcgccgatga

SEQ ID NO: 322285 - DNA, 681 bp, Pseudomonas aeruginosa
atgaaactgctgatcgtcgaagacgaaccgcgcatcggccagtacctgcgccaggggctcgccgaggcaggcttcgccgtcgacctgagcgacgatggcaacgagggcgagcaactggccctgggcggcgactacgacctgctgatcctcgacgtcatgctgcccggccgtgacggctggcagatcctgcgcagcgtgcgcgacgccgggatgaccgtaccggtgctgttcctgaccgcccgcgatgccgtagaggaccgcgtgcgcggcctcgaacaaggcgccgacgattacctggtgaagccgttcgccttcgtcgaactgctcgcccgggtgcgcaccctgctgcgccggggcagccagcagttgcaggagaccaccctgcaactggccgacctcgaactcgatttgctgcgccgccgggtgcaacgccagggcaagcggatcgacctcaccgccaaggagttcgccctgctcgaactgctgctgcggcgcagcggcgaggtgctgcccaagtcgctgatcgcctcgcaggtctgggacatgaacttcgacagcgataccaacgtcatcgaggtggccatccgccgcctgcgcgccaaggtcgacgacgactacccgcagcgcctgatccataccgtgcgcggcatgggctacgttctcgaagagcgcgacgaatga

SEQ ID NO: 322286 - DNA, 192 bp, Pseudomonas aeruginosa
atgcgtaccttcactgcctccaccctcgctttcctgctggtcctcgccccgaccgttccggccgtggccgacagcggcggcgacatcgtcttcgagcgcatgcaggcccaggccgccaaggctcgtgccgcgcaccaggagaaactggcgaagcaggccgaagcgacgaagaaggacaaggaaaactgctga

SEQ ID NO: 322287 - DNA, 546 bp, Pseudomonas aeruginosa
atgtttccgcgccgcctgcttcccgcttccctgatcgtcctcggcgtgcttttcggtgccagcgcccaggcttcaccggcccacggccaggccttcggcaagccggcccaggccgcgcaggccagccgcagcatcgaggtggtgctcggcgacatgtacttcaagccgcgggcgatcgaggtcaaggccggcgagacggtccgcttcgtgctgaagaacgaaggcaagctgttgcacgagttcaacctgggagacgcggcgatgcatgccgagcaccagaaggagatgctggagatgcagcagtccgggatgctcaccccgaccggcatggcgtcgatggaccatagtcagatgggccacggcatggccggcatggaccatggccggatgatgaagcacgacgaccccaacagcgtgctggtcgagccgggcaagagcgccgagctgacctggacattcaccaaagccacccggctggagttcgcctgcaacatccccggccactaccaggccgggatggtcggtcaactgaccgtgcagccctga

SEQ ID NO: 322288 - DNA, 831 bp, Pseudomonas aeruginosa
atgcagcatcccgccgaacattcgccgctgggcaagaccagcgaatacgtctccagctacacgccgtcgctgctgtttcccatttcacgcacggcgaaatgggccgagcttggcctgagcgccgagaccctgccttatcgcggcgtggatatctggaactgctacgagctgtcctggctgaccccggccggcaagccggtggtggcgatcggcgagttctcgatcccggcggactcgccgaacatcatcgagtcgaagtcgttcaagctttacctcaattccctcaaccagtccgccttcgatagtcgcgaggcgcttcgcgcggtattggagaaagacctctcggccgctgccggggcgcccgtgggcgtgcgcctgcgcagcctcgacgaagttgccgaggagggcatcgggcgtctgccggggcgctgcatcgacgagctggacatcgccgtcgacggctacgagcagccgcgcccggaactgctgcgctgcgacgccgggcggatcgtcgaggagcagctctacagccacctgctcaagtccaactgcccggtcaccggccagcccgactggggcaccctggtggtcgactaccggggcccggcgctggacccggccagcctgctggcctacctggtttccttccgccagcaccaggacttccacgaacagtgcgtcgaacgcatcttcctcgacctgcagcgcctgttgcagccgcaggcgctcagcgtctacgcgcgctacgtacgccgtggcggcctggatatcaatccctaccgcagcctggcggaggtcgcaccggacaaccgacgcctggtgcgccagtaa

SEQ ID NO: 322289 - DNA, 264 bp, Pseudomonas aeruginosa
atgccgaaagagagtctgctgcgcgaactatccgccctgcgcgagcaactggagcaacaacccccgctgaacgaagagcagcgcgccgaactggaactcctgatcagggacatcgaactgaaactggccaacgaggacgccctcaacgaaggcagcctggtcgatggggtcaacctcgccgtcgagcgcttcgaggtcagccacccgaccctcgccggcacgctccgctccatcgtgcagagcctggccaacatgggtatctga

SEQ ID NO: 322290 - DNA, 582 bp, Pseudomonas aeruginosa
atgagccgcgcccgtcaccgctttctcgacgaactggccgaacgcttcgccagccatggcgccgagccctatggcgaggcagtcagccaggccgagcacgcgctgcagtgtgcgaccctggccgagcgcgccggctgctcggacagccttgtagtcgccgccctgctgcacgatatcggccacctctatgaagacccggcgcagatcgacgaggaggacctgcgccacgaggaattcggcgcacgcctgctacgcgagctgttccccgagtcggtctggcagccggtgcgcctgcacgtatcggccaagcgcttcctctgcgcggtggacccgagctaccacgccagcctgtcgccggcctcccggcacagcctggtgctgcaaggcgggccgttcgacgagcgtgccgccgcggcctacatcaaggcgccctatgcccaggacggcctgaccctgcgccgcctcgacgacctggccaaggacccggccatgcgcacccccgaactgacgcacttcttcccgctgctggaacgcctgctgcggattgatccggatcgcgcacatctgcgcccgacaggttaa

SEQ ID NO: 322291 - DNA, 744 bp, Pseudomonas aeruginosa
atgcccagctccgaccaactcccgcgcttcaccgccctgctcttcggactctccggcggcctggtggatttcggcgcccggaccctgtccctggcgctgctgcgcagccatccgcatagccctgccgaacacctccgcgacgccagtctgctgcccttcgccgaggcacaaagcttcctgttgcagcgcaagccgaacaagaacgagcgccagcgcctggagcaggccctcgacgaagccgccgaggaacaggccgaagccatcgccggtgccgtggccctgctggagagcctggacgaacaacgggttccctacgcctggcaggacgagctaccggaatcggtctgccagcgtcttgccgcgccgctcggccgagcgaacgccctgatccccctcgccggcgcgcgcccctggccggcccccgatggctgctggcaagccctcgcccggctgggcatcgagcgcctcgacggctgcgtgctggtcagcgcccaaccgcgtcaactccaggccggactcaatgccgggctatggaccatcggcctggccgccagcgggccgtcgtgcggcctctcgccggccgactgggacgctctcggacacaccgagcgcgaccgcttgcgcgccgacgccaccctggaactgtaccgcctgggcgtgcattccgtgatcgatcacctgggcgagctgcaaccctgcctgcacgacctcgccgtccgccgcctgaaaggagaaaaaccatga

SEQ ID NO: 322292 - DNA, 720 bp, Pseudomonas aeruginosa
atgccggtcgatcaatctcgtcagtacctgcgcatccgcgaccagctcgccgcggatatcgcccagggtgtgctgcaagtgaaacttccctccgagcgggagttggccgagcgcttcctgtgtacccgcatcacccttcgcgaagccctgcagcaattggaaaccgaaggcctggtctatcgcgagaaccgccgcggctggttcgtcgcgccgccgcggatccgctacaacccgacccgtaccaccggcttcatggaatacgtcagcgcccagggacgccagccgcgtaccgagacgctgcacgccgagcggcgtgcagccggcgcctggctggccaagcggatggggctggaggacagcgcgccggtgtatttcctgcaacggcgccgctgggtggacgagcgtccggtgctgatcgaactgatcgccctggatgccgggtggtgcccaggcctgctggaccacgacctcgatacttcgctgatgagcctgctgcgcgagcgtttcggcctgcagccgacgcgctgccaactggcgatgcacccgaccgcgctgaacgcggcccaggccgagccgctgcaactggcgccgggttcgccggcgctgtacctggagcgactgagttacgcggaggggcagagggtggtcgagttcgaccaggagttctggcgcccggacgctctggagatcgtgctcgacgcggcctatccgggcgcctga

SEQ ID NO: 322293 - DNA, 405 bp, Pseudomonas aeruginosa
atggctgacagacaattgctacacacggcccatatcccggtgcgctggggcgacatggacagctacgggcacgtcaacaacaccctttatttccagtacctggaagaggcccgggtggcctggttcgaaaccctcggcatcgacctggaaggcgctgccgaggggccggtcgtgctgcaaagcctgcacacctacctgaagccggtggtgcatccggccaccgtggtggtggaactgtacgccggcaagctgggcaccagcagcctggtactggaacatcgcctgcgcaccctggaagatccgcaaggcacctatggcgaaggccactgcaagctggtctgggtgcgccacgcggaaaaccgttcgacgcccgtgccggacagcatacgcgccgcgatcgcctga

SEQ ID NO: 322294 - DNA, 705 bp, Pseudomonas aeruginosa
atgcgcgcccgcggcgtgaactggatcgaacgtagtgcccgaatcctggcttgcgccagcctcgcattggcacccacgctgtccctggcggccagtgaagaagacccttgggaaagcatcaaccgtcccatcttcaccttcaacgacaccctggacacctatgcgctgaaaccgctggcccagggttaccagaaggtcaccccgaacttcgttcaggacggcgtgcacaacttcttcaacaacctcggcgacgtgaagaacctggccaacaacctgttgcaggccaagttccacaatgccggcgtggacaccagccgcctgctgttcaacagcaccttcggcctggccggcttgatcgacgtggcgaccccgatgggcctgcagcgcaacgatgaggacttcggccagaccctgggttattggggcgtcggcagcggcccgtacgtgatgctgccgttcctcggcccgagcacgctgcgcgatgccccggcgaagatcccggacatctatgtcagtccctaccactacatggacgacgtacgcgcgcgcaacgtgatgttcggcatcaataccgtcgacacccgtgccaacctgctgaagtcggaaaaactgatcagcggcgacaagtacatcttcatccgcaacgcctatctgcagaaccgcgagttcaaggtcaaggacggcgaggtggaggacgacttctaa

SEQ ID NO: 322295 - DNA, 300 bp, Pseudomonas aeruginosa
atgcagcccatcgagcacaactacagcgagaagcgcgacttcatccgcatgaagctcgacaccccggtcaccatccgctgcgaaggccgcgagtcggtggccctgtgccgggacctgtccgccagcgggctgctgctggaagcgcaaagcgagctggctccgggcgaccacctgcgggtgagcatcccgtccacccacgagacgctcaccggcctggaactggaagcccgcgtggtgcgctgcgaacgcctcggcccgggtcggcatagcctggggctgagcatcgtcgcgatccactga

SEQ ID NO: 322296 - DNA, 1185 bp, Pseudomonas aeruginosa
atgcataaagtcagtgccatgctgctgatcatcgatgacgacgaggtggtgcgcgaaagcctcgccgcctacttggaagacagcaacttcaaggtgttgcaggccctcaacggtctgcagggcctgcagatcttcgaaagcgaacagccggacctggtcatttgcgatttgcgcatgccgcagatcgacggcctcgaactgatccgccgcatccgccagaccgcttcggaaacgccgatcatcgtactttccggagccggcgtgatgagcgatgcggtggaagccttgcgcctgggcgccgccgactacctgatcaagcccctggaagacctcgcggtgctcgagcattcggtgcgccgggccctggatcgcgcctacctgcgggtcgagaaccagcgctaccgcgacaagctggaagccgccaaccgcgaattgcaggccagcctgaacctgcttcaggaagaccagaacgccggccgccaggtgcagatgaacatgcttccggtgacgccgtggagcatcgaggggctggagttttcccaccggatcattccgtcgctgtatctctccggcgacttcgtcgactacttccgggtcgacgagcgacgcgtggcgttctacctggccgacgtttccggccatggcgcttcctcggccttcgtcacggtgctgctgaagttcatgaccacgcgcctgctctatgagtcgaggcgcaacggcacgctcccggagttcaagccgtccgaggtgctggcgcacatcaaccgcggcctgatcaacaccaagttgggcaagcacgtgaccatgctcggcggggtcatcgacttggagaagaacagcctgacctacagcatcggcggccacctgccgcttcctgtgttgttcgtcgaagggcaggcgagctacctggagggccgtggcctgccggtgggcctgttcgacgatgcgacctatgacgaccgggtcatggagttgccgccttccttcagcctgtcgctgttttccgatggcatcctcgatgtgctgccaggagctacgctgaaggagaaagaggcttcgctaccggaacaggtggcagccgccggaggcaccctcgacgggctgcgccaggtcttcgggctggccaacctggcggagatgccggatgatatcgccttgctggtgttgagcaggaaccttgcatga

SEQ ID NO: 322297 - DNA, 483 bp, Pseudomonas aeruginosa
atgagtaccggtaaaatccagtttgccgaacagaacggctccttcgttctgaaattcgtcggtgaggtccgcctcaccctgtgctcggccctggattccaccatcgaaaagatcttcgctgcgctgaatttttcggcgatcatcatcgatcttacggaaacccagagcatcgatagcaccacgctcggcctgctggccaagctgtccatcctgtcgcggcagaaaatcggcctgttgcccacgctggtgaccaccaatccggacattacccgtctgttgcagtcgatgggcttcgatcaggtgttcaatatcgtcgatcgtccgattccgtgcccggaatgcctgtccgacctgccgccgcaggaccagtcggaagatgtggtgcgcgacaaggtcctggaggcgcaccgcatcctgatgggcctcaacgaatccaaccgcgaagccttccacgacctggtcagcgccctggagcgccattaa

SEQ ID NO: 322298 - DNA, 924 bp, Pseudomonas aeruginosa
atgacttcgaagctggaacaactcaagcaatacaccacggtggtcgccgacaccggcgacttcgatgccattgcccgcctgaagccggtggacgccaccaccaacccgtcgctgctgctcaaggccgccgccctgccgcgctacgccgagcaccttcgacaggctaccgcgggtagcggcggcgacgccggactggcttgcgaccgcttcgccgtggcagtcggcaaggacatcctcggagtcattcccggacgtatttccaccgaagtcgacgcgcgcctgtcgttcgacagcgaggccaccctcgcccgcgcccaccgcctgatcgagctgtacgacgaacagggcatcgaccgcgagcgggttctgatcaagatcgcctccacctgggaaggaatccgcgccgccgagattctggaacgcgagggcatccagaccaacctgaccctgctgttctccttcgcccaggcggtggcctgcgccgacgccggggtgttcctcatctctccgttcgtcgggcgcatctacgactggtacaagaagagcgagaaccgcgactacgccggcgccgaggatcccggcgtgcagtcggtctcgcgcatctatcgctactacaaggccaacggctacaagacggtggtgatgggcgccagcttccgcaatctcggccagatcgagcaactggccggctgcgaccgcctgaccatcagtcccgacctgctgcaacaactggctgacgcccagggcgagctgccgcgcctgctgctgccgggcgaaggcgagccgcgccaggtgctcgacgagagcgctttccgttggcagatgaacgaggacgccatggccaccgaaaagctcgccgaaggcatccgcctgttcgcacgcgaccaggaaaagctcgaataccagttggcgacccgccactga

SEQ ID NO: 322299 - DNA, 939 bp, Pseudomonas aeruginosa
atgatggactggaccgatcgccactgccgcttcttcctgcgccagttgtcccgtcacaccttgctctacaccgagatggtcaccaccggcgcgttgctgcacggcgatcgccagcgcttcctccgctacgacgaatgcgagcacccactggcgctgcaactgggcggcagtgtgccggcggaactggcggcctgcgcgcggctggcggaagaggccggctacgacgaggtcaacctcaacgtcggctgccccagcgaccgggtccagcacaacatgatcggcgcctgcctgatggggcatccggcgctggtggcggactgcgtgaaggcaatgctggatgcggtggagatagcggtgacggtgaagcaccgcatcggtatcaacgggcgcgacagctatgccgagctctgcgatttcgtcggccaggtgcgcgaggccggctgccggagcttcacggtgcatgcacggatcgccatcctcgaagggctctcgcccaaggaaaaccgcgaggtgccgccgctgcgctacgaggtcgcggcgcaattgaagaaggacttcccggacctggagatcgtcctcaacggcggcatcaagaccctcgaggcctgccgcgagcacctgcagaccttcgacggcgtgatgctcggtcgcgaggcctaccacaacccctacctgctggccgcggtggacagccagttgttcggcagcgaagcgccgccgctcagtcgcagcgaggccttgctccgtctgcgtccgtacatcgagcgacaccaggccgaaggcggcgcgatgcatcacgtgacccgccatatcctcggcctggcccagggcttccccggctcccggcgattccgccaactgctctcggtggacgtgcacaaggccgccgatccgctgcgggttttcgaccaggcgctggaacttctggcggggcgatag

SEQ ID NO: 322300 - DNA, 1155 bp, Pseudomonas aeruginosa
atggccactattcgcgctcggcgcaacgccgatggaacggtgatgtacaccgcgcagattcgtatcaagcgcggaggcgcgcaagtctatcaggagagcgcaagtttcagccggaaaaaggccgctgaagcatgggcgctccgtcgggaggctgaattggccgagcccggtggcttggagcgggcgacgaaaaagggggtactgcttcggaacatcatcgcccagtacctggccgaccgggataagactcgcccgctgggtaagaccaagatcgccacgctgaccgccatcgccgcttcccacctgggcgataccatcgaccgggatatcaccagtcaggtgctcgttgactatgcgctgtggcgcatggggccggacgggggaggggtgaaggcgcagacagttgccaatgacctggcacatcttgggtcggtgttaggagtggcggaggcagcctgggggtatcaagtcgacccggacgttatggcgaaagcccgcagagttctcaagaacctgggttacaagttgcgcagcagggagcgtgatcggcgcccgacacttgaagagttggatcggttgttccaggcgttcgagcgctcatggcgatcgcggccgacctcgatgtgcatggcgaaggtcgctgccttcgcattgttctccagccgaaggcaggaggagatcatccgtatccggtgggcggatctggacgaggcccggggcgccgtcctggtccgggacatgaagaacccaggcgacaagtggggtaacgacgtgtggtgtcagctacccgaggaggcaatggcggtcatcaagagtatgccgcgggccttcgacgagatctttccatacaccaccgatgcgattcagggggcatggagtcgcgcgatcactgccgcaggtatagaggatctgacgtttcacgatctgcgccacgaagcgatcagtcggctgtttgagctggagtgggacattcccaaggtggcttcggtcagcgggcaccgagattggaactctcttcggcgatatacccatctgcgtgggtctggtgataaatatgctggctgggaatggctcccgaaggtcctggcgatgccggtgtccttcggggaatgggtttccaagaagaagtcaggccgccggtcgggctcggtttag

SEQ ID NO: 322301 - DNA, 276 bp, Pseudomonas aeruginosa
atgaataccctgttccttctcatggcccagtacaacggcctcgccatcatcccgctgaatagagtatgcgccgactacttcagtcacctgactgtcgagcagttccagcggaaggtcctggccggacagatccagatccctatcacgcggatcgagtccagccagaaggctgccagaggcattcacttggcggacctggcggcgtatctggacaaacagcgcgaggtcgccctgaaagaccatgaacggctaaaccgagcccgaccggcggcctga

SEQ ID NO: 322302 - DNA, 468 bp, Pseudomonas aeruginosa
atgacagcattctctgcctccactccatcgcaagccataccatgctcgcggattggcgctgacctggtactcggcgaacaacacaacatcatcagtgtttccggcggtaaggacagcacagctacgctactgctagccatcgcagtggaggccccaaacatccgaggggtcttcgccgacaccggcaacgagcacgagctgacgctggaatacatcgactatctggagcaggtcactggcgtgatcatcgaacgccggcgtgctgacttctctcggcagatcgccggcaagcgccgctacatcgaaaccaagtggcgcgaccaaggcgtggctgagagcctcatcgaggccgcgctggaagtgctccaggatctcgtccagcaggcagaggtggacatgccgcaaaccgtcatcgaatcgctcaaggaccgggcagcggcgagtcagggagagctaagcgatgcgtag

SEQ ID NO: 322303 - DNA, 1050 bp, Pseudomonas aeruginosa
atgaccgctttccgtcgccacgatctcgcccaggccatctaccaggcccagctccctctcggccctcgcgagtctccgaacatcgatctcttcgcctccgccgagctatgtcgcttcagcagccactgcgcacaccattacagcacagcgcaacacagctatttcgtcgtttttctggctgtcgaagaacaccaactgactgcgatctggctcggcatgaaaaacgactattttctagtgtcggcccgcttacacaagcacaggcacataccggagtcagaaactttagccactgcccaggaaaatctcgacttactaatccagcgactttggcagaggtggcccgtcaattttttttctacttgttcccaatgctttaagcatggaggcctcatcgcccaactccggaataaatgccgcagcatcaattaccaatctcgctatagcgcgatcaattaccaccgccaaaggagccaggcgatgaaactccacactttctggctcatcaacttgcactatctgacacaggtccgaaagagcatgctgcagctccagccaagccagtgcactatccactgttggcaactggttaaaattaaccgacctcatggtgctgaggtactcagaagttccaaagagcgcttgctgttggccccctcttttctccttcacggaagatataaccattttccccagctttccagcatgcttcgcaactccaaccgtctgcttaagcatcagcttgttatcttcggtttgtttccgacgctgaattcgcttatcaagcacaaagaaaatccaactcacaaaaatagcgacaacactaccaaccgcctgaacccaggccggagcattggcgctactccatccccaagaccatatccagcaccccagcagcaccataaagggagagaccagtacgcagcccaaaagatgactaggacgcaacttgattgtgacttcctcttgaaacatggccatccccttgccatcagcgataaacgaagcatgcagacaccaaggcaaatggtccagggggagacggcatga

SEQ ID NO: 322304 - DNA, 480 bp, Pseudomonas aeruginosa
atgactactatcccggctagccgcgtagcggcacaagaccagggcgccgccctggcacacgccacccacagcacccaagccccggccgcgcaaaagcgcggcggcggcctggcacgtcgcatccaactgatcgccatcgcccaaggccgccaaccgatgcccgagggtggcgctatagaaagccactgctgcgcagcagcaggcatattccaacccaaccttcagtacacgccgaaggcacgcataccccacgaaaggctgcgccggggcgcgaagcacatagccacgcttcgcttaatgactcgctcgcccgcgcagcttgtcgaggggggaaagcgcccaccgaagcccaccgataacgcactgatccgcacgctgtgcgcgcagatccgcgagcagaaccaagagattgccgcgctgcgcatcgtgaacaccgacctcctccagcgcctggagaaaaccgaagggggacgggcatga

SEQ ID NO: 322305 - DNA, 240 bp, Pseudomonas aeruginosa
atgaactactccagcctctccacctacgacctgctgaagcaccgcagccaccacgtcgacagcctgacccgcctgcgccgcgcccagccacagtgggacgaggacgatgctcgacgcggggaaatcacgattgccgatatcagcgaccagatccgcgagatcgatgaccaccttcgtccgagcggctgggagtcagtcgacctcgactactccggcgacactgcaccgatgtgcatgtga

SEQ ID NO: 322306 - DNA, 627 bp, Pseudomonas aeruginosa
atgcatacccaacacatcattctcgcggccaccactctcgccgcgctgctggtcctgatcgccaccgcctatcttgctgggcgcaaggacaggaagaacgcccaacagcaggcggtcgacgaggcgctttacctctgccgcgcctcgcacagccaggaactgacggcgctgcatgccgaccttgccaagctgcgcaccaatgcccagcgcctgcaacaggtcatcgatgagcagcaggaagagatcagcgacgagaaggaacttcgtcaaaacgtcgaagccgaggccaccgagaaacttgcggattggcagcagcgccacgaagagcaacaagcggaactgaagcgcctggagacggagctggagacacgcatcgcgaccaatcatcggcaggctgagaccgcgaagctcctccgcgagcagaacttggtcgccgaagaactggacgccatccgcaccgccagtcgcctcctcagcggccacgctcgacagttccaaaagaccggcaccaccaagcgcaacgcagacgccgaagcccaacagcagctcgccgcgatcctccagcggctcgccatcacggaactggccagccagagcgcagaagttgaagcgcaggaggcggcatga

SEQ ID NO: 322307 - DNA, 318 bp, Pseudomonas aeruginosa
atgagcactcctcacgacaaccaacccgagcttcgcctgactccggccccacgcccggagacggtggaactcctctaccgcaccttcggcgacgtgctgatcccgctggagcacctgcgcattcggtacttccacaacctcaacgaagagacgttcagccgttcgatcaaggaacgccgaatccgcctccccatcaccaccgtcgacccgagtcagcgcgcccagccatttgtcgatgtgcgccaccttgcggcctggatcgactcacgagcctggcaggccgacgaggcatatgcccgactcggcagtaacgagtaa

SEQ ID NO: 322308 - DNA, 231 bp, Pseudomonas aeruginosa
atgaacaacgcacgccgacgccaactgcaacaaatcaccgctcaactcgaagagatccgcgagcagatcgaaaccttggttagcgaggaggaggaggccctggacgctatgcccgagagcctgcaagccagcaaccgcggagcgcgcatggaagagatcgtcgaccaactcaacgaagcagccagcggcatcgaggacgcggtagccgtgctcaacgaggccgccgcatga

SEQ ID NO: 322309 - DNA, 294 bp, Pseudomonas aeruginosa
atgaaagacttgtccctgcaccaggccgcgcagcgcctcgggctgacgcgtcccgagctgatcaagcgcatgaaggcggccggcctgctcgacagcaacactcttccagccgctccagtccgcgaccgcctctacctgcgcgcaaaggaaacgccctggcaccaccccgaactcggcatgcagtacagccactcgacgaaagtgcgcccggccggagtggcatggctggccgacaagctcggcatcccccgcgtctgcccgccggcggtcccggaccgccgcgaggttggctga

SEQ ID NO: 322310 - DNA, 312 bp, Pseudomonas aeruginosa
atgacctacgcactccgccaaccatcctttgtgcggctcaaggctcagctcagcctcaacggccgcttcaaccacgccctctacgacgccgaaacccgtcaggcagtccacgtcactctcgacattgagcgcggcgctggacaggtccacatcatcgttcgaatgggctccacgctgaacagcctgggcctcccgctcgactcccagtccaacgccaacaccgtggccgactacatcgagtccatcgcgaatggccgcctggacaccgcggacgagaccccggctcaccgccgtttcgaccaggctgcgtag

SEQ ID NO: 322311 - DNA, 192 bp, Pseudomonas aeruginosa
atgcaacgttccgccacggtacacgtccacccggcctgtacctcctccccgcaacaggtccaacgcctccaggccgaaactggctgccttgtcgtcatcttcaacggcaaagcccagcttgtagccagccgtaccccgggccgccgttattcggtaaccaccacctccccgtttggaggtgacgcggcatga

SEQ ID NO: 322312 - DNA, 270 bp, Pseudomonas aeruginosa
atgaatggcgccaccatcggagtggacaagagcgcaacccgcattctggacggcgaaatctacgcccttgaacatgacggaatgctacgagtgaaatacctatatcgcctgccagcgggcggtatgcgcctgcggagcttcaacacaacagagcacccagacgaagaatactcagccgagcagatcgagacccaacaaatccgaatccttggctgggtattttggtggtcgacgctccgaaaaaagaaaggccttgccttcgaccaataa

SEQ ID NO: 322313 - DNA, 555 bp, Pseudomonas aeruginosa
atgtcccgaccctcgttcgcggatcagttcgaccgcatgggccgcgaggtgcttcccttgggcgaagcgctcaacctcgtcgcccgcaatcaacgcatgtgccacggtggcatcactggcttcgctcactccaccggccgcagcgtctccaccacttcccacaagttcgaccccagccacaccagccacatcctcaacatctacgacgtgctcgacttcctgcggtacgtgtcggccgaggggcgggcggtcgtgctcgacgcgctgcatgccgagctgggcgacagcctgtggttcttcgtttcgccgcttcagttcgaggatgtgccggccagcctgattgccggtgccggcgagatcctgcacacgtcggccaatgcggcaaccaccatcgcgcgccatatcgaggatggtcgcatcgatgcggccgagctggccgaaacccaaaaactggcgatgagcatcatccgcgcggcggttggcctctacgagcgggctcgctacgtccaccagaccaccaagggcgccgaacgcggggaggtggccaatggctga

SEQ ID NO: 322314 - DNA, 210 bp, Pseudomonas aeruginosa
atggctgatatcgcggatcacgccaatgacctggtgctggagcgcatggaggcggcgttggctgcccgagcgctggtagtggctggcgaatcggctcatgagtgcgagtgctgcggcgagccaatcccgccgcgccgtcgcgaagctgtgccggggtgccaaacctgcattgaatgccagtccttcaacgagcggagggggcgccggtga

SEQ ID NO: 322315 - DNA, 2214 bp, Pseudomonas aeruginosa
gtgagtaacgaagccttggacgaagtgctgaatcagcttcgggatcatggtatcgagcccttcaccaagcggagcccgggctgggtgttcggcaagctggtgcgctgcaaggtcgagggcgaccggagcggggaggctactggctggtacgtactgcacgaatacaccactgccagcggcaagaccctctatttcgggcgcttcggcaactggcggcaggatctcaacgagaaattcaagctcaagggtgttcgcctgactgccgaggagcgcgagcttatgcacgcccgccaggaagaggccaagcgcaaggccgcggcaaaggccgcctacgccgcgcagcgtgctgcgcagggcgccgcgcggctgtgggaacggctatcggagaagggcaaggcgccgtatctcgaccgcaagcaaatcgtcggtatcggcggtcgctacggttacggcgggcgtttcatggtgcccatgcgaacgctcaaggggctggtggggctgcaaatcatctaccctgaaaagcagcccgataccggccgggacaaggcgtattggccctacggcatgcagaaggaaggcgcgttctgcctgatcggtccgcgccccgaacccggcgagccggtgttgatcgctgagggctacgcaaccggcgtcagcctgcatatggcgacgggctgcgcggtggctattgccttcgatgccggcaacctgctgccggtcggcaaggcgatgcagaccgagtacccgtcgcggccgctgatcttctgcggcgatgacgactggaagaccacccgccaggacggatcgccttggaatccgggcgctcaggctgcggagaacgccgccacgatcctgggcggccagttcgtactccctcgcttcggcagcgagcgggatgagggctggactgacttcaacgacctgcactgtgccgaggggctggaggttgtccgcgcccaggtcatggcggtggtccggccgccggcggaagggggctggcgtgactgcttgctgcggatcaagggcggcgggttggcggcgcacatggtgaacatcagtctcatcttgcagaacgatgaacggtggcaaggcgtgctcggctatgacgagttcagcgccaagaccatgaagctgcggacgccaccctatggcggtggtacgggggagtggacagatctggacgacatgctggcgtgcgagtggctggcacagcagtacggtctgttgacgaaggtgccgccggtgctcgaagcggtgtctgtggtggccagcaagaacagttttcacccggtgcgggcgtaccttgagggcctggagtgggacggtacgccgcggatcgagcattggctgaacagggccctgggcgtggaggagaccccgtactcgatgaaggccggcaagcgctggctgatcggcgctgttgcgcgtgttatgcgcccaggctgcaagatggatacggtgctgatcctcgaagggttgcagggtgagggcaagtcgactgccatgtcggtgctgggcggcgagtggttcatggataccccgttcgtgcttggtgacacagaaacatttcagatgttacgcggcaaatggatcagcgaactgggcgagttggatgccttcaacaaggccgacagcaccaaggcgaagcagttcttctcggcatcggttgataccttccgcgagaaatatggccgcagatcccgcgatgtgccgcgacagtgtgttttcgtaggtactacaaaccaggaggagtacctgaaagacaccaccggtaaccgtcgatactggccggtcctctgcacgaaggtggatctggacctgctgcgcgagatccgggaccagctatgggcagaagcgctgttctgctaccgcgccggagatcagtggtgggtctcgcgtgaagagcgcgcgctgttcgaggaggagcaggacaagcgctacaccgtcgacgcctgggagcacaagttgatcggttggctggaggggtacgtcggcgagaccgtcaccagtgctgacctgctgggggacgcgctcaacctcgacttcgggcattggggcaaaccggagcagatgcgagttggccatatcatgcaccggctgggctggcggcgcagacgcctgcccgcatccggtaagtcaccggtgcggccgtggggctatgagcggccgccgtcgtggaaggggcggccaacgcagaaggaggccgcattttga

SEQ ID NO: 322316 - DNA, 372 bp, Pseudomonas aeruginosa
ttgatcaagccaattgacgagatgctacggacctgggccgccgagctgcacccaccgaacggcgtaggttcagccggcaacgctagcggcgggagcaatgtgattgctatgctgatggcgaccaggggaaacctgactcgctccacagcgggggctcgctgtcctctggatcgcacggcggacattgagctgatcgtgaacaagcaccttccgccgcccatcgagcgggtggtgcggttgcattacacggactacgacatgtcggacccgatgaaatgggaagcgtgcgggtgcggtagaacccagtattaccagcgcctgcacctggcccatgcggccattgctgaaatcctgctgcggcgggcggcctga

SEQ ID NO: 322317 - DNA, 351 bp, Pseudomonas aeruginosa
atggcgacagagaacgacgttcagcagacgctgagcgatatcccgacctggctgttcgtgctggtgtcgatggcaggcctgtctggggagttgtggcgcgccgaggcggcagggctgacggtcagcgatctgctgaaacgtgtcctgctgcgctcgggggcgtcggtggtgttcggcctggcctcggtgttgctcgccacggcgagcggtgcggggctgccggttgccgccgcgctcggtagcgtggtcgcgtgcctcggcgccgacgtggcatctggtttttacacacgttggcttgagcggaaagcgggcggttctgaggtgccgcctcgtcgggctgactcggagtga

SEQ ID NO: 322318 - DNA, 738 bp, Pseudomonas aeruginosa
gtgagaggggctatcactgcgcgggacttggacgacgccgttcggtccttgcagcagctcggtggcgacttgcctgctgctgtgttggccgacgccttgaaccacacggcgaaccaggcgaatcaggcgctggtcggggagatcgaccaggtcttcgaccggccgacaccgttcacccgcaacgccatccgcatcctgcatgccacttcgcgccgccttgaggcggccttgtgggtgaaggacgaaaaggaccatgcctcgaaggggcaggcgccggaggactgggtggctccccaagtcttcggggggccgagggtggacaaggcgtcggagcggaacctccgagcccggggcattctgcctgcgggcatgttcgtcgttccagcggagggcgcccggctggaccagtacggcaacatgagccgcggccagatgatccagatcctctccggcctgggcgccctggaataccgagcggggttcaaaggaaacgccactcagtcggcgcgctccctggcgaagggacaccaactggcgtacttcgtgatgcgccgtggccgccggccgattggcatcgccgaacgccgtggacggacgttgaccatggtcctcgccttcgtccgccagcctcagtaccgcgtgcgcttccagtttcacgaagtcgttcggcgtattgccgaggacgacgcgcgcatcgaggcgaacatcgagcggaccctggcgaaagcgttgcgctga

SEQ ID NO: 322319 - DNA, 591 bp, Pseudomonas aeruginosa
atggagttcatgaccaaggcagcgttcgcggaccgccaaggctggtcgcgcgcctacgtgtcgaagctggtccggcaaggacgcctcgtcctcactgccgacggaaaggtcgacgtccaggcgagcgacgaactgctggccgccagcgcagacccgagcaaggctgccgtggccgagcggcaccggcaggagcgggtggagaagggcgtgtacgcccacataggcgcaggtgcagccccgagcccggccttaccggcacctgggcagaccgcaccgctgcccgactaccagaaagcccgcgcacggcgagagtacgccctggctctgctggcagaagacgaacaccgcaagagccgtggcgagacggtcgagcgcgcgcgtgtcgactccgccgccttcaccgctgcgcgcgctctgcgcgatctgctgatgggcgtgccgccgaagatcgccggcgacctggtgacgctgaccgacccctgggagatcgaacgccgcctgacccaggcgctgcgccgtgccttggaagatgccgaccgcctcctgcagctcgatgccgagatcgaacaagggggcaaggagccgaactga

SEQ ID NO: 322320 - DNA, 2016 bp, Pseudomonas aeruginosa
atggaacaaccgtatgccgacggtgccgccgtgtacctggcggcataccgtcgaggactgaagcccgaccccgaactgtggatcgatgagtgggcggacgagttccagatgatcccggcggatacgggggcggccgagccgggcaagtaccacaccgaccggaccccctatgcgcgcgagccgatgcgttgcctgtcgccgctgttcccagccaagcgcgtggtgaccatgatcgcctcgcagctgatgaagacccaggtcgccttgaactggatcggcggctgtatccacatggcaccggccaacatcctggtgctgctgcccaccgagaagctgagcaagcgggtatcaggacggatcgacaagacgatcaaggccgtgccggtgctgaccgcgcgcgttgccaaggcccgctcgcgcgactcgcgaaacacgctcgacaccaaggagttcgagggtggcgcgctgtactgcgcgtcagccggctcggcctccaacctggccgagttgtccgctcggtacgtgtacggcgacgaaatcgatcgctgggaaatggacgtcgacgacgacggcgacccggtcaagcaggccgaggcgcgcggttcgacgttcggccgccgcgcgaagttctactactccagctcgcccacgctgaaaggcgtttcgcggatcgccgacctcttcacccagggcgaccagcggcactactacgtcccgtgtccgcattgcggaacgatgcaggtgctggagtgggagggcctgaagtacgaccccgattaccgccttgtgcagtacatgtgctgcaacgaggagtgcggcgccctgatcgaggagcaccacaaggcggccatgctgtccgctggcgagtggcgagcccatgccgtcggtgacggcgagaccgtcagtttcacgctgagcgcgctgtatgcgcctcccggctggttgacctggacggacctggcgaaggagtacgacgaggccaagcgtctacaggagaagggcgatcccgggtccatgcaggtgttctacaacacccgcttggcccggctgtgggacagcgccgaggaaatgaccaaggcggacgagctgcgcaagcgagccgaggccgaggggcatcggctgggtctggtacccgccggagcgctgctgctgaccgcggcggtcgatacccagcacaaccgcttggaaatgctggtgatgggctggggcgagggcctggagcgctggacggtcgatttccaggtgatccccggcgacccgaccgacgagcgtacctgggcgctgctcgacgagcgcctgaaggctcgatatcggcacgtcagcggtgtggacctggccatctgcgcggtctgcatcgactcgggcggtcaccatacccatgaggtctaccagttcacccgcctgcgccgctggcgaaacgtgctggcggtgaagggtgcgagcaagcgcggccgcccagtgctggcccagcggccgtccaaggtcgacgtcacctggcagggcaacaccgagaagagtggcgccgaactatggatggtcggtaccgacacggcgaaggactgggtctacaaccgctaccacctcaaggatggccccggggcgttgcacttctccgcagacctgccgcctgacttcttcgaccagtgcgtggccgagcgcaaggtggtccgctacgtgaaggggttcaagcgcaccgactgggtcaaggccaagtcggagcgaaacgaggccctcgacctcatcgtgtacaacctggccgcggcccacttcctcggcctgcatcgctatcacgctccgcagtggagcagcctgcgcgcagcggtaggtcaaggcagcctgttcgccgacccagtcgccacggtgcccagcgcagccgacgaggcggacgagcatgagccgcagaacgaggcgccaagcgccccagtgcggccggcacctcccacgcggagcgcgaacccaccatcccaaccaactggccggcgtacctcgcgcagcgggtatctgagccgccgatag

SEQ ID NO: 322321 - DNA, 225 bp, Pseudomonas aeruginosa
atgagcacagcgcagcagcgcctggacgaggtccgggtggcgattcaggacatcctgaaaaaagggcagtcggtgcgcaagggagaccgccaggtcgaccgcgcgcaactggcgagtctgcgcgttctggagcagcagtacgccgaagccgcagccctggaggcggctacgaacaaccgacgctcgcgccaggttcgcctctacagcggaggcaaggggatctga

SEQ ID NO: 322322 - DNA, 1467 bp, Pseudomonas aeruginosa
atggctacccgataccgaatcacgtcgaagcgcattcgcaacagctacgagggcgctggcaccggacgccgcgccgctggatgggacgcgcccgaggcggcgctgaatgcggtagccattccggcattgccgaccctgcgcaagcgctcgcgagcggcggtgaggaatgacccctacgccgcgagcgcgatcagcaagcgcgtcagcaacctgatcggcaccggcattacgccgcgcgcacgtctggacgacgcggcgttgcgcgaggcgttgaacctgctgtgggaggactgggtagacgagtcggacgcggatgaccgtaccgatttctacggcctgcagatgatcatcgcgcggatggtcgaggaagcgggcgagtgcttcgtgaggcgccgcaaccgacggccggaggacggcctggcggtacctctgcaactgcaggtgctcccgcctgacttcgtcccggtggatcgcaatttcaagacccgcagtggcaacgtggtgcgcgcgggaatcgagttcgacgccatcggccgccgggttgcctactggatgtggcagagccatcccggcgatccggcggcgccccggcgcggctacaaccagctcaaccgcatcccggcggaccaggtgctgcatatcttcgaaccgctggagggtggccagctgcgcggtgtgccgcgcttgtcaccggttctcctgcggctgaagtcgctggacaactacgacgacgcggtgctgttcaggcaggaggtttccaacctgttcgccggcttcatcaccaggcctcgacaggacggggcgccgatcttcgatccgtcgaccgggctggaacttgcgcaggatcgcgacgggacaccgatggtcggcctggagccggggaccatgcaggaactgctggaaggggaggaggtggttttctccgacccgccggacgccggtaacacctacgtcgacttcatgcgacagcaactgatggcagcggcggtcggtgtcgacctgccgtatgagctgctcaccggcgacatgggcgatatcagcgaccgcaccttgcgggtgctgctcaacgagtttcggcgccggatcgaacaggttcaattcagcgtgtacgtctaccagctctgccgcccggtgcgcgcgtggtggctggataccgcgtacctcagcggagcagtcgacctgccggactatccggcgcggcgacgtgagttcctgcgcacgcgttggatcccgcagggctgggcctacatccatccggtgcaggacgtccagggcaagctgctggagatcggcggaggcctcgccagccggagcgagcatgcgctacgcaccggatacgacgccgaggtgatcgaccgggagaacgcccaggacaacgcccgggctgaaagcctgaacttgcactacaccaccgacaccgggcaaccggtgagagaccaaggggactcccatgaagaaacgcaatga

SEQ ID NO: 322323 - DNA, 1173 bp, Pseudomonas aeruginosa
atgaagaaacgcaatgaacagcccctggcgctggccgccctgtgggcgctgctgggcgttggcacgctcgccgatccgcgcatccagaacaaggcgcagggcgcgccggatctgcaggccgagcactggtacagcgtcaaggcgctgagcgctgagggtaccggctcggtcgcctccatcgagatctatatctacggcgaaatcggcttttggggcatcacctccgcggatttcatccgcgacctgaaagcagtcgacgacggcacctctccggtactggttcacttcgacaccatcggcggcgacctcttcgacggcatcgccatccacaacgcgctccgggccctgggcgaacgctgcaccgcccggatcgacggggcctgcttcagcgcgggcagtgtcgcggcctgcggcgcgcaccgggtcgaaatggccgacaacgcgctgttcatgatccacaacccctggaccttcgcggcaggcgacagcgaagacctgcgcaaggtcgccgacatgatggaccaggcgttcgagggcatcgtggcgagctaccagcatcggccgctgaatgtcgacgacgccgaactgcgccggatgatcgacgacgaaacctggctcaccgcgcccgaggcgaaggacaaggggttcgtggacgaggtgctcggcgcggccgagccgatcggcgtgaacgcacgcctgggcaaggtgctgaatcgctatcgcaacacgcccgacgcggcgcgccggctgctggccagtcgggagccggtgggcgaccccgcactgacgtcggccgaactggctgcggagctgacggcggactgcgcccaggccggtctggccgactgcgcggcgtacctgatcaaggcctcgggcctgaaagatcgcgaaacggtgcgcgcggccttggacagggcgaaggccgtccggtcggtgtgcctcgtcgcgaaaatgcccgatgaggccaaggcgctcatcgaggagggcctggatgccgacggcgcccgtctgcggctgtacgacaagatcgtagcgcgcagcacccaggtggagatcgacaaccgcgtgccgacggacgatcagccgcagaacacggcttaccaacccccggcgccgagcgacgtgtacgcgaagcgccggctcaatgcctcgaaaggaggaaagcaagcatga

SEQ ID NO: 322324 - DNA, 636 bp, Pseudomonas aeruginosa
atgaccatcaagaccgaaggcgttcacgccggagagttcctcctgtcggaggccaacggctcgcgcagccgcgaaaacatcgtcatcaccgccggctccggccggctggtggcgggtaccttgatcgcccccatcaccgccgccaatgcgctgaccgcgaccgcggcggcagggaacaccggcgacggcactgtcggtgcctccgtggtgaccagcgccgccatcagcggaacctacgtgctggaaatcaccgaggccggagccaatggcggcaagttcgaggtggtcgacccgcagggacgccaggtgggcactggtcaagtcggccaggcgttcaccggcggcggagtcggcttcaccctttccgacggggccaccgacttcgtagtgggtgatcgcttcaacctgcaggtgctggcagggctcggcgagtggacgccctacgacgacgacggtgccgatgacggccgtcgcgcggctggcggcattctgttcggtccagtggacgccacggatgccgacgtcaaggcggtggccgtggtccgtgatgccgaagtgatcgccagcctgctgaccggcctggatgccgccggtgaggccgacctcaaggcgctgggcctcatccttcgcacctga

SEQ ID NO: 322325 - DNA, 999 bp, Pseudomonas aeruginosa
atggctgaaatcagcattttcgaagatgaggcgttctcggtggaggcgctgctggcggtgatcaacaccgatcacccggtgccggggcaactcgccgcgctgggcctgttcgaggagcagggcgtgtcctcgctggtggtacagatcgaaaaggacggcaccacgctgcaactggtggaggcgaaagcccgcggcggcgttggccaggtcgtgaccggtgacaagcgtcaactggtccccttcaacaccgttcacctgccgcagacgttccagatcctcgccgatgaaatccagggcatccgtgcggtgggtagccggaccgagctgcagtccgccgaggcggtcgtggccaagcgcctggaaaaagcgcgccgccagttggacctgacccacgagtatcagcgcatcggcgccatcaagggcaagattctcgatgccgacggttcgacggtactgctggatatctaccaggccttcggactgaggaagcccaagccgcgatcgctcgagctgggtaaccccgagggtgatctgagcggcattctggccgacctgctggacgagcaggacgacgcgctgggcaacgtccccagcaccggatcgcgagcgttctgtggcaagaacttctgggccaagctcatcgatcaccccaaagtgcgcggcacttacctgaacaccctgcaggcggcgcaactgcggggtgaccgtcgccagtcgttcgagttcggtggcgtggtctgggagcgctatcgcggcaagcatgacggggagccgttcgtggacgatggcagtgcccaactggtcccggagggggttccggacctgttcatcagcgcctttgcgccggcggactacatggaggtcgtcaacaccgaaggcctgccgtactacgccaagcttgagcgtctgcccttcgacaaaggcgtggctggggaagcgcaatcgaacccgctgcacctgtgcacccgcccgttggcggtgcgcgaactgaccctctga

SEQ ID NO: 322326 - DNA, 282 bp, Pseudomonas aeruginosa
atggacgagatcatcgccgacgtcctcggcgatggtgagtttggctacctggaccgctctggccggcaggtcggcaatgctgcggtgatcgttgaggaaggtgtggaacgcatggaggccggcgccctggatcggtaccgcaccattgcgtgccgcaaggccgtgttgcagccccttgatcgaaagggggcgttcctcgattccgatggccaggtctggcgcatcgacggcatccatgccgacgacggcgactggatcactttctacgtggtgcccgaatga

SEQ ID NO: 322327 - DNA, 438 bp, Pseudomonas aeruginosa
atgagcgatgtgatcgatgtacagaccgcggtcatcggccagttgctggacctgctcgccgcggttccggtgttcggcgataccgtccgtgaggactgggtggccggggtgctcgacgccgaggacagcgacgagcccgaacggctgatcatcctgcaggaaggggacaccgtggaacgagaccggtcgccgggcagtgtcgtggaggagtggaccgtgaacatcgtcccgatggcgcgcggcagggacgccgcccaggcgttgcgcgaggcgcgcctggcgatcaagcgggtgctcaagggccacaaggccgggctgacggtgcccggcctggtgcgtgtcgattttccggcatccgctgtgcgcctgcccgagcccggccggcgctgggcctatcgagccatccctctgcaggtcagctactcgcagcagttgtaa

SEQ ID NO: 322328 - DNA, 201 bp, Pseudomonas aeruginosa
atgcccgagatcatcgttaccaggccgttcaactaccgcgaggggctcgacgcgacccactacccggcgtcgaagggcgccatcagcgttaccgccgccgtagctgcccatgccctgggcaagggctacgccaccgaggccaaggccaaggcgccgattccggcagctaccgccgagccgaccggcggcgaccagaagtaa

SEQ ID NO: 322329 - DNA, 753 bp, Pseudomonas aeruginosa
atgctccagaccatcgaccgctcgttcatcggcgagggcatcatccatgcccgcctgtacggatcgcaggaaccgttcctgccgctcggcaactgcgacaccttcaacatcagcttcgccaccgaccgcaagacgctgcccaactacatgggaggtggcggcaacagcaacgtccgcgagcgcgtcaccgacgtgacgtcctccatcggaatgttcgacctgaccgccgagaatgtcgccctggtgacgcgctccaccatccaggtggcgcctaccgccgcgatcaccgacgaggcgcatacctctcagggggttgcgctggagttgatcccgttcaagtacctgccggacctgaccaagcccgtgacggtgaagaccgcgggggacgtcgaggtggccccgggcacggactacctgctggtaccccacggcattcaggtgctgagcggcggcaagatcgatgcaaccggcatcaaggtcagctacacgccgcgcccgagccgggcggtgcatatgctcaacggctcgcagaaggagctggagctgttcatcgctggcctgaacgacgcgcagtcgggcgagccgttcgcgctgcgccctcgccgcgtcaagttcggcctcctgcaggagctggcggtgctgggccaggaatacgccaagctcaccggcccggcggaactgctcgcagattcgcgcgtgaccgcgaccgacatttccaagttctgccagatggatctcgcgcaggcggcctga

SEQ ID NO: 322330 - DNA, 3273 bp, Pseudomonas aeruginosa
atggcgaacccaatgcagcgcctgatccagttcgttcttcgcggccgggacgaactgtcgcccgccgcccagcagtcgaccgaggcgctggaagggctgcgcaccacagcggcgaacctgaaccggcagttggacgatgcgaagggggcccgcggcctggtgaccgcgctcggaactaccgagcgcgccattgcgcagacgcagacgtcggtgcagcgggtggaccgtaccattgcggacctgcgcgaggcgttggaccgcaaccccgggagccggggcctggccgtgtccctgcagatcgcggaacgggacgcagcgggtctgcgtcggacccttgaccaactgaccgctcggcacgctgagcagcaacgtgcggcgcaggcggcgggcgtggataccgggcagcttgccaacgaggagcggcggctggcgtcggtggtcgacaacacccgcgagagcatcgcgcagaacagccgtgagatccgcgagctggaacgcgcgcagatgcgagcggcgcgggaggctgctggccacacctcgcgcgtgacggcgctgcgcgaggccatgtcgtccggcgttcgccaggcagccgcttacgccgcagccttcgtcggcatccaggcggcgctgaacctggtgcgcagaggaatcggcctggtgcgtgatggcatcgtctcgatgctgaccaccggcgaccagttcgagaacctgcagaaccggcttacgtcgctgatgggctcggttgccgagggggagcgggcaaccgcctggatcaagacctttgccaaggacacgccgcttcagttgagcgacgtcaccgacgccttcgcgctgctgaaggcctacggcctggacccgatggacgggtcgctgaaagcgatcgaggaccagtcggagaagctgggtggcggcatggagcgcctggagggcatcacgactgcagtcggccaggcctgggcgaagcagaagctgcagaccgaggagatcctgcaactggtcgagcgtggcgtgccggtgtgggacatgctggccaaggtcaccggcaagaatgccgcgcagctgcaggatctggcgagcaagggcaagcttggccgggacgtcatcaaggcgctggtcgacgaaatggggcgcagctccgaaggggccgctgcgaaggccatgagcaccctgaccggtctggtcagcaacctcggcgacactgcggccgactttctcaaccgcattgccaacgccggcgcgctggaccacgtcaagaacaagctgaaggaactgggtgacaccatcgcgcagatggaccaggacgggcgcctcgactcgctggccaaggggctgtcggatgccttcgtccagggctcggaatgggtcgagcgcttcatcaagcgcctggccgacgtcgatttcggcaccctgatcgacaagacctcggcctggcttagcagcttcagcacccagttggacgacatggcctcgcgggtgcaactgttcatcgcgccgttccggacgttgttcaacggcgtcacctcgggcatcagcgctatcgccctggcctggaccggcaccatgtcgctgatggtcgccggcatcgagaaggtggcggagaggatcccggcggcgctgggtggggagcgcatccgcagttccgtcgccggcgtccacgacttgctcagcagcatgagcgagggcttccgccagcagatccagcaggacgcgcaggatatcgcggatgcctgggacaccagcaccacggctaccgcctccgccgcacagcagcagagccaggcgattaccgacaccttcaccgacctgaaggcgggtgcgaagaacgcggcggccgagtcggtgcaggcggtgaccagcctgcagaatgccctggaccagatcagcgcggccaagaccaccgagcaactgaccgccctgcagggggaaatgctcaaggcctaccaggccggcacgctgagccagcaggagtatgcgaacggcgccggtgtcctcaacgcgaagctgaccgaactgaagtcgaccgccagcggcgccgccctgggggtgtctgacctcagtaccggcctggagaacctgaagcaggtccaggacgcgatcagcagcgcgaagaccacggtcgatatccagaacatccggacggcgctgggccggttgtacaacgacggcacgatcagtgcgcgggagttcaaccaggaacagaccaagctgtccgccaaggtcaaggaactgaaggcggccggcgaggagggcgccaagggtatgcaggcggtcgcggagtcctcggacaaggcggccaaatcgctctcggaccagcgcaaggccatcggcgaatcgatggaggcaacccgcaagggagtagcgtcgacgaaggacgacatgggcgccttcgaagggttcttcggtggggtgttgagcaccgcgcggcagggcgttgcgcagttgagccaggaagcgctgaacgccttcgatgcgatgcgtgggatctccaccgtcgatctcagcatcgacaccagcagcctggacgccacttcgcgctccctggccaaggtcagtgagcaactggcccggatcaaggccgagtcgggcgtgggcatgagcggtttcggccgctgggcgatggatacccagcgagccagcctggagatccaggcggcgtacctggagcagaagcgcagcctgcagagcctgatggacgactacgagcgcgggaccatgaagctgggcgacttcgtgtcggcggccaagggtgctcgaaacggtctcagcctgctgaacgattcggacatgcggcaactggagagtgcaatcgaggcggccaatcagaagatccagcagctcaaggaaggctcgaagtcgacgctggtcagcctgcgcgaggaactggcggggctgcgcggcgagcaggaggccgtggatcgcagccggttcaacagccgcaaggccgagttgcagcagcaactggccgaggcccagggcagcggcgacatgaacgcggtgcagaacctgatgacggcgctggccaccctgcagcagatccaggccgagacggatgccaagcggcagagagaggagcagcagaagcgggtggacgagcagaacgccgccaaggccgcggcggcggcgcctgcctcgccgccggcttcgagtcctccgccccgggtcgttcgtttcgagacggcgcggggagccgttgacgtggcggtggccagcgaacaggacgaaaccaacctgctcggcgtgctcgagcaggccagcatgaggaccggccgatga

SEQ ID NO: 322331 - DNA, 1143 bp, Pseudomonas aeruginosa
atgagcggcaaacgcatcctcgacatcgaactgttgcgcgggctggccgtgctcggcgtggtattccaccatctgcacggcaacctgttcagcggctccccggcactgctggacggcatcaaccagcgcgtccagttctggtggggcgtggacctgttcttcgccatctccggcttcgtcatcgcccgcaccctcatcccgcaactgcgcgaggcgcccacacgccaggcattctgggaacaggcgcggtacttctggatccgccgcgccttccgcctgctgccctcggcctggctgtggctggcgctgatcctggcctgttgcctgctgctgaaccgctccggagccttcggcagcctgtcggccaacctcgcggcgagcctcgccggtttcctccaggtcgccaacttccgcttcgccgacagtttctaccgctacgaatacggtgccagcttcgtctactggagcctttccctggaggaacagttctacctcctgctgccgctgctgatcctctgcctgcgtcgctacctgggctgggccctcctggcgctggtgctggtccagttcttcagcctgcgcacgccgctgctgatggtattgcgcaccgacgccctggccatcggcgtactgctcgccctcgcctccctgcagcctggctatgcccgctggaaccccaccctgctgggccgcgcctggagcgggccgttgctgctggtcgtcgtggccgcggccctgggcgtgctggccagcgaagcgtacagcctggtcgccgtgcggatcggcgccatcgcgctattgtgcggactgctggtgtggatagcctcctacgaccgcgactacctgctctccaacgggccgctgaagcgcttgctggtctgggtcggcgcgcgctcctatgcgatctacctgatccacatcccggcgttctatctcagtcgcgaactctgcttccgcctgggctgggacgccggcgagcggcccctgtcgctgctcgccatcagcctggtcctgatcgtcgtactcagcgagctcaactaccgcttcgtcgagagcccctgccgcgacctgggctcccgcctggtcaagcgcctgagcgccgcccgccgcgtcgccaccacttccggagccacctcatgctga

SEQ ID NO: 322332 - DNA, 864 bp, Pseudomonas aeruginosa
atgatccgcgccctgctccaacgctggcgttcccgtcccgctgcggcgagcgaaccggtgtcgccacgcatgtgcggtctgcgcgatgcggtgctggatggctggttccgcagcgaaaccggcgaactgctcgccggcttcgccatcggcgcccaggacaccctgctcgatctcggctgcggcgaaggcgtcgccaccctcttcgccgcccgccagggcgcttcggtgatcttcaccgacagcgaggaggacaaggtgcgaagcctggcgcagcaggtcgaggcggtggcccggcggcccttcaccggcctggtcagcgacagcgacccgctgccgctgcgcgacgcctgcgccgacaagctggtgtgcatggaagtgctcgaacacgtggccaacccagcgcgggtgatggacgaactcgtgcgtctcgggcgccctggcgcgcagtacctgctgagcgtgccggacccggtcggcgaacacctgcagcagggcatcgccccggccgactacttccgggcgcccaaccacatccacatcttttcccgtgacgacttcgcgcgcctggtgcaggacgccgggctggtcatcgagcaccgccaggccagcggcttcttctgggtgatgggcatgatcttcttctgggccagcgaacgggccgccggccgtgagctcggcggcgccgtccgcgaccgtatccagccgccctacccggcgctgatggaagactgggcacggctctgggaaaacctcctggcccgtcccgacggcctggagatcaagcacctgctcgaccgcttcatgcccaagagccaggtgatcatcgcgcgcaagccgctcgaccccggatcgtcgcggacatga

SEQ ID NO: 322333 - DNA, 1302 bp, Pseudomonas aeruginosa
atgctgatcatcatccactccgagaccaacaagaccaccatccggcagaacctcgggcgcccggagtacagctattacttcgtcctcaaggaattccgtccgctgctggaagagatcggccaggtggtcgaagtcagcgatcccgacgaactggtggaccgcctctaccacgactgccgcaagcgcggcgaaccctgcgtcttcctctccttctcgccgccccatcgcacgccgatccaccatgcctgcccgaccatcccggtgttcgcctgggagttcagcaccctccccagcgaaacctggcacggcgaaccgcgccacgactggcgacatgtgctgcgccacagcggacgggccatcacccactccagcttcacggtcgacgtggtgcgcgccgccatgggtcgcgactacccggtactgagcgtgccggcgccggtctgggatcgcttcgccaaccgcgcctcgcagcaggcaggccgtcccgaagcccgggatgtgcgcctgcgcctggacggcctgctggtggacagccgccagctggacctggccgtccatgccgaccccgagccgtcggcggaggtcctggccctgccggaccgcgcggcgaaacaggtcgagctgagcctcgacggggtcatctacacctcggtgttcaacccctacgacgggcgcaagaactggcaggacatgatcagcgcattctgcgccaccttccgcgacgagcccgacgccaccctggtgctgaaactgacccaccacaacgtcggcgaagcgctggccgacatgcttcaccacctgtacaagaaccagtcctaccgctgccgcatcgtgctgatccacggctacctcgccgacccggactacgagcggctggtcgaggccaccagctacgtggtgaacacctcctacggcgaaggccaatgcctgccgctgatggaattcatgtccagcggcaagccggccgtggctccgcgcaataccgcgatgatcgactacatcgacgccgacaacgccttcatcgtcgactcctcggaagaagccaccgcctggccccacgacccgcgcgcggcctaccgcacgctgcgctacatcaccgactgggagtcgctgtgccgggcctaccgggccagtttcgaggtcgctcgccaggagccggagcgctacgcacgcatgtccgcgcatgccagcgccagcctcgaacgcttctgcagccgcaagctggccgtggagcgcctgcgtcgcttcctcgacgaagcggcacaaggcgaccccgccgccttgcaaagcatcccggcatga

SEQ ID NO: 322334 - DNA, 915 bp, Pseudomonas aeruginosa
ttgactcagcgtctgttcgtcaccgggctctccggtttcgtaggcaagcatcttcaagcttatctggcagcggcccacacgccgtgggcgctccttcccgtaccgcatcgttacgacctgctggagccggattcgctgggcgacctctggccggagctgccggatgcggtcatccacctggccgggcagacctacgtgccggaggccttccgcgatcctgcgcggaccctgcagatcaacctccttggcaccctgaacctgctccaggcgcttaaggcgcggggtttctccggtaccttcctgtacatcagctccggcgacgtctacggccaggtggccgaggcggcgttgccgatccacgaggaactcatcccccacccgcgcaatccctatgcggtcagcaagctggcggccgagtcgctgtgcctgcagtggggtatcaccgaaggctggcgggtgctggtggcgcgaccgttcaaccatatcgggccggggcagaaggacagcttcgtgatcgccagcgccgcgcggcagatcgcccggatgaagcagggcttgcaggccaatcggctggaagtggggggcatcgacgtcagccgtgatttcctcgatgtccaggacgtgctgtcagcctatctgcgcctgctctcccacggcgaggcgggcgccgtctataacgtctgttccgggcaggagcagaagattcgcgagctgatcgaactgctggcggacatcgcccaggtcgagctggaaatcgttcaggaccctgccaggatgcgccgggcggaacagcggcgggttcgcggcagccatgcgcgactgcacgacaccacgggctggaagcctgaaataaccataaaacagtccctgcgggcgatcctgtccgactgggagtcacgggtacgagaagaatga

SEQ ID NO: 322335 - DNA, 972 bp, Pseudomonas aeruginosa
atgacaagaagtgcactggtaactgggatcaccggtcaggacggagcgtacctggccaagctgctgctggagaagggctaccgggtccacggcctggtggcgcggcgcagcagcgacacgcgctggcgcctgcgcgaactggggatcgaaggcgatatccagtacgaggacggcgacatggccgatgcctgttcggtgcagcgcgcggtgatcaaggcgcagccgcaggaggtctacaacctggcggcacagagcttcgtcggggcttcctggaaccagccggtgaccaccggcgtcgtcgacggcctgggcgtgacccacctgctcgaggcgatccgccagttcagcccggaaacgcgcttctaccaggcctccaccagcgagatgttcggcctgatccaggccgagcgccaggacgagaacacgccgttctacccgcgcagcccctacggcgtggccaagctctatggccactggatcaccgtcaactatcgcgagagcttcggcctgcacgcctccagcggcatcctgttcaaccacgaatcgccgctgcgcggcatcgagttcgtcacgcgcaaggttaccgacgcggtggcccgcatcaagctcggcaagcagcaggaattgcgcctgggcaacgtcgacgccaagcgcgactggggctttgccggggactacgtcgaagccatgtggctgatgttgcagcaggacaaggccgacgactacgtggtggccaccggtgtcactaccaccgtgcgcgacatgtgccagatcgctttcgagcatgtgggcctggactaccgcgacttcctcaagatcgacccggcgttcttccggcccgccgaggtcgacgtgctgctgggtaatccggccaaggcccagcgtgtgctcggctggaagcccaggaccagcctggacgagctgatccggatgatggtcgaggcggacctgcgacgcgtttcccgggagtaa

SEQ ID NO: 322336 - DNA, 1440 bp, Pseudomonas aeruginosa
atgctgattcccgtggtgctttccggcggcgccggtacccgcctttggccggtgtcgcgtgaaggacagccgaagccgttcatgcgcctgcccgatggccagaccctgctgggcaagacctaccgacgtgccgccgggctcctggccgggcatggcgaaatcgtcacggtgaccaaccgcgagcattacttccagagcaaggaccagttccaggcggcccgcctggggcggcatcggggacatttcatcctcgaaccgaccggacgcaacaccgctccggcgattgccgtcgccgccctggcgctgcaagccgaacatggcgacgcggcggtactggtggtgatgccggcggatcacctgatccgcaacgaggaggccttccgccaggcggtggggcatgccgcgcgtctcgccgtcgccgggcacctggttaccttcggcgtggtgccggacgcagcggaaaccggtttcggctatatcgagctgggcgaccggctggacgagcagggggcggccaaggtgcgccgcttcgtcgagaaacccgatgaggaaaccgcccgtcgctacgtggaaagtggcggtttcctgtggaactccgggatgttctgtttcacggcctcgaccctggtcgacgagctggcgcagcatgccccggccctgctggagcaggccagggcctgcctggccgccagtgcggcggtgaagatggccgatggcatccagcatgagctggcgggcgaagccttcgccgcgctgccggacatttccatcgactatgcgctgatggagcgctccgcgcgggtcgccgtggtgccggcggccttcgactggagcgatatcggttcctggggcgcgatgagcgcgctgctcgacgcggacgcagagggcaatcgcggcagcggcgacaccctgttcgtcgacacccgtaacaccttcgtgcagagcgacgggcgcctggtcgccacggtcggggtcgacgacctggtcgtggtggatacttccgatgcgctgctgatcgcccgcgccgaccgggtccaggaggtgcgcagggtggtgcagcggctgaaggacgagcggcacgaggcctatcggctgcatcggaccgtcaaccgtccctggggcagctataccgtcctcgaggaggggccgcgcttcaagatcaagcgaatcgtggtcaggccgggagagcgcttgtcgctgcagatgcaccatcaccgcagcgagcactggatcgtggtgcaaggcatggccagggtcaccaatggcgatggcgcgcggctggtcaacagcaacgagtcgacctacattcccgcgggccaccggcatcgcctggaaaacccgggggtcatcgacctggtgatgatcgaggtgcagagcggcgaatacctgggagaggacgacatcgtccgcttcgaggaccagtacggcagggtggtctga

SEQ ID NO: 322337 - DNA, 798 bp, Pseudomonas aeruginosa
atgcttcttggcttgtctcgttccttgtggggctatcgtggcttcgttctcggcagcgtcaagcgcgagttccagtcgcgctaccgcgggtcgctgttcggcgcgttgtggacggtgctcaatccgctgtcgatgatcgtcgtctacacggtgatcttctcccaggtgatgcgcgcgcgcctgccgggggtcgacgacggcctggcctacagcgtctatctctgcgccggcctgctgacctggggcctgttcgcggaaatcacctcgcgcagccagagcatgttcatcgagaacgccaacctgctgaagaagatcagcttcccgcgcatctgcctgccggtcatcgtactgctcaacgccggggtcaatttcgccatcatcctcgccttgttcctcggctttctcgccctcagcgggcgcctgccgggcgcggcattgctcgcgctggtgccgctgctggcgatccaggtgctgttcgcggcgggactggggatgatcctcggggtgctcaacgtgttcttccgcgacgtcggccagttgttcggcatctgcctgcagttctggttctggctgacgccgatcgtctatccgatcggcatcctgcccgagggtatccgctcgctgatcgaactcaacccgatgaccgcgctgatgcgcagctaccagcagctgttcctccacgggcaatggccggactggccttcattgctgccgatcaccctgctggcgctgctgctgtgcgcgctcggcctgcgtctgttccgccagcgggtcggcgaaatggtggatgaactctga

SEQ ID NO: 322338 - DNA, 1266 bp, Pseudomonas aeruginosa
atgggacagatacgcgtatccggcctcggcaaggcctacaagcagtatcccaatcgctggagccggttgttcgaatggctggtgcctttcagccctccgcgccaccacctgcactggatcctgcgcgaggtcgagttcaccatcgagccgggcgaagcggtcggcatcgtcggggtcaacggcgccggcaagagcaccctgctgaagatgatcgccggcaccacccagccgacctgcggcgagatccgcgtggccggccgggtcgccgcgctgctcgagctgggcatgggcttccacccggacttcaccggccggcagaacgtcttcatggccgggcaactgctgggcatgcaggtcgaggaaatccaggcgctgatgccggatatcgaggccttcgccgaaatcggcgaggccatcgagcaaccggtgcgcacctactccagcggcatgcagatgcgcctggcgttcagcgtggcgactgcccggcggccggacatcctgatcgtcgacgaggccctgtcggtcggcgatgcctatttccagcacaagagcttcgagcgcatccgcagtttccgcaaggccggcaccaccctgctgatcgtttcccacgaccgctcggcgatccagtccatctgcgactccgcgatcctcctggagcagggacggatggccatgcgcgggcggccggaagaagtgatggactactacaacgccctgctcgccgagcgcgaggggcagaccgtgcgccaggaaatgctcgccgacggccaggtgcggacgatttccggcaccggcgaggcagcgatcctcgacgtacggatggtcgaccagcggcagcgcgcgctggaggtggtcgaggtaggccaggcggtgacgctggaagtcgaggtcgaggttcgccaggacatcgagcggctgatcctcggcttcatgatcaaggaccgcctcggccagccgatgtacgggatcaatacccaccgcctggacaaggcgctcaccgacctgaaggccggcgagcgcatcacctaccgcttcgccttcgacatgcgcctgggcaaggggcactactcggtggcgctgagcctgtcgcggctggactcgcacctggaccgcaacttcgaatggcgcgactacggcctggtcttccatgtcatcaacaaccgccaggaagacttcgtcggttgctcctggctgggcgccgaaacccatatcagccgctccggcgaggcggctctggaccccacttccgcggagagcactccatga

SEQ ID NO: 322339 - DNA, 1383 bp, Pseudomonas aeruginosa
atgacgcgtctgttggtcgaatgcacctatgtgttcgagcatcccaaggtcaattccggtattcagcgggtggtgcgcaacgtcatccgcgagttgccggaagccgacgagacggtggagtgcatcccggtggcaatgctcgacggcaccctgtatcaggtccacagcctggcgccgctggacccgcggccgcattcgccgctggtacgcctgcgcatcctggtggagcgagccgccaactacttctggctgggccagcgcaccctggaaaagcgccgcccgttccgttcctcgccgtgggcccggcgccttctctatgtagcctgccgcctgttcgcctttgccttcctcagcattccgctgcgcctgctcgaccgcatcctcggcaagcagcagcctgcacccgtgcgcgcgaccccgctcgaacatcgggccggcgaccaactggtcttgctggactcctcctggcacgccgatttcttcccgctggcggaacgcctcaagagcgagggcgtgggcatcgtctcggtgatctacgacctgattcccctgacccatccgcaattctgcgatgccggactggtcaaggtgttcaaccactggttcgactggatcgcggccaccgccgacggctacgtcgcgatttccgagaccatccgcgacgaagtgcgcgcggagatgctgcggcgcatcggcccggagaaggtcgcgcaacgctggttcgattatttccacctgggttcggagctggacctggtggaggacggcgcctccgtcgagcccgacctgctgcgcatgttcaaggccaaggcgccggtattcctgatggtcagcaccatcgagccgcggaagaaccacggttacctgctggatgccttcgagcgcgcctgggcccagggttcgcaggtgcggttgtgcatcgccggacgcatcggctggaagtgcgaggcgctggtggaacgggtgcggcagcatccggagctgaacaagcgcctgttcatgttcaacgacctctccgacaagagcctggagtacgcatactcccatgccgcatcgctggtcttcccgtcctatgtggaaggtttcggcctgccgctggtggaggccatgcagcgcggcctgccggcgatgggcagcgacatcccggtgttccgcgagatcggcggcgaattcatggcctacttcgacctcgccgatccgcagaccctggcgaacctggtcacccgcttcgaagccacgggcgagttcccggccgagcgaccggtcggcgaatggcgctggatcggctggcacgaagcgagtcggcaactgatcgcgcggatcctgctcgccctcggcaaggccccgacgcatggcgaggcagtacatgcggattgcggttaa

SEQ ID NO: 322340 - DNA, 1128 bp, Pseudomonas aeruginosa
atgcggattgcggttaacgcgcggattctccaggcgccgcggaccggcatcggacattacctggtcgagttgttgggcgcgttgcaggcgcatgcggacttcgagttttccctgttccatggctggggctggagcggcgacctgccggcggcggcgctgcccggctattcgcgtctgtcgccctggctgcgcaacctgcctggagcctaccgggcacgacgctggctggagcagcggcgtttcgatagcggtcggccgccggtcgatctctaccatgagcccagtctctggccgctggacttcgacgggccgatgctgatgaccctgcacgacctgacccacctgcattatccggcgacgcaacccgccgcccgcttgcgcgaaatagaacgccggctggcgcgcgggatggaaaaggcgcggttgatcctgaccgactcgcaggcgatcgccgacgaggcgcaggcgtatttcggcctgccgcgcgagcgcttcgtggtggcgcccctcggccatgccgcgcggttccgtccgcgggaccgggagtccctgcgcgagcccttgcgcgcgcatggcctggtgccgcgcgggtatttcctctgcgtaggaaccctcgaaccgcgcaagaacctgtcgctggccctgcgcgcccatgggcaactgccggcggcggtccgccagcgttttccgctgatgatcgtcggcatgccgggatgggaaagtcgctcgctcgacgacgaactgcgccaggcgctggcttcgggaacggtgcggctgctcggctacctgccggacgagcgggtcgccgagttgatgtcgggcgctcgggcgctggtcttcccctcgatctacgaaggcttcggcctgcctgtgctggaagccatggccagcggcacgccagtattgctcacgcgactctccgcaatgccggaggtggccggcgaggcgggcagctatattgacccggatgatgccaatgggctatctgacatgctggtccgcatgaccgaggataccgtctactgggagtgctgccgggaagccggcctgcgacgggcggagcagttttcctggaagcgttgcgcgaatctcaccgctgcagcctatcgtcgtgccgtggagggctga

SEQ ID NO: 322341 - DNA, 1146 bp, Pseudomonas aeruginosa
atgcgggtactgcacttctacaagacctacctgagcgaaacggtaggcgggatcgaacaggtgatcttccagctttgcgagagcagcgggtcgtgggggatcgacaaccacgtcctgaccctgagcagcgacccgcatccgcctgtcgtgcccttcggcggacatgtggtgcatcgcgccaggctcgacctgcagctcgcttccaccgggttttccctgagcgtgttcaagcagttccgcgagctggcggcggaggcggacgtggtcaactaccacttcccctggccgttcatggacctggtgcatttcctcaccggtatgaacaagccgagcgtggtcacctaccattcggacatcatccgccagcgcgtcctgttgaaactgtaccggccgctgatggggcgcttccttcatagcgtcgatcggatcgcggtggcgtcgcccaactacttcagcaccagcgacgtgctccgccagtaccgggaaaagacccgggtgatcacctacggcctggacaaggcctgctacccgaagcctgcggcacagcgtctggagcactggcgagagaaactcgggccgcggttcttcctgttcgtcggggtgatgcgctactacaagggcctgcatatcctgctggatgcgttgcagggcaccgattacccggtggtgatcgtcggtgccgggccgttgcaggccgagctgtatgcccaggccgcggcgctggggttgcgcaacgtgcacttcctcggccgagtggacgacgaggacaaggtcgccctgctgcaactcagctacgccatggtctttccgtcacacttgcgttccgaggcgttcggtatctccctgctggagggcgcgatgtacggcaagccgatgatctccagcgagatcggcaccggcaccagctacatcaatatccatggcgagaccggcctggtcgtgccgcccagccagccggccgcgtttcgccaagcgatgcgctggctctgggagcatccgcagcaggcggaggaaatgggcaggaacgcggaggcccgctatcggcaactgttcaccgccgaagagatggggcgtcgctggagcgagctgtaccgtgaactgctggaggaaaaggcttcttccagatacgtgaaggccgctcggtaa

SEQ ID NO: 322342 - DNA, 204 bp, Pseudomonas aeruginosa
atggaacgtaccctcggttccaacactttcgacatcgctcgctccaaccgccgcagcagcagcctgctgggcaccatgaaactgtggcagcgccgcatccagagccgtcgccagctggcccgcctggactcccgcctgctcgccgacgccggcatcagcgaagcccagcgctacgccgagctgaacaagccgttctggcgctaa

SEQ ID NO: 322343 - DNA, 1494 bp, Pseudomonas aeruginosa
atgtaccgtgatcgcgtgcgcctgccctccctgctcgacaaggtgatgagtgcggccgaagccgccgacctgatccaggacggcatgaccgtcggcatgagcggtttcacccgcgccggcgaggccaaggccgtaccccaggcgctggccatgcgcgccaaggaacgtccgctgcgtatcagcctgatgaccggcgccagcctcggcaacgacctcgacaagcagctcaccgaggccggcgtgctcgcccggcgcatgccgttccaggtcgacagcaccctgcgcaaggcgatcaacgccggcgaagtgatgttcatcgaccagcacctctcggaaaccgtcgagcagttgcgcaaccaccaactgaagctgccggacatcgccgtcatcgaagccgccgcgatcaccgagcagggccacatcgtgccgaccacctcggtgggcaactcggcgagcttcgcgatcttcgccaagcaggtcatcgtcgagatcaacctggcccacagcaccaacctggaaggcctgcacgacatctatatcccgacctaccggccgacccgcacgccgatcccgctgacccgcgtcgacgaccgcatcggcagcacggcgatcccgatcccgccggagaagatcgtcgccatcgtcatcaacgaccagccggactcgccatccaccgtgctgccgccggacggcgagacccaggccatcgccaaccacctgatcgatttcttcaagcgcgaggtcgacgccgggcgcatgagcaacagcctcggcccgctgcaggccggtatcggcagcatcgccaacgcggtgatgtgcggcctgatcgagtcgccgttcgagaacctgaccatgtactccgaagtgctgcaggactcgaccttcgacctgatcgacgccggcaagctgcgcttcgcctcgggcagctcgatcaccctgtcgccgcggcgcaacgccgacgtgttcggtaacctggagcgctacaaggacaagctggtgctgcgcccgcaggaaatctccaaccaccccgaggtggtccgtcgcctgggcatcatcggcatcaatacggcgctggagttcgacatctacggcaacgtcaactcgacccacgtcggcggcaccaagatgatgaacggcatcggcggctccggcgacttcgcccgcaacgcgcacctggcgatcttcgtcaccaagtcgatcgccaagggcggcaacatttccagcgtggtgccgatggtcagccacgtcgaccacaccgagcacgacgtcgacatcctcgtcaccgagcagggcctcgccgacctgcgcggcctggcgcctcgcgaacgggcccgggtgatcatcgagaactgtgtccacccgtcctaccaggcaccgctgctggactacttcgaggcggcttgcgcgaaaggcggccacacgccgcatctgttgcgcgaggcgctggcctggcacctgaacctggaagaacgcggacacatgctggccggctga

SEQ ID NO: 322344 - DNA, 429 bp, Pseudomonas aeruginosa
atgctggcatcctgggccttctgggcactgctttcggcgctgttcgccgcgctgaccgcgatcttcgccaagatcggcctcgaccgggtcgattcggacttcgccaccttcatccgcaccctggtgatcctcgtcaccctcggcggcatcctcgcggtcctgggcaagttccaggccccgggaagcatcctgccgcgcagctggctgttcctggtgctctccgggctggccaccggtgcctcctggatctgctatttccgcgccctcaagctcggcccggcgtcgctagtggcgccgctggacaagttcagcgtggtgctggtggcactgctcggcgtggccttcctcggcgaacgcctggacctgcgccaatggctcggcgtagccctggtgacagcgggcgtggtggtcctggcaatccgcccataa

SEQ ID NO: 322345 - DNA, 2187 bp, Pseudomonas aeruginosa
atgaacgacgacctctccctcctgctgaactccctcaacgacccgcagcgccaggccgtggccgcgccgctgggccgccaactggtcctcgccggcgccggctcgggcaagacccgcgtgctggtgcaccggatcgcctggctgatccaggtcgagcacgcctcgccctacagcatcctgtcggtgaccttcaccaacaaggcggcggcggagatgcgccaccgcatcgagcagttgctcgggatcaatccggcgggcatgtgggtcggcaccttccacggcctcgcccatcgcctgctgcgcgcgcactggcgcgaggccgggctgagcgagaacttccagatcctcgacagcgacgaccagcaacgcctggtcaagcgggtgatccgcgaactcggcctcgacgagcagcgctggccggcgcgccaggcccagtggttcatcaacgggcagaaggacgagggcctgcggccgcaacacatccagcccggcggcgacctgttcctcgccaccatgctgaagatctacgaagcctacgaggcggcctgcgcccgcgccggggtgatcgacttctccgagctgctgctgcgcgccctggacctctggcgcgaccatcccggcgtgctcgagcactaccagcggcgcttccgccatatcctggtggacgagttccaggacaccaacgccgtgcagtacgcctggctacggattctcgccaagggcggcgacagcctgatggtggtcggcgacgacgaccagtcgatctacggctggcgtggcgcacggatcgagaacatccagcagttcagcgacgacttcgccgacgccgaggtgatccgcctggagcagaactaccgttccaccgcgtcgatcctcaaggccgccaacgccctgatcgccaacaaccagggacgcctgggcaaggagttgtggaccgacggcgaggacggcgagtcgctgagcctgtacgccgcgttcaacgagcacgacgaggcgcgctacgtggtcgaatcgatcgagagcgcgctcaagggcggcctggcgcgcagcgagatcgccatcctctaccgctccaacgcccagtcgcgggtgctggaggaagccctgctgcgggagaagattccctaccgcatctacggcggccagcgcttcttcgagcgtgccgagatcaagaacgccatggcctacctgcgcctgctcgacggccgcggcaacgacgcggcgctggaacgggtggtcaacgtgccggcacgcggcatcggcgagaagaccgtggagagcatccgcgaattcgcccgcggcaacgatgtgtcgatgtgggaggcgatccgcctgatgatcgccaacaaggtcctgcccggccgcgccgccagcgccctgaccggcttcgtcgagctgatcgagaatctttcggcgaaggtcatggacatgccgctgcacctgatgacccagacggtgatcgagcagtccggactgatcagctaccacaaggaagaaaaaggcgagaaaggccaggcccgggtggagaacctcgaggaactggtcagcgccgcccgcgccttcgagaacagcgaggaagaggaagacctcaccccgctgcaggccttcctcagccacgcatccctggaggccggggaaacccaggccgacgcccacgaggacagtgtccagctgatgaccctgcacagcgccaagggcctggagttcccgctggtgttcctggtcggcatggaggaagggctgttcccgcacaagatgagcctggaggaatccggccgcctggaagaggaacgccgcctggcctacgtcggcgtcacccgcgccatgcagcgactggtcctgacctacgcggagacccgccggctctacggtagcgagacctacaacaaggtttcgcgcttcatccgcgagatcccgccggcgctgatccaggaagtgcgcctgtccaataccgtcagccgcccctacggcggcacttcgcgcaacgccggcggcagcctgttcagcggcgccggggtgccggagacgcccttctccctcggccagcgggtgcgccacgcgctgttcggcgaagggactatcctcaacttcgaaggcgccggcgcccaggcccgggtgcaggtgaacttcgagagcgaaggcagcaagtggctgatgctcggctacgccaagctggaagccctgtag

SEQ ID NO: 322346 - DNA, 2856 bp, Pseudomonas aeruginosa
atgaccgtccatgtcgagcccttggcgctgccgggcggcagcaccgatgtactgcggctctacgcccgcgaaatcgccatcgagcgtacccggctcctttatctcggctcgcgcacgccgaccctgctcatgctgctcggcggcgtgaccagcgcctgcctggtgtggggcaaggtcagcagctggctgctcggtggctggctggtctggctggtgttgctcgccgtcctgcgcctgctgcaggtcgccgccttccagcaggccgacagccgtcgccaggccagccgccactggcggcggaccttcctgtgcggcgccggcgcctcgggcctgaccctggcgttcgcggtgatcatgctggtcccggccgatgccttcctccagcaggtgctggtgttcggcctggtggcggcggcgatcctctccgccagcgtcgcctatgcggtgagcctgccggccttcctcaccttcgccttgccgggcctgctgccatccatcgttttcctgctgttacagccgcatagcctgttgcagggctggggcgtgctcggcctgatcctgctggtggcgctgctggtggtcgccgggcagatccaccggctggtgcagggcgcgctgctgcgacgcttccagacccaggcgctgaacctgcacctggagcgtgtcaacgccgaggccgaagcgctcaatcgcaagctcgcccaggaggtcggccagcgacgcctggtcgaacgcgagctgcgcgccgcccgcgatgccttgcagcgccgggtggaggcgcgcaccgaggagcttggcgcgaccagccaggcgctcagccagagcgaggcgcgcctggccatggccctggaggccagcgaactggggttgtgggactgggacctggagagcggccgggtccagcattcctatctcgaggcggtcttcagcgacgccggggacggtcccgaggactatcgcaggctgatcgaaagcatccaccccggcgacctgccgcgcatccgtcgcgccctcgccgaacatctcaaggggcgcagcgagctataccgggtggagtaccgcgtgcgcgaccgggagggcggctggcgctggctggaggatcgtggccgggccatggctcgcgacccgcggggacgggtgacgcggatgctcggcacgcgcagcgacatcagcgcgcgcaagcgcctggaagagcagcagcaactggccgcgacagtgttcgaggcggccagcgagagcatcgtgatcctcgatccggcctacaacctgctggcggtcaaccaggccttcagtcgcatcaccggctatcgccgcgaggacgtggtcgggcgcaacgccagcctgctggtgaatacccccgaggcccagcgccactaccggcagatccgcgccgagctgcgccagcacgggcagtggcagggcgaactggtggatacgcggaagaatggcgatccctatccccaatggctgcagctcaacctgctgcgcgacggcaatggcgaggcgacccacatcgtcggtttcttcaccgatctcagtgcccgccgcgacgtcgaggagcgcctgcgtcacctgctgcactacgacgaactgaccggcctggccaaccgccggttgttccgcgagcggctgcacgaggcggcccagcgggcgcgccaggaggagggcgggctggccctgctgctgatcgacctggaccgcttcaagctgctcaacgacagcctcggccacgaggtcgccgaccagttgctcagggagatggcccagcgcctgcggcgcaccgcgccggaagccaacaccctggcgcgtctggccggcgacgagttcgccatcctcctcgatggcggcaccggcaccgcggccctgtcgcgcctggccgaacgcctgctggtccagttgcgccagccggtgagcgtgctcggccacgagttgatcctcggcgcctcgctggggatcagcctgttttccgagcaggcacgggaaatctccgtgctgatgagccaggcgaacctggcgatgcaacatgccaagcaactcggcggcaataccttccagttcttccgcgacaacctgcaggacagcaccctcgaacgcctgcgcctggaaacccggttgcgcaaggcggtcgaggagggccagctggacgtgcattaccagcccaagctgtgcctggccagcggctgcgcggactcggtcgaggcgctggtgcgctggcaccatccggaggagggcatgatcccgccgtcgaccttcatcggcctcgccgaggagtgcgggttgatcggcgagatcggtgaattcgtcctgcgccgggcctgcctgcaggccgccgagtggagccagcggggcctgaacctgcgggtctcggtgaacctctcggtccaccagttgcgccagggcgacctgctcgacgtagtgcgctcggcgctggccgacagcggcctgccggcggcgcaactggagctggagttgaccgaaagccagtggctggacgccctcgatagtgtcctggcgaccttccgccagttgcgcgagatgggggtgaagctatcggtcgacgacttcggcaccggctattcctcgctcagctacctgaagcgcctgccgctggactacctgaagatcgaccagtcgttcgtccgcgacctgacccagaacagcgaggatgcggcgatcatccgggcgatcatcgccatggcccacagcctcgacctgaaggtggtcgccgaaggcgtggaaaccatcgaacagcgggacttcctggtggcccagcgttgcgacgagctgcagggctacctgatcggccggccgttgccggcccatgccctggaggaaggtttgcgccaggctcgttga

SEQ ID NO: 322347 - DNA, 726 bp, Pseudomonas aeruginosa
gtgaggcgctggcgagcctggctggcgggcctgttgctgggcctgccgctgttgccgtccgtcgaggccgcggtgcgcgccgaggactacggcgccttctggctgtggagcggcgtcgcgccgcagccggtgctggcgcgggccgagacgctgtacatcctgcagggacagatcagccagtcgcgccggcgccccggcgagggcgtgcggctgatcgcccagggcatctcggtgccacgcctggcgcggggtgaggtctgggtggtgtaccgcgcccataccctgcgctggacgccgcagatctaccaggccgtgctgaaccaggtgcagcgctggaagcgtgccggcaacccggtggtcggcatccagatcgacttcgatgcgcgtacccgctacctcgacgagtacgtcgatttcctccgcgacctgcgccggcgcctgccccgcgaataccgcttgagcatcaccgggttgctcgactggggcagcaacgccgagccggcggcgatcaaccggctcaagggcgtggtcgatgaagtggtggtgcagacctaccaggggcgccacagcattcccaaccacgccgcctacctcccgcgggtcagccgcctgcagctgccgtaccggatcggcctggtccagggcggcgactggcaagcccccgactacctggaaaagagcccctggttcaggggctacgtggtgttcctgctcaaccctcagtga

SEQ ID NO: 322348 - DNA, 1395 bp, Pseudomonas aeruginosa
atgaccgccaccaccctccgccccgaactgctgtgccccgccggcaccctgaaaagcatgcgctatgccttcgcctacggcgccgatgccgtctacgccgggcagccgcgctacagcctgcgggtgcgcaacaacgatttcgaccacgcccaactggccgaaggcatcgccgaggcccacgcacttggcaagcgcttctacgtggtggtcaacatcgccccgcacaacgccaagctgaaaaccttcctgcgcgacctggagccggtggtcgccatgggtccggatgcgctgatcatgtccgatcccggcctgatcatgctggttcgccagcatttcccgcagatgcccatccacctgtcggtgcaggccaacgcggtgaactgggccgcggtgcaattctggcggcagcagggcctgacccgggtgatcctttcccgcgagctgtcgctggaggagatcgaggaaatccgccagcaggtgccggacatggagctggaagtgttcgtccacggcgccttgtgcatggcctattccgggcgctgcctgctgtccggctacatcaaccgccgcgaccccaaccagggcacctgcaccaatgcctgccgctgggaatacaaggcggtggagggccgcgaggacgagctgggcaacgtggtggcgcgggagccgaccctgggacgcggcgcgccgaccgagcaggtgttcctcctcgaggaaggcaaccgtcccggcgaaccgatggccgccttcgaggacgaacacggcacctacatcatgaattccaaggacctccgcgccgtgcagcacgtcgagcggctggcgcggatcggcgtgcactcgctgaagatcgagggccgcaccaaatcccactactacgtggcgcgcaccgcccaggtctaccgccaggcgatcgacgacgcggcggccggcaagccgttcgaccgcggcctgatggacaccctggagtccctcgcccaccgcggctacaccgagggcttcctgcgccgccacgtgcacgacgagtaccagaactaccagcacggccattcgttgtccgagcgccagcagttcgtcggcgaactcaccggcgaacgccgcgacggactggccgaggtggaggtgaagaaccgcttccagcgcggcgacagcgtcgaactgatgactccgcgaggcaacctgagcctgcgcgtggaggacctgcgcaacgccgccggcgaggccatcgaggtggcgccgggcaatggccacgtggtctacctggcgctgccggaaggcctggacctgtgctacgcgctactgatgcgcgatctccagcccggccaggatacccgccagccgcaggccgaacgcagcggcgggtgtgccggcaagggcgcttgcggctgcgctcactga

SEQ ID NO: 322349 - DNA, 1467 bp, Pseudomonas aeruginosa
ttgagtacaccagccactccaacgtcctgcgacatcctggtcttcggcggtaccggcgacctggccctgcacaagctgctgccggcgctctatcgcctgcaccgggaggaccgcctgccggccgatacacggatcttcgccctcgcccgcagcgcgctggacaacgccgccttcctcgccctcgccgagcgcaacgtccgcgcggtggtggcgcgcagcgagttcgccgccgaacaatggaaaggcttcgccgcgcgcctcgactacctggccatggacgcctcgcagagcgccgacttcggccgtctcgcgcggcacctgaagagcagcgagggccgggtgctggtgcactacctggcgacctcgccgagcctgttcgcgccgatcgcgcagaacctctccatcgccggcctcgccgggccgcaagcgcgcatcgtgctggaaaaaccgctgggccattcgctggactcggcgcgggcgatcaaccagtccatcggccgggtgttcgacgagtcgcgggtgttccgcatcgaccactacctgggcaaggaaaccgtgcagaacctgatggccctgcgcttcgccaatgcgttgttcgagccggtctggcgcgcggcgcacatcgaccatgtgcagatcagcgtcaacgagacccttggcgtggagaaccgcggcggctactacgaccacgccggggcgatgcgcgacatggtgcagaaccatctgctccagttgctctgcctggtggcgatggaggcgccggtgcgtttcgacgccgaggctgtgcgcaacgagaagctcaaggtgctgcaggcgctgaagccgatctccgggctcgacgtgcaggacaagacggtacgcggccagtacgccgccggcaggatcggcggccaggaggtgccggcgtactacttcgagaagaacgtcgacaacgacagcgataccgagaccttcgtcgcgctccaggccgaggtcgagaactggcgctgggccggggtgccgttctacctgcgcaccggcaagcgcatggcgcgcaagtgctcggaaatcgtcatccagttcaagccggtgccgcacagcctgatcgacggcggcggcgggccggccaaccgcctgtggataaggttgcagccggaggagcggatcagcgtgcaactgatggccaagaccccgggcaagggcatgcaactggaaccggtggagctggacctcaacctggccgaggccctcagccgcaacaagcggcgctgggacgcctacgagcgcctgctgctggacgtgatcgagggcgactcgacgctgttcatgcgccgcgacgaggtagaggccgcctggggctgggtcgacccgatcctcgccggctggcgcgagcactaccagagcccgcggccctacccggccggcagcaacggcccggaacaggcgcaactgctgctggaactgcagggtcgacgctggctggaatga

SEQ ID NO: 322350 - DNA, 882 bp, Pseudomonas aeruginosa
gtgaacctgctgcagcacatagcccagtcccgccaacagctccgcaagtcggaactcaaggtcgccgatcacgttctcaacgatccggcgtcggtcatgcacagctccatggccgaactggcccatggggtcggggtcagcgagccgaccatcgtgcgtttctgccgcgccatcggctgcagcggcttccaggacctcaagctgaagctggcgcagagcctggcggccggcgccagcttcggccagttctcgatccatgagagcgactcggtggccgacttcagcctgaagatcttcgacaccacgctgcacagcctgatggaagtccgcgagcacctggacacccacgccctggagcgcgccatcgccgccatcgcccacgcccagcgcgtggagttctacggcttcggcgcttccggcgcggtggcctcggatgcccagcacaagttcttccgcctgctgctgtcggcggcggcctactccgacccgcacatgcaggcgatgtcggcggtgaccctcaagcccagcgacgtggccatctgcatttcccagtcgggtcgctcgaaggacctgctgatcaccgccaacctggtgcgcgaggccggcgccacgctgatcaccctgtgcccgagccagaccccgctggccgacctggccacggtcaacctggcgatcgacgtgcacgaggacaccgacatctacaccccgctgacctcgcgcatcgcccacctggtggtgatcgacgtgctggcgatgggcgtggccatggcccgcggcccggacctggtcaaccacctcaagagcgtcaagcgcagcctgcgcagcctgcgcctgtcgccgaaggtgatgaagaaccaggaagagcgcggcgagccgtcctga

SEQ ID NO: 322351 - DNA, 216 bp, Pseudomonas aeruginosa
atgccccgtcatagcgatgccaatgcccagcacgtggattcgaaaacccgccgcaagctcgaagaccagcggcgcatgcaattccgccgggcgatcgaggaccactgcgaagaactgcgcctgcgccaggaactggccgactaccccgagctggtagccgccgcctacctcagctcgaaccgccagggccggcgaagcgcccagcgagctggctga

SEQ ID NO: 322352 - DNA, 951 bp, Pseudomonas aeruginosa
atgcgtaagtcgttgatgcgtatgacattacggcagcttcaggtttttcgtgccgtatgcgagagccgctcctacagccgggcggcggaggaaatggccctgacccagccggcggtcagcctgcagatccgccaactggaagagctggtcggccagccgctgttcgagtacgtcggcaagaagctctacctgaccgatgccgccgaagccctgctgaagaccagcaccgacctgttccagcgcctggaaagcctggacatgcagctctcggacctgaagggctcgctgcagggccagttgcgcctggcggtggagtccagcgccaagtacatcaccccgcacctgttcaaggcgttccagaacctgcatccggaagtcagcctgagcctgacggtggtcaaccgcacccaggtgatcaagcgcctggccgacaaccgcgacgacctggtgatcatgtccctggtaccgcaggacatggccctggagttcctgcccttcctgaacaacccgatcatcgccgtggcgccgccggaccatccgctgtgcaacgccgcgaagctggccctgaaggacctggagcccttcccgctactggtccgcgaaccgggctccggcacccgcaaggcttgcgaggagttcttccagcaacgccgcgcgcacttctcgcagatccaggagatcgcctcgctggagtccctgcgcgaaggggtgatcgccggcctcggcctggccctgctgccgcgccatgcggcgcaccaggaactggccaacggcctgctgcgcgaactaccggtggaggaattgccgctctatcgcagctggtgcctggtgcacgccaagggcaagcgcctgagcccggtggcccaggcgttcgtcgccttcgtccgcgaggagcgggcgctgatcagccagctcgctgggcgcttcgccggccctggcggttcgagctga

SEQ ID NO: 322353 - DNA, 1416 bp, Pseudomonas aeruginosa
gtgatcaagaagatcctgatcgccaaccgcggcgagatcgccgtccgcatcgtgcgcgcctgcgccgagatgggcatccgctcggtggccgtctactccgaggccgatcgccacgcgctgcacgtcaagcgcgccgacgaagcccacagcatcggcgcggacccgctggccggctacctcaacccgcgcgccctggtgaacctggcggtggaaagtggctgcgacgccctgcaccccggctatggcttcctctcggaaaatgccgagctggcggaaatctgcgccgagcgcggtatcaagttcatcggcccgtcggcgcaagtgatccgccgcatgggcgacaagaccgaagcccgccgcagcatgatcgccgccggcgtgccctgcacccccggcaccgaaggcaacgtcgccgatctcgccgaggccctgcgcgaagccgagcggatcggctacccggtgatgctcaaggccacctccggcggcggcggtcgcggcatccgtcgctgcaacagccgcgaggagctggaacaggcgttcccgcgggtgatctccgaggcgaccaaggccttcggcagcgccgaggtattcctcgagaagtgcatcgtcaatcccaagcacatcgaggcgcagatcctcgccgattccttcggcaacaccgtgcacctgttcgagcgcgactgctcgatccagcgccgcaaccagaagctcatcgagatcgccccgagcccgcagctcactcccgagcagcgcgcctatatcggcgacctggcggtgcgcgcggccaaggcggtgggctacgagaacgccggcaccgtggagttcctgctcgccgacggcgaggtgtacttcatggagatgaacacccgggtccaggtggagcacaccatcaccgaggagatcaccggcatcgacgtggtccgcgagcagatccgcatcgcttccgggctggagctgtcggtcaagcaggacgacatcgtccatcgcggctacgccctgcagttccgcatcaacgccgaggacccgaagaacaacttcctgccctcgttcggcaagatcacccgctactacgcccccggcggccccggcgtgcgtaccgacacggcgatctacaccggctacaccatcccgccgtactacgactcgatgtgcctgaagctgatcgtctgggcgctgacctgggaagaggccctcgatcgcggcctgcgcgccctcgacgacatgcgcgtgcaaggggtcaagaccaccgcgccgtactaccaggaaatcctccgcaacccggaattccgcagcggccagttcaacaccagcttcgtcgaaagccacccggaactgacccagtactcgatcaagcgcaacccgtcgcacctggccatcgccatcgccaccgccatcgcggcccacgccggcctgtaa

SEQ ID NO: 322354 - DNA, 1824 bp, Pseudomonas aeruginosa
atgagcaacaccatccaagcgaagaagaccggcgtcaccgataccatcctgcgcgatgcccaccagtcgctgctggcgacccgcatgcgcaccgaggacatgctgccgatctgcgacaagctcgaccgcgtcggctactggtcgctggaagtctggggcggcgccaccttcgacgcctgcgtgcgcttcctcaaggaagacccgtgggaacgcctgcgcaagctcaaggcggcgctgcccaacacccgcctgcagatgctcctgcgcgggcagaacctgctcggctaccgccactacagcgacgatgtggtgcgcgccttcgtggccaaggcggcggtcaacggcatcgacgtgttccgcatcttcgacgcgatgaacgacgtgcgtaacctgcgcgtctccatcgaggcggtgaaggccgccggcaagcacgcccagggcacgatctgctacaccaccagcccggtgcacaccatcgaggccttcgtcgcccagggcaaggcgatggccgacatgggcgtcgactccatcgccatcaaggacatggccggcctgctcaccccctatgccaccggcgacctggtcaaggccctgaaggacgccctgccgctggacgtggtggtgcattcccatgacaccgccggtgtcgccagcatgtgccagctcaaggccgtggaaaacggcgccgaccgtatcgacacggcgatctccagcatggcctggggcaccagccacccgggcaccgagtcgatggtcgcggcgctgcgcggtaccccctacgacaccggcctggacctggagctgatccaggagatcggcatgtacttccacgcggtgcgcaagaagtaccaccagttcgagagcgaattcaccggcgtggatacccgcgtgcaggtcaaccaggtgccgggcgggatgatttccaacctggccaaccagctcaaggagcagggcgcgctgaaccgtatgggcgaggtgctcgaggaaatcccgcgggtccgcgccgacctcggtttcccgccgctggtgacgccgacttcgcagatcgtcggcacccaggcgttcttcaacgtgctcgccggcgagcgctacaagaccatcaccaacgaagtgaagctgtacctgcagggccgttatggcaaggcccccggcgaggtcaacgagcaactgcggcgccaggccatcggcagcgaggaagtcatcgacgtgcgcccggccgacctgatcaagccggagctgaacaagctgcgcagcgagatcggcaacctggccaagtccgaggaagacgtactcacctacgcgatgttcccggacatcgggcgcaagttcctcgaagagcgtgaggccggcaccctgaagcccgaggaactgctgccgattcccaccggcaagggcgtcgccgccgctggcgcggaaggcaccccgaccgagttcgtcatcgacgtgcacggcgagacctaccgcgtcgacatcaccggggtcggcgtgaagagcgacaacaagcggcacttctacctgtccatcgacggcatgccggaagaagtggtgttcgagccgctcaacgaatatgtcgccggctccgccagcggccgcaagcatgccagcgagccgggccacgtcagcaccaccatgccgggcaacatcgtcgacgtgctggtgaaggaaggcgatagcgtcaaggccggccaggcggtgttgatcaccgaggcgatgaagatggaaaccgaggtccaggccggcatcgccggtacggtcaaggcgatccacgtggccaagggcgaccgggtcaacccgggcgagatcctgatcgagattgcgggctga

SEQ ID NO: 322355 - DNA, 1197 bp, Pseudomonas aeruginosa
atgatcatcgccggcaccgccgtcggcgccggaatgttctccctgcccatcgccatgtccggcatctggttcggctggtcggtggcggtgttcctgctcacctggttctgcatgctgctgtcggggatgatgatcctcgaggccaacctcaactacccggtgggctcgagcttctcgaccatcacccgcgacctgctcggccagggctggaatgtggtcaacgggctgagcatcgccttcgtcctctatatcctcacctatgcctatatctccggcggcggctcgatcatcggctacaccctgtccagcggcctcggcgtgaccctgccggaaaagctcgccgggctgctgttcgccctggcggtggcgctggtggtgtggtggagcacccgcgcggtggaccgcatcaccacgctgatgctcggcggcatgatcattaccttcggcctctccatcagcggcctgctcgggcgcatccagccggcgatcctgttcaacagcggcgagccggacgcggtttactggccctacctgctggcgaccctgccgttctgcctgacttccttcggttaccacggcaacgtgccgagcctgatgaagtactacggcaaggacccgcagcggatcagccgttcgttgtggatcggcaccctgatcgccctggccatctacctgctgtggcaggccagcaccctgggcaccatcccgcgcgagcagttcaagggcatcatcgccggcggcagcaacgtcggcaccctggtggaatacctgcaccggatcaccgcgtcggattcgctgaacgcgttgctcaccaccttctccaacctggcggtggccagctccttcctcggcgtgaccctcggcctgttcgactacctggccgacctgtgcaggttcgacgacagccacttcgggcgcttcaagaccgcgttgctgaccttcgtcccaccgaccatcggcgggctgctgttccccaacggcttcatctacgccatcggtttcgccgggctggccgcggcgttctgggcggtgatcgttccggcgctgatggcgcgggcctcgcgcaagcgcttcggcagcccgctgttccgcgcctggggcggcacgccggcgatcgtgctggtgctgctgttcggcgtggccaacgcggtcgcgcacatcctggccagcctgcactggctgccggagtaccgttga

SEQ ID NO: 322356 - DNA, 675 bp, Pseudomonas aeruginosa
atgcgcgaacccttgaactggcgccccgtcgccactccaccccacgccccgctcgacggccgcttcgtcaagctcgaaccgctcgatccgcaacgccacggcgacgacctgtgggacgccctgcaagggcctggtgccgacccgttgctgtgggaatacctggcctacggcccgttcgccgagcgcccggcgttcgacgcctggctggccggccaggcggccagccgcgacccgctgttcttcgccgtgcgcgagcggcgcacgcagcgcgccgtcggcctgctcagctacctgcggatcacgccgaaggatggcgtcatcgaaatcggccatatcgccttcggcgcgccgatgcagcgcacaccggggtctaccgaggcggtctacctgctcgccgaactcgccctcggccgcctcggctaccgccgcctggagtggaagtgcaatgccggcaacgcccgttcgctgcgcgccgccgagcgcctgggcttcacctacgaaggcaccttccgccagcacatggtggtcaagcagcgcaaccgcgacaccgcctggttctccctgctcgacagcgaatggccggcgcgacaggcggcgttcgagcgctggctcgatccttccaacttcgacgccgaaggccgccagcggcagacgctggaggcgctgcgcgactag

SEQ ID NO: 322357 - DNA, 450 bp, Pseudomonas aeruginosa
atgagcacgtccctgcagattcgtcccgtcggcgccggcgaccacgccgcctggctgccgctgtgggagggctaccagcgcttctacaagaccgagatcgccgccgctaccagcgacgccacctggcagcgcttcctcgacgccgacgaaccgatgaacgccgccctcgcctggctcgacgagcgcgccgtgggcctggtgcactggatctaccaccgctcctgctggaccgtcggcgactactgctacctgcaggacctgttcgtcgccgagggcctgcgcggcgaaggcatagggcgccggctgatcgagcatgtctacgccgaggccggcgccgctggctgttcgcgggtgcactggctgacccacgagagcaacagcgacgcgatgaagctgtacgagcgcatcgccgacaagtccggtttccttcagtaccgcaggattctctga

SEQ ID NO: 322358 - DNA, 1476 bp, Pseudomonas aeruginosa
atggccaccgtactgcccttcgacgccgccggcatccacctcgaccccgcccagggcctggcccgccagctctacgccgcgctgcgcgaacggatcctcgacggccgcctcggcagccgcacgcggatgcccgccagccgcgagctggcccaggccctgaaggtctcgcgcaacaccgtggtgcgggcctatgaacagttgcacgccgagggctatatcgacgggcgcacaggcgacggcacctacgttgccgagttgcaggaaatcccaggcagggcccccgccgtcgccccgagcgctcccgcgccgcgcggcccggcggccctggcgccgccaccggaaggcgcgccgcgagcgttccgcgtcggcgtgccggccttcgacctgttccccttcgacacctgggcgcggctacaggcgcgcttctggcgcaacccaccggcggactgcctgggctacggcgacccggccggcgaggcgcgcctgcgcgagctgatcgccgcctacctgcgcagcgcgcgcggcctgcgctgcgaggcggaacaggtgatcgtcacccatggcgcgcagcaggccatccgcctgtgcgcccaggtgttgctcgagaacggcgatccggtggctgtggaaaaccctggctaccgcgcggcgcgcctggccttcgccgcgaccggcgcggtaccgcacgggatcgacctcgacgccgaggggctgcgcagcgaccggctcgcgggcattgccggctgccgcctggcctatgtcacgccgtcacaccagtaccccaccggcgtcaccctgtcgctggcgcggcgcctggagctgctggagtgggccgagcgcgccgacggttggatcgtcgaggacgactacgacggcgagtatcgctacagcggtacgccgctggcgccgctggccgcgctggaccgacagggccgggtgctctacgtcgggaccttctgcaagatcgccttcccggcgttgcgcctgggctacctggtggtcccgccggcgctggtcgagcgcttccgccagcggcgggccatcgaggtacgccattcggaggtgggcacccagcgggtcatggccgacttcatcgccgaggggcatttccagcgccacgtccgccgcatgcgccgcgccgcccgcgcccgccgcgacgccttgctgcggggctggccagaggcgccgggttgccagccgttgccggcggtggaggcggggctgcacctgtgcgtgcgggtcgacagcctggcgcgggagcgggccctgatcgccgcggcggcagccgccggggtggaagtcagcgccttgagcgactactggatggacgactccagcgttgcgccagacgaccgcgcgggcctggtgctgggcttcgcggcagtacccgaggtgcgtatcgacgaggcgctgcgggcgttgcgcaaggcctggcggcgggaggccctggttggacccgtcgtcgcgactgactag

SEQ ID NO: 322359 - DNA, 1215 bp, Pseudomonas aeruginosa
atgagtgtcgccctttccgccgcgcccgagcgcaagctcgccgcccccctgatcgccttcgccctgctggtgctcggcgggctgttcctgttcaacgcggtcagcgcgcgccaggccatcctcttcatcgtcggcggcgccctgggcctgaccctctaccacgccgccttcggcttcacctccgcctggcgggtattcatccgcgaacggcgcggcgccgggctgcgcgcgcagatggtgatgctggcgctggcggtgctgctgttcttcccggcgctggcggcgggcagcctgttcggccagccggtgagcggtttcgtctcgccggttggcacttcggtgatcgtcggcgccttcattttcggcatcggcatgcaactgggcggcggctgcgcctccggcaccctgttcaccgtcggcggcggcaacgcgcggatgctggtgaccctgctgttcttcatcctcggctcgctgatcgccacccagcatgtcggctggtggttcgccctgccgtcgctgccgccgatctcgctggtcgccgaactgggcctggcaccggcgctggtgttgagcctggcggtgttcatcggcatcgccggggtcacggtacgcatggagaaggcccgccacggcaccctggaaaccccgccgagcgccgaatggcggggttggcggcgcttcctccgcggcccctggccgctggtctggggcgcgttggcgctggcgctgctcaacttcctcaccctgtacctcgccggacgcccctggggcatcacgtcggccttcgccctgtggggcgcgaagatcgcccagggcgtgggcctggacgtcggcgcctgggccttctggcagacgccggcgaacgccaaggcgctggccgcgccgctgtgggaagacatcaccagcgtgatggacatcggcatcgtcctcggcgcgctgctcgccgccggcctggccggacgcttcgcgccgaacctggacatcccgcgccgttcgctggcggcggcggtgatcggcgggctgctgctcggctacggcgcgcgcctggcctatggctgcaacatcggcgcgtatttcagcgggatcgcgtccggcagcctgcatggctggttgtggttggtggcggcgtttgccggcaacagcgtcggggtacgggtattgaggccctatttcttcccggaggagcggcgggagcaagggttgacggggtgttga

SEQ ID NO: 322360 - DNA, 1425 bp, Pseudomonas aeruginosa
atgtcccccgttgcatcttcccgtatcgagaaagacctgctcggcaccctcgaagtgcccgctgacgcctactacggcatccagaccctgcgcgccgtgaacaacttccgcctctccggggtgccgctgtcgcactacccgaagctggtcgttgccctggccatggtcaagcaggccgccgccgacgccaaccgtcagctcggccatctcccggaagacaagcacgccgccatcagcgaggcctgcgcccgcctgatccgcggcgatttccacgagcagttcgtggtggacatgatccagggcggcgccggcacctccaccaacatgaacgcgaacgaagtgatcgcgaacatcgcgctggaagccatgggccacaccaagggtgagtacaagtacctgcacccgaacaacgatgtgaacatggcgcagtcgaccaacgacgcctacccgaccgccatccgcctgggcctgctgctcggccacgacaccctgctggccagcctcgacagcctgatccaggccttcgccgccaagggcgtcgaattcgccggcgtactgaagatgggccgcacccagttgcaggacgccgtgccgatgaccctcggccaggaattccacgctttcgccaccaccctcggcgaagacctcgaccgcctgcgtcgcctggcgccggagctgctcaccgaagtgaacctcggtggcaccgccatcggcaccggcatcaacgccgaccccggctaccagaagctcgccgtcgagcgcctggccgccatcagcgggcagccgctgaagccggccgccgacctgatcgaagccacctccgacatgggcgccttcgtgctgttctccggcatgctcaagcgcaccgcggtcaagctgtcgaagatctgcaacgacctgcgcctgctctccagcggcccgcgcaccggcatcaacgagatcaacctgccgccgcgccagccgggcagttcgatcatgccgggcaaggtcaacccggtgatcccggaagcggtcaaccaggtcgccttcgaagtgatcggcaacgacctcgccctgaccctggcggccgaaggcggccagttgcaactgaacgtgatggagccgctgatcgcctacaagatcttcgactcgatccgcctgctgcaacgcgccatggacatgctccgcgagcactgcatcaccggcatcaccgccaacgtcgagcgctgccacgaactggtcgagcacagcatcggtctggtcaccgcgctgaacccgtacatcggctacgagaactccacgcggatcgccaagaccgccctggagagcggccgcggcgtactggaactggtacgcgaggaaaagctgctggacgaagccaccctggccgacatcctgctgccggaaaacatgatcgcgccgcgcctgattccactgcgcgcctga

SEQ ID NO: 322361 - DNA, 909 bp, Pseudomonas aeruginosa
gtgaacctcgaactgaagtggctggaggatttcatcgccctggccggcacccgcagcttttcccaggcggcggagaaacgcttcgtcacccagccggccttcagccggcgcattcgcagcctggaggacgccctcggcctgaccctggtgaatcgccagcgcacgccggtggaactgaccgaggccgggcagttgttcctggtcaccgcgcgcagcgtggtcgagcagctcggccaggtggtgcgccacctgcaccacctggaaggcgggcagggcgaggtgctgcagttcgccgccgcccactcgctggcgctgggcttcttcccgcagtggatcgcgcggctgcgcaacgaggggctgaacatcgccagccggctgatcgccaccaacgtcggcgaggcggtgcattccctgcgcgagggtagctgcgacctgatgctggcgttctacgaccctgacgccgcgttgcagatggacccggagatcttcccctcgctgcacctggggcgcaccgagatgctgccggtttgcgcggtgaacgccgagggccagccgctgttcgacctggagaacggccagagcgtgccgctgctcgcctacagcgccagcgccttcctcggccgcggggtcaacctgctgctgcgccagcgcaacctgcgctacaccacggtctacgagacggcgatggccgacagcctgaagagcatggcgctgcaaggcatgggcgtggcctgggtgccacggctgagcgtggtcaacgaactggagcgcggtgagctggcgatctgtggcgggccgcaatggttcgtgccgcaggaaatccgcctgtaccgctgcgcgctggtacgcaaggcggcgatccgcctgctctggcgcaagctggaaggcgggctgggcagcgtcgagtag

SEQ ID NO: 322362 - DNA, 1029 bp, Pseudomonas aeruginosa
atgaccctgccacagaccatgaaagccgcggtcgtgcacgcctacggcgcgccgctgcggatcgaggaagtcaaggttccgctgcccggccccgggcaggtactggtgaagatcgaagcctccggcgtctgccacaccgacctgcatgccgccgagggcgactggccggtgaagccgccgttgccgttcattcccggtcacgaaggcgtcggctacgtcgccgcggtgggcagcggagtgacccgagtgaaggaaggcgaccgggtcggcatcccctggctgtacaccgcctgcggctgctgcgagcactgcctgaccggctgggagaccctctgcgagagccagcagaacaccggctactcggtgaacggcggctatgccgaatacgtattggccgacccgaactacgtcggaattctgccgaaaaacgtcgaattcgctgaaatcgcgccgatcctctgcgccggcgtcaccgtctacaaggggctcaagcagaccaacgcgcgccccggccagtgggtggcgatctccggcatcggcggcctcggccacgtcgccgtgcagtacgccagggccatgggcctgcacgtcgccgccatcgacatcgacgacgccaagctggaactggcgcgcaagctcggtgccagcctgacagtcaacgcccggcaggaagacccggtggaggtgctccagcgcgacatcggcggcgcccacggggtgctggtcaccgcggtatccaacagcgccttcggccaggccatcggcatggcgcgccgcggcggcaccatcgccctggtcggcctgccgccgggtgacttcccgacgccgatcttcgacgtggtgctcaagggcctgcacatcgccggctcaatcgtcggcacccgcgcggaccttcaggaagccctcgactttgccggcgaaggcctggtcaaggcgaccatccatccgggcaagctggacgacatcaaccagatcctcgaccagatgcgcgccgggcagatcgaggggcgcatcgtccttgagatgtga

SEQ ID NO: 322363 - DNA, 492 bp, Pseudomonas aeruginosa
atgagcgcactggttggcgtgatcatgggttccaaatcggactggagcaccctcagtcacaccgcggacatgctggacaagctgggcatcccctacgaagtgaaggtggtttccgcccaccgcaccccggacctgctcttccagtacgccgaggaagccgaaggccgcggcctcgaagtgatcatcgccggcgctggcggcgccgcccacctgccgggcatgtgcgcggccaagacccacctgccggtactcggcgtgccggtacagtcgtcgatgctgtcgggtgtcgactcgctgctctccatcgtgcagatgcccgccggcgtaccggtcgccaccctggccatcggcaaggccggcgcggtcaacgcggcgctgctctcggcgagcatcctcggcgccaagcacccgcagtaccacgaggcgctgaagcagttccgcgccaaccagaccgaaaccgtgctggacaatcccgacccgcgcgatgcgtga

SEQ ID NO: 322364 - DNA, 1083 bp, Pseudomonas aeruginosa
atgaaaatcggtgtcatcggtggcggccagctgggccgcatgctggccctggcgggaaccccgctgggcatgaacttcgctttcctcgacccggcgccggacgcctgcgcggcctccctgggcgagcacatccgcgccgactacggcgaccaggagcacctgcggcaactggccgacgaggtcgacctggtgaccttcgagttcgagagcgtgccggcggaaaccgtggccttcctctcccagttcgtgccggtctacccgaacgccgagtcgctgcgcatcgcccgcgaccgctggttcgagaagtcgatgttcaaggacctcggcattcccactccggacttcgccgacgtccagtcccaggccgacctcgatgccgccgcagccgccatcggcctgccggcggtgctcaagacccgcaccctgggctacgacggcaagggccagaaggtcctgcgccagccggccgacgtgcagggcgcgttcgccgaactgggcagcgtgccgtgcatcctcgagggcttcgtgccgttcaccggggaagtctcgctggtggcggtgcgcgctcgcgatggggagacgcgtttctacccgctggtgcacaacacccacgacagcggcatcctcaagctctccgtggccagcagcgcgcatccgttgcaggcgctggccgaggactacgtcggccgcgtgctggcacggctcgactacgtcggcgtgctggccttcgagttcttcgaggtggacggcggcctgaaggccaacgagatcgccccgcgcgtgcacaactccgggcactggaccatcgaaggcgccgagtgcagccagttcgagaaccacttgcgcgccgtcgccggcctgccgctgggctcgaccgccaaggtcggcgagagcgcgatgctcaatttcatcggcgcggtccccccggtggctcaggtggtcgccgtcgccgactgccacctgcatcactacggcaaggccttcaagaacggccgcaaggtcggccacgccaccctgcgttgtgtcgaccgggcgacgctgcaggcgcgcatcgccgaggtcgaggcgctgatcgaggcgtga

SEQ ID NO: 322365 - DNA, 246 bp, Pseudomonas aeruginosa
atgggattaatcggaaccatcatcgtcggactgatcgttggtctcgttgcacgctttctgaagccaggtgacgacagcatgggctggatcatgaccatcctgctcggcatcggcggttcgctgctggccacctacggcggccaggcgatcggcttctaccaggctggccaggcggccggtttcatcggcgcggtggtcggcgccgtcgtactgctggtcatttacggcctgatcaagaagaattga

SEQ ID NO: 322366 - DNA, 549 bp, Pseudomonas aeruginosa
atgcgccgcttcccgttcgcccgcctgttgctgctcgccctgttgtcctcacccctggcccacgccgaactgcccgagaccgactggctggaactgatgccgccggccgaccgcaaggcgctggaagaaatgcccgacatcgttcacgacaccccggaggccgccggcaccttcaccagcaaggggggcctgaagcagtcggaccggaagatgccggcggtgatgtattcggccaagaccgtcgccagcctggatggcaaggcgatccgcctcggcggctacccggtgccgctggagaacgacgccaagggccgcgtcaccgaattcttcctggtgccctatccgggcgcctgcatccacgtgccgccgccgccgccgaaccagatcgtcctggtgcgttatccacaggggctgaagctgaccgatatctacaccccgctgtgggtcagcggcacgctgaagatcgagcaggtgagcaatgacctggccgatgccgcctacgccatcgacaaggcgcgggtgaaggtggtggaggaagcggacctgtag

SEQ ID NO: 322367 - DNA, 918 bp, Pseudomonas aeruginosa
atgaacaccgatagcccgatcaaccgcgtcgaacaggtacaggtcgacgacctggcctgctggcgcatccacaccgcccatggcgaggcgctgatcgcccagcagggcgcgcaactgctcagctaccagccccacgaacagccgccgctggtctggctcagcgacgaggccggctaccggcgcgggcagtcggtacgcggcggggtgccggtgtgctggccgtggttcggtccgctggagcgcaacccgcaggaagtccgcggccaggtggaagatggcctgaaggcgcccgcccacgggctggtccgggcggtcgactgggaaatcgacgacatcgccgaggaggacggcgacctctgcgtcagcttccacctcgacgcccccgatggcctccccggctggccgcacccggcggcgctgcgcatgctgttccgcttcggcgagcgcctgaccctgcgactcaccagcgagaacctcggcagcaagccgctggtgctcagccaggcactgcacacctacttcgcggtcagcgacagccgcgagatcgccatcgagggcctggaaggcgcgcgctacatcgagaccctggagaactgggaagaacgcactcagcacggcgcggtacgggtcaagggcgaactggatcgcatctacctcggtctcgaacgcgacctgctgatcaaggacccgcgctgggaacgcagcatccacctgcacgccctcgactcgcgctcggcggtggtctggaacccctgggtggacaagtcccggcgtctctcgcagttcgccgacgacgcctggcagcagatgctctgcatcgagaccgggcgggtctgggacgacctcatggtggtcgcccccgggcgcagcgaaagctttggcgtgcagatctggagcgagccgctgaaacgaccctga

SEQ ID NO: 322368 - DNA, 1200 bp, Pseudomonas aeruginosa
atgtctggcaatcgtggtgtggtctatctcggcccgggcaaggtcgaggtgcagaacattccctatccgaagatgcaggacccgcagggccggcagatcgaccacggggtgatcctgcgggtggtctccaccaacatctgcggctccgaccagcacatggtgcgcggccgcaccaccgcgccggaaggcctggtgcttggccacgagatcaccggcgaggtggtggagatcgggcgtggcgtggaaaccatgaagatcggcgacctggtctcggtaccgttcaacgtcgcctgcggccactgccgtacctgcaaggaacagcacaccggcgtctgcctgacggtcaatccggcgcgtgccggcggcgcctacggctacgtcgacatgggtggctgggtcggcggccaggccgaatacgtgctggtgccctacgccgacttcaacctgctgaaactgcccaaccgcgaagcggcgatggagaagatccgcgacctgacctgcctttcggacatcctccccaccggctaccacggcgcggtcaccgccggcgtcggcccgggcagcacggtctacatcgccggcgccggtccggtcggcctggccgcggcggcctcggcacgcctgctcggcgcggcggtggtgatcgtcggcgacgtcaacccgacccgcctggcccatgccaagaaacagggcttcgagatcgccgacctgtccaaggacaccccgctgcacgaacagatcgccgctctgctgggcgagccggaggtcgactgcgcggtcgatgcggtcggtttcgaggcgcgcggccacggccattcgggctcgcagcaggaagccccggccaccgtgctcaactcgctgatgggcatcacccgggtcgccggcaagatcggcattcccggcctgtacgtcaccgaagacccgggcgcagtggacgcggccgccaagcacggcgccctgagcatccgcttcggcctgggctgggccaagtcgcacagcttccataccggccagaccccggtgatgaagtacaaccgccagctgatgcaggcgatcatgtgggaccggatcaagatcgccgacatcgtcggggtggaagtcatcaccctcgacgatgcgccgaaaggctatggcgagttcgacgccggggtgccgaagaaattcgtcatcgacccacacaacctgttccgcgcggcctga

SEQ ID NO: 322369 - DNA, 858 bp, Pseudomonas aeruginosa
atgagccgtacccccgacacctggatcctcaccgccgacagtcccagcctgctaggcaccgtcgacgtggtgacgcgctacctcttcgagcagcgctgctacgtcaccgagcaccactcgttcgacgaccgcctggcgcaacgcttcttcatccgcgtggagttccgcgccggcgacggcttcgacgaagcctccttccgcgccggactggccgaacgggtggcaccgttcggcatgcgtaccgagctgaccgcgccgggctaccgcagccaggtggcgatcatggtttccaaggccgaccactgcctgaacgacctgctctaccgccagcgcatcggccagttgccgatggacgtggtggcggtgatttccaatcacccggacctggagccgctggcgcgctggcacggcattccctaccaccacttcccgctcgacccgaacgacaagccggcccaggaagccagggtctggcaggtgctcgaagagagcggcgccgagctggtgatcctcgctcgctacatgcaggtgctgtcgccggaactgtgccggcgcctggacggctgggcgatcaacatccatcactccctgctgcccggcttcaagggcgccaagccgtaccaccaggcctaccagaagggcgtgaagctggtcggcgccaccgcccactacatcaacaacgacctcgacgaagggccgatcatcgcccagggcgtcgagacggtcgaccacgcccactaccccgaggacctgatcgccaagggccgcgacatcgagtgcctgaccctggcgcgggcggtgggctaccacatcgagcggagggtattcctcaacgccaatcggaccgtggtgctgtaa

SEQ ID NO: 322370 - DNA, 636 bp, Pseudomonas aeruginosa
atgagcaaggcaaacgtctaccagcaacgccccgaacccggcgtccacgccgaatcgccgctgcaccatgccgagctgcacaagctcgccggcaagaccgccgcgaaggccggtatcgtcctgcgcgagaagaagctgctcggccacctggtgctgcgcggcgatgccgccgacccggccttcgccgccgccgtgcaccaggccctcggcctggaactgccggtggccctgaccctggtcgccagcggcgagacctcgctgcaatggctggccccggacgaatggttgctgatcgtccccggcggcgaggaatacgccgtcgaacagcgcctgcgccaggccctgggcgaggagctgcactacgcggtggtcaacgtcagcggcgggcagacgctgctcgaactgagcggagcgaacgtccgcgaactgctgatgaaatccaccagctacgacgtgcatccgagcaacttcccggtgggcaaggcggtcggcagcatcttcgccaagtcgcaatgcgtgatccgccataccggcgaggacacctgggagctggtcgtgcgccgcagcttcgccgactacttctggctctggttgcaggacgccagcgccgaatacggcctgcaggtagcggcatga

SEQ ID NO: 322371 - DNA, 3018 bp, Pseudomonas aeruginosa
atgagccagatcaatcgcctgtccagcggcggccgcatcgaccgcaaccgcccgctgaccttcagcttcaacggccagcactaccagggctatgccggcgacaccctggccgccgcgctgctggccaacggcgtcgacatcgtcggccgcagcttcaagtactcgcgggcgcgcggcatcgtcgccgccggcgccgaggagcccaacgcgatcctgcagatcggctcccgcgaagccacccagatccccaacgtacgcgccacccagcaggcgctctacggcggcctggtggccaccagtaccaacggctggccgaacgtgcagaacgacctgatgggaatcttcggcaaggtcggcggcaagctgatgccgcccggtttctactacaagaccttcatgtacccgcagtcgatgtggatgacctacgagaagtacatccgcaaggccgccggcctgggccgcgcgccgaccgaggtcgatccggacagctatgactggatgaaccaccactgcgacgtgctggtggtcggcgccggcccggccggcctggccgccgccctcgccgccgcccgcagcggcgcgcgggtgatcctcgccgacgagcaggaagagttcggcggcagcctgctggacacccgcgagaccctcgacggcaagcccgccgccgagtgggtcgcggacgccgtggccgagctgcaaggcctgccggaagtcatcctgctaccgcgctccacggtcaacggctaccacgaccacaacttcctcaccatccacgagcggcgcaccgaccacctcggcgaggtcgccccgctcggccaggtccgccagcgtgtgcaccgcgtgcgcgccaagcgcgtggtactggccgccggcgcccatgagcggccgctggtctacggcaacaacgacctgcccggcaacatgctcgccggcgcggtttccacctatgtacggcgctacggcgtggcaccgggcaagaaactggtgctggccaccaacaacgactacgcctaccgcgtcgccctcgactggcaggaagccggcctgcaagtggtggccatcgccgacgcccgggccaatccgcgcggcgagtgggtcgaggaagcacgccaacgcggtatgcgggtgatcaccggcagttcggtgatcgaggctcgcggcggcaagcgggtcagcggcgccaaggtcgcccggatcgacctgcaggccatgcgcgccagcggcggcgaatggctggactgcgacctgatcgccagctccggcggctacagcccggtcgtgcacctggcctcgcacctgggcggcaagccggaatggcgcgaggaaatcctcgccttcgtccccggcgacggcctgcagaaacgcatctgcgccggcgccgtgaacggcgtgttcgggctcgccgaggtgctcgccgacggctaccaggccgggagccgcgccgccctcgacgccggctacaagaccgccgccggcagcctgccgaaggtccagccgcgccgcgaggaagcacccgtcgcgctgttccaggtgccccacgaaaagcccacggcgcgcgcgccgaagcagttcgtcgatccgcagaacgacgtcaccgccgccgccatcgaactggcctgccgcgagggcttcgagtccatcgagcacgtcaagcgctacaccgcgctgggcttcggcaccgaccagggcaagctgggcaacatcaacggcctggcgatcgccgcgcgggcccagggcaagagcatcgccgacaccggcaccaccatgttccgtccgaacttcaccccggtgaccttcggcgccgtcgccggccgccactgcgggcacctgttcgaaccggtgcgcttcaccgccctgcacgcctggcacgtgaagaacggcgccgagttcgaagacgtcggccagtggaagcggccgtggtacttcccgcgccgcggcgaggacatgcacgccgccgtggcccgcgaatgccgcgcggtgcgcgaggcggtcggcctgctcgacgcctcgaccctgggcaagatcgacatccagggcccggacgcgcgggagttcctcaaccgggtctacaccaacgcctggaccaagctcgacgtcggcaaggcgcgctacggcctgatgtgcaaggaagacgggatggtcttcgacgacggcgtgaccgcctgcctggccgacaaccacttcgtcatgaccaccaccaccggcggcgccgcccgcgtactggagtggctggagctgtaccaccagaccgaatggccggagctgaaggtgtacttcacctcggtcaccgaccactacgcgaccctcaccctgtccggcccgaacagccgcaagctgctcgccgaagtcaccgacatcgacctggacaaggatgccttccccttcatgacctggaaggaaggcaaggtcgccggggtgccggcgcgggtgttccgcatctccttcaccggcgagctgagctacgaggtgaacgtccaggccgactacgccatgggcgtgctcgaagcgctcgccgagcacggcgcgaagtacggcctgacgccctacggcaccgagaccatgcacgtcctgcgcgccgagaagggcttcatcatcgtcggccaggacaccgatgcctcggtcaccccggacgatctcaacatgggctgggcggtgggccgcagcaagccgttctcctggatcggctggcgcggcatgaaccgcgccgactgcctgcgcgaggatcgcaagcaactggtcggactcaggccgagcaacccgcaggaggtactgcccgaaggcgcgcaactggtgttcgacacccagcaggcgatcccgatgaagatggtcggccacgtcacctccagctacatgagcgccagcctcggccacggcttcgccctggcggtggtgaaaggcggcctcaagcgcatgggccagaaggtctacgcgccgctggcggacggccgcttcatcgaggcggagatctgctcctcggtgttctacgaccccaaaggggagcggcagaacgtggattga

SEQ ID NO: 322372 - DNA, 321 bp, Pseudomonas aeruginosa
atgctgaatatcttctgcccccactgcggcgaactgcgttccgaagaggaattccacgccaagggtcaggcccacatcccgcgcccgctcgacccgaacgcctgcagcgacgaggaatggggcgactacatgttcttccgcgacaacccgcgcggcctccatcacgagctgtgggtgcacgccgccggctgccgcaagtacttcaacgtcacccgacatacggtgacctacgagatcctcgagacctacctgatcggcgagcagcccagcgtcgtcgccgacggtgagaagaaagccgccgtacaaggggaaccggcatga

SEQ ID NO: 322373 - DNA, 1251 bp, Pseudomonas aeruginosa
atgcaacgctactccggcttcggcctgttaaagcattcactgagccatcacgagaactggcaacgcatgtggcgcacgcccacgccgaagccggtctacgacgtggtcatcgtcggcggcggcgggcacggcctggccaccgcctactacctggccaaggaacacggcatcagcaacgtggcggtagtcgagaaaggttggctgggcggcggcaacaccgcgcgcaacaccaccatcgtgcgctccaactacctgtgggacgagtccgcgctgctctacgaacacgcgatgaagctgtgggagggcctgtcccaggacctcaactacaacgtgatgttctcccagcgcggggtctacaacctctgccacaccctccaggacatgcgcgacggcgagcgccgggtcagcgccaaccgcctcaacggcgtcgacggcgaattgttgaacgcgcagcaggtggcggaggagattccctacctggactgcagcaagaacacccgctacccgatcatgggcgcgaccatccagcgtcgcggcggcgtcgcccgccatgacgcggtggcctggggcttcgcccgcgccgccgatgccctcggcgtggacctgatccagcagaccgaagtcaccggcttccgcaagcaggacggcgcggtgatcggcgtcgagaccaaccgcggcttcatcggcgcgcgccgtgtcggagtggtcaccgccggcaactccgggcacatggccaggctcgccggcttccgcctgccgctggagtcgcacccgttgcaggcgctggtctccgagccgctgaagccgatcatcgacagcgtgatcatgtccaacgccgtgcatggctacatcagccagtcggacaagggcgacctggtcatcggcgccggcatcgacggttacaacggctacggccagcgcggctcttacccggtgatcgagcacaccctgcaagccatcgtcgagatgttcccggtgctctcgcgggtacgcatgaaccgccagtggggcggcatcgtcgacaccaccccggacgcctgcccgatcatcggcaagactccggtgcagaacctgttcttcaactgcggctggggcaccggcggcttcaaggccactcccggctccggaaacgtcttcgccgccaccctggccaaaggcgaaccgcatccgctggccgcgcccttctccatcgaacgcttccacagcggtgcgctgatcgacgagcacggcgcggcggcagtggcgcactga

SEQ ID NO: 322374 - DNA, 612 bp, Pseudomonas aeruginosa
atgccacgtatccgctgcgagcgttgcgctcgccccgccagccattgcctctgcgcgctgattccctccttgccgtcgcgtacgcgggtgctggtcctgcagcaccccagcgaggtcgggcacgcgttgaataccgcaggattggccgtcctcggcttgtgcaatgcggagctgcgggttggcgagcgtttcgccgaggagacctggcgggtaccgggctaccgggcctgcttgctgtttcccggcgagcaggcgcgtgcgctggcagagatggccgccgaggccgccggcgagcccctcctgctggtggtgccggacggcacctggcgcaaggcgcgcaagctcctgcacctgaacccggccctggcggccctgccgcgggtgagcctggccgaaggcatggcgtcgcgttatcgcctgcgcaaggcgccgggagagggcgcgctgtcgaccatcgaagcaatcgctgcggcgctcgacgaactggaggcgccgcgtacccacgaagccttgctgaaacccttcgatgccctgatcgaggggcagatcgcggcgatgggcgaggacacctatcggcgcaaccatctcagccaggagcgccgccgccgatag

SEQ ID NO: 322375 - DNA, 336 bp, Pseudomonas aeruginosa
atggccagaccgcgcatctccgaactcttcgaacaggaaccctcgcgctggggcggccgtggcgacccctacctctggcaggaaatggccgggcaactggcggacgcgtcctggccggcttccgcagcggccctggaacacctgctcggcgagaccttcgagcgcctcagcggccatccgctggaatacgatgccttgatctacctcgcgcgccacgcccacggcggcatgtccagcggcatggtcagcccggagttctggcgcgaaacggcaatcccggaactgctcgaccgctatcggcggcggcgctcctggctgagatggttgcgccgatag

SEQ ID NO: 322376 - DNA, 1641 bp, Pseudomonas aeruginosa
atgcatggcatcaagggggtatccatgacgaatacgtcgaccctgacgctcgatggcgtctctttccagctgccggacggcagccttctgttttccgatctcgacgaaaccttcgacacccggcacaccgggctggtgggacgcaacggcgtcggcaagtcgctgctcgcgcgcctgctcgccggacacttgcagccgtccagcggcagtgtccggcgccaggggcgcgtgcgctacctggcgcagcagctcgaaccggccgactacccgaccgtcgccgatctggccggcgtccgcccatggctggaggcgctggcgcggatcgaggcgggtagcctcgacgccgccgactacgaatgcctgggcgagcgctgggacatccgccaacgcctggccgacgccctggccgccgaggggctcggccatctccgcgcggacaccccgagcgaacgcctgagcggcggcgaatgcatgcgcgtggcgctgctcggcgcattcctcgacgacgccgactttctcatcctcgacgaaccgagcaaccctctcgacgggccggcacgcgctttgctgcgggcgcgcctggcggcatgggacggcggcctgctgctggtcagccatgaccgcgaactgctggagggcatgcagcggatcgtcgagctgtcgaccctcggcctgcgcagctatggcggcggctattctttctacgcgcagagccgggaggaggcgcgcgaggccgccgaacgtcgcctggaccagcgtcgtctggagcgcaagcggcagaccctggccatgcgcgaacagcagcagcgccaggagcggcgccaggccagcggccggcgcgaaggcaagacggcgaaccaggcgaagatcctgctcggtgggttcagggaacgtagcgaggtcagcgccggcaagctgcgcaacgcccaccaggcggagcgcgagcgtctcgaccgcgaggtgcgcgaggctgcccgggaggtcgaggaggcgtcgccgctgctgctcgattcgcccgatgccgaactggcggcacagcgccggatcgtcgagttgaagggcgcggtcctgccgcatctgcgcgggccgttgcgcgaaatcgacctgctcctgagcggtccgcgacggctggcactggtcggcccgaacggcagcggcaagtcgaccctgctgcggctgctggccgggcaacgggcgccgctggcgggaacctgcgcggtgacggtgggcgccgcctatctcgaccagcggctgagcgtgctggaccacgggcgaggcgtgctggagcagttgctggaggtcaatcgcagtcgcggcgaaagctggctccgcacgcgcctggcgcaactcggcttgccggctgaacggctcgcccagccgtgcgcgacgctgagcggcggcgaacgcctgaaggcggccctggccctggtgctctacgccgaccggccggcgcagctgctactgctcgacgaaccggacaaccacctcgacctggctgcgcggcaggccctggaaagcatgctcgggcagtaccgtggggccttgctggtggtgtcccacgacccggtgtttctccgccacctggcgctggatggcgaactgcgggctactgccgcgggttggcgcctggaggaccgatga

SEQ ID NO: 322377 - DNA, 1590 bp, Pseudomonas aeruginosa
atgcccaactccccgcttccttccggccgcaggctgcccgcttgcgccttcgccgacatcggcgagccctacgccgtgttccaggctcccggcggcgcgctccttgcggtggccagcgcctttcatgggcaacacccgggccgacagctcgacgtctacgaacagagcctgcgcctgtaccgcggcggcgacctcgaatgcatcgccgtcctgccggacctgggctttccgctcaacgccatcgcctggcacccgagccggcccgtactggtgatcggcggcggacgctacgacggcggcgccttcttcgaaggcggtctgctggcctgggactacgcgagcggcaagacccaatcgctgctcgccgacaaccgcgaagtgctcgcctgcgacttcgaggacgacggccggcgcctgaccttcaccgtcgcccccagcgacgacctggaggaccgaccgttgttccgccagcgccattcgctagcctttccggtcgacgccccactggtgctggacgacctgcccggcacccgcctgcccttcgactgggccctctaccctgcctcgacacaacgcgaagcagcgctgccgatcctggaaaacctagccctgggcaaagatcggcggttcctgcatcgtccaccggtgtgggacctgtgctttctcgacggacaacgcctggccatcgcccgcgccaacccccggctcgagctctggaatctggccgacgacagcctgcgcagcttcgaactggccgaacggggccagtgcctgcaggtcttccataacgccacggacgacagcctgctggtcaatctgcaactcgggtatgccgcccagcgactgttcaaggtgccgctgacaccgggacaaccgctgctcctgagcgactgccgccatctgctggcgcaatccgcccaaggcggttttctcgcccgccagatcgccctcgagggcaaagacctggaagacctcgtgctcgacccggccggccggatcatccacaggcgccgtctcggacactacgacctgttcaaccaccatctgcgcatcgaccgtggcgaagccttcttctacctggccggcaatccgccggagcagcaccaggacaagggcctgttccgcctcgacccgcagaccttcaagacccgcgaagtgctacgcctggagcgccacccggagcacttcaacaacctgcacggctgcctgctgggcaatcgcctgctgctcaacgccaaggtctacaactcgccgcatcacgcctacggtacccagcgcctgacctgctacgacctggagagccgcggcacgctctggggcgcgaccctgtccgcccaggtcagcgccttcgcgccgttgcccggcggacaatggatcgcactggcgctggtcgatggtcaggtcgaggtacgcgacctcgccagcggcgaatgtcgctggcgctaccgcacggcagacgccataccgctgtgcctggcagtcagcgacaaactcctcgccatcggtttcagccacggcggagtcagcctcctgcaggtcgcggcggatggccagctcatcggtcctccaggcgccaacccgcggcagtag

SEQ ID NO: 322378 - DNA, 432 bp, Pseudomonas aeruginosa
atgcacattcgcaagcgcgtcgacgccgacaacacggcattggtcgacctgtgggaacgttccgtccgcgcgacccacgactttctcagtgaagcggacatcgtcgagctttacccacaggtccgcgacctgtacctgccggccgtcgaggtctgggtgctggtcgacgacgacggcgtggcccagggcttcatcggcctgaaccaggcgcatgtcgagatgctcttcgtcgaacccgggctgcgcggccggggtatcggccgacgcctgctcgatcatgcgcgggcgacctggccgcgcctgagcgtcgatgtcaacgagcagaacccgcaggcctgcggcttctatcgacactatgggttccgccagaccggccgctccgcgaccgactcggcggggcggccgttcccgctgctgcacatgagcctgtag

SEQ ID NO: 322379 - DNA, 2709 bp, Pseudomonas aeruginosa
atgaacggtatcccacccctgtcttcccgcgacgcccatgccagcccgccgcaacgggtgctggaacgattgcacagctccgccgccggcctggacgcggacgaagccgcccgccgcctggcggcgcacggctacaaccgattgcccgcgccgaaacgccaggggccgctgctgcgcttgctgcggcagttccacaacgtcctgctgtacatgatgctgttcgcctcgctggtcaccgcgctgctcggcttctgggtggacagtgcggtaatcctcctggcggtggtggtcaacgcgctgatcggtttcgtccaggagggcaaggcggccaacgcgctggacgccatccgcgacatgctttcgctgcatgccctggtcctgcgcgacggccagcgccaggcgctggacgccgaacgcctggtaccgggcgacgtggtgctgctggcctccggcgaccgggtgccggccgacctgcggctgttcgaaacgaagaacttccatgtcgacgagtcggccctgaccggcgagtcggtgccggtggagaagggctgcgtcgcggtggccatcgacgcgctgctcggcgaccgccgttgcatggcctattccggcaccctggtgaccagcggccaggcgcgcggagtggtggtcgccaccgccggggataccgaactgggccggatcggtacgctgttgcgcgaagtccgcaccctggccactccgctgctgcgacagatcgccagcttcagtagctggctggccctggcgatcctgctgctggccggcgccaccttcgtcctcggcaccctctggcagggccagccgatggtggacatgttcatgctggtggtggcgctgaccgcctcggcgattcccgagggactgccggcgatcatgacggtgatcctcgccctcggcgtacagcgcatggcccggcgcaacgccatcgtcagccgcctgccggcggtggagacgctgggttcggtgacggtgatctgctcggacaagaccggcaccctgacccgcaacgagatgaccgtgcagcgtatcgtcaccgccgaccaggtaatcgaggtcagcggcgccggttacgccccgctgggtggtttcagccacaacggcgaaggcctcgatcccgccggacgcgacgatctgcaggagatcggtcgcgcggcgctgttgtgcaacgaggcgcgcctgcaccaggagggcgaggcatggcaactggagggcgaccccaccgaaggcgcgctgctcagcctcggcctcaagctgggcctcgatccgcaggcgctggcggcggaacggccacgcagcgatgcgattccgttcgagtccgagcatcgcttcatggccaccctgcaccacgaccacgcaggccaggcgatggtctacctgaagggcgcgccggagcgcatcctcgacatgtgcgaggctgaacgggtgggcgactcggtgcggccgctggacccggactactggcggcgcctggccaccgacaccgccgctcgcggcctgcgcctgctggccatcgcccgacgggcgatgccggcggagcagcgcacgctggatttcgccgacgtggaacatggcttcaccctgctggccctggtgggcatcatcgaccctccgcgcgaggaagccgtggccgcggtcgccgaatgccaggcggcgggtatcgcggtgaagatgatcaccggcgaccacgtcgacaccgcgcgggcgatcggcgccatgctcgggatcggcatcgaccggccggcgctgaccggcgcggagatcgagttgctcgacgaccagcgcctgcgcgaagtgctgccgggcgtcgatgtgttcgcccgcgccagccctgagcacaagctgcgcctggtgcaggccctgcaggccagcggcgaggtggtggcgatgaccggcgacggggtcaacgatgcgccggcgctgaagcgcgccgacgtcggcgtagcgatgggcaacaagggcaccgaggcggccaaggaggcggccgaggtggtcctcgccgacgacaatttcgccaccatcgccaatgccgtgcgcgagggaagggcggtctacgacaacctgaagaaattcatcctcttcatgctgccgaccaacggtggcgaggcgctgatcgtgatcgccgcgatcctgttccagttgaccctgccgatgacaccggcgcagatcctctggatcaacatggtcacctccagcaccctgggcctggcgctggccttcgatccggccgagcgcggcctgatgcagcgtccgccgcgtccgccggcggagcccctgttgtcgctgttcttcgtctggcgggtgctgctggtctcgctgctgatgatggcgggcgccctgggcctgttcctctgggagctggagcatggcaccgggctggagagcgcgcggaccatggcggtgaacagcgtggtggtgtgcgagatgttctacctgctcaacagccggcatatctacgattcggtgctcagccgcgagggcctgttcggcaaccgccaggtcttgctggcgatcgccgcttgcgtggtgctgcaactgctctatacctacgcgccgccgttgcaggcgctgttcggctcggtcggcctggccccgggcgagtgggcgcgggtgctgctggccgggctcggcctgttctgcgtcgccgaactggaaaagtggctatgtcgccgggtccgtgcccggcaggcctga

SEQ ID NO: 322380 - DNA, 720 bp, Pseudomonas aeruginosa
atggccttggttgacggttttcttgagctggaacgctcaagtggaaaattggagtggagcgccatcctgcagaagatggcgagcgaccttggattctcgaagatcctgttcggcctgttgcctaaggacagccaggactacgagaacgccttcatcgtcggcaactacccggccgcctggcgcgagcattacgaccgggctggctacgcgcgggtcgacccgacggtcagtcactgtacccagagcgtactgccgattttctgggaaccgtccatctaccagacgcgaaagcagcacgagttcttcgaggaagcctcggccgccggcctggtgtatgggctgaccatgccgctgcatggtgctcgcggcgaactcggcgcgctgagcctcagcgtggaagcggaaaaccgggccgaggccaaccgtttcatggagtcggtcctgccgaccctgtggatgctcaaggactacgcactgcagagcggtgccggactggccttcgaacatccggtcagcaaaccggtggttctgaccagccgggagaaggaagtgttgcagtggtgcgccatcggcaagaccagttgggagatatcggttatctgcaactgctcggaagccaatgtgaacttccatatgggaaatattcggcggaagttcggtgtgacctcccgccgcgtagcggccattatggccgttaatttgggtcttattactctctga

SEQ ID NO: 322381 - DNA, 210 bp, Pseudomonas aeruginosa
atggccttccgggcaaaggccacccgcaccgcccgacgggaaagccaggaaactttctggagccgcttcgggataagccaatcctgcggcagtcgtttcgagaatggcgagaacctgcccttccctatatatctgcttttgcatttctatatagaagggcaaattaccgatcgccagctcgccgacctgagaggcaagatcagagagtaa

SEQ ID NO: 322382 - DNA, 606 bp, Pseudomonas aeruginosa
atgatcgtacaaattggtcggcgcgaagagttcgataaaaaactgctgggcgagatgcacaagttgcgtgctcaagtgttcaaggagcgcaaaggctgggacgttagtgtcatcgacgagatggaaatcgatggttatgacgcactcagtccttattacatgttgatccaggaagatactcctgaagcccaggttttcggttgctggcgaattctcgataccactggcccctacatgctgaagaacaccttcccggagcttctgcacggcaaggaagcgccttgctcgccgcacatctgggaactcagccgtttcgccatcaactctggacagaaaggctcgctgggcttttccgactgtacgctggaggcgatgcgcgcgctggcccgctacagcctgcagaacgacatccagacgctggtgacggtaaccaccgtaggcgtggagaagatgatgatccgtgccggcctggacgtatcgcgcttcggtccgcacctgaagatcggcatcgagcgcgcggtggccttgcgcatcgaactcaatgccaagacccagatcgcgctttacgggggagtgctggtggaacagcgactggcggtttcatga

SEQ ID NO: 322383 - DNA, 1953 bp, Pseudomonas aeruginosa
atgtcactgctcaagcaattgttcctcgccatctgcctgttcctcgtcgtcgccttcagcggcagcttcgtcagcagcgtggagaactcccgcgagcagttgcgcggccagttgcgctcccacgcccaggacgccgccaccgccctcggcctgtccctgacgccacacgtggacgacccggcgatggtgcaactgatggtcagctcgatcttcgacagcggctacttcgccagcatccgggtgatcgacatcaagagcggcaagccgctggtcgagcgcgtgcaggcgcatgccgagcgtacggtgcccggctggttcgaacgcctggtggatctccagccccagggtggcgacgcgctgatcatgcgcggctgggaacaggcggcgcgggtcgaggtggtcagccatccgcaattcgccctggcgcgcctgtgggacagcgccctgggcagcctctactggttgctggcctgcggcgcggcgagcctgctgcttggcggctggctgctgcgccgccaactgcgcccgctcgaccagatggtgcgccaggcccatgccatcagccggcgggaattcctcagcctgcccaggctgccgcgcacgccggagctgcgccgcgtggtgcaggcgatgaaccagatggtggagaaacttcgcacgctgttcgccgaggaggccgcgcgtagcgacaagctacgcgcccaggcctaccaggacagtctcaccggcctgcccaaccggcgcctgttcgacgcccgcctcaacgaacagctgggtgccggcgagcacgagcatgccgggcagctcctgctgctgcgcctgaacgacctgaacgggctcaaccagcgtctcggcgggcaacgcacggatgaattgatccaggcggtcgcccgcttgctggtcgactcctgcggccagcaagggcgcgccgactggctgctggcccgcagccgcggcggcgagttcgccgtgctggctcccggttgctcccgcgagcaggccgaacgcctggccgaggaactctgcgaaggcctggagaaccttgcccgcaccggtgccagcgatctcacgccggtcgcctatctcggtatcagcgcgttcgccgaaggcgactcgcccgcggatctcctggcccgtgccgaccaggccctggcccaggccgaaagccagcccgcccagccctgggcgagccaggacggcaccgcgctcgcggcgctcaacgatagccaggactggcacgactggatcgaccaggccctgacggagcgccgcctgctgctctatttccagccggtggtggactgcctggacacccagcgcgtcctccaccacaaggtcctcgcgcgtctgctcgacccgcaggccacggccatcgccgccgggcgcttcctgccctggatagaacgtttcggctgggccgcgcgcctggacctggcgatgctcgaacagagcctggagcacctgcggcgccatccacggccgctggcgctgagcctgtcggccgccagtgtccgcaatgcgcagacgtttgccccgctactggccctgctcaaggcgcatccgcaggaggcgcgccagctgaccctggaactggacgagcggcacctgccagccgcggccgaactggaacgcctcagccaggtcctgcgcgaactgggctgcggtctcggcctgcagcatttcggcggccgcttcagcctgatcggcaaccttacccatctggggttggcctacctcaagctggacggctgctacctgcacgccgtcgaccgggaaggcgacaagcggttgttcatcgaagcggtctatcgcaccacccacagcatcgatctaccgttgatcgcggaacaggtggaaaccctcggtgaactcgaagtactgcgggaaatgggtttgcgtggcgccatgggacgcctgttcggcagcccggcgccctggtccggggatgcctga

SEQ ID NO: 322384 - DNA, 714 bp, Pseudomonas aeruginosa
atgtccccaacccccggcgcctgccggccctgccccagggcctacgccccctggctgctgtcgctggcggcgacattgctgctggcagtcggcgcggcgctggcgcagtgggacctggagtcgatactgagccgtgccgagcagcgctacggcgagctgggcgcggcgaaatcacgcctgggcgactggggccgcctgctcgaacagggcggcacgctcgacgaagcggccaagctgcgcgcggtcaacgacttcttcaaccggtcgctgcgtttcaccgacgacatcgagatctggcaacaggaagactattgggcgactccggtcgaggcgctggtcaagggcgccgccgactgcgaggactacgccatcgccaagtacgtgaccctgcgtcgcctcggcgtcgccagcgacaagctgcgcatcacctacgtcaaggccctgcgcctgaaccaggcgcacatggtgctgacctggtacgccagcccgggcgccgacccactggtgctggacaacctgatcggcgagatccgccccgcttcgcaacgtgacgacctgttgccggtgtacgccttcaatgccgagggcctctggctgcccggcgccgacggcggacgccggaccggcgacagcaagaagctgtcgcgctggcaggacctgctgaccaagatgcgcgccgaaggcctcgacctcgacgcacccaaggaggattga

SEQ ID NO: 322385 - DNA, 1158 bp, Pseudomonas aeruginosa
atgcaggcgttgcgcagtggtgggggacgggtcctggtgggcgtgctggcggcgggcctggtcgccttcggcggttgggcatggctcggcggcgacgccggggcgaaggcggcgcccgcgccggccagggtcccggtgaacgtggcgcgggtggagcggcgcgacgtcgagcaacaggtcagcggcatcggcacggtgacttcgttgcacaacgtggtgatccgcacccagatcgacggccagttgacccgcctgctggtgagcgaagggcagatggtcgaggcgggcgagttgctggcgaccatcgatgaccgcgccgtcgtcgccgcgctggagcaggcgcaggcctccagggcgagcaaccaggcccagctgaaatccgccgagcaggacctgcaacgctaccgcagcctgtatgccgagcgtgcggtgtcacgccaactgctggaccagcagcaggcgacggtcgaccagttgcgcgcgaccctgaaggccaacgatgccaccatcaacgccgagcgggtgcgcctgtcctacacccggatcacctcgccggtatccggcaaggtcggtatccgcaacgtcgatgtcggcaacctggtgcgggtcggcgacagtctcggcctgttcagcgtgacccagatcgcaccgatctccgtagtcttctccctgcaacaggaacagttgccccagttgcaggcgctgctcggcggcgaggcggcggtgcgcgcctacagccgcgacggcgggagcgcgctgggcgagggccggttgctgaccatcgacaaccagatcgacagttccaccggtaccatccgcgtgcgcgcctccttcgataaccgccaggcccggctctggcccgggcagttcgtcgcggtgagcctgcacaccggggtccggcgcgaccagttggtgctgtcgagcaaggcggtgcgccgcggcctggagggtaatttcgtctaccgggtcgccgccgaccgggtcgaggcggtgccagtgcgggtgctccaggacatcgacggcctcagtgtggtggaaggcctggccagcggtgaccaggtggtggtggacggccactcgcggctgatgcccggcgccctggtcgatatccaggagccgcgcccgagcctggctcaggcggcggagcggcagccgtga

SEQ ID NO: 322386 - DNA, 3108 bp, Pseudomonas aeruginosa
atgccgcgcgccgggatttccggctggtgcgtacggcacccgatcgccaccgcgctgctgaccctggcctcgctgctgctggggctgctggcgttcctccggctcggtgtggcgccgttgccggaggcggacttcccgaccatccagatcaacgccttgctgcccggcggtagcccggaaaccatggcctcgtcggtggccacccccttggaagtgcagttcagcgcgattcccgggatcaccgagatgacttccagcagcgccctgggcaccaccaccctgaccctgcagttcagcctcgacaagagcatcgacgtcgccgcccaggaggtccaggcggcgatcaacgccgcggccgggcggctgccggtggacatgccgaacctgccgacctggcgcaaggtcaacccggcggacagcccgatcatgatcctgcgggtcaactcggagatgatgccgctgatcgaactcagcgattacgccgagaccatcctcgcccgccagctcagccaggtgaacggcgtggggcagatcttcgtggtcggccagcagcgcccggcgatccgcatccaggcccagccggaaaagctcgccgcctaccagctgaccctggccgacctgcgccagtcgttgcagtcggccagcgtcaacctggccaagggcgcgctctacggcgaggggcgggtgtcgaccctcgcggccaacgaccagttgttcaacgccagcgactatgacgacctggtggtcgcctaccgccagggcgcgccggtgttcctcaaggacgtggcgcggatcgtctcggcgcccgaggacgactacgtgcaggcctggccgaacggtgtgcccggggtggcactggtgatcctccgccagcctggggcgaacatcgtcgataccgccgacgcgatccaggccgcattgccgcgcctgcgcgagatgctcccggcgaccatcgaggtagacgtgctcaacgatcgcacccggaccatccgctcgtcgctgcacgaggtcgaactgaccctgctgctgaccattggcctggtagtgctggtgatgggcctgttcctccgccagctgtcggcgaccctgatcgtcgccacggtgctggcggtgtccctgagcgccagcttcgcggcgatgtacgtgctcggcttcaccctcaacaacctgaccctggtggcgctgatcatcgccgtcggcttcatcgtcgacgacgccatcgtggtcgtggagaacatccaccgacacctggaagcgggcgcctcgaaggtcgaggcggcgctcaagggcgcggcggagatcggctttaccgtgatttccatcagcttctcgctgatcgccgcgttcattcccctgctgttcatgggcgggatcgtcggccggctgttccgcgaattcgcggtcagcgtgacggtggcgatcctgatctcggtgctcgcttcgctgaccctggcgccgatgctggcttcgcgcttcatgccggcattgcggcatgccgacgcgccgagaaagggcttcgccgaatggctgaccggcggatacgagcgcggcctgcgctgggcgctcgggcaccagcggctgatgctggtcggcttcgcctttaccgtgctggtggcggtggccggctacgtcgggattcccaagggtttcttccccttgcaggacaccgccttcgtcttcggcacgagccaggctgccgaggatatctcctacgacgacatggtcgccaagcaccggcaactggccgagatcatcgccagcgacccggcggtgcagagctacaaccatgcggtgggcgtcaccggcggtagccagagcctggccaacggacgtttctggatcgtcctcaaggaccgtggcgagcgcgatgtctcggtcggtgagttcatcgaccggctgcgcccgcaactggccaaggtgccgggagtcatgctctacctgcgcgcggcacaggacatcaacctcagttccggaccctcgcggacccaataccagtacgccctgcgcagcagcgacagcacccagctggcgctctgggcgcaacgcctcaccgagcgcctgaagcaggtgccggggctgatggatgtgtccaacgacctgcaggtcggcgccagcgtcaccgcgctggacatcgaccgggtggccgcggcgcgtttcggcctcagcgccgaggatgtcagccagaccctctacgacgccttcggccagcgccaggtcggcgagtaccagaccgaggtcaaccagtacaaggtggtcctcgaactcgatgcgcgccagcgcggccgcgcggaaagcctggactggttctacctgcgctcgccgctgagcggcgagatggtcccgctgtcggccatcgccaaggtcgcggcgccgcgctccgggccgctgcagatcaaccacaacggcatgttcccggcggtcaacctgtccttcaacctggctgccggggtgtccctcggcgaggcggtgcaggcggtgcagcgcgcccaggaggagatcggcatgccctcgaccattatcggcgtgttccagggcgcggcgcaggccttccagagctcgctggcctcgcaaccgctgctgatcctcgccgcgctgatcgcggtgtacatcatcctcggggtgctctacgagagtttcgtacatccgctgacgatcctttcgaccctgccctcggcggggatcggcgcggtgttcctgctctgggcctggggccaggacttctcgatcatggcgctgatcggcatcgtgctgctgatcggtatcgtcaagaagaacggcatcctcatggtcgacttcgccatcgtcgcccagcgcgagcagggcatgagcgcggagcaggcgatctaccaggcctgcctgacccgtttccggccgatcatgatgaccaccctggccgcgctgctgggcgcgatacccctgatgatcggcttcggcaccggttccgagctgcgccagcctctgggcatcgcggtggtcggcgggctgctggtgagccaggtgttgaccctgttcagcacgccggtggtatacctggccctggagcggctgttccaccggcgcggggcgacgacctcggacggcggaaccgctggggcgacggcgacatga

SEQ ID NO: 322387 - DNA, 690 bp, Pseudomonas aeruginosa
atgcgggtactgattgtcgaggacgaggcgaagacggcggactacctgaaccgtggcctcagcgaacaggggttcaccgtggacctggcggacaacggcatcgacggtcgccacctggcgctccatggcgagtacgacgtgatcgtgctcgacgtgatgctgccgggcgtcgacggctacggcgttctgcgggcgttgcgcgagcggcggcagaccccggtgatcatgctcaccgcgcgcgagcgcgtggaagaccgggtgcgcgggctgcgcgagggcgccgacgactacctgatcaagccgttctccttcctcgaactggtcgcccgcctgcaggccctgacccggcgcggcggcaaccatgaaagccattcgcagatgcgcatcgccgacctgtccatcgacctgctcagccgcaaggtcttccgtggcaacacccgtctggagctgactgccaaggagtacgcgctgctctgcgtgctggcccagcgcagcggcgagatcctgtcgaagacggcgatcgccgaactggtctgggacatcaacttcgataccgacaccaatgtcgtggaggtggcgatcaagcgcctgcgcgccaagctcgatggtccgttcgagaacaagctgctgcataccatccggggcatgggctacgtcctggagaaccgtgcgctggcggagtcgggctga

SEQ ID NO: 322388 - DNA, 1416 bp, Pseudomonas aeruginosa
atgtccttgtcgacccgcctggcgggaatgttcgccggcgccgcggtggtgatcttcgccctcatcggcaccatgctctattgcatcctcgaccgccagaccgagcgcctgcagcagggcgaggtggacgtgcgcttcaacatggtctcgcggatgctcgaccatcccgacctggccgagcgctggccgcacctgcagggcaagctggacaacctgagccaggagtacgagctgatccgtttctggatcgacagcgacgacccgcgctatcactacgggcgcttcagcgaaccggtgcagcggctgatcgccgatggcgccggccgctacgaactggagttgccggagcaccggtacgcgctgactgcgcgggtcggcgtgttgccggcgcgcgaggggcggccgcggctgacctacgtcaccgccatcgatagcgcggcgttccatgaggcgcggacctccaccctgaaatggctgctcggcctgtccgccctcggtgtgctgctggcctcgttgcttggccactggatcgcccgcctgggcctgtggccggtgcatcggctgtccgaggaggcccggcggatcagcccgcggcagttgtcgcagcgcttgcagctctcgccgctgccggccgagctgcgcgagctggtgggagcgttcaacggcgccctggaccgcctggagcaggcctacgtgcgcctggagtcgttcaatgccgacgtcgcccacgagctgcgcacgccattgaccaacctgatcggccagacccaggtggcgttgtcccgcgaacgcagcggcgaacattacgaagaggtcctgcaatccaacctggaggagctggagcggctgcgggcgatcgtcaacgacatgctgttcctcgcccgcgccgaccagggacgcctggcctgcgagcgcgaggaaacctcgctggccggcgagatcgccaccacggtggatttcctcgaggtgatcttcgacgaggccggggtcggtatcgaggtgcgcggcgaggcccgcgcgctggtcgagcgcgccctgttccagcgggcggtgaccaacctgctgtacaacgccgcccagcacaccgccgccggcggcacgctgcgggtcggcgtcgagcggcgcggcgacgaagtgcgggtggcggtgagcaaccccggcgtgccgatcgccgacgagcaccgcaggcacctgttcgaacgcttctatcgggtcgacgcggcgcgcagcaacagcgaggccaaccacggcctcggcctgtccatcgtcaaggcggtggcgagcatgcacggcggttcggtgttcgtcgacagcgcggacggctggaacaccttcggcttcaccgtgctgagccccgagcggcgcgggcccggcgaccgcttgccgctgggcgagggcgatccggcgctgtcctga

SEQ ID NO: 322389 - DNA, 408 bp, Pseudomonas aeruginosa
gtggcgcagcgggaaattcgcccgagcgctcgtgcctgggtgcgctatagcctccaggccgtgggtttcctaagcgtagccctgggcgtgatcggcatcttcctgccggtgctgccgaccacgcctttcttgctcctcgcggcggcctgcttcatgcgcagctcgccgcgcttctaccactggctggtcggccatccacggctcggcccgtggatccgcgactatctcgacggcgaaggcatcccgctcaagggcaaggtctacgccatcggcctgatgtgggccagcatcgccctttcctgctacctggtccgacgcccctgggcccagggcttcatgctgaccagcgcggtactggtcagcatctatatcctccgccagaagacccgcccgccgcacgacgcctga

SEQ ID NO: 322390 - DNA, 588 bp, Pseudomonas aeruginosa
atgtccttcgccgaaaaactgtcccgtctgcaagccttcctcgatgccgatgacctgcacgaagaagcgctggactacgtggcgacccacggctacctgaccgccctctccatctgcccggagcaggtgccggagcgggagtggatcgacgccctgttcgccgaaccgccgcactaccgcagcgatgaggagcgccaggagatcgagacttccctcgagcagctcaaggcgcacatcacccgcgtgctggccagcgacgaagacctcgagctgccctgcgacctcgacctcggcgacgagccggacgactccgacctgcgcggctggtgcatcggcttcatggaaggcgtgttccttcgcgaggaagtctggttcgagcaggccgaggaggaagtcagcgagctgctgctgcctatcatggtcggctccggcctgttcgacgagcagcccgagttcgacgagatcgcccgcgaccgccacctggtggacgacatggtcgcgcagattcccgacctgctgaccaacctgttcctgctctgccaggcgccggaagaaaagcccgccctgctcaagccgcgcacgcactaa

SEQ ID NO: 322391 - DNA, 1284 bp, Pseudomonas aeruginosa
atggccgtcgcccctggtgtgttgttgccgccgacgcctgatgtaaagcccaaggccgctgcgccgaagagccagcagaaaacgcctgagcccagtaacgacaagacttccagcttctccgacatgtatgccaaggagaccgcgaagaagcccgccgagcgcgccgacggtcccgcgaagggttcgcgggacaagccacgggacgccggcaaggacgccgtcgaagcgcagccgacggatgccgccaggcagccggccgttgccgaagacggcaagcctttgccggccgacggccaggccaaggccgacggcgaagataaagtcgaaacgccggtcgatccgctgcaattgctcggcctcggcggtgccgtaccgttgctcgacgagaatacccaggcgactttgctgccaccggccgtgccgacggccagcagtgctccggccagccttaccgaagccagcagcgacccgaccctggtcaagctcaacggcgtgccggcggtgaacatggccctggagcagggcgcccaggacgccgcgcagacggcgaaaggcgggccggcgaagagcgccgatccccgccaggcgaacctcggcgatgcccttgccggcctgacctcggattccttgaccaaggccgtcgacggcaaggcgctcgaggcccagttgcagcagaccgccgagccggccgtcgccagcgccgcctccgagagcctgctggagagcaaggcggaaccccgcggtgaacctttcgcggccaagctcaacgggctgacccaggccatggcgcaacaggccctgaccaaccgtccggtgaacggcacggtgcccggccagccggtggcgatgcagcagaacggctggagcgaggcggtggtggaccgggtgatgtggatgtccagccagaacctgaagtcggcggagatccagctcgaccccgccgagctgggacgcctggacgtgcgcatccacatgaccgccgaccagacccaggtgaccttcgccagtcccaacgccggcgttcgcgacgccctggaaagccagatgcaccggctgcgcgacatgttcagccagcagggcatgaaccagctcgacgtgaacgtctccgaccagtcgctggcgcggggctggcagggccagcagcagggcgagggcggatcggcgcgcggacgcggcttggccggcgaggcctcgggcgatgaggaaaccctcgccggagtcagcgagatccgcagccggccgggtgcgtcggcggcgcgcggtctggtcgactactacgcctga

SEQ ID NO: 322392 - DNA, 522 bp, Pseudomonas aeruginosa
atggctaagaaagaggcgacacccgccgacgcgggggctccgagcggcggcaagagcaagctgaagctgatcctgctgatcgtggtcggcctgctgctggcgatcggcctgtcggtgggcggcacctggttcttcctcagcaagtcgctgaaggccgagaagaccgaggaagtcgccagcgaggcggcgaagccgggcaagcagccggcgctctacgagatcctggcgccggccttcgtcgtcaacttcaaccagaacggccggcagcgctacatgcaggtcggcgtcgcgttgatggggcgcgacaaggcgcagatggacgcattgcgcgagcacatgccgctggttcgcaataaactggtgatgctgttctcgagtcagagtttcgactcgctggtgactccggtgggcaaggaaatgctccgccagcaggcgaccgccggattgcaggaactggccaagaaggaaaccggccaactggctatcgaacaagtgttgttcaccaatttcgtgctgcagtag

SEQ ID NO: 322393 - DNA, 972 bp, Pseudomonas aeruginosa
atggccgtgcaagatctgctttcccaggatgaaatcgacgcgctgttgcacggcgtcgacgatggcctggtggaaaccgaagtcgaggcgacgccgggatcggtcaagtcctatgacctgaccagccaggaccgcatcgtccggggccgcatgccgaccctggagatgatcaacgagcgtttcgcccgctacacccgcatcagcatgttcaacctgctgcgccgttcggccgacgtcgcggtcggcggcgtgcaggtgatgaagttcggcgagtacgtgcactcgctgtacgttcccaccagcctcaacctggtgaagatgaagccgctgcgcggcaccgcgctgttcatcctcgacgccaagctggtgttcaagctggtggacaacttcttcggcggcgacggccgccacgccaagatcgagggccgcgagttcaccccgaccgaactgcgggtggtgcggatggtgctggagcaggccttcgtcgatctgaaggaagcctggcaggcggtgctggagatgaacttcgagtacgtcaactcggaggtcaacccggccatggccaacatcgtcagtcccagcgaggtggtggtggtctccaccttccacatcgaactggacggcggtggcggcgacctgcacatcaccatgccctactcgatgatcgagccgatccgcgagatgctcgacgccggtttccagtccgaccacgacgaccaggacgagcgctggatcaaggccctgcgcgaggacgtgctggacgtccaggtaccgctcggcgccaccgtggtccgccgccagctcaagctgcgcgacatcctgcacatgcagccgggcgacgtgatcccggtggagatgccggaacacatggtgatgcgcgccaacggcgtgcccgccttcaaggtcaagctgggcgcccacaagggcaacctggcgctacagattctcgaagcggtcgagcgctcgcgctga

SEQ ID NO: 322394 - DNA, 474 bp, Pseudomonas aeruginosa
atggcagacgaagaaaaagtgaccaccgaggaacaggcactggccgacgagtgggcggcggcgctggccgaggcgggcgacgccagccaggacgacatcgatgcgctgatggcccagggcggcgcgactcccgtggcggagccgagtaccccgcgggcgccgatggaagagttcggcgcttcgccgaaggcaccgaccatttccggcctggaggggcccaacctggatgtgatcctggacatcccggtgaccatttccatggaggtcgggcataccgacatcagcatccgcaacctgctgcagctcaaccaggggtcggtgatcgaactcgatcgcctggccggcgagccgctggacgtactggtcaacggcaccctgatcgcccacggcgaggtggtggtagtgaacgagaagttcggcatccgcctgaccgacgtgatcagtcccagcgaacgcatcaagaagctgcgctga

SEQ ID NO: 322395 - DNA, 453 bp, Pseudomonas aeruginosa
atgcgtcgctacctgttcgccggcttcctgccggcactcgcctcgctgagcgcgccgctgtgcgccgccgaggggacgacgggtgccgccgcgccgacggtgggcgccgcttccggcgccgccgcgcaactggcccaactggtgctcggcctgggcctggtgatcggcctgatcttcctgctcgcctggctggtgcgccgggtgcaacaggccggtccgcgaggcaaccgcttgatccgcaccctcgccagccagccgctgggtccgcgcgaccggctggtgctggtgcaggtcggtgaggagcagatcctgctcggcctgacgcccggccggatcacgccgttgcacgtgctcaaggagccggtacacctgccggacggcgagccggccacgccggaattcgcccagcgcctgctggagctgctgaacaaggaccccaagggtaagccatga

SEQ ID NO: 322396 - DNA, 768 bp, Pseudomonas aeruginosa
atgactccgcgcatctccctggccggcgcgctcgccgcgctctgcctcctgctgctggcgccgtggccggcgctggccgccgacccgacatcgatctcggcgatcaccgtgaccaccaacggccagggccagcaggagtattcggtcagcctgcagatcctgctgatcatgaccgcgctgagcttcatcccggcgttcgtcatgctgatgaccagcttcacccggatcatcatcgtcttctccatcctgcgccaggcgctgggcctgcaatcgacgccgtcgaaccaggtgctggtggggctggcgctgttcctgaccatgttcgtcatggccccggtattcgacaagatcaacagccaggccctgcagccctacctgaacgagcagattcccgcccaggaagccctgcaaaaggccgaggtaccgctgaaggcgttcatgctggcgcagactcgcacctccgacctggagctgttcgtgcgcctgtccaagcgcaccgacatcggcagcccggaggcgacgccgctgaccatcctggtcccggccttcgtcacgtccgagctgaagaccgcgttccagatcggcttcatgatcttcatcccgttcctgatcatcgacctggtggtgtccagcgtgctgatggcgatgggcatgatgatgctgtcgccgctgatcatttccctgccgttcaagatcatgctgttcgtcctggtggatggctgggcgctgatcatcgggacgctggcgggcagtttcggcaccgtctag

SEQ ID NO: 322397 - DNA, 270 bp, Pseudomonas aeruginosa
atgacccctgaggtggcactcgacctgttccgcgaggcgttgtggctgacggcgatgatcgtcggcgtgctggtggttccgagcctgctggtcggtctagtggtggcgatgttccaggccgccacccagatcaacgaacagaccctgagcttcctgccgcgcctgatggtgatcctgctcaccctgatcgtgctgggcccctggctgctgcggcagctgatggaatacacccagacgctgatcggcaacatcccgctgctgatcggctga

SEQ ID NO: 322398 - DNA, 777 bp, Pseudomonas aeruginosa
atgctggagctgaccaacgcacagatcggcggctggatcgccagcttcgtgctgccgctgttccgggtcgcggcgctgctgatgaccatgccggtgatcggcacccagctggtgccggtgcgggtgcgcctctacctggcgctgggcgtctgcgtggtgctggtgccgaacctgccgccgatgccgcaggtggacgcgctgagcatgaaggccatgctgctgatcggcgagcagatcctggtcggcgccttgctcggcttttccctgcagttgctgttccacgccttcgtgatcgccgggcagatcatctcgatgcagatgggcctgggcttcgcttccatggtcgacccggccaacggcgtctcggtgccggtgctcggccagttcttcaccatgctggtgacgctgctgttcctggcgatgaacggccacctggtagtgttcgaggtgatcgccgagagcttcgtcaccctgccggtgggcgagggcctgagcggcaaccatttctggatcatcgccggcaagctcggctgggtgatgggcgcggcgctgctgctggcgctgccggcgatcaccgcgctgctggtggtgaacctcgccttcggcgccatgacccgcgcggcgccgcaactgaacatcttctccatcggctttccgttgaccctggtgctgggcctggtgatcctctggatcggcaccgccgacctgctcagccagtaccaggtgctggccggcgaggccctgcaattcctccgtgaactggtgcgggcgaaatag

SEQ ID NO: 322399 - DNA, 1137 bp, Pseudomonas aeruginosa
atggccgagagcgagagcgggcaggacaagacagaggaacccacggagaaacgccgccgcgaggcgcgcgagaaagggcagttgccgcgttcgcgggagctgaacaccctggccatcctcatggccggcgccggcggcctgctgatctacggcgccgacctggcgggcgccctgttgcgcctgatgcgcagcaatttcgagctgtcccgggaaaccgcgatgaataccgagagcatgctgcaattgctcggcgcttcggcctacctggcggcccaggggctgtggccgatcctgctgatgctgctggtggcggcgatcgtcgggccgatcgccctcggcggctggctgttctcgatggacgccctgcaacccaagttcagccggctcaacccgctgtcggggctgaagcggatgttttccgccaagtcgctgctcgaactgagcaaggcgctgatcaagttcctggtggtgctggcggtggccctgctggtgctctccgccgaccgcgacgccctcctggcgctggcgcaccagccgctcgagcaggcgatcctgcacagcgtgtgggtggtcggctggagcgccttctggatggcctgcagcctgctgctgatcgccgcggtggacgtgccctaccagatctgggacaaccgccagaagctgctgatgaccaagcaggaagtccgcgacgaatacaaggactccgagggcaagcccgaggtcaagtcgaagatccgccagatgcagcgcgagatggcgcagagacggatgatggcggcggtgccggaggccgacgtggtgatcaccaacccgacccacttcgccgtagccctgaagtacgacccggcgggcggcggggcgccgctgctgctggccaaaggcaacgatttcctggccctgaagatccgcgaggtggcccaggagcacaaggtgatggtcatggagtcgccggcgctggcgcgagcggtgtactactccaccgagctggaccaggagattcccgccgggctctatctcgccgtggcccaggtgctggcctatgtctaccagctcaagcagtaccaggccggcaagggcaagcggccgagcccgttgaaggacctgccgatcccgccggacctgcgtcgcgacgagtga

SEQ ID NO: 322400 - DNA, 1278 bp, Pseudomonas aeruginosa
atggatcgaaccttgtctgatcgtattttcccgcctgtcctcctgttgctcgccctggcctggctgctgccctggatgcctgcgcacgccgaagcgccggcggaatgggtcgccttgcccctgtcggagcggctggtggatgccacccacacgctggacgaggcgacgcgccaacgcctggtggagaagctcgaggcgctggagcggcgacgcggtgcgcagatcgcggtggtgatgctgccgactaccggtaccctcgatatcgaagccttctccgacaagttgttccaggcctggaagctcggccgcaaggcggtcgacgacggtctgctgctggtggtggccaaggatgaccggcgcatgcgcatcgaggtcggctacggcctggagggtgcggtgcccgatgtggtcgccggacggatcattcgcgagcggatggccccggcatttcgcgagggtgactacgccggcgggatcgaggccgcggtggacgagctgatccgcctggtcgacggcgaaacgctgccggcggccgcgtcgtcgggtgcgccgaaagtctcgctggggcaattgccggcggaagcctgggcgctgctggtcgccttcatctacggatcgttggccggagtgctgttgagtgcccgggcgctgcgctggccctggctgctcggcggggcgctgctctgctggctgctgggcacgctggccggcgcttccggcgaatggatgagcgtgctgctggtcgctccgctgtgcatgctggtcggcggcgcgaccttcggcgcgctgtggacggtgcgcccggccttctacctggtgatcggcgtactggtctatgtagccctgctcgggctggcggcgcattggttcagcgcggtgtccttcatctacggcctgctgtggccggccggggtgctgatgctggcggttctctgctggtcgaactaccgcctgatgcgctcgctatggcgcgagcggcggaaaagtttccaccgccgactgtgggcgttgctggcggcctacctgctgctcggattgctgtccggtggcctggacgcaccgctggtctggctggccctgctaccgctccagctcatgctcgggctgctggtgttcggccaggtacgcctgagtggggggggtggaggctcgtcgggaagctccggcggcggttcctcctcctcttcctcctcttcctcctcttcctcctcgtcgtccggcggcttttccgggggcggtggttccagcggcggaggcggtgcctcgggcagttggtaa

SEQ ID NO: 322401 - DNA, 1344 bp, Pseudomonas aeruginosa
atgtctacaatcacgcgttatctcgccatgcttcgcctgttcggcatgctgctctgcgccgccgcgattccctccgttgccaccgcgacggtgccggtcaccgtcgcggtggcagcgtccgatgtcgaggaggaggccgtggaggcatcggcggtcggcgccgaggccgaggcagcgcgcgatgcgggctacgagtccgcggaggttccagcgctggcgcggcgggtgaccgaccttaccgcgaccctcgacgccgccgagcgtgcccgcctggaagcttcgctggccgcgctggaggcccggaagggtgcccaggtagcgatcctgatgctgcccagcacctatccggacagcatcgaggcctatgcgacgcgggtcttcgaggcgtggaagctggggcgcaaggggatcgatgacggcgtcctggtgctggtggcgaaggacgaccggcgcatgcgcatcgaagtcggctatggcctggaaggaacgatcaccgacatcgatgccgggcggatcatccgcgaatacatgacccctgcgttccgtcagcaagactacgccggcggcctggaagcggcggcgcagcgcctggtacgactgatcgacggcgaggcgttgccgccgccgccgcgcgacccgctggagcccggcgcggtacggcagaccctggctatcgcattcctgctcggcgctctcggcggggtggcgctgctggtacgtccgcgcgcctggtactggaccctgggggcggtagtggcgctcgctgcggcgttggcactggggcggcactggccggcaggggcgatggtggcgctggcggagatggtggcggtcctgggcgtcggcttcggcgcgttgctcaagtattcgcgcggtgcccgctggttcttcgccattcttgtgctctatgcgctggggctgttctgggcctacggccgttatggcctgccggtgctccattacggattggccgtgccgctttcgctgggactgaccctgctgatgctggccggtgcctggcaggggctgcgcagaggacggcgctgggcctacctgccgggcctgctcggcctgctgctgaccctggccctggagtgcctgctgttgctggtggacgacccgctgaacagcatcgaggcgctgatcatcctgcccgccgcttgcctgccgctgctcatcggttgcaatttcagcgccggcggctcggggggagggcgtcgacgcggcggcgattacgctagctcatcgggttcctcgtcgtccagttcgtccagttcgtcttcggactcgttctccggcggcggaggctcgagtggcggcggtggcgcctccggtagttggtga

SEQ ID NO: 322402 - DNA, 2124 bp, Pseudomonas aeruginosa
gtggatcgcacgcaactgatcagcaatgtgcgcagcaacctggcgggactggggcgcggcagcctcggcgtgccggtcctgctgctggccatgctggcgatgatgaccctgccgatcccgccattcctgctggacgtgctgttcaccttcaacatcgccctgtccatcgtcgtcctgctggtctgcgtgtacgccctgcggccgctggacttcgccgtgttcccgaccatcctgctggtggcgaccctgttgcgcctggcgctgaacgttgcctcgacccgcgtggtgctgctccacggccacgacggccatggcgccgcaggcaaggtgatccaggccttcggcgaagtggtgatcggcggcaactacgtggtcggggtggtggtgttcgcgatcctcatgatcatcaacttcgtggtggtgaccaagggcgccgggcggatttccgaagtcagcgcgcgcttcaccctggatgccatgcccggcaagcagatggccatcgacgccgacctcaacgccggcctgatcgagcaggaggaagccaagaagcgccgcagcgaggtggcccaggaggccgacttctacggttcgatggacggtgccagcaagttcgtccgcggcgacgccatcgccggcctgctgattctcttcatcaacctgatcggcggcgtcgccatcggcatgatccagcattcgatgtccttcggcgatgccggcaaggtctacgccctgctgaccatcggtgacggcctggtggcacaactgccgtcgctgctgctgtcgaccgcggcggcgatcatggtgacgcgggtctccagttccgaggacatgggccagcaggtcaaccggcagatgttcgcctcgcccaaggcgctggcgatttccgcggcgatcctgatcgccatgggcgccgtgccgggcatgccgcatgtttccttcatcggcctcggcgccctggccggcgctgccgcctactggatctggcaccggcagaacaaggccaagcaggtcgccgagcaggaggtgcagcgccagcaggagctgctgccggcgcagcgcgcccaggaggtcaaggaactgggttgggacgacgtcaccccggtggacatggtcggcctggaagtcggctaccggctgatcccgctggtcgaccgcaaccagggcgggcaactgctggcgcggatcaagggcgtacgcaagaagctgtcccaggagctgggcttcctgatgccctcggtgcacatccgcgacaacctcgacctgctgcccaacgcctaccgtctgaccctgatgggggtcagcgtggccgaagcggagatctatcccgatcgcgagctggcgatcaaccccggccaggtattcggcagcctcaacggcatcgccggcaaggacccggccttcggcctggaggcggtatggatcgagcccggccagcgcgaccaggcgcagtcgctgggctacaccgtggtggatgcgagcaccgtggtcgccactcacctgaaccaggtgctgcacaagcacgcccacgagctgctgggccatgaagaagtgcaacagctcctgcaattgctcgcgcgcagctcgccgaagctggcggaagagctggtgccggggctgatttccctgtccaccctgctcaaggtcctgcaggcgctgctccaggagcaggtgccggtgcgcgacatccgtaccatcgccgaggccatcgccaacgtcgctccacggagtcaagatcccggcgcgatggtcgccgcggttcgcgtcgcgttgtcccgcgcaatcgtgcaaagcattgtcgggcttgagccggagctgcctgtgatcacgctcgagccgaggttggaacagattttgctgaacagcatgcagaaggccggacaaggctccgaggacggcatgttgctggagccggggatggccgagaagctgcaacgctcgctgatcgagagcgcgcaacgccaggagatgctcggtaagccggcgatcctgctggttgccggaccgatccgctcgatgatgtcgcgcttcgcgcggatggcggtgcccagcatgcatgtgctggcctaccaggaaatcccggacaacaagcaagtcaccatcgtcgcgacggtgggacagaactga

SEQ ID NO: 322403 - DNA, 1290 bp, Pseudomonas aeruginosa
atgcaagtcaaacgcttcttcgccgccgatatgcgccaggccatgaaactggtccgcgacgaactgggtccggacgccgcgattctcggcaaccgccgggtcgccggcggcatcgagctgaccgcggcgctggattaccaggccccgccggcgccgagcaagcccaacccggcgctggaagtggagctgcgcaagacccaggcgcggatcgccgaggcgcgcgccgagttgacggcgcgtccggcggaaacccagcgcaaggaccgtcaattgttcgccgaggagaagccggcgcgtccgtccctggccgagtccatgacggcggcgcaggccaagccccaggcgggcggccagaccctcgaggcaatgcgtttcgaactgaacggcctgcgcgagctgatcgaggtacaactgggttccatcgcctggggccagttgcagcaccagcgtccgcagcaggccaatctctggcggcgcctgcagcgcatgggcttgccggcggagctgagcaagccgttgctggagcgggtcgccgcggtgggcgatacgcgccaggcctggcgcatgctgttggcgcacctgtcgcgtgccgtgcagacccccgagcaggacccgctcgacgcgggcggcgtactggccctggtcggcccggcaggtgccggcaagaccaccaccctggcgaagatggccgcgcgctacgtcctcaagtacggcgcccagagcctggcgctggtgagcatggacagctaccggatcggcgcccaggagcagatcaagaccctcggtcggatcctcaacgtaccggtgaccctggtcgatcccggccagtcgctgatccaggccctggcgccgctggcgcgcaagcgcatggtgctgatcgataccgccggcctgccggccagcgacccggcattgcgcatgcagctcgaggcactggcgtcgccgagcctgaacgtgaagaattacctggtgatggccaccaccagccagagccaggtgctcaagtcggcctaccagacctatcggcactgcgggctggcgggttgcatcctgactaagctggacgaggcgggcagcctcggtgaatcgatggcgctggctatcgcccagcgtctcccggtagcctatctggcggatgggccgcggattccggacgacctgcaggtggcgcgcagtcaccaactggtcagccgggcggtgagcctgcaggcaccggaagagcccagcgaggacgccatggccgagatgttcgccgggctctaccagcaaccggcgcggcgtgccggctga

SEQ ID NO: 322404 - DNA, 834 bp, Pseudomonas aeruginosa
atgggtagcatgcatcccgtacaggtgatcgcagtaactggcggcaagggcggcgtcggcaagaccaatgtgtcggtgaacctggcactggctctggccgatctcggccgtcgcgtcatgctgctggatgccgacctcggcctggccaacgtcgacgtcctgctgggactcacgcccaagcgcaccctggccgacgtgatcgagggacgctgcgaactgcgcgatgtcctcctcctcggtcccggtggcgtgcgcatcgttcccgcggcctccggcacgcagagcatggtgcacctctcgccgatgcagcatgcggggctgatccaggcgttcagcgatatcagcgacaacctcgatgtcctggtcgtcgacactgccgctgggatcggcgattcggtggtcagtttcgtccgcgccgcgcaggaggtgctgctggtcgtctgcgacgagccgacctcgatcaccgatgcctacgccctgatcaaactgctcaaccgcgaccacggcatgacccgcttccgggtcctggccaacatggcccacagcccgcaggaaggacgcaacctgttcgccaaactgaccaaggtcactgaccgtttcctcgacgtcgcactacagtatgtaggtgtcatcccttacgacgagtcggtacgcaaggccgtgcagaaacagcgagccgtatacgaggcattcccccgctcgaaggcgtccctggccttcaaggcggtcgcgcagaaggtcgatagctggccgctgccggccaacccgcgcgggcacctggagttcttcgtcgaacgactggtccaacaccccgcgacaggttcggccgtatga

SEQ ID NO: 322405 - DNA, 720 bp, Pseudomonas aeruginosa
atgtatagcaaggcgcaagcgcagaactcccaggagcaactgatccagcgttacgcaccactggtcaagcgcatcgcctatcacctgctcggccgcctgccggccagcgtgcaggtggaggacctgatgcaggccggcatgatcggcctgctcgaggccgcgaagaaatacgacgccggcaagggcgccagcttcgagacctatgccggcatccgcatccgtggggccatgctcgacgaggtccgcaagggtgactgggcgccgcgttcggtgcaccgcaacacgcgcatggtgaccgacgcgatccgcgcgatcgaggcgagaaccggacgcgacgctaaagatcacgaagttgctgccgaactccaattgagcctcgaagattactacggcatcctcagcgacacgcagggcagccgcctgtacagcttcgacgacctgttgcaggacggcgaacatggattgccggaagacaccagcctcagtcacaacgaaccgatccacggcctgctcgacgaacgtttccaggcggccctggcggatgccatcgccaagttgccggagcgcgagcgcctggtgctggcgttgtattacgacgaggaactcaacctcaaggagatcggcgaggtactgggcgtcagcgaatcgcgggtcagccagttgcacagccagtgcgccgcgcgtttgcgcgcgcgcctggccgattggcggtcggcctga

SEQ ID NO: 322406 - DNA, 375 bp, Pseudomonas aeruginosa
atgaaaattctcatcgtggacgacttttccacgatgagacgcatcatcaagaacctcttgcgggacttgggcttcaccaataccgccgaggccgacgacggcaccacggcgctgccgatgctgcacagcggcaatttcgactttctcgtcaccgactggaacatgccgggcatgaccggcatcgatctgctgcgcgcggttcgcgccgacgagcgcctcaagcacctgccggtgctgatggtcaccgccgaggccaagcgcgaccagatcatcgaagcggcccaggccggggtcaacggctatgtggtcaaacccttcaccgctcaggtcctgaaggaaaagatcgagaagattttcgagcgggtcaacggctga

SEQ ID NO: 322407 - DNA, 789 bp, Pseudomonas aeruginosa
atggtgcttggtaacgattccacgggcgacgaattcgaatcgaccctgaaaaaacatgcgcgcgaactggtggactgtctcgaacgggggcacttccagcaggcggtgcaattgatccaggagctcagccaggccagggaccgtggcctctaccaggaagtgggcaagctgacccgcgaactgcacaacgccatcgtcgatttccagatcgacccgcattccccccacgcgcaggaaatgtcgcagatcgccgatgccaccgatcgtctttcctacgtagtggaaatgaccgagaaggccgccaaccggaccatggacctggtggagcagagcgccccgctggtcaaccagttgggcgacgattcgcgggagctgcaccaggagtggcaacgcttcatgcgccgggaaatcgacgctgacggcttccgcgagctggccaagcgcatcgaacagttcctcgtgcgcagcggcgagaacgccggccagttgtcctcgcagctcaatgacatcctgctggcgcaggattaccaggacctaaccggccaggtgatcaagcgtgtcaccaagctggtcaccgaggtcgagagcaacctcgtgaagctggtctggatggccggccaggtggaccgttacgccggaatcgagcacgaccacgtgagcatgcgccaccaggccgcgctggagcgttcggccaagggcgaggggccgcaggtcgccgcggaaaaacgagaggatgtggtgtccgggcaggatgacgtggacgatctgctgtccagcctgggtttctga

SEQ ID NO: 322408 - DNA, 2262 bp, Pseudomonas aeruginosa
atgagcttcgacgccgatgaagaaatcctccaggacttcctggttgaggccggcgagattctcgagcaattgtccgagcaactggtcgagctggagagccggccggacgatatggacctgctcaatgccattttccgtgggttccatacggtcaagggcggtgccggcttcctccagctgaacgcgctggtggaatgctgccacattgcggaaaacgtcttcgatatcctgcgcaagggcgagcggcgcgtcagctccgaactgatggatgtggtgctgcaggcgctggatacggtcaacgcgatgttcgaccaggtgcgcgagcagtccgaaccgaccccggcgacgcccgagctgctggcggcccttgcccgcctggccgagcccgagggcgccgagcccgcggaacctgtgcaagcgccgccggcggccgttccgccagccgagcctgcggcgccgccggaagcgcctgcgcagagtgcctccagcgatatcaccgacgacgagttcgagcagttgctggatgctctgcagggcgacgaagcgccggcctccgccgttgcagaagcgcccgcggctcccgctggcgacgagatcagcgacgccgagttcgaggcgttgctcgaccagttgcacggcaagggcaagttcgtcccgccggcggtctcggccgagcctgcgcaagtccccgccgaggcggtcgagccggccgcggctgccgctggtgacgatatcagcgacgacgagttcgaggcgctgctcgacgaactgcacggcaagggcaagttcggcgatgtcccggaagccgccggcacacccgccgcaccggctgccgcggctccagcggctgcgccggcggagcagggcaaggcgccggccgccgcgggcggcgatgagatcagcgacgacgagttcgagtcgctgctcgacgaactgcacggcaagggcaagttcaacggcgcctccgaggccgtggcggccgccgcggcggtagccaagaacatcgcggcgaagagtcccgcggcgaaaccggtcgctccggccaaggccgccgccgcgcgtccggcggcgcccgacaggcccgcggcaagcgaggcggagaccaccgtgcgggtggatacggcgcgtctcgacgagatcatgaacatggtcggcgagctggtgctggtgcgtaaccgcctggtgcgcctgggcctgaacagtggcgacgaggccatggccaaggccgtggccaacctcgacgtggtcaccggcgacctgcagatgtcggtgatgaagacccgcatgcagccgatcaagaaggtcttcggccgcttcccgcgcctggttcgcgacctggcgcggaacatgaagaaagagatcaacctggagctggtgggcgaagagaccgacctcgacaagaacctggtcgaggccctcgccgatccgctggtgcacctggtgcgcaacgccgtcgaccacggcatcgagagtccggaggagcgcgaggccgccggcaagccgcgggtcggccaggtggtgctgtcagcggagcaggagggtgaccacatcctcctgatgatcaccgacgacggcaagggcatggacgccgaggtgctgcgcaacaaggcggtggagaagggcctgctggagcgcgatgcggcggaccgcctgaccgacctggagtgctacaacctgattttcgccccgggtttctcgaccaagaccgagatttccgacgtgtccggccgcggtgtcggcatggacgtggtgaagaccaagatttcccagctcaacggcacggtcaacgtgttttcgcagaaggggtccggctcgaagatcgtcatcaaggtgccgctgactttggcgatcatgcctacccttatggtgatgctgggcagccaggcgttcgccttcccgctggtcaacgtcaacgaaatcttccatcttgacctgtcgcgcaccaatgtcgtggatggccaggaagtggtgatcgtccgcgacaaggccttgccgctgttctatctcaagcgctggctggtgccgagtgcggcccacgaagagcagggtgagggacacgtggtgatcctgtcggtcggcacccagcgcatcggtttcgtcgtcgaccagttggtgggacaagaagaagtggtgatcaagccactcggcaagatgttgcagggcacccccggcatggcgggcgccaccatcaccggggacgggcgcatcgccctgatcctcgatgtgccgagcatgctcaagcgttacgcacggcgcatctga

SEQ ID NO: 322409 - DNA, 1107 bp, Pseudomonas aeruginosa
atggcagtcaaagtcctggtggtggacgattcggggttcttccgccgccgtgtctcggagattctctccgccgatggacagatccaggtggtcggcaccgccaccaatggccgcgaggccatcgagcaggcgctggccctgagacccgatgtgatcaccatggattacgagatgccgctgatggacggcatcaccgcggtacgcaacatcatgcagcgttgcccgaccccggtcctgatgttctcctcgctgacccacgagggcgcgcgggtgaccctggatgcactggacgctggagcggtcgactacctgccgaagaatttcgaggacatctcgcgcaacccggacaaggtccgccagttgctctgcgagaaggtcctgaccatcgcccgtagcaatcgtcgctcgatcagcctgccgccgctgccttcggccacctcgtccagccatgcgccggcgtcgtcctccagcgtcggcgcgagcgcgcgtgttggtgccggcgcgtcgccggccccggcgtcgacctcggcggcgccgaagcgcaaggcctaccggctggtcgcgatcggtacctccaccgggggaccggttgccttgcagcgggtgctgacccagttgccggccaacttcccggcgccgctggtactgatccagcacatgccggcggccttcaccaaggccttcgccgagcgcctcgacaagctgtgccggatcaacgtcaaggaggcggaggacggcgacatcctgcgtcccggcctggcgctgctggcgccgggcggcaagcagatgatggtcgacggccgcggcacggtgcgcatcctccccggcgacgaacgcctgaactacaagccctgcgtcgacgtgaccttcggctcggcggccaaggcctacaacgacaaggtcctggcggtggtcctcaccggcatgggcgccgacggacgcgagggtgcgcgcctgctcaagcagggcggcagccaggtgtgggcgcaggacgaggccagttgcgtgatctacgggatgccgatggccgtggtcaaggccaacctggcggacgcggtgtacgggctcgacgacatcggccggcacctggtcgaggcgtgccagtaa

SEQ ID NO: 322410 - DNA, 741 bp, Pseudomonas aeruginosa
atggatgtgctcagcctagtcgggatcatcctggcgttcgtcgccatcgtcggcggaaactttctcgagggcggccacgcgggggccctgctcaacggtccggcggcgctgatcgtgatcggcggcaccctggccgcggcgctgttgcagaccccggtgaacgtgctcaagcgcggcctgggcatgctcggctgggtgttcttcccgccgcgcgaggatctttccgggggaatcgaccggatcgtctcctggagcatgaccgcgcgcaaggaaggcctgctcggcctggagagcatcgccgatgcggagcccgatccctatgcgcgcaagggcctgcaactgctggtggacggcgccgagccggaagtcatccgcagcatcctcgaggtcgacctgttcacccaggaaagtcgcgacctgcaggccgccaaggtgttcgagagcatgggcggctatgcgccgaccatcggcatcatcggcgcggtaatgggcttgatccatgtgatgggcaacctggccaacccggcgcagctcggcagcggcatcgccgtggccttcgtcgccaccatctatggcgtcggcttcgccaacctgctcctgctgccgatcggcaacaagctgaaaaccctggtactgcgccagtcgcgctaccgcgagatgctcctggagggcctgctgtccatcgccgagggcgagaacccgcgttccatcgagttgaagctgcaaggcttcatggactga

SEQ ID NO: 322411 - DNA, 891 bp, Pseudomonas aeruginosa
atgcagcgccgccgtcgccaccaggaggaacacgagaaccacgaacgctggctggtttcctatgccgacttcatcaccctgctgttcgccttcttcgtggtgatgtattcgatttcctcgatcaacgagggcaagtacaagatcctctcggagaccctcaccggcgtgttcaaccagcccgaccgctcgttgaagccgattcccatcggcgacgagcggccgcgcaccaccgagccggagcgcaccagcgtcgaggagcagcccagcgacaacgcggccagcgccgactcgctggagcggatcgccgacagcgtgcgcgatgccttcggcgacttgatcgcctccgaccagttgagcgtgcgcggcaacgagctgtggatcgagatcactctcaattccagcctgctgtttcccagcggcgatgcgctgcccaacgatgccgccttcgatatcgtcgagaaggtcgccaagatcctggcgccctacaagaacccgatccatgtcgagggcttcaccgatgacgtgccgatccatagcccgcgctatcccaccaactgggaactgtcggcggcgcgggcggcgagcatcgtccgcctgctcggcaacgatggggtcgagccgtcgcggatggctgcggtgggctatggtgaatttcagccggtggcggacaatgccagcgccgaggggcgggcgaagaatcgccgggtggtgctggtgatctcgcgcaacctggaggtgcgacgcagcgtcagcggggtcggcagcggcaaggcgcaaccggattcggcgctccgccacgcaggctcggcagctggcacgcaagctgcagatactggcggtacgccggcgcccgcgccggcaaccgtcaattccccgtcgccttcgccatga

SEQ ID NO: 322412 - DNA, 789 bp, Pseudomonas aeruginosa
atgaaagtctgggcagtcgccaatcagaaaggaggggtcggcaagaccacctcgtccatcgccctggccggcctgttggcggatgccggcaagcgcgtggtcgtggtcgacctggacccccacggctcgatgaccagctatttcggctatgacccggacaccctcgagcacagcgccttcgacctgttcctgcaccagggcaacgtccccgaggggctgccggcctcgctgctgcgcagcaccagcaacgaacgcatttccctgctgccgtcgagtaccgcgctggccaccctggagcgccagtcgccgggcaagagcggtctcggcctggtggtctcgaagagcctggcgcagctctggcaggatttcgaccatgcgatcatcgacagcccgccgctgctcggcgtgctgatggtcaacgccctggccgccagccagcacctggtgatcccggtgcagaccgagttcctcgcggtgaaagggctggagcggatggtcaacaccctggcgatgatcaaccggtcgcgcaaacaggcgttgccctataccatcgtacctacgctgttcgaccggcggacccaggcttcgctgagcacgctgcggattctcaacgagaactacccggacaacctgtggcaggcgttcattcccatcgatacccgcctgcgcgatgccagccgggccggggtcacgccgtcgcagcacgacggcaagagtcgcggggtgatcgcctaccgcgccttgctcaagcatctgctggcgcagcagccggccacccgggtggcctga

SEQ ID NO: 322413 - DNA, 891 bp, Pseudomonas aeruginosa
atgagcgccgccaccgccacccgttcgcaactggccttgcagtcctacctggatgcgttgctccaggaggccactttcgaggacctggaacctctcgtcgagacgccgccagcgcctgcgcccgcgccgttgaagcctgtcgcgctggcggtcgccgaagtggcgacaccggccccggcgctggaaacgctgccggtcgaccccgggttcgacgagttcgaggccgcggtgctcgaggagcaggtccgcgatgcgcgtctggttccgccggcgccggcggccctgctcgacgaaccgacgacgttgcgcgagctgccggtcgagccacggccccacgaagtcatcgagttgcgcgtgccgagcgccccggcgagcgtcggcgagccgccgctgctcgacctgccgctgctcgacgacggtcgtccggcctgggcggcggagcccttcgagtgcctgctgttcgacgtcgccgggctgaccctggcggtgccgctggtgtgcctcggctcgatctatccgctggagaaccaggaactgaccccgttgttcggccagcccgactggttcctcggcatcctgccgtcgcaggcgggcaacctgaaggtgttggacaccgcacgctgggtgatgcccgaacgctaccgcgacgactatcgcgacggcctcaagtacgtgatctcggtccagggctacgagtgggggctggcggtgcaccaggtgagccgctcgatccgcctcgacccggccgaggtgaaatggcgcagccagcgtagccagcggccctggctggccggcacggtcatcgaacacatgtgtgcgctgctggatgtggcggcgctcgccgaactgatcgccagcggcgccgtcaagcgcctgcacggcgaccattga

SEQ ID NO: 322414 - DNA, 480 bp, Pseudomonas aeruginosa
atgagcaaagccaccgcgcaaagcgccgaagatccgatcctgcagtgggtcaccttccgcctggacaacgagagctacggcatcaatgtgatgcaggtccaggaggtgctgcgctacaccgagatcgccccggtgccgggcgcgccgagctacgtgctgggcatcatcaacctgcgcggcaacgtggtcacggtgatcgacacccgccagcgcttcggcctggaccctgcgccggtcagcgacaacacgcggatcgtcattatcgaggcggacaagcaggtggtcggcatcctggtcgacagcgtcgccgaggtggtctacctgaagcagtcggaaatcgagaccgcgccgaacgtcggcaacgaagagtcggccaagttcatccagggtgtctgcaacaagaacggcgagctgctgatcctggtcgagctggacaagatgatgaccgaggaagaatggtcggagctgggcagcatctga

SEQ ID NO: 322415 - DNA, 408 bp, Pseudomonas aeruginosa
atggaggtcgtcgcgctggcactggcgctcgccgcctgcctcggcctggcggcggcgtgcctgtggctgcgccgtgaattgcgccgcctgcaagctgcgctggcgcagcaggcggaggagggcgccgcgcgcgagcgccggctcaaggagctgagcaagcgcatcgagtcctaccagcaggtcaacgtgcgcatgggcgaggccttgcaggacctcggcaagcaactcgcgccgcttcccgaccgggtcgcgcgcctggagcagcgcgatccgaccacgctgtcgttcagccaggccgcacgcctggtcgggctcggcgccagcgccgaagacctgacccaggcctgcggtctgtcgcaggccgaggccgagctggtggcgcgcctgcacgaagccaagggcaagtga

SEQ ID NO: 322416 - DNA, 687 bp, Pseudomonas aeruginosa
atggaacctgtactgttttatggcgtaccccacggctgttccttcggctcgatcgtggccctcgagtggctcggccgcccctatcgcctgtgtcggatcgagatgccgctggagaccggcgagcgcacctacgtgcgcctgaacccggctcgccagacgcccaccctgctcctggaggacggccgcgcgctcagcgaaagcctggccattctccagcacctggcggcgcgcgacctgtgcaggaagctcggttatccgcagggcagcgccgagttcgacgaactgaacttcgccctcgccctcctgcataccgaatgccattcggcctggggagccctgttctatctggaggacgccgacgcaaccacgacggcaagggcgctgacgcgcgcggcgcgagcctatggccggatcgacaagctgctcggcgaccgcaagtggctggccggcgaagggccgagcgtggccgacgcctacctcgcgggtaccgctcgctggggacgggagctgggctacttcgacctgcaacacgactttccgcgcctgcatcgacacctggagaagctggagcaggacccggcggtgcgcttcgcccatgccatcgaggatcgcctgccggcgcagagctgcggggagttcaggggagaggtgacactggcagaagtggcgagccgcctgctcgcctga

SEQ ID NO: 322417 - DNA, 972 bp, Pseudomonas aeruginosa
atgtccaagcccacggtgcgcgtgctcgccctgctcgaactgctgcagagccacggccaactcagcggtagcgagctggccaggcgcctggaggtggatggacggacgctgcgtcgctatatcgtcgccctcgaggagctgggcattcccatctcggcggagcgcggacgccatggcggttaccgcctggtggccggtttcaagctcccgccgctgatgttcagcgcggaggaaaccctggccgtgtccctcggcctgctggcggtgcgcagtctcggcctgggcgaaagcgagctggccctggaaagtgcgcaggccaagctgagcagggtgatgcccgttgcgctgcggcggcgcctcgtggcgctccgcgagaccgccagcctggacctggcccgcgcccgggcgggaaccagtgtggcggcgctggcgaccctcgccgaagccgcccaggtccgtgcgcgggtcgagttccgctatcgcgacccgcagggcgccgaaaccctccgccaactcgatccctacggcctggcctatcgcaacggctgctggtacgtcagcggtttctgccacctgcgccaggcgttgcgctcgttccgtctcgatcgcctggacgcgccgcgcatgctggcggagcgcttcgagcgaccggcggatttcgataccctccgccacctgcgggagagcttcgcccggatgccgcgcgcctacccggtggaaatcctgatgcgggcggcgagggagcaggtggtcgcggtgctcggcgagcccctcggtctgctcgccgaggtcgatggcggtacgctgttgcgcgccagcaccgacgacctggactggttcgcccggcgcctgtgcggcctgccgttcgacttcgaggtcaggcagccgctggagttgcgcgagccgttgaggcgccaggccgagcgtgtcctgcgtaacctgggccaggaggaagcttcggatcacaggtag

SEQ ID NO: 322418 - DNA, 417 bp, Pseudomonas aeruginosa
atgcctgcaatacccctgcgcgccatggtgctgtgcgccaaccccggccgtctgctcaggtacggagcgctgttcaaccgctgcggctacttccacctgagcctgtgcctggaccgacgggagctgcggcgctccctggaccagggttacccgtacgactattgcctctacgacggattccgcctggaccagggctgcaagggcacgctggcgatgctgggacgcagcggcagcatccggcgcttcctgctggtgggcgaactcgattgccgcgagaagcgtctgttgttcgagtggagcagaggccatggcctgagcatcggcgcggtgtccgaccggcctttgggccaggtcgccctggctgcgttgatcaagcgtgatcgcggctgccccgacctcctgcgcggcatcgcctga

SEQ ID NO: 322419 - DNA, 723 bp, Pseudomonas aeruginosa
atgaccgtccaggccgacatcctcaaggcgatcgaaggcatcgagcatggcttccagcaagccggccaggcactctccgaacggatattccattgccggcaggtgcatggcgccgagatcgtcgacgcgcgctcgttgtcggaatcgggacggcatgccgccgacggtgttttcagcgaagggccgctggcggtcgcggtggtcaccgcggactgcctgccgattctcatgagcagtcgcgacggtcgggtggtggccgccctgcacggcggctggcaggggctcgtcgccggtatcgtcggcgcggcggtggcgcgcttcaatgcgcgcggcgtcgccagcgcggacatccgggtcgccatcggtcccgggatcaaagcctgctgctacgaggtgagtgccgggttcatcgaggcgttgcaggccagccacggccgcctctgggagggcgcggtgccgccctggagccagcgtcgtccgctccccgagcggccaccccggttcgctccgcccgagccaaggcaggcggagcagggcgcctggctggacctggtggccttctgtcgccagttgttccaggccgccggcgtcgggccggcgcagatcgaagccagcgccgtctgcacctactgttccggcgatgcgttcgccagtcatcgccgacgccagcgcctgggcgaggagaagcgtcagcagtacgcctggatcgcgcgcaagccgtga

SEQ ID NO: 322420 - DNA, 738 bp, Pseudomonas aeruginosa
atgcctgacatcacccaagccgccatcgtcaccggcgcctcccgcggcatcggtcgcgccattgcccggcggttggccgccgacggtttcgcggtcgcggtcaactatgccggcaaccagaccatggccgacgaggtcgtggccgaaatcgtcgccgccggcggcacggccatcgccgtacagggcgacgtggccagcccggaggacatggacaagctgttcgaagccaccaggggcgccttcggccgcatcgacgtggtggtcaacagcgccggcacgatgccctacctgaagatcgccgacggcgacctggagggcttcgaccgggtgatccgcaccaacctgcgcggcgccttcatcgtgcttggcctggctgcccggcatgtcgagcgcggcggacggatcatcgccctgtccaccagcgtgatcgcccgggcgctgcccagctacggtccgtacatcgcgtccaagtccggggtcgaggggctggtgcacgtgctggccaacgagttgcgcggccaggacatcagggtcaacgcggtggcgcccggcccggtggccaccgagctgttcttcaacggcaagagcgccgagcagatcgaccagatcgccaggctggcgccgctggagcgtctcggcgagccggacgagatcgccgcggcggtgtccttcctcgccgggccggacggggcctgggtcaattcccaggtgctgcgggtcaacggcggtttcgcctga

SEQ ID NO: 322421 - DNA, 330 bp, Pseudomonas aeruginosa
atgaaaaaacataccctgttcgccgtagctgctctcggcctgctgttcgcgggcagcaccctgctgcctggcgagctttctcctgtcggctccgcctatgccaagggcggaaatggcggcggcaacggtggcggtcatggcggcggcaagggcggcaacctcggcggccactccagcaaaggccatggttcagccacctccggcatcgccagctcccgcgacagccgcgggctgtcgcaggccagcgcgatctccgccaccacccccggcgatcacaacagcaagggcttgagcaacgccatcggctcctcgaccaagaacgaccgctga

SEQ ID NO: 322422 - DNA, 555 bp, Pseudomonas aeruginosa
atgaacttcgtctttccccacccgttggacaccccgcgcctgcggctacgcactttccgagaggaagacgccgcgccgctgttcgccatgatgtccgacccggaagtcatgcgttactggaacacaccgccgtggacgacccctgcgcaggcccgcgaggcgatcctgcgggacagccaggcgctcgtcgacggcgaatacctgaacctggccatcgagcgtcgagaagacggccaattgctcggcagttgtatcctcttccatttcgagaaaggctcgcgccgcgccgaactcggctactgcctggcacgtgcagcccagggccggggttacatgggcgaggcgctgcgcaggctgctggcgttcgctttcgatgaaatcgacctgaaccgcctggaggcggagatcgatccgcgcaaccggccttcggccgccagcctggagcgcctgggcttccgccaggagggcctgctcgcacaacgctggatcgtttccggagaagtctccgactcggcgctctacggattgctcgccgagcactggcgcaaccgctga

SEQ ID NO: 322423 - DNA, 336 bp, Pseudomonas aeruginosa
atgaacagaaagcagtcacccgccccgcgccaggccatcgccctgagctacgacggccaggccgcgccgaccctttccgccaagggcgacgccgaactggccgaggcgatcctggccatcgcccgcgactacgaggtaccgatctacgagaacgccgagctggtccgcctgctcgcccgcctggaactcggcgacgccattccggaagcgctgtatcgcaccatcgctgagatcatcgccttcgcctggcacctgaaaggcaagtgtcccgagggattcgcgccggacgccgcggatggcaaccagatgctgctactcggcggtcccggcgactga

SEQ ID NO: 322424 - DNA, 1479 bp, Pseudomonas aeruginosa
atgaccctgaagctggtgcagaccctggccggcctgctgggcgaaggcgagtcgggcaaggccgaggtgctggcggtcaaggaaggcctggcgaacaatttccaggtcctgctcaagctgaccctggcgaacagcgggcagagcctggtggaagtgcagagcaatcggccgctggtgccgggcaacctgctcaacgtcagcgccaccagcaacaccagcgtggttgcaaccctgctcgacagcatggccggcgctggcccgctgagcagcctcgacctggagcaactgccgcccggcaccctgctccagggcaaggtcctgtccagcaccgcgctgccggcggacaaggcccagcaggtggtctaccgggtcctgctgaacctgctcaacacgccgctcgccggcagcaagctgagcctcgactcgccccaggcgctgccggtcggcagcctgctcacggcgctggtgaaaaacagccagcagatcgacttcctgccgctcagcggacgcctcgaccagcttgcgctgggccagcaactggccgggcagagcgcccgccaggcttccctggaaggcctgttcgccgccctgcaggggctgaacggccgcaacgacctgccggacagcctgcgccaggccgtggagcgcctcttcgccggcctgccggaggcgcagaagatgggcgattccaagctgctcggccaggccctgcagcagagcggcctgttcctcgaggcgcgcctgatgcagggcgccaccgatcatctcggccaggacctgaaggccaacctgttgcgcctgttcgcccagctgtcgccgctgccgccgaccggcgcccaggcgccgggcatgttcgccggcaacacggcgaacctggcccaggcgctgccggcctttgtccgcaacgccctgggcaacctgggacagagcgccaacaagacccaggcactgaactttcccctgccgagcaaggttctccaactgttcgacgaggacatggaactggagtcactgctgcgccttgccgccgcggcgatctcccgcctgcagacccatcagttgtcgagcctggcgcagaccagcaccctgccggatggcacccaactggcgacctggcagatggaggtgcccatgcgccatcagcactcggtggtaccgttgcaggtgaagttccaggaagaacagcgcaagaccggcgaagaggcccgcgaaagcctctggcgcgtcgaactggccttcgacctggagccgctgggaccgctgcacgcccaggcgaccctgctacgcggcagcctgtccagccagctttgggccgagcgagacgcgaccgcgcggctggtcgagcatgaactcggccacctgcgccaacgcctgcgcgacgccggcctgaccgttggcgagatcacctgccaacgcggccacccgccccagggcccgcgagcgaccatcgaacaacgctgggtagacgaaaccgcatga

SEQ ID NO: 322425 - DNA, 2607 bp, Pseudomonas aeruginosa
atgaacagcgcacaccgcaaaccgctccccggcacccgcctggactacttcgacgcccgcgaggcggtcgaggcgatccaacccggcgcctacgccaagctgccctatacctcccgcgtgctcgccgagaacctggtgcgccgctgcgacccggcgaccctggaggcttcgctgcgccaactggtcgagcgcaagcgcgacctcgacttcccctggtacccggcgcgggtggtctgccatgacatcctcgggcagaccgcgctggtcgacctcgccggcctgcgcgacgccatcgccgacaagggcggcgacccggcccaggtcaacccggtggtgccggtgcaactgatcgtcgaccactcgctggcggtggaatgcggcggctacgaccccgaggccttcgccaagaaccgcgccatcgaggaccgccgcaacgaggaccgcttccacttcatcgactggaccaagcaggccttccgcaacgtcgacgtgatcccgccgggcaacggcatcatgcaccagatcaacctggagaaaatgtcgccggtgatccaggcgcgcgacggcgtggccttccccgatacctgcgtgggcaccgacagccataccccgcacgtcgacgccctgggcgtgatcgccatcggcgtcggcggcctggaagcggaaaacgtgatgctcggccgcgcctcctggatgcgcctgccggacatcgtcggcgtcgagctgagcggccgtcgccagccgggcatcaccgccaccgacgtggtgctggccctgaccgagttcctgcgcaagcagaaggtggtcggcgcctacctggagttctacggcgaaggcgcctccagcctgaccctcggcgaccgcgcgaccatctccaacatggctccggaatacggcgccaccgcggcgatgttcgccatcgaccagcagaccatcgactacctgcgcctcaccggccgcgacgacgagcaggtcgccctggtggagggctatgcgcgcaccgccgggctctgggccgacagcctggtcgacgccgagtacgagcgggtgctgaagttcgacctgtccagcgtggtgcgcaacatggccggcccgtccaatccgcacgccagggtcgccaccagcgaactggcggcgaaaggcatcgccggcaacctcgagcgggcccgcgccgaggaagccgagggcctgatgccggacggcgcggtgatcatcgccgcgatcaccagttgcaccaacaccagcaacccgcgcaacgtgatcgccgccggcctgctggcgcgcaacgccgaccgcctcggcctggtccgcaagccatgggtgaagacctcgctggcacccggctccaaggtggtcaccgaatacctgcgcgaagccggcctgctgccgcacctggaagccctcggcttcggcgtggtggcctacgcctgcacgtcttgcaacggcatgtccggcgccctcgacccggcgatccagcaggagatcgtcgagcgcgacctgtacgccaccgcggtgctctccggcaaccgcaacttcgacgggcgcatccacccctacgccaagcaggccttcctcgcctcgccgccgctggtggtggcctacgccatcgccgggaccatccgcttcgacatcgagcgcgacgtgctcggcgtggtggacggcaaggagatccgcctgaaggacctctggccgagcgacgaggagatcgacgcggtggtcagggcggcggtgaagcccgagcagttccgccaggtctacatcccgatgttcgacatcacccacggcgagcgcgagaaggtcgacccgctctacgcctggcgcccgacgagcacttacatccgccgcccgccgtactgggaaggcgccctcgccggcgaacgcaccctgcgcggcatgcgcccgctggcggtgctgccggacaacatcaccaccgaccacctgtcgccgtccaacgcgatcctcgccgacagcgcggcgggcgaatacctggcgaaaatgggcctgcccgaggaggacttcaactcctacgccacccaccgcggcgaccacctcaccgcgcaacgcgcgaccttcgccaacccgaagctgttcaacgagatggtgcgcaacgccgacggcagcgtgaagcagggttcgctggcgcgggtcgagccggaaggcaaggtgatgcgcatgcgggaagccatcgagacctacatggagcgcaagcagccgctgatcatcgtcgccggcgccgactacgggcagggttcttcgcgcgactgggcggccaagggcgtgcgcctggccggggtggaggcgatcgtcgccgagggcttcgagcacatccaccgcaccaacctgatcggcatgggcgtgctgccgctggagttcaagccgggtaccacccgcctgaccctggggatcgacggcagcgagaccttcgacgtgctcggcgctcgccggccgcgcgccgacctgaccctggtcatccaccggcgcgacggggagcggctcgaagtgccggtgacctgccgcctggacagcgacgaggaagtctccatctacgaagccggcggcgtactgcaacgcttcgcccaggacttcctggaggcggccggcgcctga

SEQ ID NO: 322426 - DNA, 1128 bp, Pseudomonas aeruginosa
atggctgaagcaaaagtactgagtggcgccggcctgcgtggccaggtggccggccagacagccctgtccaccgtcggccaggaaggcgccggcctgacctaccgtggctacgacgtccgcgacctggcggcggcggcgatcttcgaggaggtcgcctacctgctgctctacggcgaactgccgaacaagcaacagctcgacgcctacctgaagaagctccagggccagcgcgacctgccgcaggcgctgaaggaagttctcgaacggattcccaaggacgcccacccgatggacgtgatgcgcaccggcgcctcggtcctcggcaccctggaaccggagctgagcttcgaccagcagcgcgacgtcgccgaccgcctgctcgccgccttcccggcgatcatgacctactggtaccgcttcacccacgaaggccagcgcatcgactgcaacagcgacgagccgaccatcggcgggcacttcctcgccctgctccatggcaggaagcccagcgagctgcacgtgaaggtgatgaacgtctcgctgatcctctacgccgagcatgagttcaacgcatccaccttcaccgcgcgggtctgcgcctcgaccctgtccgacctgtactcctgcgtcaccggcgccatcggctcgctgcgcggcccgctgcacggcggcgccaacgaggcggcgatggaactgatcgaacgcttctcttcgccgcaggaagccaccgccgagctgctgaagatgctcgagcgcaaggacaagatcatgggcttcgggcatgccatctacaaggattccgacccgcgcaacgaagtgatcaagggttggtcgaagcagctcgccgacgaggtcggcgacaaggtgctgttcgcggtttccgaagccatcgacaagaccatgtgggagcagaagaagctgttccccaacgccgacttctaccacgcctcggcgtatcacttcatgggcatcccgaccaagctgttcacgccgatcttcgtctgctcgcggaccagcggctggaccgcccacgtcttcgaacagcgcgccaacaaccgcatcatccgcccgagcgccgagtacaccggcgtcgagcagcgcgcgttcgtgccgctggagcaacgctga

SEQ ID NO: 322427 - DNA, 897 bp, Pseudomonas aeruginosa
atgagccagacgtcccttacccccggccagcgcttccgcgaagccgtggccaccgagcacccgctgcaggtggtcggcaccatcaacgccaaccacgccctgctggccaagcgcgccggcttcaaggccatctacctgtccggcggcggcgtcgctgccggttccctgggcctgccggacctgggcatcagcggcctcgacgacgtgctcaccgacgtgcgccggatcaccgacgtctgcgacctgccgctgctggtggacgtcgacaccggcttcggctcctcggcgttcaacgtcgcccgcacggtgaagtcgatgatcaagttcggcgccgccgcgatgcatatcgaggaccaggtcggcgccaagcgctgcggccatcggccgaacaaggagatcgtctcgcagcaggagatggtcgaccgcatcaaggccgccgtcgatgcccgcagcgacgactccttcgtgatcatggcgcgcaccgacgcgctggccgtggaaggcctgcaggccgccatcgaccgcgcctgcgcctgcgtcgaggccggcgccgacatgatcttcccggaagccatgaccgaactggccatgtacaaggagttcgccgccgcggtgaaggtgccggtgctggccaacatcaccgagttcggcgccaccccgctgttcaccaccgacgaactggcctccgccgacgtgtccctggtgctctacccgctgtcggccttccgcgccatgaacaaggcggcggagaacgtctacaccgcgatccgtcgcgacggcacccagaagaacgtgatcgataccatgcaaacccgcatggagctgtacgatcgcatcgattaccacagcttcgagcagaagctcgacgcgctcttcgcgcagaagaagaacgcctga

SEQ ID NO: 322428 - DNA, 723 bp, Pseudomonas aeruginosa
atgacccagaacccgccccctctcgagattgcccatgacgacggcgagaccttgtcggaacacgtcttccgcaagatccagagcgccatcgtcagcggcgagatcgcgccgggcagcaagatctccgagccggagctggcgcgcacctacggcatcagccgcggcccgctgcgcgaggcgatccaccgcctggaaggcctgcgcctgctggtgcgggtgccgcatgtcggggcgcgggtggtgtcgctgagccacgccgagctgatcgagctctacgagatccgcgagtccctggaaggcatggcctgccgactggccgccgagcgcatgagccaggccgagatcgacgagttgcgccgggtgctcgacacccacgagcgcgacgaggcgttccaggccggacgcggctattaccagcaggaaggcgactacgacttccactaccggatcatccagggcagcggcaacgccaccctcacccgcatgctctgcggcgagctctaccaactggtgcggatgtaccgcatccagtactcgaccacgccgaaccggccgcgccaggccttcgccgaacaccaccgcattctcgacgccatcgccgaccgtgacggcgaactggccgagctgctgatgcgccgccacatcagtgcgtcgcgccgcaatatcgagcgccagctggaaccccagccggcgaagctcgcctccgcttcctccaccgtctaa

SEQ ID NO: 322429 - DNA, 612 bp, Pseudomonas aeruginosa
gtgggcatctatgaccgttacgtgttgccgcgcctgatcgacttcgcctgcggcatgggcgacgtgatgaagcagcgttcgctgctggtgccgcgcgcccatgggcgggtgctggagatcggtctgggcaccgggctcaacctgggcttctacgacgcggcgaaggtgtcggcgatcgtcggcgtcgacccggccgcgcaaatgcaggcgctggcccgcgagcgcgcggcgcaaatcggcatcccggtggaaatggtcgccctcgagcttggcgagatccgcgccgaggcggaaagcttcgacaccatcgtctgcactttcaccctttgctccatcgccgcgccgctgccggcgctgggcgagatgcgccgggtgctgaagcgtggcggcgaattgctgttctgcgagcacggccgcgcgccggacgcctcggtgctggcctggcaacgacgcctgacgccctggtggaaaccgctggccggcggttgccacctggaccgcgacatgccggccttgctgcgcgaggctggctttcgcatcgacgagctggagcaaggctacctgccggggccgcggccgatgacctacgtctaccgcggcgtcgcgcgctga

SEQ ID NO: 322430 - DNA, 2322 bp, Pseudomonas aeruginosa
atgacttcaccctccgccccagacacccagctcagcctggccatcgacccggcccggccgtatgcgcggctgaccctcggcagccacgtgcacagcggctacgacctgcgcagcggacgcatgcagagcatttcccggcaccgtgcggcgctggccttcatctatgccggcgaggcggtttccgggcgtcccggcagcgagccacgggaggctcagcggcgtatcgaacggcgtccggcgcacgagcaggaataccgcgagaccctgcgccgcctcggcttcaagccggcgacccggcgcagcgacgcgctcgaggagagcgccggcgagatgttcgaactgcccggcgacaacgcctggctgcacttcatgcaggacgacctgccgcgcctgcgccagcagggctggttcatcgacatccgcgccgacttcgcctacgacctgacgcccatcgacgcctggtacgccgaggtcgaggaagccgacgaccgccagtggttcgagctggaactgggcatccaggtcgccggccagcgggtcagcctgctgccggcgctgaccgaactgatccgccgcagcccggccctgctcgatccgcgcgccctcgcccggcacgccgacgaagagcaactggtgctgcgcctggaactcaacccgccgctgcgcgtggcgctgcccttcggccgcctgaagccggtgctggcggcgctttccgacttctacctgggcgaccccgaaccgcagcgcaagctgcgcctgggcgcaccggacgcggcgcgcctggccgatctcgacgagttgccgctggcctgggaaggcggcgacaacctgcgcgacttcgcccgccgcctacgcagtttccaggctcgtccggcgaccccgccgcaaggcctgcgcgccgaactgcggccctaccagctcgaaggcctgagctggatgcagaccctgcgcgaactcgacagcggcggcgtgctggccgacgacatggggctgggcaagaccttgcagtcgctggcccacgtgctcctggaaaagcaggccgggcggctcgacacgccggcgctggtggtgatgcccaccagcctgatccccaactggctggacgaggccgagcgcttcgcccccgatctgcgcgtgctggccctgcacggcgccggccggcgccgcgacttcgcccgcatcgacgagcacgacctggtgctgaccacctatgccctgctgccacgcgacgccgccgagctgggcaagcggcggttccacctgctgatcctcgacgaggcgcagaacatcaagaacgccaccaccaaggccgccgtcgccgcccgcgagctggcggcacggcatcgcctgtgcctgaccggcacgccgctggagaaccacctcggcgaactctggtcgctgttccatttcctgatgcccggctggctcggcgacgcccgccagttcgcccaggactaccgcacgccgatcgagaagcacggcgacgaggcacgcctcagccacctggccgctcgcctgcggccgttcctgctgcgacggaccaaggaacaggtggcctcggaactgccgccgaagagcgagttcacccagttcgtcgaactcagcgaggcgcaacgcgaactctacgagaccgtgcgcctggcgctggaccgcaaggtccgcgaggagatcgcccggcgcggcctggcgcgcagccgcatcgtgatcctcgaggcgctgctcaagctgcgccaggtctgctgcgacacgcgcctgctgcaacgccaggaagacggcgcgcgcagcggccgggcgctcagctcgggcaagctggcctacctgctcgacatgctcgacgaactgatcgccgagggtcgccgggtcctgctgttctcgcagttcacctcgatgctcgcgctgatcgaggacgccctgcgccagcgcggcgtcgactacgtcctgctgaccggcgagacccgcgaccgccgcgccccggtacagcgcttccagagcggcaaggtgccggtgttcctgatcagcttgaaggcaggcggggtcggcctcaacctgaccgcggcggacaccgtgatccactacgatccctggtggaacccggcggtggagaaccaggccagcgaccgcgcctaccgcatcggccaggacaagccggtgttcgtctaccggctgatcgcccgcggcacggtggaagagaagatccagcacttgcagcaggaaaaggccgccctcgccgacggcctgttcagcgaaggcaacggcgacggctggaagctcgacgaggccgatatcgacgcgctgttcgcgcccttgcccaaggcgctctga

SEQ ID NO: 322431 - DNA, 297 bp, Pseudomonas aeruginosa
atgaccagccaggccctggccggcggactgtccgtcaccggccgcatcctcgtcgcggtcctgcttggctacgcgctggcctatgcggtcaccgcctgcctgagcatctacctgccgctgccgcgtcccgaccgggtctcgttcggcagcctcggctgcttcgccgtgtgggtcgcggccatcgtctacgccttcgccgcgcgcagcgcctggcgcgcctgctgggtgctggcgctggccagcctggcgctgggcggcctggcctggctcggcctcgactacggagcgcgtccatga

SEQ ID NO: 322432 - DNA, 1521 bp, Pseudomonas aeruginosa
atgaacctgcgtcaatcgatgtccggcctgcatacctggtcggggctgctggtcagctggctgctgttcgtcatcgtcttcgccggcagcctggccagcttcgacaaggagctgacccgctggatgcagccggacctgcacctgcccggcgcgcagtcgctgggcgccgaccaggtgcgcgactggttgcgccagcgcgcccccgatgcccatgcctggtggatgctgccgccgagcgagcgggcgccctactggaacgccggctgggagccgcgcgacggcagcgagttcaaggtctttcagctggacgcggtgagcggccagccgctgccgaagacagtcggcggcgagttcttcttcaccctgcactacgacctgcacgccggcatggtcggcctgtacatcgtcggcatcgccgggatgctgatgctggtggcgctggtcagcgggaccatcgtgcaccggcggatcttcaaggacttcttcaccctgcgcccgcaggcggcgcggcagcgcgcctggctcgacgcgcacaacgtgctgggggtgatcggcctgccgttccacctgatgatcgcctacaccggcctggtgatcttcatcgtctactacatgcaggcgggcttgcaggtggtctaccagaacgatggcgagcgcttcttccatgaagtgcagggctcctacgaacgcgaggaagtcggccgcccggcggggccgccggcgtccatcgacggcctgatcgtcgaggccggcaaggtctggggcgacggcggcgcgccgggctggatcagcgtccaccatccctatgacgaggcggccaccgtggacatccgccggcgcgacgcctcgcgcatcctcgacgaccagcgcacggtcaacttcgatgcctccagcggcgaactgctgcatgcccagccgtcctatgcgcccggctacgccacctacggctggctgaccggcctgcacatgatccagtggggcggccagttggtgcgctggatgtacctgttgctcgggctgtccggggcgatgatgatcttcggcgggttgcaggtctggctggccaagcgcgaggtccgcggcagtcgtggcgttggtctggtgcgggcgctgaacctggcggtctgcggcggcctgccgctggccagcctggcgctgctgtggggcaaccgcctgctgccgacgcaactggccggccgcgacacctgggagatccgcgtgttttgcgccagttgggcgctggtcgcgctgtgggccatcgtccgccgcaacagcgggaccctcggtcgcacgcaactgcgcctcgccgccgtgctggcgctgggcctgccgctgctcggcctgctgcgtagcccggaaggcaacctgttggccagcctgcagcgcggcgactgggtgctggccggcgtcgacctcagcctgctgggcctcggcctgctctgcgcctggctaggttggcgacgtcggcaagcgtcgagcaagcccgtccggcgacgcctgaacgtccaggaggtggcctga

SEQ ID NO: 322433 - DNA, 324 bp, Pseudomonas aeruginosa
atgctgctggtcttcggcctcaacctgctggctttcaccgctctctgcctggccatgaaccgccaccacaagaacctcctcggccacgagccgtcggcttcccgggtgcttctgctacgcggcgtggcgctgctcgacctgggcctggcactggccttctcgatccaccggcagggcgtggagatcggcatcgtcttctggtcctgcctgctgatgctggcggccggcacgctggtcctgctgctcgcctggcggccacgctgggcattgccttgcgccgccggagtgccgttgctcggcggggtgctggcgctgctgcgctga

SEQ ID NO: 322434 - DNA, 441 bp, Pseudomonas aeruginosa
atgcacacgcccgccagcaacaccgtcgccagcgtcattccctgcctgcgttaccgcgatgcgccggccgccatcgactggctgtgccggacctttggcttccagcgcaagctggtggtgcccggcgaggacggacaggtgctccacgccgagttgacctacgccagcccgaacggcgccaacggcatgctgatgctcggctcgagcgtccgcgacaacgcctacggtcggctgatgcggcacgtcgacgaagccggcggcaatacccagagcctctacctggtggtcgccgatcccgacgccctgttccgcagcgcccaggccgccggcgccgagatcgtcatcgacatcaaggacgaggactacggcggtcgcggcttcacttgccgcgatccggagggccacgtctggagcttcggcagctatgatccctgggcatga

SEQ ID NO: 322435 - DNA, 822 bp, Pseudomonas aeruginosa
atgaaaacgctcacgctgatcgatggccaggaggtcgccgccatcggccagggtacctggcatatcggcgagcagcccggagaacgcaagcgcgaggtcgcggcgctgcgcgaaggcatcgagctggggatgacgctgatcgataccgccgagatgtacgccgagggcggcgccgaagacgtggtcggcgcggctatcgcgggacgccgcgaagaggtcttcctggtcagcaaggtctacccgcacaacgccagccgcaagggtctgccggcggcctgcgagcgcagcctgcgccggctcggttgcgaaaccatcgacctctacctgctgcactggcagggccggtatccgctggaggaaaccatcgaagccttcgagcggttgcgcgaccagggcaagatcctgcgctggggcgtgtccaacttcgacctgggcgacatgtacgaactggacggcagcgcctgtgccgccaaccaggtgatgtacaacctggaggaacgcggtatcgaatacgacctgctgccctggtgccaggagcgcggcatgccggtgatggcctactgtccggtggggcagggcggcaggctgctacggcacccggcgctcggcgagatcgccgcgcgccacgacgccagcagcgcccaggtcgccctggcctggctactggagcagggggtgatcgcgatcccgaaggcggtgacgtccgctcacattcgcctgaatgcagcggcggccgacctggaactgagcgccgatgacctgcgggcgctcgaccaggcgtttccgccgcctacccgcaagcgaaacctggcgatcgtctga

SEQ ID NO: 322436 - DNA, 228 bp, Pseudomonas aeruginosa
atgtctattcaacatcgtactcaggatgcaattcgcaccctaaccgccgcatttgcgccgttcgactgcctgatccaggcaactcgtaaaggaaacttcagtttcaccatcgttgaccagcatggcgtggcctgccacagcgagcgcctgtatccggagcagtacgacgactccggcaaaatggaagaagtgatcaatcgagttcgcaagaaaacactggctgcctga

SEQ ID NO: 322437 - DNA, 396 bp, Pseudomonas aeruginosa
atgccgtcgcccgctcgcacgctgctcgtggccttcgtgtccgcctggttcctgctgggtgggctgggccacttcgtcttcaccgatttcttcgtcggcatcgtcccgccctacgtgccctggccgctggcggcggtgtgggtcagcggggtcttcgaactgctcggcgccgccgccctgctggtgccggcatggcgccggctggcggcgtgcgggctgttcatcctgaccctctgcgtgaccccggccaacctctacatgtggcagcaccccgacctgttcccatccttcccgccgacgctgctggccgctcgcctggcgctgcaggcgttcctcctcggctgcatcctggcgctgatgctggcgcgggacgaggcgccgctggcacgacgctag

SEQ ID NO: 322438 - DNA, 768 bp, Pseudomonas aeruginosa
atgctgaccatcgactacaacagctatcgcaccactaccccctacggcaaacgcgtgcgcttcctggtgctgcactacaccgcgctcgacttcgccgcctcggtcaaggcgctgaccaccggcgccgccagtgcccactacctgatcccggcgccgcatgaccccagctacaaggccgccggcttcaagggccagcgcatcttcaacctggtcgccgaggaagaccgcgcctggcacgccggcgtcagcggctgggcgcgccgcgacaacctcaacgacacctccatcggcatcgagatcgtcaacctcgcccgcgacgacgacggcgtgttcaccttccccgactacgagcgctcgcagatcaacgcactcaagcaactggcgaagaacatcctgcagcgctacccggacatgaccccgaagaacgtggtcggccactccgacatcgccgtcgggcgcaagtccgacccgggtccgaagctgccctggaaggaactctacgaggccggtatcggcgcctggtacgacgacgccacccgcgatcgctatcgcgaaggcttcgagcgcgacggcctgccgccgcgcgccgacctgctggaggcgttccgcctgtacggctatgcgctgccggcgacggtcgacgatgcctacttcaccagcctgctgcgcgctttccagatgcatttccgcccggagaactacgacggcgcgctggatgtggagacggcggcgatcctctacgctctgaacgagaaatacccggcctga

SEQ ID NO: 322439 - DNA, 474 bp, Pseudomonas aeruginosa
atgactgccgtcgcacaggtcgtcgccaaggcggaaatgctgatccgccgccccatcgccgaggtcttcgaagccttcgtcgatccggccatcaccgccaggttctggttcagccgcggcgatgcccgcctcgaagccgggaaacggctgcgctggcactgggacatgtacggggtttcccaggaaatcgaagtgaaagacctgcaaacgaaccgccgcatcctcatcgaatggccgaatggcgacagcaatccttcccaggtggagtggctgttcgaggaactgcccggcgccgggaccttcgtcagcatccgcaacagcggtttcgtcggcaccccggaagaggtcatcccgcgggtggtagacgccaccgaaggtttcaccctggtgctggccgggctcaaggcctgcctggagcacggcatcgccttgaacctggtggccgaccgttttccccgcggtctcgatggctga

SEQ ID NO: 322440 - DNA, 1317 bp, Pseudomonas aeruginosa
atgtccgcgaaggataccccggccccccaggccgccgagcccggtcgcgcccagccggtcgaagtccccggcggcggccactggtggcgccgcctgctggccttcgccggccccggctacctggtcgcggtgggctacatggacccgggcaactgggccaccgacgtcgccggcggcgcgcaactgggctacctgctgctctcggtaatcctgctctccagcctgatggcgatgctgctgcaggcgctgtccgcgcgcctgggcatcgccagcggcctggacctggcccaggcctgccgcgaacgctactcgccgagcacctgccgcctgctgtggctggcctgcgagacggcgatcatcgcctgcgacctggccgaggtgatcggcaccgccatcgccctgaagctgctgttcggcctgccgctggcctggggcgccttgctctgcgtgggcgacgcgctgctggtgctggtcctgatcggacgtggccagcggccgctggaggccttcgtggtggcgttgctgacactgatcttcgcctgcttcgcggtacagttgctgctctcgcgtcccgaactcggcgaggtgctccaagggttcttgccgagcccgcgggtgctcagcgatccggctgccctgtacctggcgatcggcatcgtcggcgcgaccgtcatgccgcacaacctctacctgcattcctcactggtgcagagccgcgcctacccgcgcagccttgccggcaagcgccaggcgctgcgctgggcggtggccgacagcagcctggcgctgaccctggcgctgctggtcaacgcggcgatcctgatcgtcgccgccagcgtgttccaccgcaacgggcacaccgaagtggtcgatatcgagcaggcccacgcgctgctctcgccattgctcggcctggaactcgcctcgctgctgttcgccgtggcgctgctcgcgtccggcctcaactcgacggtcaccaccaccctggccgggcagatcgtcatggagggcttcctccgcctgcgcctggcgccctgggcgcggcgcctgctgacccggggcgtcgcagtgctgccggtgctgctggtgaccctgctctacggcgaggacggcaccgcgcggctgctgatcttcagccaggtgatcctgtcgatgcagttgccgctggcagtgatcccgctgctacagttcgtttccgaccggcgcctgatgggcccgctggcgatcggcgccgggacccggtggctggcctgggcggtagcgctggcgatcgtcggcctgaacctgcaactgctggccgacttcgcgttcggctga

SEQ ID NO: 322441 - DNA, 702 bp, Pseudomonas aeruginosa
atgcgcgcgatcctgttcgatgtgttcggtaccctggtggactggcgttccagcctgatcgagcagttccaggcgttggagcgcgaactcggcgggaccctgccctgcgtggaactgaccgaccgctggcgccagcaatacaagccggcgatggaccgggtacgcaacggccaggcgccctggcagcacctcgaccagttgcaccggcagagtctcgaggccctggccggagagttcggcctggcgctggacgaggccctgctgcaacgcatcactggcttctggcaccgcctgcggccgtggccggacacgctcgccgggatgcacgcgctgaaggccgactactggctcgccgcgctgagcaacggcaacaccgcgctgatgctcgacgtcgcgcggcacgccgggctgccctgggacatgctgctgtgcgccgacctgttcggccactacaagcccgacccgcaggtctacctcggcgcctgccgcctgctcgacctgccgccgcaggaggtgatgctctgcgcggcgcacaactacgacctcaaggccgcgcgcgccctcggcctgaagaccgcgttcatcgcccggccgctggaatacggccccggccagtcccaggacctcgccgccgagcaggactgggacctgatcgccagcgacctgctggacctgcaccggcaactggcggcctcggcctga

SEQ ID NO: 322442 - DNA, 1248 bp, Pseudomonas aeruginosa
gtgaccgccgccctcgccgcgaacccgacccagcgctaccgctgggtcatcctgctgatcgccaccttcgcccaggcctgcgcctgcttcttcgtccagggcatcggcgcgatcgccgtgttcatccagaacgacctgcaactctcgtcgctacagatcggcctgctggtgtcggcggcgcagctggtgccgatcgtcggcctgctggtggccggcgagctgctcgaccgctactccgagcggctggtggtcggcctcggcacgctgatcgtcgcgctggccctctgcgcctcgctgtgggccaccgactacctgaccatcctgctgttcctggtggtcgtcggcgccggctacagcacggcgcagccgggcggcagcaagtcggtgtcacgctggtttgccaagacccagctgggcttcgccatgggcatccgccaggccgggctgccgctgggcggcgcgctgtccgctgcgctgctgccatacctggcggggatctacggctggcgcagcgcattcctcgccggcggcctggtagcgttcctcggcgcgctggccttcatgctcttctaccgcaccccgccggacgcccccgcgcccggcgcgaaccccgccgaacgcgacctgggcgcggtggtgaagtcgcggctggcgatgatcaccgacccggcgatgaagaacatcgtctgttccggggtggcgctgatctcggtgcagtacggcatcctggtgttcaccgtgctctacctgcacgagaccctggagatcggcatcggcatggccgcgaccctgctgttcgtcgcccagggcagcggcgtcgccgggcgcatcctgctggccgcctggagcgaccgctgccgcgccgggcgctacttcccggtgatggtctgcctcggcgcggtgatcctcggcctgctggcgctggtcctgctgcccctgcaatcgccgttggggatgggcctggtagtggcctggctgggcttcttcggcttcggctggtacggtccctgggtggcctatgtggcggataccgcgccggtcggcaagaccggcttcgccctcggcctggcgatggccatcaaccagttggcgatcgttctcgcgccgccggcgctggggctgctcaaggacttcagccacagcttcgtccccggctggctggcgctctgcctgatggcggcggtagcccttgtggtcaccgcctggagcggccgcggcctgcccaccgcgctgccacagaagcactga

SEQ ID NO: 322443 - DNA, 1296 bp, Pseudomonas aeruginosa
atgaccggatcccggaaaaccctgattctcggatgcgcctccaccggcgccaagttcaccccgcgcaaccacgccgccaccggcgaccgcctgctcgacagcatctgcaccggcgccaccatccgcaccgcccctggcgaactgctggacgaagcgcgccagctctacgagatgggttgccgctactaccactatcacgcgcgcaacccgctgacccaggaacagaccaccgacaacgacatctaccaggcggtcagccgcgccctgcagaaccgcttccccgacctgatgttgagcttcggcgccagccgcaacggcagcgaggtgcaggagaacatccgccgcttcggcgagtgggagcgggtcagccactgcgccatcccgctgcacctgggcggtgcgcacttcgtgacgatccaggcggccatcgaattgcaggtgatctgcgagctggagaagcaaaggcgcaagctcgacctcgactatgcctccagcccggccttcctcgccgacctgcgcgactaccagccgtcgacggcgctggaaaaggccgagttgcagacccactccaccagcaagggcgccgactacggggtgacctcgccgatgacccagttccaggtctaccgcaacgccatccaggcgcgccagaagctcggcctgttccacgaggtggagtgggtgcagcatgtgcgcagctacgccatgacccgtttcgccgtggagcacccgcgcctgcgcctgggcggttccggccagttgaacgtgatcctgctgttcggcttctcgccacgcctgccgttcccggagacctaccagcagttccgcgcggtgatcgagagcgccaagagcctggagtacgacatcggcgaacccggcgtgcgcaagcgcaaggtcagcatcacggtcggcgcggcggtgatgccgcagcatgccgcgcagcacttccggccgctcgacgtcggccctcgcgccggcaccccgctctgcgcggtgcgccggctggccgcctatgccgcgcaggcggacagccaggtcgacgtgctgcgggtcggcatggaggacacgccctatgcggtggacgatgacggccaggtgacgctcagcgacaactgccagttgctgcgccaggctctcgacgaactgcgcgccaacggcgccgaggccgagctcgacggcgaacggatcttccagcgcatgggcatggaacgcaccctcggcgaatacctgtcgctgcagcgcctgcatccgctcggcgaagccaacttcaccctcgcacgggagttcgtccagtga

SEQ ID NO: 322444 - DNA, 1248 bp, Pseudomonas aeruginosa
atgagcgcgctcttccccgccgcccccgacgccttcggtgccgacgaactgctgcgcctgcgccgcgagaccccggcctggggcagctacgcgcacttcgcccatggctccgccagcctgccgccgcaggtgctctacgacgccctcgacagctggctggaagccgagcggcgctggggcgtgcagcgcgccgccgagcatttcgccgagcccttgctggcggtccgcgacagcgtcgcgcgagtgctcggcacccagccacggcacatcgccctgctcgactgcgccagccgcgcctggtcggtggcctttgccgcggccctggccgcccatccacggatacgggcgatcagcagcttcgacgaatacggttccaacagcctgtgcctgctcgccgcgcgccagcagcgcgggctggagctgcgcctgatcgacgcacgcggcgacgccgcacagctgttgcaacggctcgacgagcagttgcacgacctcgcccccggccagacgccgctgctgtcgctcagcgcggtgcccaccgggcatggcgcggctaccgcgctggagggcgtggccgagcgcatccgcgcccatgacgggctgttcttcctcgatgccagccatgcggtcggccagttgccgctggcggtggaggcgatcggctgcgacgtgctggtgttcccgccgcgcaagtggctgcgcgggccgaagggactcggcgtgctctatctcggcgaacgtgccctggagcgcctggccctgcccgacgggctggacgtcggcggcgcgcaatggagcgacgccttcgccctgcaggcacgggatgacgcgcggcgcttcgaatgctcggagttcaacccggggctgcgcctggcgctcaaggccagttgcgactacctgttgcagaccgacgtccggcgcatcgcccggcgtaaccgccagttgcgcgaacgcatcgcccagcagctctaccgccggctcggctggacgccactggaacaagggccgcacgccagcgcgttgatgacctacgcagcccccgaactgagcggcgagcaatggctgaagcgcctccacgcgcgcggcgtgaacgcctcctacatcggcccgcagtatgcccgctgggcgctgcgcgagcaggcgctgccgggggtactgcgcctgactccgcactacctgaccgacgacggcgagatagagcgcctcggcgaggccctggaggattgcctgcgacagcgcgccgccagttga

SEQ ID NO: 322445 - DNA, 435 bp, Pseudomonas aeruginosa
atgcagacatcccccgctccggccatcgtcgccggcggcgcctaccagccggtggtgctccacgccggcatcgcctacgtcagcggccagttgccgcgccagcacggcgagctgcgctggaccggcaaggtcggcagcgaactcgacctggaacaggcccgccaggccgcccggctctgcgcggcgcgctgcctgcaggcgctggaggaggcgctgggcggcctgcaacgggtcgagcggctgctcaaggtgaccggctacgtcgccagcgcggcgggtttcgtccagcagccggcggtgatcgatgccgccagcgaatatttcgacgaggtgctcggcgcgcgcggcggccacgcccgcgccgccgtcggcgtggccgagctgccgcgcggcgccgcggtggaggtggaactgatcgcggcggtgcggccatga

SEQ ID NO: 322446 - DNA, 954 bp, Pseudomonas aeruginosa
atgatcgacctggtgatgctcaaggacttcctcgtcctctgtcggatcaagagcttcagccgtgcggcgcaggagtgccatgtctccgtgtccgggctcagccggcgtatccagaccctggaacagtggctcggcgcgccggtgttcgagcgccacaagcacgccctcgaactgaccgaggccggccgccagttgcaaggcgtggcgcaggacgcggtgcgcgccctggacaacctgcgccagtcgatccgcgagcgcgacgaagacgcccagcggcgcattcgtttctgcgccccgcacatcctctcctcggtgttcttcccgcactggattccgcgcctgcaggcggacttccgcagcgccaagttcagcgtcgactgcgattacctgccgcaatgcctgtcgcgcctgcgcgacggctcggtggactacgtggtggcgttgctcgacgaaggcgaggcggtgtcgcgccgcctgggcatcgacagcgaagccgagttccagcgcctggagcttggccacgaacaactggtggcggtctgcgcgccggacgccgccggccagccgttgttcaacctcgaccgcctgcagaccgaagcgctgtcgttcctcggctactccgaggaatgccacctgggttgggccctggaaccgctgctgcgcgacagcggcctgttcctccagcgccatcacagctccagccagaccgaggggctgcgcttcttcgcccagtcgcgcctgggcgtcgcctggctgccgcataccctggtccgcgaggacctcgccagccgtcgcctggtgcgcgccggcggccagcgcttcgacgtgccgctgcgctacaccctgatccgtcgccgcctgccgctacccggcgaggccgaacgcctgtggaccttcctcggcgagctggcgcgcccggcgccgcgctacgcggtggtcggcgcggcctcctga

SEQ ID NO: 322447 - DNA, 885 bp, Pseudomonas aeruginosa
atgatccgcgaactccgcaccctggtcgccgtggcgcgccggggctccttcgccgcggcgggggaacaggtggggctgacgcagtcggcggtgagcgcgcagatccgcgcgctggaacgcagcgtcggcgtcgagttgttcaagcgcacaccgcgcgcggcgcacctgaacgaggtcgggcggcaggcggtgcgtacggccgagcagatcctcgcgctgttcgacggcatcggccagggcgacagcccgcgcggacgcctgcgcatcggtgcggtgaacacggcgcagaccgggctgctgccggaggtgctcaagcgcctcgccgaacaggcgccgcacatcgagccgcaggtggtgccgggcgtctcgctgcacctgctggaccaggtggacgccgccgaactggacctggcgatcctcatccgcccgccgttcaacctgccgcgcgggctctccgcgcaacgggtcgagcgccagccgttcgtgctgattacgccgccgcaatgcaccacgacggatgcgctggaattgctgcgcacgcaaccgttcatccgctacgaccatgtgtccttcggcggtcgcctggtgggcgatttcctcgaggcgcagcagctcaggccgcgccaggtgatggagctggatgagatcgacgcgatcgcgcggatggtggagaacggtctcggcgtggcgctgctgccccgggccgggctgtggctacgcgagccggcgcgggtacgggtgatcgaactgggcgcgctggaattccagcgcgagctggtgatggtcagccgcagcggctcggcgcaggacgacctggtcgatgaattccgccgcgccctgctggccgagacggcggctcaggaggccgcgccgaccaccgcgtag

SEQ ID NO: 322448 - DNA, 426 bp, Pseudomonas aeruginosa
atgagcctgatgcccttccacctcgccatccctgtccacgacctgccggccgcccggcgcttctacggcgaagtcttcggcctgagcgaaggccgctccgccgagcactgggtcgacttcgacttcttcggccaccagttggtcatccaccagcacccgcagaccgattcccagcgccacgccggcagcaacccggtggacggccacgacgtgccggtgccgcatttcggcgtggtcctcgcctgggacgactggcacgccctggccgaacgcctgaagcagcgcggcacccgcttcgtgatcgagccctacatccgcttcaagggccaggtcggcgagcaggccacgctgtttctcttcgacccctgcggcaacgcgctggagttcaagagcttccgcgacatggaccagttgttcgccaagtga

SEQ ID NO: 322449 - DNA, 273 bp, Pseudomonas aeruginosa
atgccctaccgcgttctcctgctcatcctggccctgacgcccgccctcgcctcctccgccaccctggacgaacgcctgggcgaccttgaacacgccttcaagcccgacctcgacgggacgacaagcgcaaagccggccagcccgtcgccggagcggttcaagctggcgccgctaggtagcgtggtgcgcaagaaagagtgcgcgacgtcgagcctgccggatgagcagtccagctgcgcggcgctggagttctgcacggactgcgcgcagtaa

SEQ ID NO: 322450 - DNA, 324 bp, Pseudomonas aeruginosa
atggctaagaaattctccgaccttcgggcgcaaatgtcgcctgagggacaggcccgcgtcgaggccaaggcccaggaactgttggctgaaatgcccctgaatgagttgcgccaggctagaggcttgtcgcagaagatgctgtctgaagtgctgcacgtgcagcagccggcaattgccaaaatggagcggcgtacggatatgtacatctccaccttgcgcagccacatcgaagccatgggcggccaactggaagtgattgcacgcttcccggatggcgcggtgaaaatcagcaacttcgcggatatcgaagaggcgggcgcctaa

SEQ ID NO: 322451 - DNA, 474 bp, Pseudomonas aeruginosa
gtgccgacgggccatccagaggttcgacagggcgaacagcgtcaccagttgcgcggtgttcttggtcagtcccccgaagcgcacctgcaaggcctgttcggctacgcctgcgaggcttacaagcttctcgcccgtgatgccgtgtatgacccgttctggtcgctgatcatgcaggacgtgaaggtccaggtcgaagccgacccgctgatcgaacgcgtcgaataccgccgctaccacaagacgaccatgggattctccggcaagaactgcgagatgttcctgggccagttcatctgcctgatcgcacgggagcgcatccccgcaaaaaaggcgattgagtccgcccaccgactggagttctggcacgtcatcgaagaccactatctggccaagggttggactcgccgcgagctggagcagtacatcaagcacctgatttccgaccgctacctcaggcgaggctatgccgtctga

SEQ ID NO: 322452 - DNA, 276 bp, Pseudomonas aeruginosa
atgagcatcaccaagctcccggacggcctctggttcgttgacgtcgaaccgatcaaggacaagcgcttccgcaagcggttcaagaccaagggcgaggcccagcgcttcgaagccacggtgcggcagaagtgcacagagaacctggcgtggagcatcaaacccaaggatcgccgaaggctctccgagctggtgcaagtctggtacgacctgcacggccattcactgcgcgacgcgcctcgacgactcttcaagctgctgcaattggctgcccgatag

SEQ ID NO: 322453 - DNA, 879 bp, Pseudomonas aeruginosa
gtgccgaccctatcacgccgcctgctctggccgctggccatccttttactggttctcggccgcccgctcgcggccgccgacctctactacctcggccagcgcatcccggacatccagaagccctgggacagccacgactaccaggtgctgatcgacgccctgaagaagatcgaggaaacccagaaaaacgccctgccgcgacgcagcggcgaattcaccgggccgctctacctgcgcatggtcagcgaggaaaacttccgcccgcagctgaacatctacagccccctggagatccgccagaacgaggcccgcgaagtgctgttcaagctcaaggagctgatgcgcctgtacttcgacttccgcgccgccaagcagccctacggcgccgaagcgctgggcctgatgagctactcgctgcgcgagcagtcgatcctgttcaccctcaccgtcgaattctggatgaccctgtcccaggccgaacagcgcaaccccgcgcgcctgcagggcatgcaggaaaccaaggcggccgcggcgatgctcaccggcagcgccctcgactacctcggcctcaccgcccagttcgagcgccaggacctggtgctctactccgccgaactggccaaggaaatgcccgagctgttcatccacctgccctccccggtgcgcgcccagttgctggaacgcatcgccggtttcgccaaggaccacccttaccccgaggtccgcgacaacatgcgcgacctgcaaccggtgttgcaggcgatccaggccgacgtggaaaaacagctggcgcccgggcggaacgccaaggcaccggacaaacccctggacctgagcccgcctccggaggggaaacccagcggcgtcaacggtttatga

SEQ ID NO: 322454 - DNA, 684 bp, Pseudomonas aeruginosa
atggcaacggcgcagtgggacggcttgcaggcggtattcgaggacctcggcggctacggcgcgctggcgcgccaggcggcgcagggcgaggggccgctggtggggcatctgcaacggaccaacatccagctcgcggcgatcccggtgttcacccgcaagggagtcgccgagaccacggtcaacgacctgctggaggcggcgcgggtctcgcggcggactttctacaagtatttcgccggcaagctggaggtgctggaaagcatctaccacagcgccgtgcaattgctgctggcgcgcttcggcgggctgcgcagcgaggcaggcagcgacgaggactggctgcgggcgatggtctcgctgttcttcgactaccacctggcggtcggtccgatcatccgcatgatgcaggaggaggccctgcatgccggctcgccgctggcggcgcaccggcagcgcgcgcacctgaagattatcgagctgtgggccgagcgcctgggcgcccagggcgcggcccacgatgcgctgacctaccgggtgctgatctgggcgatggaggcggcttcgctggagctgctcaatgccagcgacccgctggagctgccgcgggtcaagcgggtgctcggcgacctgctggtgggtacgctctgtcccagcacccaggctccgacgagactgcaagggtaa

SEQ ID NO: 322455 - DNA, 942 bp, Pseudomonas aeruginosa
atgtccgcgacaccctatctgctgcaaccgccgctggcggtcggattcgcccgcctgggcttcggctccctctcgctggagtcgttgcgcgaacgctacgccgcaccgtccagcggctcgcgcttcatcgagctggacggtttcccgctgcactaccgcgacgaaggcagccgcgacaagccggtactggtgatgatccacggcgtagtggcctcgctgcacacctgggacgactgggtgaaggcgatgtcgccgtacttccgcatcgtgcgcttcgacgtaccgggcttcggcctgaccgggccggggcgtgacagccgttactctggcgagcgcatggtggcgatcctcggccagttgctcgatttcctgaagatcgacaaggcctcgatcgccggcaactccctgggcggctatatcgcctggaacttcgccctggcgcagccgcagcgggtggagcggctggtgctgatcgacccggccggttaccagatgcgcaaggtgccgtggatgatcgcctcggcggcgctgcccggctcgaccctggcgatgccgctgtggatgccgcgagcgctgatcgcccagggcatcaaggaagtctatggcgagccggggcggatcaagccgggggtggtcgaccgctactacgatctgagccgccgcccgggcaaccgcaagggcatgatggagatcttccgcgtgttgctgaaggtcaaccgcgaggagctcggcacctccggcgaacgcatcgcccggatcgtcgcgccgaccctgctgatgtggggcgaacgcgaccgctggatctcgccgaagcatgtaccgctgtggcaacgcgacctgccggggatccaggtgaagacctatccgggcgtcgggcatatccccatggaggagattcccgagcagaccgcggcggatgcactgcgcttcctgatggcctga

SEQ ID NO: 322456 - DNA, 834 bp, Pseudomonas aeruginosa
atggccagcaccacccccgaaggtctggagatccgcccgcgtcatctggacttcgacctgcccgatccgatgccgcgccattggcacagcggcgacgctttcaagacccacatgttcaacgccatgtcggtgctgttccccgatggcgagcgcttcttcatcgactccgtgcgccactaccgcgaacgggtcgaggacccggcgctgaagcaacagatccgtggcttcatcggccaggaaggccaccacagccgcgagcacctggtctacagcgaccgcctgcgcgccctcggctacgacatcgaccgcctggaaggcggcgccaaacggcgcatccgcttcgcccagcagaaactgcacccgtcgcggcaactggcggccaccgcggccctggagcacctcaccgcgatcatggccgacggcctgctgagcaaccccaggtggctggaaggcgccgacccgaccatggcccgcctgtggcgctggcacgcactggaggaaaccgagcacaaggcggtggcctacgacgtgttcatgctggtcaacggcaaggccaggctgcgccgccgggcgatggtccagggcaccttcttcttcgccctcgacaccaccaagggcctggtccacatgctcaagcgcgacggcctgctgtggaacttcaaggtctggcgcgacggcatcaagtggctgtggggcaaggacggcgtgttccgctcgctggtgggcgtgtacctggacttctacaagaaggacttccacccctggcagcacaataacctgcacctcatcgagcagtaccgcgaccagttcgaaccggaaccgaaggccgcctga

SEQ ID NO: 322457 - DNA, 1020 bp, Pseudomonas aeruginosa
atgaaacaaccgctcaatttcaccgccgaactggtgccggtggcctatgccgaggcactcctcgatcttgtcgcggagtacggcgtatcccgccaggcgctgttcgacgctgcgcgggtgcgtcccgaggtgctggacagcccgaacggccgcctgtccttcctcgacttcaaccagctcacctacagcgcccaggccctgtgcggcgagccggcgctggggctggtgctcggccagcgcctgaacgtctccgcccacggcatcctcggctacgcggtgctgtccagcgccaacttgggcaaggccatccagttcgccctcaagtactaccgggtgctcggcctggcctacgaactggaactggtgctcgatgacggccgcgccgagttgcgcgcggtggagtcgatgccgctgggcgccgcttcggtgttcgccgccgagggcctgatggcgacgctgtattccatcgcctgcttcctggtcggcgagccgttgcaggacgtgcgggtcggcttcgcctatccgccgccggcccatgcccggcgctacgccgaggtgttcggggtggccgcggagttcgagcagccctggcactggctgagcatgcccagcgagtacctggaacgaccgatggcgctggccaacccggccacggtgcagatgtgcgagcagcagtgcgaggcgctgctggccaccctggacgtccaggaaggcctgctgacccgtgtgcgccgcctgctgctggcgcgtcccggcgacttccccgatctcgaacaggccgcccgcgaactgcacaccagcgggcgcagcctgcgccggcacctgtcgtcgttgggcaccacctaccagcaggtcctcgacgatgtgcgcaagcgcctggccctgcaatacctgaccaccacccagctacctctgtacgagatcgccctgctgctcggcttcaacgattcgtcgaacttccgccgggcgtttcgcaagtggaccggcaagctgcccagcgactaccgcgaagcgccctga

SEQ ID NO: 322458 - DNA, 951 bp, Pseudomonas aeruginosa
atgattaaagattacatagggttttattctgataatggattttgggttaatcggcgttatgattggggaaataatttagatagaggcatgctggaagggataattcaacaccaggcgatttggcatcattgtcctgagttttccgccgccgtatgtgtcgatggaatgatattgcttagggttgaacggctttttgaagtggttccctctatgtcaaaccctgatgaaattttggctgcatttcattggtgggatgatcatcttgattatgccaatgctctgcagttatatatcgtgtcagaggctcttcggtgttctagttcgtcaaacatagacaccatggagataactgttgaaagcacttgtcgggtaggcttttcagatggtcgcgcagtcagaagtaaattttctgagtgtgtgaattttatgtcggcgcgaagacgaatatatcttggactgactcggagtcctgatgagatgggggacgctttgtcaacctactctgtagttagtgaagagtctttgcgtaaggcatttaggttgtttgaagtggcttgccataatccggtgcatgtggggtggttaagctttttggctagagcgggatatgcatttaggaaaaatgactttagagctgcgctggtttttatatggtttgtgattgaatcgattgccaaggacttgtggagtgagaaggggtgccggtctaagtttcctcgttctgctgtcgtgttgcgtgaattgatgaggaatgatgtgatttctattcggctttatcatgcactggacttcgtcagggcgaggagaaactccttgatgcacgaaccaattgaaacgacggtgtttccagatgactgtttgaaagccgcagactccgctttagagcttttctcgctgaccggaaatgagagtggcttggttttgggttggaagtgtggtgtggaattttaa

SEQ ID NO: 322459 - DNA, 504 bp, Pseudomonas aeruginosa
atgaaggccctatcgtttgccatgctggtcgtagaggccgtcaaggatgggaagacaaagctgtcagtcggtcgcacccgtgtgctgcacatgatcgatggattcgactacgacgatgagttggaggagtacagcgtgcgtatcgatcctaggtggcgtggcctttatgccaaccaggagtacgcgctgatcgactgggagaagcgtctgcagattcggccgggccaggacatggccaagtctctacagcgtttggttgccacgtcgagtgacgcagttcagcggtatcagttgagttggctcaaggaaaagctgcagtactccagtccaatgcgaaagttcaaggaggcgctgatcactgccatgcgcgagctcgaacgtgtagagatcatagctggtgggcgcattgagctcagtaccagggggaaggaacaggtgatttggcacaagatttcgggttctctggctaggcgtcgggatagcgttccgcctgtatcgggatag

SEQ ID NO: 322460 - DNA, 657 bp, Pseudomonas aeruginosa
atgccagcacgcaacgcaagagagcatcatcaagatcagattcgctcagttgctctaatgcacgagctaatgtgccggacaggctgtacaaatccacatcagtttgccggctggtttgatcaattgacgcacagccatacccaggactcagggaaatggcgtgcaaacttcgcaggtgctcgccccctgtcaaagaatcagctcgatgcgctaggcaaaatcttcacagacgcccatagccattatcagaatggcccatgcgacctatggcgcgcgctttggggagagactgccgaccttattgcctgtgtccgcagtcacccaaagtcttccccccagatgcctttcgcggtaagcgagagagctgtgcagctatcaatacttgctgcagcagaagatgagattacgtttgaagacttcatccgagcgatagctctataccgactgcgcaaagaaactgaaccatttgcgcgtatcgacggtattggtcttaatcaaaccggcaccatttggcgaaacatccagtcgtgcctaaaagaaaacaaggtgattaccaaactcgaccggctgggtctgagacgacttgtcattgaagagttggagcaattggaagccgagcgtaaaagggacaatccaaaggcgcgcttcttcgactag

SEQ ID NO: 322461 - DNA, 204 bp, Pseudomonas aeruginosa
atgatgctacacgatgatgaaatgcagcctggccgggggctgcaaacgttcgacgttgccgcccaccttaaggacgaggagaccattcgggcctacctgcaggccgctcttgatgatcctacgccagaggcgttatggctcgctctgggcaacgtggccgaggcgctggagaggatttcggccaataaacaggttcgtgattag

SEQ ID NO: 322462 - DNA, 1314 bp, Pseudomonas aeruginosa
  misc_feature (560)..(569): n is a, c, g, or t
atgttcgttcagttttcggtagagaattttctatccttcaaagatgaagcaatgatctcaatgcttgcatctaaacggagatccaaaagcaagttattagatgaaaactcaacttttgacgccctccccgatataaaactactgaaaacagcagtaatatacggcgcaaatggcagcggcaaaagcaacctcttcaaagcaataaggtttatgaaaaaccttacaataaactcttcgaaagagtcgcaagccgaagaagaaattgaaataaccccatttcttgccagcacaaaaaccccaaacaaaccatcaagattcgagatgattttcatctcgaatgagacactatttcagtatgaattttccgtttccagaaagagaatagaacacgaaaaattaacagcaaaatttaaaagtagcgaaaaagaaaaagttctattcgagagaacccaagataagatatcggtaaaagcccccttccccgaaggaaaaggcctagaaaaaagaacacgtgataacgcattatttctttccgtatgcgcaaactttgatggcgaaannnnnnnnnnagatataattcgctggtttaaatcgatcagagtgattggcggcctgaccgatcaagcaatgatatcttttacacgccgacagctagaaaatagcaatgaaagcgcaaaaataagagacttacttaactcctttgaccttgggatcagcaacttcaaagcgtctgattccaagcagcaagaaggcaaagaaagtgctctagttgaaaacctaagatcctttgtcgagcaaaaaataggacaaaagatatccttcgacatcggaagaatatcaactgaacataaggttttcgatgaaaacggaaaggctgccggccttattgagttcgacctagagaaaaatgagtcagaaggcacaaagaaactagtagccctatctggccctctaatcgacgtcctagaaaactcactaattctttttattgatgagtttgacgccaggcttcaccctgtaatatccaaacaactaatctcaatatttaataactcaccaaaaaacaacaacaacgcgcaactgattgtggcatctcatgacaccaatctacttgacaaggatttactacgccgagatcaaatctggttcacagagaaagacatctatggttcctcacatctgaactcgctacttgagtaccgcgtgagaaatgatgcttcctttgaaaaagactatatatctggaaaatatggagccatcccccttcttggagactcctgcatgatcttttctgagtccgagcatgaggaataa

SEQ ID NO: 322463 - DNA, 999 bp, Pseudomonas aeruginosa
atggacgccggcgtgttcgtcagccgcaacgaagccgaggccacctcgttctccagcgcactggcgctgtacgccaaggaggtgaccagcaagaagcgcagcagcgcctccgagctatcgcgcattcaagccatgcaacgccaccctctcgcccttcgctcgcttgcgagcattcgtggctccgacatggccacttaccgcgacatgcgcctcgaagagggcctggccccttccaccgtgcgccgtgagctggcactgatctctcatgtcttcaccatcgcccgcaaagagtggcgtatggagtcgctaagcaacccagtcgaattgatccgccaaccgagcgtcgatgatgcccgagagcgaagaatcctcagtgcagatgtgtggacacgcaaagacgggaaactggcatgcgagcacctgggcgagctggaaatgatctgccgccactcgcgctcggccgagctgccgaagattatcgccttcgccgtagaaacggcgatgcgtcgtagcgagataaccggcctgcttcgcgctaacgtaaacctgaccaagcgggtagccctactgcccacaaccaagaacggctctgcccgtggcgtgcccctttccaaaaaagcagtggagatactggaaaatctcgccgagcatgatgatggccgctgctttaaaagccggccggactcaatcaccaaggctttcgcggacgccatcgccgatgctcgcagcgcctacacggaggggctacgccttcacctcaaacagaaaaagctttcccaggacaagatcgaaaaacacatcagcgacgatccgtttctgagggacttacgctttcatgaccttcgccacgaagccacctcgcgcctggccgaagttttcccactgcatgagctgaccaagatcaccgaccaccgggatacccgaatgctattgcgctactaccatccaaacccggaagacctagcccaaaagctgaagcaggcaacagacgagacataa

SEQ ID NO: 322464 - DNA, 645 bp, Pseudomonas aeruginosa
atggaagccgcaaaacccgcactaatacgcgaaacattccccgtcgggcctttgcagtgcaactgcaccatcattggcgatccgctgaccaggaaggccatcgtcgtcgatccgggcggcgaccacgaactgatcctgcagcgcctcgaccgcctcggcctgcaggtggtcagcatcatccatacccacgcgcacctggatcacttcctcgcctccggcgagatgaagaagcgcaccggcgccagcctgcacctgcacaaggacgaccagttcctctgggacaacctggagatgcagtgccaactgttcggcgtgccctacacgccggtgccggccccggaccgctggctggccgacgacgaggaactggcctgcggttgcggagtggcactgcacacgccggggcatacgccgggctcgatgagtttctggttcccccgggcgaagctgctgatcgccggcgacaccctgttccgccgtggcatcggccgcaccgacctgtggggcggcgactcggcggcgatccagcgttcgatcaggcagcgtctgtacagcctcgacgaggacgccacggtggtcgccggccatggcccggacaccacgctgggcgaagagatgcgcgagaaccccttcgtcaggggctga

SEQ ID NO: 322465 - DNA, 714 bp, Pseudomonas aeruginosa
atgttcacctcccgttgcctgcctctggccgcagccgtcaccgcactggcgctgctcgccggttgtgccaacaacaacccctacgacacgcaaagccaaagccagggtggcatgagcaagacggccaagtacggcggactgggtgcgctggccggcgccgtcgccggcgctgcgatcgaccacaacaaccgtggcaagggcgcgctgatcggcgctgccgttgccggcgcggccgccgcgggttatggctactacgccgacaagcaggaagccgagctgcgtcggcagatggaaggcaccggcgtggaagtgcagcgccaaggtgacgacatcaagctgatcatgccgggcaacatcaccttcgccaccgattcggcgaacatcgccccgagcttctacgcgccgctgaacaacctggcgaactcgttcaagcagtacaaccagaacaccatcgagatcgtcggctacaccgacagcaccggcagccgccagcacaacatggacctgtcccagcgtcgtgcgcagagcgtggccggctacctgaccgcccagggcgtcgacggcacccgcctgagcacccgcggcatgggcccggaccagccgatcgcgagcaactccactgccgacggtcgcgcgcagaaccggcgcgtcgaggtcaacctgcgaccggttccgggcgcccagggcccggcgcagacccagccgcagtactga

SEQ ID NO: 322466 - DNA, 915 bp, Pseudomonas aeruginosa
atgctgtcgtttctcccccatttcctgcgcggctccctggccggcctgctgctggtgtccagcaccctgtgctgggcctgcctgctgttcggcatgaccctggtcaagctgctcctgccgttcgccgccgcccagcgcctgtgcagcaagatcatgagcctgatcgccgaaggctggatcgcctgcaacaagggctggatgaacctggtccagcgcacccgctggaacgtccagggcctggagggcctggagtaccaacactcctacctggtcaccagcaaccaccagagctgggtcgacatcctcgtcctgcaataccagttgaaccgacgcatcccgctgctgcgcttcttcctcaagcaggaactgatctgggtcccgatcatcggcctgtgctggtgggccctcgatttccccttcatgaagcgctacagcaaggcctacctggccaggcacccggagaagaaaggccaggacctggcgaccacgcgcaaggcctgcgccaagttcagccgcatcccggtagcggtgttcaacttcctcgaaggcacccgtttcacccgcgccaagcacgacgagcagcagtcgccgttccgccacctgctcaagcccaaggccggcggtatcgccttcgtcctcgacgccatgggcgagcaattgaagaccctggtcaacgtgaccatccactacccggacggcagcccgaccttctggtgcctgctttccggacgcctgaaggacgtcgtggtgcgcttcgaggaactggagattccgcgccagttcgtcggcaagagctacgaccaggacgccggctaccgcgcggaattccagcaatgggtcaaccagctgtgggagcgcaaggaccagttgctcgacagcctgcaccgcgagtttcccggtaacgccaaggcgtag

SEQ ID NO: 322467 - DNA, 2115 bp, Pseudomonas aeruginosa
atgcataccttcttcatcgccccgaccggtttcggcgtcggcctcacctcgatcagcctcggcctgcttcgcgccctggaacgcgccgggctgaaggttggcttcttcaaacccatcgcccaactgcatcccggcgacctcggcccggagcgctccagcgaactggtggcgcgcacccacggcctggatacgccgaagccgctgccgctggcccaggtcgagcgcatgctcggcgacggccaactggacgaactgctcgaagagatcatcagcctctaccagcgcgccgccgccgacaaggacgtggtgatcgtcgaaggcatggtaccgacccgtcacgccagctacgccgcgcgggtcaacttccacctggcgaagagtctcgacgccgaggtgatcctggtctccgcgccggaaaacgagacgctcaccgaactgaccgaccgtatcgagatccaggcccagctgttcggcggcccgcgcgacccgaaggtactcggggtgatcctcaacaaggtccgcggcgaggccgacgcggccaacgccgaggacggcgtggcggacttcgcccggcgcctcaccgaacactcgccgctgctgcgcgacgacttccgcctgatcggctgcattccctggcaggacgaactcaacgccgcgcgcacccgcgacatcgccgacctgctcagcgcacgggtgatcaacgccggcgactacgagcagcgccgggtgcagaagatcgtgctatgcgcccgcgccgtgcccaacaccgtgcaactgctcaagcccggcgtgctggtggtgacccccggcgaccgcgacgacatcatcctcgccgccagcctggccgcgatgaacggcgtacccttggccggcctgctgctgtgcagcgacttcccgcccgacccgcggatcatggaactctgccgcggcgccctgcagggcggcctgccggtgctgtcggtggccaccggctcctacgacaccgcgaccaacctgaaccggatgaacaaggaaatcccggtggacgaccgcgagcgcgccgagcgggtcaccgagttcgtcgccgggcacatcgatttcgaatggctcaagcagcgctgcggcacgccgcgcgagctgcgcctgtcgccgccggcgttccgctaccaggtggtgcaacgcgcgcagaaggccggcaagcgcatcgtcctgcccgagggcagcgagccgcgcaccgtacaggcggcggcgatctgccaggcgcgcggcatcgcccgctgcgtgctgctggccaagccggaagaggtccaggcggtggcccaggcccagggcatcgtgctaccggaaggcctggagatcatcgaccctgacctggtgcggcagcgctacgtcgaaccgatggtcgagctgcgcaagggcaaggggctgaacgcgccgatggcggagcagcaactggaggacagcgtggtcctggcgaccatgatgcttgccctggacgaggtcgacggcctggtctccggcgccatccacaccaccgccagcaccatccgcccggcgctgcaactgatcaagaccgcgcccggctacaacctggtgtcgtcagtgtttttcatgttgttaccggaccaggtgctggtctacggcgattgcgcggtgaatcccgatccttcggccagtgacctggccgagatcgccgtgcagagtgccgcgtcggcgcaggctttcggcatcccggcacgggtcgcgatgatcagctactccaccggcgactccggttccggggtggatgtcgacaaggttcgcgaggccacccgcctggcgcgcgagcagcgccccgacctgttgatcgacggacccttgcagtatgatgccgccgccatcgccagcgtcggccgccagaaggcgccgaacagcccggtggccgggcaggccacggtgttcatcttccccgacctgaacaccggcaacaccacctacaaggcggtgcagcgcagcgccgattgcgtcagcgtcgggccgatgctgcaaggcctgcgcaaaccggtgaacgacctgtcgcgcggcgcgctggtggaagacatcgtctacaccatcgccctcaccgccatccaggcggacgcccaggccccggcctga

SEQ ID NO: 322468 - DNA, 1185 bp, Pseudomonas aeruginosa
atgccctcacgcaacatactggtgatcaactgcggcagttcgtcgatcaagttcgccctggtcaacgaggcccactccctgtttcccctgcacggcctcgccgagcgcctgggcagccgcgatgcggtgctgcgctggaagcgcggcggcgacagcgacagcctgatgattcccaacgccgaccaccgcgccgccctcgcccagttgctgccgatggtgcagaacgccgcgggcggcaagctccacggcatcggccaccgggtggtgcatggcggcgagctgttcacccatgccacgcgcatcgacgaccgggtggtcgaggcgatccgggccaccgcgccgctggcgccgctgcacaacccggccaacctgcaaggcatcgaggcagcgatgacgctgtttcccaagctgccccacgtcgccgtgttcgacaccgccttccaccagagcctgccggagcacgcctaccgctacgccctgccggaagccctctaccgcgagcatggcgtacgccgctacggcttccacggcaccagccaccgctacgtcagccaccgcgccgcggaaatggccgggttggcggtcggcgacagcagttggctcagcgcccacctcggcaacggcagttcgacctgcgccatcgtcaacggccagagcctcgacaccagcatgggcctgaccccgctggaaggcctggtaatgggcacccgcagcggcgacgtcgaccccaacctgcacagccacctggcgcggaccctgggctggagcctggagcgcatcgactcgatgctgaacaacgaaagtggcctgctcggcctctccgacctgtccaacgacatgcgcaccctggagcaggagcgcgagcagggccaccccggcgcggccctggcgatcgaggtgttctgctaccgcctggccaagtccctggcggcgatgagctgcgccctgccgcaactggacggggtgatcttcaccggcggcatcggcgagaactcgccgctggtgcgtgccaagaccgccgcccacctgcggctgttcgacctgcgcctcgaccaggaggccaacgcccgctgcgtgcgcggcgtcgccgggccgatccaggccgcggggcatccgcgggtactggtgatcccgaccaacgaagagcggcagatcgccctcgacacgctggccctgctcgactga

SEQ ID NO: 322469 - DNA, 486 bp, Pseudomonas aeruginosa
atgcagatcgcggccaacaaggcggtttccatcgactataccctgaccaacgacgccggggatgtcatcgacagttccgctggtggcgcgccgctggtctacctgcacggtgccggcaacatcatcgtcggcctggagaaggccctggaaggcaagaacgtcggtgacgaactgagcgtcgccatcgagccggaagacgcctatggcgaatacagcgccgaactggtcgcgaccctgacccgcgagatgttcgaaggcgtcgacgaactggaagtcggcatgcagttccacgcctcggctccggacggcggcatgcagatcgtcaccatccgcgacatcgacggcgacgacgtgaccgtcgacggcaaccatccgctggccggccagcgcctgaacttcaaggtcaaggtagtcgacgtgcgcgaggccaacgccgaggaaatcgcccacggccacatccatggcgaaggcggtcaccaccactga

SEQ ID NO: 322470 - DNA, 483 bp, Pseudomonas aeruginosa
atgagtgcctttcacgatctcaccctgcagaggttggatggacaggacctgccgctttccccgttcaagggcaaggtgctgctggtggtcaatgtcgcctccaaatgcggcctgacaccccagtacgccggcctggagaatctctaccagacctaccgcgagcgcggtttcgcggtgctcggcgtgccctgcaaccagttcgccgggcaggagccgggcagcgaggcggatatccagtccttctgcagcctgaactatggcgtcagcttcccgatgagcgccaaggtcgaggtcaacggcagcgcgcggcatccgctctatcgcctgctggcgggcgagggcgcggagtttcccggcgacatcacctggaacttcgagaaattcctgctcggtcccgacggtcgcgtgctggcgcgtttcagcccgcgcacggcgccggacgacccggccctggtgcaagccatcgagaaggccctgggttga

SEQ ID NO: 322471 - DNA, 828 bp, Pseudomonas aeruginosa
atgaaccgacagatcgtgcgcagcgcgctgttcgtcccggcgacccgcccggagcggatccccaaggcccttgccagcggcgccgaccgggtcatcgtcgacctcgaggatgcggtggaggaggggctgaaggtcgaggcgcgggccaatctccggcgtttcctcgtcgatacgccggaagcccgggtgctggtgcggatcaacgcggcggagcatcccgggcatgccgacgacctggcgctgtgccgcgaccacgccggagtgatcggcctgctcctgccgaaagtggagagcgccgcccaggtgcgccacgccgccgtggccagcggcaagccggtctggcccatcgtcgagagtgcccgcggccttgccgcgctgggcgagatcgccgccgccgcgggggtcgagcggctgtccttcggcagcctcgacctggccctggacctcgatctcaacagcggcagcaacgcagccgaacagattctcggtcacgcccgttacgcactgctcctgcaaacgcgcctggcaggcctggcgccgccgctggacggcgtctatccggcgatccagaaccgtgccggactggtcgaggcagtgcgcttcgctcgcgacatgggcttcggcgggttgctgtgcatccatccgagccaggtcgagccgatccaccagacattgatgccgagtcccgcggaactggagtgggcgcgtcgggtggcagaggccggcgcctccggtgccggcgtcttcgtggtcgacggcgagatggtcgacgcgccggtgctggggcgcgcgcgacgcctgctggagcgggccggggagggtggctga

SEQ ID NO: 322472 - DNA, 1203 bp, Pseudomonas aeruginosa
atgacacaatcccaccgaccgcgcccgctcgacggcatcaccgtggtcagcctggagcacgccatcgccgcgccgttctgcacccgccaactggccgatctcggcgcgcgggtgatcaagatcgaacgccccggcgtcggcgatttcgcccgcggttacgacgagcgggtcaacggcctgtcgtcgcacttcgtctggaccaatcgttccaagcagagcctcagcctcgatctcaagcaggccgaggcgctgccgttgctggagaagctgctggccggcgccgacgtgctggtgcagaacctcgcgccgggcgccgccgcgcgcctgggcctgtcctacgaggcgttgcgcgagcgcttcccgcgactgatcgtctgcgatatctccggctacggcgaaggcggtccctacgagaagaagaaggcctacgacctgctgatccagagcgagggcggcttcctttcggtgaccggcggcgccgggccgaacgagatggccaaggccggctgttcgatcgccgatatcgccgccggcatgtacgcctacagcagcatcctttcggccctgctgctgcgcgagcgcaccggcgagggcagccgcatcgacgtgtcgatgctggagagcctggtggagtggatgggctacccgatgtactacgcctaccaggacgcgccgccgccgccgcgcgccggcgcttcgcactcgaccatctacccctatgggccattccccgccggcgacggcggcacagtgatgctcggcctgcagaacgagcgcgagtggcgggccttctgcgacaaggtcctgcgccgcccggagctggccgacgacgaacgcttctcggcgaacttcaagcgctcggccaaccgcgaagagctgcgtgcgctgatcgtcgaagccttcgccgccttgccggccgccgaggtggtggcgcgcctggaacaggcgcagatcgccaacgcccacgtcaacgacatggccggggtctgggcgcacccgcagttacaggcgcggcaacgctggacctccatcgacagcccggccgggcgcctgccggcgttgttgccgccggccagcagcagcgccttcgttccgcgcatggatgcggtgccggcgctgggcggcgacagcgacgcgctgcttgccgaactgggctgtaccgcggccgatatccagcgcctgcgcgcgaccggaacggtatga

SEQ ID NO: 322473 - DNA, 1353 bp, Pseudomonas aeruginosa
atgaccgactacacccagcaactcgccggctttctcgccggcctgcgctaccaggacctgccgccggcggtgttggcgcggatggaagaattgttcctcgactggctcggctcggcgctggccggcaagggccagcatccgatcccattgttcgagcgctacgccgaacgcatgggcccggccgatggtagcgcgcagatcctgcccagccggcggcgcagctcgccgtatttcgccgccctggtgaacggcgcggcttcccacgtggtggagcaggacgacctgcacaacagctcggtgctgcaccccgcggcggtggtcttccctgctgccctggccgcggcccaggacctcggccgcagcggcgccgagctgatcctcgcggcggtggccggctacgaggccggcatccgcatcggcgaattcctcggccgttcccactaccgggtgttccataccactgccacggtcggcaccctcgccgcggcagtggcggtgggcaagctgatggacttcgaccgcgagcgcttcgtcgacctgctcggcagcgccggaacccaggccgccgggctctgggagttcctccgcgacgccgccgattccaagcagttgcataccgccaaggccgccgccgacgggctgctcgccgcctatctcaccgccgacggcctgagcggcgcgcgacacatcctcgaaggcgagcaggggatggccgccgggatgtccagcgacgccgaccccgagcgcctggtggatcgcctcggcagccgctgggcgttgctggaaacctcgttcaagttccacgcctcgtgccgccatacccatcccgcggccgacgcgctgctggcgctgatgcagcgcgaagggctcgatcactcgcagatcgccgcggtcaccgcgcgggtccaccagggcgccatcgacgtgctcggccgggtggtcgagccgcagaccgtgcaccaggcgaagttctccatgggcaccgtgctgggcctgatcgccgtgtacggcaaggccggcctcggcgagttccatcggcatgcgctgagcgacccgcgggtcgcagcgttccgcgagcgggtcgagatgcgcctggacccggaggtcgatgccgcctatccgcagcgctggctcgggcgggtcgaagtgctcgatcgccaggggcggcgccataccgccgccatcgacgaacccaagggcgatcccggcaataccctcagccgcgacgaactggccgacaagttccgccgcctgctggcgttctccggcgcggccaccgacgccgaggcggaaatcctcatccagcgcgcctggggcctgcgccaggcgccttccgtagcgccgctgatctga

SEQ ID NO: 322474 - DNA, 381 bp, Pseudomonas aeruginosa
atgcagatcgaccgtctcgaccacctggtgctcaccgtccgcgacatcgacgccagcatcgatttctacacccgcgtgctgggcatgcgcgccgttaccttcggcgcgggtcgcaaggccctcgccttcggtgcgcagaagatcaacctgcaccaggccgggggcgaattcgaacccaaggccgagcgacctacgccagggtccgccgacctctgtttcatcgtcgccacgccactcgaggcggtggccgagcaactgcgccagcaggccgtggaaatcctcgaaggcccggtgcagcgcaccggcgccggcgggccgatcctctcgctgtacctgcgcgaccccgacctgaacctgatcgaactgagcaacccgctgtag

SEQ ID NO: 322475 - DNA, 1161 bp, Pseudomonas aeruginosa
atgaatccgaacagcgaagagatgaacgcgatccgcgagggcgtacgtgccctctgcgccgaattcgacgccgcctactggcgccgcatcgatgagcagcgcggttttcccgaggccttcgtcaaggccctgaccgacgccggctggctctcggcgatgatcccggaggagtacggcggttccggtctgggcctggccgaggcctcggtgatcctggaggaagtcaaccgctgcggcggcaactccggcaccgtgcacgggcagatgtacaacatgttcacgttgctgcgtaacggcagcgaggcgcagaagcgcttctacctgccgaagctggccagcggcgagctgcgcctgcagtcgatgggggtgaccgagccgaccaccggcaccgataccaccaagatcaagaccaccgccgtgcgcaagggcgaccgctatgtgatcaacgggcagaaggtgtggatctcgcggatccagcactccgacctgatgatcctgctggcgcgcaccacgccgctggccgaggtgaagcgcaagtccgaaggcatgtcgatcttcctcgtcgacctgcgcgaggccatcggcaagggcctgaccgtgcagccgatcgccaacatggtcaaccacgagaccaacgagctgttcttcgacaacctggagatccccgccgatagcctgatcggcgaggaaggcaagggcttccgctacatcctcgacggcctcaatgccgagcgcaccctgatcgccgccgaatgcatcggcgacggccgctggttcatcgacaaggccagccactatgcccgcgaccgcgtggtcttcggccggccgatagggcagaaccagggcgtgcagttccccatcgccgaggcgcacatcgaagtggaggccgccgacctgatgcgctggcgcgcctgccaggagtacgacgccgggctcaacgccggggccagcgcgaacatggccaagtacctggcggcgaaagcttcctgggaggcggccaacgcctgcctgcagacccacggcggcttcggcttcgcctgcgagtacgacgtcgagcgcaagttccgcgagacccgcctgtaccaggtggcgccgatctccaccaacctgatcctgtcctacgtggccgagcacctgctcgaactgccgcgctcgttctga

SEQ ID NO: 322476 - DNA, 828 bp, Pseudomonas aeruginosa
atgagtgagtccgctttcgccccctggatcggtcgccaggaagaaacccacgatcaattgagccgcaacctggtcaagcgcatcgccgccaccttcggcgagccgaccccggcccacggcgaagcgctgccgccgctctggcactgggcgttcttccaggacccggtggaggccgccggcctcggcgtcgacggccacccggcgcgcggcggtttcctgccgccggcggacgatcgcaaccgcatgtgggccggcgggcgtctggagttccaccagccgctgcgggtcggcggcgaggccagccgcacctcgaccatcctccgggtcgaggagaagcacggtcgcagcggcgcgctgctgttcgtcaccctgcgccacgactaccgccaggacggccaactagcgctgagcgaagagcacgacatcgtctaccgcgaaccgaccccgcccaagctcggcggtaccgaggccttgcccgagggcgactggcgcgaggcgctggagcccgatccggtgttgctgttccgctactcggcggtgactttcaacggccaccgcattcactacgactggccctatgtcaccgatgccgaaggctatccgggcctggtggtgcacggtccgctgatcgccaccctggccctgcgcgcgttctgccgggccaatccgcaggcgcgcctgcgtcgcttcgcctatcgcggcctgcgcccgctgatctgtcccgagccgttcgaggtcggcggccgcctgctcgctgccggcaaggccgaggtatgggtcggcaatggcgccggcctggcccagcgcggcgacgtggaattcgactga

SEQ ID NO: 322477 - DNA, 897 bp, Pseudomonas aeruginosa
atgcatttcgatctcgccgacctgcgcctgttcatccatatcgccgagtcgcccagcctgacccagggcgcgcgccgcgccttcctttccccggccgccgccagcgcgcgggtcaaggcgctcgaaggccagcttggcagccgcctgctgtatcgcgacagccgcggcgtcgaactgaccccggcgggccagcgcctgctacagcacgcgcggctgatcatgcgccaggtggaatacctgaagagcgagttcaccgagtacggcagcgacgccgccgggcatatccgcatcttcgccaataccaccgcggtcaccgaattccttccggaaatcctcgccggcttcctcgccgctcgtcccggggtcaccgtcgacctgcaggaacgcctcagccgcgacattgtccgcggcgtgctggacggctccaccgacctcggcatcatcgccgggccggtggcggccagtggcctgcaggtcctgcatttcagcaccgaccgcctggtgatggcggtgccccagggccatccgctggccggacaggccagggtacgcctgcgcgacaccctgcagttccagcatatcggcctgcccgagggcaccaccctgcacgccttcctgtacgaacgggtggagcagatgggcgagcagctatcgctgcgcatccaggtctccagcttcgaggcgatctgccggatgatcgagggcggcgtcggcatcggcgtgatcccgcagtccgccgcgcgccgccacagccggacgatgaagctggcgaccatcgaactcgacgagccctgggcgatccgcgagcgcagcctgctggtacgcgacctggaagcactgccgagttgcctgcgggcgttgatcgaggagttgcagagggtgggagacagcctgtag

SEQ ID NO: 322478 - DNA, 945 bp, Pseudomonas aeruginosa
atggatatcctgttcaatatgcgcgcgttcgtcagcgtcgcggagaccggcagtttcactgccgccgcccagcgcctggacctgacgaccgcctatgtctcccgtgcggtggccaagctggaggcccacctgcagacccgcctgctgcatcgcaccacccggcgcatcgcgctgaccgaagccgggcagcgctacctgatgcgcgcccagcagatactcgcctacatcgaggaggccgaggccgaggcgggcgacgcccatgcgcggccgtcgggcacgctgaaggtccacgcgatgaccggcatcggccagcactacctgatcaaggccatctcgcaatattgcgagacctacccggaggttggcttcgacctgaccctggccaaccggatcaccgacattctcgacgagggctacgacatttccgtggtgatcgcccccgagctgccggactccggtttcgtctccaagtgcatcggccagacctacagcatcctctgcgcctcgccgggctacattgccgcgcacggcttccccaagctgccggcggagctgtccgcgcaccgttgcctgcgcctggtgaactcggtgatgtcgctggaccgctggctgttcgacggtcccgacggccaggaactggcctgcatcaaccagacgcatttccaggtcaacaccgccgacgccatgaccgaggcggtggtctccggcatgggtatcggcgcgctgccggtgtacgcggcggtcaacggcctgaaggacggcagcctggtgcgggtgttgccgcgctatagcctgttccatctcaacgtctacgccctctacccctcgcggcagtacctggatgcgaagatccgcacctgggtcgagttcctccgcgagcacatgccggcgatgctcgccgcggacgagcacagcctggcggagagcggtgggttggcgaactga

SEQ ID NO: 322479 - DNA, 2196 bp, Pseudomonas aeruginosa
gtgccccgcgccacccggaaaggtctccccctggttccaccggctcccctcgcgttctttcccagccccgacgaattgcgccgcgccctgctcgaatgggcgcgtagcgacggcgtcgcctgggtcttcgtgttcaaggccctgctcaccgccagcctcgccctgtggctggcctatcgcctggaactgccgcagccgagcacggtgctggtgacggtcttcatcgtcatgcagacgcagagcgggcaggtcctggccaagagcttctaccgcatcgtcggaaccctgatcggcctcagcgtgatggtcactctgatcgccctgttcgcccaggagcgcgtgctgttcctcgcctgcctggcgctctgggtcggcctgtgcaccgccggcgccgcgcgctaccgcgatttccgcggctacgcctgcgtactcgccggctacaccgcgaccatgatcgggattccagccaccgcgcacccggaaggcgctttcatggcggcgctgtggcgggtcctggaaatatccctgggcatcctctgcaccggtaccgtcagcgccatcttcctgccgcagaccagcggcgccgccctgcgcaacacactctacgggcgcttccgcgacttcgccgggttcgccgccgaaggcctgcagggcagcctcgacggcgagcgcttcggcgagctcagcgcgcgcttcgtcgcccagtccgtgggcctggaaaacctgcgcagcgccactactttcgaagatccgcacatgcgcctgcgcagcggccggctgattcgcctgaacaacgaattcatggtcatgaccagtcgcttccacggcctccaccgcctgctcgaacgcctgcgcgggcgcggggcgcagaatgtcctggaggtcctggcgccctgcctggcggagcttgccgggctgctcgcgccgattcgcgaacggacgcccaccgacgccgacgccgcgcgcctggccgaacgcatcgaggcctacaagccggaactgatgcagaacatccgccaggcccgccagcgcctggtggagcagcgccccggcgagaacgacctgctggatttcaacaccgccgccgaactggccttccgtttcaccgacgacctgcacaactacgccctgacccacgcttccctggccgaacaccaccatgcccgcgagcaatggaaggaaagcttcgtcgcccgcgccaacccggtcgccgcgctggtcgccggagagcgtagcgcgctgatgatcggcctgctcggcacgttctggatccagacctcctggccccacggcggcaccttcgccctcaccgcggtactgatctcggcgctctcctcgacctcgccgaatcccggccggttgtcgctgcaactcaccctcgggaccctcgccggggcctgcaccgggctgttcgtgctgctctacctgctaccccacgtggacggtttcccgatgctgctctgctgcctgctgccggtcttcgcggtcggcgccctgctgctctggcggccgcagtggaacggctacggcgtcggcctactggtgtggttctgcttcgcctcgctgccggccaacatggcgcgctacgacgccctggccttcttcaacgaatacctggcactactcttgtcgatggtcctcgccacggtcgccgccatggtgatcctgccgccgaaccggccgtggatgtggaagcgcctggagcacgacctgcgcgagcgggtggtgttcgccatcagcggcaagagcaagggcctggtctccggtttcgaaagcggcacccgcgacctgctgaaccaggcctacaccttctccgccggccgcccggacgtgcaacgccggttgctgggctggatgttcctggtgctggaggtcggccaggcgatcatcgagctgcgcctcgaacagcaacgcctgccccaggagccctgctacgccgaacgcaccgcctggcgccgggcgatccgcctgatgggccgggcgctgatccggctgttcctgcaacccgggccgagcaaccgccagcgcgccctgcacgcggtgaaccaggcgatcatggcggtacgggcggcgccggagccgcgcgcaccgcagttcgatacgtcgccgctgcgacgggtgctcagctacctgcacttcattcgcagcgccctgctcgacccgcaatcgcccctgggccaggaaagaaacccgtga

SEQ ID NO: 322480 - DNA, 267 bp, Pseudomonas aeruginosa
atgaaggctttcgccctgatggccctgttcgcctgctcgccgctggtgatggcggctggcgcccaggatcaacctgccagccagcaggaaaacgctgttgaagaatatgcctatggcatgcaactggatgtggctcgcgttatatcttcaaccgacacttccaatgcctgcggcatcgttcccgcacgcacgacctacgaagattcgaacggccagaaacataccgtcgaatatcaggtctggggcaacggctgcactggcggctaa

SEQ ID NO: 322481 - DNA, 1560 bp, Pseudomonas aeruginosa
atgcgtatcaaagtgcactgccagaaccgtgtaggcatcctccgcgacatcctcaacctgctggtcgactacggcatcaacgtcaatcgcggcgaagtcggcggcgaccagggcaacgccatctacctgctctgtccgaacatgatcaacctccagttgcagtcgttgcggcccaagctggaggcggtgccgggggtcttcggggtcaagcgcgtcggcctgatgcccagcgagcgccggcacctggaactcaacgcgctgctcgccgccctggacttcccggtgctctcggtggacatgggcgggcagatcgtcgccgccaaccgtgccgccgcgcagttgctcggcgtgcgcgtcgacgaggtgccggggattccgctgtcgcgctatgtggaggacctcgacctgcccgaactggtgcgcgccaacaaggcgcggatcaacgggctgcgggtgaaggtgaagggcgacgtgttcctcgccgacatcgcgccgctgcaatccgagcacgacgagagcgaggcgctggctggagcggtgctgaccctgcatcgcgcggatcgcgtcggcgagcgcatctaccatgtgcgcaagcaggagctgcgtggcttcgacagtatcttccagagttcgcgggtaatggccgcggtggtccgcgaggcgcggcgcatggcgccgctggacgcgccgctgctgatcgagggcgagaccggcaccggcaaggagctgctggcgcgcgcctgccacctggccagcccgcgcgggcagtcgccgttcatggcgttgaactgcgccggcctgccggaatccatggccgagaccgagctgttcggctatggtccgggagccttcgagggcgcccgcccggagggcaagctcggcctactggagcttaccgccggcggcacgctgttcctcgacggcgtcggcgagatgagcccgcgcctgcaggccaagctgttgcgcttcctgcaggacggctgtttccgccgggtcggcagcgacgaggaggtgtacctggacgtgcgggtgatctgcgccacccaggtagacctgtccgaactctgcgccaagggcgaattccgccaggacctctatcaccgtctcaatgtgctctcgctgcacatcccgccgctgcgcgagtgcctggatggcctggcgccgctcgccgagcatttcctcgaccaggccagccggcagatcggctgcggcctgccgaagctttccgcgcaggcgctggaacgtctcgaacgctaccactggccgggcaacgtgcggcaattggaaaacgtgctgttccaggcggtttcgctgtgcgaagggggaacggtcaaggccgagcacatccgcctgccggactacggcgcgccgcagccgctgggggatttttccctggaaggagacctcgacgccatcgttgggcgcttcgagaaggcggtgctggagcgcctgttccgcgagcatccgagcagccgccagttgggcaagcgcctcggcgtttcgcataccacggcggcgaacaagctgcgccagcatggcgtggggcaaggcgagggctga

SEQ ID NO: 322482 - DNA, 789 bp, Pseudomonas aeruginosa
atgaaaacgacgcagtacgtggcccgccagcccgacgacaacggtttcatccactatccggaaaccgagcaccaggtctggaataccctgatcacccggcaactgaaggtgatcgaaggccgcgcctgtcaggaatacctcgacggcatcgaacagctcggcctgccccacgaccggatcccccagctcgacgagatcaacagggttctccaggccaccaccggctggcgcgtggcgcgggttccggcgctgattccgttccagaccttcttcgaactgctggccagccagcaattccccgtcgccaccttcatccgcaccccggaagaactggactacctgcaggagccggacatcttccacgagatcttcggccactgcccactgctgaccaacccctggttcgccgagttcacccatacctacggcaagctcggcctcaaggcgagcaaggaggaacgcgtgttcctcgcccgcctgtactggatgaccatcgagttcggcctggtcgagaccgaccagggcaagcgcatctacggcggcggcatcctctcctcgccgaaggagaccgtctacagcctctccgacgagccgctgcaccaggccttcaatccgctggaggcgatgcgcacgccctaccgcatcgacatcctgcaaccgctctatttcgtcctgcccgacctcaagcgcctgttccaactggcccaggaagacatcatggcgctggcccacgaggccatgcgcctgggcctgcacgcgccgctgttcccgcccaagcaggcggcctga

SEQ ID NO: 322483 - DNA, 357 bp, Pseudomonas aeruginosa
atgaccgcactcacccaagcccattgcgaagcctgccgcgccgacgccccgcacgtcagcgacgaagaactgcccgtgctgctgcggcagatcccggattggaacatcgaagtccgcgacggcatcatgcaactggagaaggtctacctgttcaagaacttcaagcatgccctggccttcaccaatgccgtcggcgagatatccgaggccgaaggccaccatccgggcctgctgaccgagtggggcaaagtcaccgtgacctggtggagccactcgatcaagggcctgcaccgcaacgacttcatcatggcggcgcgcaccgacgaggtagcgaaaaccgccgaggggcgcaaatga

SEQ ID NO: 322484 - DNA, 1200 bp, Pseudomonas aeruginosa
atgagtcatttcgccaaggtcgcccgcgtaccgggcgacccgatcctgggcctgctcgacgcctaccgcaacgatccgcgcgcggacaagctggacctcggcgtcggtgtctacaaggatgcccagggcctgaccccgatcctgcgctcggtgaaactcgccgagcagcgcctggtcgagcaggaaaccaccaagagctacgtcggcggccacggcgatgcgctgttcgccgcgcgcctggcggaactggcgctcggcgccgcctcgccgctgttgctggagcaacgcgccgacgccacccagacgcccggcggcaccggcgccttgcgcctggccggcgacttcatcgcccattgcctgcccggccgcggcatctggctgagcgacccgacctggccgatccacgagaccctgttcgccgccgccggcctgaaggtttcccactacccctacgtcagcgccgacaaccgcctggatgtcgaggcgatgcttgctggcctggagcgcattccccagggagacgtggtgctgctgcatgcctgctgccacaacccgaccggtttcgacctgagccacgacgactggcgcagggtgctcgacgtggtgcgtcgccgcgagctgctgccgctgatcgacttcgcctaccagggcttcggcgacggtctcgaggaagacgcctgggcggtacgcctgttcgccggcgaactgccggaggtgctgatcaccagttcctgctcgaagaacttcggcctgtaccgcgaccgcgtcggtgcgctgatcgtctgcgcgcagaacgccgagaagctcaccgacctgcgtagccaactggccttcctcgcccgaaacctctggtcgaccccgccggcgcatggcgccgaggtggtcgcggcgatcctcggcgacagcgagttgaagggactctggcaggaagaggtcgaaggcatgcgctcgcgcatcgccagcctgcgcatcggcctggtcgaagccctggcgccgcacggcctggccgagcgcttcgcccatgtcggcgcgcaacgcgggatgttttcctataccggactgagcccgcagcaggtcgctcggctgcgcgacgagcacgccgtttacctggtctccagcggccgggccaacgtcgccggtctcgacgcgcgccgcctcgaccgcctggcgcaagccatcgcccaggtctgcgcggactga

SEQ ID NO: 322485 - DNA, 933 bp, Pseudomonas aeruginosa
gtgagaaaccgtctcctgtcactggtcaccctgttcctgtccctcagcgttgccaccgcggtatccgcctccccgccgcccaaggccgggctgccgctgcaacaggagctggcgtcgggcagcgcgctggttaccgaccagaacaccggcaaggtgctctactcgcgcaaccccgacctggtggtgccgatcgcctcgatcaccaagctgatgaccgccatggtcgtgctcgactcgaaactgccgctggacgaggtactgccgatcgccatcagcgagaccagcgaaatgcgcggggtgttttcccgggtgcgggtcggcagccagatcagccgccgggacatgctcctgctcgccctgatgtcctcggagaaccgcgccgccgccagcctcgcgcagaactatccgggcggcaagaacgccttcgtcaaggcgatgaacgccaaggctcacgccctgggaatgaagaacacccgctacgtcgagccgaccgggctgtcgctgcacaacgtctccaccgctcgcgacctcacccgcctgctggtggccagccggcaatatccgctgctcagtcagtggagcaccactccggagaagaccgtggccttccgccaccccaactacaccctgggcttccgcaacaccaaccacctgatcaacaacaagacctggaacatccagttgaccaagaccggcttcaccaacgaagcaggccactgcctggtgatgcgtaccacgatcaaccgcaatccggtcaatctggtggtgctggacgccttcggcaagtacacccacttcgccgacgccacgcgcctgcgacgctggctggaaaccggccaggtcactgcgatcccggccgcggccaaggcctatcgcctgcaacgcgaccgcgagcgcggcctcggccagccggtggcccaggccgtacgctga

SEQ ID NO: 322486 - DNA, 414 bp, Pseudomonas aeruginosa
atgctgatcatctccaatgccgtccacctgcccgaccatgagatcgagctgaatgccattcgcgcccagggcgccggcgggcagaacgtcaacaaggtctccagcgcggtgcacctgcgcttcgacatccaggcctcgtcgttgccgccgttctacaaggagcgtctgctggcactgaacgaccagcgcatcagcggcgacggcgtggtggtgatcaaggcccagcagtaccggacccaggagcagaaccgcgaggatgccctggagcgcctggcggagttgatccgcagcgtggccaaggtgcagaaggcgcgccgcccgaccaagcctacgcgcggctcgcagaagcgccggctggacggcaaggccaagcgcggcgcggtgaaggccgggcgcggcaaggtggatttctga

SEQ ID NO: 322487 - DNA, 384 bp, Pseudomonas aeruginosa
atgaaaaaagcgctctggctgcttctggctgccgttcccgtggtcctggtcgcctgcggcggcagcgacgacgacaagcagaccgcccaggtcgattacctggccctgccgggggatgccaagctggatacccgcagcgtcgactacaagtgcgagaacggtcgcaagttcaccgtgcagtacctgaacaagggcgacaacagcctcgccgtggtgccggtcagcgacaactcgacgctggtcttcagcaatgtgatttccgcctccggcgccaagtacgccgccggccagtacatctggtggaccaagggcgaggaagccaccctctacggcgactggaagggcggcgagcccaccgacggggtcgcctgcaaggagcgttga

SEQ ID NO: 322488 - DNA, 1419 bp, Pseudomonas aeruginosa
atggacggccaacatccgcattcgggcgagctcaagcgcggcctgaagaatcgtcacatccagttgatcgccctcggcggcgccatcggcaccggcctgttcctcggctcggccggggtgctcaagtcggcgggcccgtcgatgatcctcggctacgccatcgccggcttcatcgctttcatgatcatgcgccagctcggcgagatgatcgtcgaggagccggtcgccggctccttcagccacttcgcgcacaagtactggggcggcttcgccggcttcctctccggctggaactgctgggtgctgtacatcctggtcgggatgtcggaactgaccgcggtcggcaagtacatccactactggtggccggaggtgccgacctgggccacggcggcgttgttcttcgtcgtcgtcaacgcgatcaacctggccaacgtcaaggccttcggcgaagccgagttctggttcgcgatcatcaaggtggtggcgatcatcggcatgatcctgctcggctgctacctgctgttcagcggcagcggcggtccgcaggcttcggtgagcaacctctgggcacacggcggtttcttccccaacggagtgagcggactggtgatggccatggcgatcatcatgttctccttcggtggcctggaaatgctcggcttcaccgcggccgaggcggacaagccgaggacggtgatcccgaaggcgatcaaccaggtgatctatcgcatcctgatcttctacatcggcgccctgatcgtgctgctctcgctgacgccctgggacagcctgctgcagaccctcaacgcttccggcgatgcctacagcggcagcccgttcgtgcagatcttctcgatgatcggcagcggcaccgccgcgcacctgctgaacttcgtggtgctcaccgccgcactgtcggtgtacaacagcggcacctattgcaacggccgcatgcttctcggcctggccgagcagggcgatgccccgcgcgcgctggccagggtcgacaagcgcggcgtaccggtacgcgccctggtggtatcggcgctggtgaccttcctcgcggtggtggtgaactatgtgatcccgcaccaggcgctggagctgctgatgtcgctggtggtggcggcgctggtgatcaactgggcgatgatcagcatggcgcacctgaagttccgcgcgcagatggaccgccagggcacccgtacgcacttccgcgcgttctggtatccgtacggcaactacctgtgcatggccttcgtggtgttcatcctcggcgtcatgttgctgatccccggcatccaggtctcggtctatgccatcccggtctggctgctggtgatgtgggcctgctatcgactcaagggagccccgcggccgatgccgggcctgcgggtgaagccggtcaccgagtga

SEQ ID NO: 322489 - DNA, 1074 bp, Pseudomonas aeruginosa
atgaacgccgtggccaagatcgaacagcacaatcccatcggtaccgacggattcgaattcgtcgagttcaccgcccccgacgccaagggcatcgagcagctgcgccagctgttcaacatgatgggcttcaccgaaaccgccaagcatcgttccaaggaagtcttcctgttccagcagaacgatatcaacatcgtgctcaacggcagcccgaccgggcatgtccatgaattcgccctcaagcacggcccgagcgcctgcgccatggccttccgggtgaagaacgcttcccaggccgccgcctacgccgaatcccagggcgccaagctggtgggcagccacgccaacttcggcgagctgaacatcccttccctggaaggcatcggcggttcgctgctgtatcttgtcgaccgctacggcgaccgcagcatctatgacgtcgacttcgagttcatcgaaggccgcagcgccaacgacaactcggtcggcctgacctacatcgaccacctgacccacaacgtcaagcgcggccagatggacgtctggtccggtttctacgagcgcatcgccaacttccgcgagattcgctacttcgacatcgaaggcaagctcaccggcctgttctcccgcgccatgaccgcaccttgcgggaagatccgcatcccgatcaacgagtcggccgacgatacctcgcagatcgaggaattcatccgcgaataccatggcgaaggcatccagcacatcgccctgaccaccgacgacatctatgccaccgtgcgcaagctgcgcgacaacggcgtgaagttcatgtcgaccccggacacctactacgagaaggtcgacacccgcgtcgccgggcatggcgagccgctcgagcaactgcgcgaactgaacctgctgatcgacggcgccccgggcgacgacggcatcctgctgcagatcttcaccgacacggtgatcggcccgatcttcttcgagatcatccagcgcaagggcaaccagggcttcggcgagggcaatttcaaggccctgttcgagtccatcgaggaagaccagattcgccgcggcgtgatctga

SEQ ID NO: 322490 - DNA, 789 bp, Pseudomonas aeruginosa
atggcacgacccgccccacccgacctgagcgacagccgccggcccctgcgcggcgtcgcccgcagctatcctgccgggcaccgcgtcgatgcccacgagcacgcctggggccaggtgctctatgcggtgtccgggatgatgtggctggagacgcccgacgaggccctgccggtcccgccgcaacgggcggtctggttgcctccgggcctgcgccatgcggtgcgggtcgcctccgagttgcagatgcgcaacatctacctgagcccggaactctcccgcggcctggaggaccgcaccctggtgctggtggtcggcccgctgctgcgcgagctgatcgtcagcctggtggagcaggaacgacagagcgacccccactactatcgggcgctggccgatctcgccgtgctcgaactcggccgcgcgcgccgttccagcctccgcgtaccgctgccggacgcctccgacaggcgcctgctcgcgctgtgccaggcggtgatggccaatccctccctggacatcggcctggagcgcctggccgaagacgccggggccagcgtgcggaccctctcgcgcctgttccagcgcagcctgggcatgggcttcgccgactggcggcggcaggtgcagctggcgaccgccgccgccgcactgatcgatggccgtccggtggcaggcatcgcccatgccctgggatatacgccgagcgccttcagcgacatgttccgccgcgagctgggcgtctctcccaccgagtacagggccgagcatcaccagccgttccagccttga

SEQ ID NO: 322491 - DNA, 174 bp, Pseudomonas aeruginosa
atgaactacctgatctccctcggcatcggcctgctggtcggcgcgctctacgccgtactcgacttccgctcgccggcgccacccgccatcgccctggtcggcctgcttggcatgcagctcggcgaacagcttttcccccttggccgcgacctgctgcagcagtggctgcactga

SEQ ID NO: 322492 - DNA, 960 bp, Pseudomonas aeruginosa
atgaaagcactgcaattcgaccgtaccggcgacctcgccgccctcgagctggtggacatgcccgacccgcttcccgccgccgatgaggtgcgggtggaaatccgcgccgccgggctgaatccgagcgacgtgaagaacgtcctcggccgcttcccctataccaccctgccccgggtaccgggccgcgacttcgccggggtggtggtggagggaccgaaggctctgctcggccaggcggtctggggcaccgggcgggagccgggattcttccgcgacggtagccacgcgcagttcctgaccctgccggccgccggcgtcgcgctcaagccggaaagcctgagcttcgcccaggccgccagttgcggggtgccctacagcaccgcctgggacgccctgcaacgcagccaggtcaaggccggcacccggctcctggtaatcggcgccaacggcgcggtcggcaaggccgcgctggcgctggccaaggccctgggggccgaagcgatcggcgcggtgcggcgcgaggagcaacgccaggcgctggaaacgcagggcatcgccgcgctgctgctgggcgagccggccgaactggcggcacaggtggaagggatcttccccggcggggccgaggtgatcttcgatacgaccggtttctggctcgaggcggcggtcccggcgctggccgccttcggtcgcctggcgatcatcgccgcaccggccgacggccatgtgcgcctgccggcgttgaacctgtaccgtcgcggtggctcggtggtggggatcaactcgctgctctatggcgtggaagcctgcgcaggcttcctcgacgccttcggcaagctgttcgaccaaggccgcctgccgctgccggacgggctgcgggaagtcccgctggagcagggcgtcgagcagtaccgggcggtgaacgaaggcacctgcgagaagatcatcctggtgccttga

SEQ ID NO: 322493 - DNA, 783 bp, Pseudomonas aeruginosa
gtgagcgagttctttgaccgtacgggccccttgcaggaggcgggaagctatccgcagtgggcgcagcaactgatcgtcgactgccaggcgagcaaggaccgggtttccggtcacgagctgtaccggcgcatgcgcgacgccgagctgagcccggcgctgatgcgcctgtacctgatcggcggctggccggtggtcgagcagttccccttgtacatgtcgcagaacctgctgaagacccgtttcgcccgccatcccggcgaagacatggcgcgccgctggctgatgcgcaacattcgggtcgaactcaaccacgccgactactggctgcactgggccgaggcccacggcgtgagcctggccgagatccaggcgcaagacgtgccggccgaactgcacgcgctcagccactggtgctggcacacctgcgccagcgactcactggcggtggccatggccgccaccaactacgccatcgaaggcgtcaccggcgagtggtcggcgctggtctgttcgaacggcgtctacgaaaacgccttccccaaggaaggccgcaagcgcgccatgaagtggctcaagctccacgcccagtacgacgatgcccacccctgggaggcgctggagatcatctgcaccctggccggcaccaatcccagcgccgagctgcgccggcaactgcgcgacgcgatctgcaagagctacgactacatgtacctgttcctcgagcgctgcatgcagctggaggaggcgcgcagcgcccgcaagctcgcggtcggcgcggagtag

SEQ ID NO: 322494 - DNA, 2457 bp, Pseudomonas aeruginosa
atgaggcagaaccggactctcgacaagccccgcctgctcggcctggtatggcccttcatcgtcgtggtgctgttgcaggccatgctggcgggcggcagtctctacgtcctctccgcggtgcgcagctatgtcggcggcgaaagcctctggtcgaagggccagaaggatgccatctactatctcaccctctatgccgactcacgcgccgacgaagacttccgccgctacgaggaggccatcgcgatccccctcggcgaccgcgagatgcgccttgccctggaccagcccgacccggacatcgaggcggcccgccagggcatcctcaagggcggcaaccatgccgacgacgttaccgcgatcatctggctgtaccgcaacttccacgacttcagttacttcgagcgcgccatcgagctgtggctggtgggcgacaagtacgtcatggaactgatcgacgtcgccggcaagatgcgcgcgggcatcggcaccgggcaggccagtgccgagcaggtgcaacagtggaagaccgagatccatgcgatcaacgagaaggtcacgccggcggccaaggccttcagcgacgccctcggcgagggctcgcgggccttgctcaggctgctgctggtggccaacctgaccaccgccagcgtgctcatcctcctggcgttcctgcggacccggcagcaactgacgcagcgccaggaagtggagaacgccctcgatgccgagcgcgaacgggcccagatcaccctggcctcgatcggcgacggagtgatcaccgccgacacccaggggggcatttcctacctcaacccggccgccgagcagatgaccaactggacgctggacaaggcccgcggcctgcccctggcgtcgctgttccggatcgtcgacgaaagctcgcgggaggagggcatgctgctgatcgagcagatcctcagcggcgagatcgacggcggtcgcgagcattccaagctggttctgcgtcacgacggcagcagcgtgccggtgaccctggtgggcgcgccgatccaccgtggcggcgagatcaccggggtggtcctggtgcttcacgacatgacccgcgagcgccagtacatggcgcgcctgtcctggcaggcgacccacgatgcgttgaccgggctgaccaaccgccgcgagttcgagtatcgcctgcagatagcgctggaacgcctggagcgcaacagcgggcggcacgccctgatgttcctcgacctggaccagttcaagctggtcaacgacacctgcggccacgccgccggcgacgaactgctgcgccaggtctgtaccctgctgcaacaaggcttgcgcgagggcgacacgctggcgcggctgggcggcgacgagttcggcatcctgctggagaactgtccggcggaaaaagccgtggagatcgccgaccatctgcgcaagaccatccaggatctgcacttcacctggagcgggcagccgttcaactgcaccgtcagcgtcggcctggtgcacctgctgccgggtatctcgaccctcgaggaggcgctgcgctccgccgatatggcctgctacatggccaaggaaaagggccgcaaccgggtccaggtgttccatcaggacgacgtcgaactatcgatgcgcttcggcgagatgacctgggtccagcgcatccacctggcgctggaggaagaccgcttcagtctctatgcccagcccatcgtgccgctgggcgaaggtgcggaggagggcttgcacgtcgaactgctgctgcgcctgcgcgacgagggcgggcgcctggtgccgccgctgagcttcatacccgccgccgagcgctacggcctgatgacgctgatcgatcgctgggtggtggagaatgccttccgcacccttgtcgagcgcgcccaggaccctcgcgccgagccgatcggcacctgcgccatcaacctctccggcgcgaccatcggcgacgagtcgttcctgcagttcctcaccgagctgttcgcccgttaccgcattccgccgcagacgatctgcttcgaggtcaccgaaaccgtggcggttgccaacctggccagcgccatccgcttcatcaacgagctcaaggacaccggttgtcgtttctccctggacgatttctgcgccggcatgtcgtccttcatctacctcaagcacctgccggtggattacctgaagatcgatggcagcttcgtcaaggacatgctcgaggatcccatcgatcgcgccatggtccaggtgatcaaccatatcggccacgtgatgggcaaacgtaccatcgccgagttcgtcgagaccgtcgaagtcatggaagcgctgcgcgagatcggcatcgactatgcccagggcctggccatcggcgcgcccctgccgttcagtcgccagcctccgggggctggagtggatgcccagggcctgtggccgagcctgggacagaacctccggtag

SEQ ID NO: 322495 - DNA, 1791 bp, Pseudomonas aeruginosa
atgagtgagcgcggagaccgcctgagctgggcggagattcgtcgactcgcactgcgccacaagaaagccctgttgctcgccaacctggtggcggtgctggccaccctctgcaccgtgccgatccccttgctgctgccgttgctggtggacgaagtgctgctcggcaagggcgacggcgcgctgcgtttcatggaccgcctgttgcccgccgactggcaggtggcgttcggctacatcggcctgatgctggcggcgaccctcctgttgcggggggcggcgctggtgttcaacgtgctccaggcgaagctgttcgcgcggctgtccaaggacatcgtctaccgcatccgcctgcgtctgatcgagcgcctccggcatatcgccctgggcgaatacgaaaccctcggcggcggttcgatcagcgcccacctggtgaccgacctggacaccctggacaagttcgtcggggaaaccctcagccgcttcctggtcgccttgctgacgctgctcggcaccgccgcgatcctggtctggatgcactggcagctggccttgctgatcctgctgttcaacccgctggtgatctggtccacggtacaactgggcaagcgcgtcaagcacctcaagaagctcgagaacgacagcaccgcgcgcttcacccaggcgctcaccgagaccctcgaggcgatccaggaagtccgcgccggcaatcgccagggctatttcctcggccgcctcggccaccgcgcccaggaagtccgcgactacgccgtggcctcgcaatggaaaagcgacgccgccgggcgcgccagcggcctgctgttccagttcggcatcgatgtgttccgcgccgcggcgatgcttaccgtgctgctctcggacctgtcgatcggccagatgctcgcggtgttcagctacctctggttcatgatcggtccggtcgaacagctgctcggcctgcaatacgcctactacgccgctggcggcgcgttgcagcggatcaacgagttgctggcgcgggccgacgagccgcgctacccgccgctgcgcgatccgttcgccggccgcacgaccgttggcatcgaggtgcgcgggctggatttcgcctacggcgaggacaaggtcctggagcagttggacctgaacatcggcgccggcgagaaggttgccctggtcggcgccagcggcggcggcaagagcacgctggtgcaactgctactcggcctctacagtgcgcagcgcggcagcatccgctacggcggggtgcccctggaggaaatcggcctggactgcgtgcgcgaacatgtcgcggtggttctccagcatccggcgctgttcaacgacagcgtgcgggccaacctgaccatgggccgcgaacgcagcgaccaggcctgctggcgggctttggagatcgcccagttggccgacggcgtgcggcgcctgccgcaggggctggacaccgtggtcgggcgttccggggtgcgcctgtcgggcggtcagcggcagcgcctggcgatcgcccggatgatcctcgccgagcccagggtggtgatcctcgacgaggccacctcggccctcgacgccgctaccgagtacgccctgcaccaggcgctcggcgacttcctcgaaggccgcaccacattgatcgtggctcatcggctgtcggcggtgaagcaggccgaccgggtcctggtcttcgatggcgggcatatcgccgaagacggcgaccaccagcaactgatcgccgaaggcggcctctacgcccggctctacggacatctgcaacagatgtga

SEQ ID NO: 322496 - DNA, 639 bp, Pseudomonas aeruginosa
ttggccaaggcccgcctgctgtacgtgatggaccccatgtgctcctggtgctggggcttcgccccggtcgccgaggcgctgtcccggcaggcggccgccgacggcgtcgctttccacctggtagccggtggcctgcgcgccggccacggcgcggcgctcgacccgaatacccgcggctacatcctcggccactggcagaccgtgcagcagaccaccggccagccgttccgcttcgacgacgcgttgcccgaaggcttcgtctatgacaccgagccggcctgccgggccctggtggcggcgcgcagcctcgacgaggaaagcgcctggccgctggtgagggcgatccagcgggcgttctacgccgagggtcgcgatgtcacccaggcggcggtgctcgccggcctggcggaagcggtgggaattccacgcatcgagttcgccgcggtcttcgacagcggcgaggcgcgcgacgccaccgccgccgatttcgcctgggtccaggaccttggcatcgccgggttcccgaccctgctggccgagcgcaacggccaactggcgttgctcaccaacggctaccagccgcttgccgaactttcacccttgctcggccgctggctggaacggggccggcatgagtga

SEQ ID NO: 322497 - DNA, 939 bp, Pseudomonas aeruginosa
atgacatccatcgtcgtggcggcgctgtacaagttcgtgactctcgacgattacgtggcgctgcgtgaacccctgctgcaaaccctgctcgacaacggtgtgaaaggcaccttgctgctggccgaggaaggcatcaacggcaccgtctccggtagccgcgaaggcatcgatgcgctgttcgcctggctgcgcagcgatccccggctggccgatatcgagcacaaggaatcctactgcgacgaacagccgttctaccgcaccaaggtcaagctgaagaaggaaatcgtcaccctcggcgtgcctggcgtcgatccgaacaagcaggtcggccagtatgtcgaggcgaaggactggaatgccctgatcagcgatccggaagtcctgctgatcgatacccgcaacgactacgaggtggcgatcggcaccttcgagggcgcggtcgatccgaagaccaggtcgttccgcgagttccccgagtacatcaaggcccactacgacccggcgcggcacaagaaggtggcgatgttctgcaccggcggcatccgctgcgagaaggcttccagctacatgctcggcgccggtttcgaggaggtcttccacctcaagggcggcatcctcaagtacctcgaagaggtgccgcaggaacagagcctgtggcgcggcgactgcttcgtattcgacaaccgcgtgaccgtgcgccacgatcttagcgagggcgagtacgatcagtgccacgcctgccgcaacccggtctcgctggaggaccgccagtccgagcactacgtgcccggcatcagctgtccgcactgctgggactcgctgagcgagaagacccgcgccggcgcccgcgagcggcagaaacagatcgaactggcgcggcagcgcaaccagccgcacccgctcggtcgcgatccgcgccagtccacgctggagaactga

SEQ ID NO: 322498 - DNA, 306 bp, Pseudomonas aeruginosa
atgagcatgcgtgaccgtatccagaccgccctgcagcccctcgatccgcaacacgtcgaggtgctcgacgagagccacatgcacagccgcgggctggagacccacttcaaggtggtgctggtcagcccgcagttcgccgggttgaacgcggtgaagcggcaccagaaggtatatgccaccctcggtgggttgatgggcgagttccacgccctggcgctgcataccttcacccctgaggagtggagccaggctgcggtgccggcctcgccgacctgccgcggcgggagcaagcacgacataccctga

SEQ ID NO: 322499 - DNA, 504 bp, Pseudomonas aeruginosa
atgacccgtcttcgcctcatcggcagcgccgtgctgctcagcctcagctccatggccatggccgattccgccagccaggccgagcaattcctcaagctggtccatgccgacaagctgacggtcccggtctatgcccaggtgcagcagatgctggcccagcgcttcgcccaggccaaggcgccggagagcaagaaggcggttctcgagcgttaccaggccaaggccaatgccgaactggaccgcgccatcggctgggacaagatcaagcccgagctgatcaagctctacaccaccaacttcaccgagtccgagctgaaggacctgaatgccttctaccagtcgccgctgggcaagaaggtgctggagaagatgccgcgcctgaccgccgaatccgcccaactgacccaggccaagctgcaaggcgccgtcgagccggtgaacaagctgatggccgacatggacaaggaactcggcgtcgccgcgccggcccagaagaaaaagtga

SEQ ID NO: 322500 - DNA, 1020 bp, Pseudomonas aeruginosa
atgaacggaaccgccgccgataccctcgccgtatcgcccccgcccctgcgcaacctctgcgacggccacggccggctcgatccccgggcggtcggctggtccgcccggccgcgggtgctctgccacatccccggccacttcggccggcgcaagcgctggaaccactggtgcatcgtcagccccggctggatgctctcgctgaccatcgccgacctcgactacctgacctacggcgccgcctatttcctcgacctggacagcggccaggcggtagcgcacacgcagatccgcttcttcggcctcggctgccagttgcccgacgagccgcaggccagccatgccttcgagcatccccgcctgcaattgcgcttcgacgaacagcccgggcgcctgcgcgtcaccggccaggccccggacctcggtggcctgccgctggagctggcgctggaagtgcgacgaccgtcgcacctggagtcggtgaacctggtggtgccgatgggcgaacacaccttccatgcctgcagccgccagctcggcctgccgatcagcggctgcctgcagctcggccgccgacgctacgactgccaggcgggccagagcttcgccgcgctggacttcggccgcggtgtctggccgctgcatacctactggacccgcgccgccttcgccgcccccggcggcatcgccggcaacttcggcaccggctggaccgaagccagcgacctgcgcgagaacgccctgtggttcggcggcaagctcagccgcgtgctcgacgacgtgcacatccgcgagcctcgcgacccgctggccgaatggcgcctggacagcgcctgcggtcgcgtcgagctgctcttccgtcccgaacagctgcaccaggcgcggcccagcgtcggcctgttctatgccaatacccgccagtggttcggccgtttcaacggcaccctgcgccacgacgacggcgactgcgtgccggtggacggcgccctcggctggatcggttcgacccgcgcgcgctggtga

SEQ ID NO: 322501 - DNA, 1395 bp, Pseudomonas aeruginosa
atgagccggaccgaaaccgatagcctgggcaccatcgaggtgcccgacgacgcctactggggcgcccagacccagcgttcgctggagaacttcgccatcggcggccagcgcatgccgctcgccgtgatccacgccctggcgctgatcaagaaagccgccgcgcgggtcaacgaccacctcggcgaactgccgccggaagtcgcccggctgatcgaacaggccgccgacgaagtcctcgcaggccgccacgacgaacacttcccgctggtggtctggcagaccggcagcggcacccagaccaacatgaacgtcaacgaggtgatcgctggccgcgccaacgaactggccggcaatccgcgtggcggcaagtcgccggtgcatcccaacgaccacgtcaaccgcgcgcagagttccaacgacagcttccccaccgccatgcacatcgccgccgccaaggccgtgcacgaacaattgctgccggccatcgccgagctttccggcggtctcgccgaacagtcggcgcggcacgccagcctggtcaagaccgggcgcacccacctgatggacgccacgccgatcaccttcggccaggaactctcggccttcgtcgcccagctcgactacgccgagcgcgccatccgcgcggcgctgccggcggtctaccagttggcccagggcggcaccgcggtgggcaccgggctcaacgcgccgaagggcttcgccgacgccatcgccgcggaaatcgccgccgaatcgggcctgcccttcgtcgccgcgccgaacaagttcgccgccctggccggccacgagccgctggtcatcctctccggcgccctgaagagcctggcggtggccctgatgaagatcgccaacgacctgcgcctgctcggttccggcccacgcgccggcttcgccgaggtgaagctgccggccaacgagccgggcagctcgatcatgcccggcaaggtcaacccgacccagtgcgaggcgctgtcgatgctggcctgccaggtcatgggcaacgacagcacgatttccttcgccgccagccagggccatctgcaactcaacgtgttcaagccggtgatcgtctacaacctgctggagtccatccgcctgctcgccgacggctgccgcaacttcaacaagcattgcgtcgccggcctggagccggacgcccagcgcatggccgacctgctggagcgcggcctgatgctggtcaccgcgctgaacccgcacatcggctacgacaaggccgccgaaatcgccaagaaggcctacgccgaaggcaccaccctgcgcgccgcggcgctgcagctgggctacctggacgaagcgcagttcgacgaatgggtacggccggagcagatgctggaggccggccaccatggttga

SEQ ID NO: 322502 - DNA, 624 bp, Pseudomonas aeruginosa
atggttgaaaccgccaagaccggcgccaccccgctggaaggcgacggcaagcgcatcctgctgatcgtcggctcgcccaagcgcaagagcttctgccacctgctcgccgaatgctacgcccagggcgcgcgcagcaaggatcacgtggtgcgcgaactgaagctgggcgagctggccttcgacccgatcctccacgaaggctacgaacagagccaggtgctcgaacccgacctgctggaagcgcagcggcagatccactgggccgagcacctggtgttcgtctacccggtctggtggggcggcctgccggcgctgctgcagggcttcttcgaccgcgccctgcagccgggcttcgccttccgctaccgcggcacccaggacaaggactgggagcaactgctgggcgggcgcagcgccgacctgctggtctgccacgaccagccgctgtcgcggctgcgcttcctcaagggcccgccggcgcaccggcagatggtgcgcagcgtgctcggcgcctgtggcatcgccacccgccgcctggaagagttcgcgccgatgcgcagttccagcgaggaacagcgccagggctggctgcgtcgcgccgaacagctcggcagccaggtctag

SEQ ID NO: 322503 - DNA, 1170 bp, Pseudomonas aeruginosa
atgaaacactactcagccaccctggcactcctgccactcaccctcgccctgttcctgccccaggcagcccatgcccacggctcgatggaaacgccgcccagtcgggtctacggctgcttcctcgaaggtccggagaatcccaagtcggccgcctgcaaggccgccgtcgccgctggcggcacccaggcgctgtacgactggaatggcgtcaaccagggcaacgccaacggcaaccaccaggcggtggtccccgacggccagctctgcggcgccggcaaggcactgttcaagggcctgaacctggctcgcagcgactggcccagcactgccatcgcgccggacgccagcggcaacttccagttcgtctacaaggccagcgcgccgcacgcgacccgctacttcgacttctacatcaccaaggacggctacaaccccgagaagccgctggcctggagcgacctggaacccgcgccgttctgctcgatcaccagcgtcaagctggagaacggcacctaccggatgaactgcccgctgccccagggcaagaccggcaagcatgtgatctataacgtctggcagcgctcggacagcccggaagccttctacgcctgcatcgacgtgagcttcagcggcgccgtcgccaacccctggcaagcgctgggcaacctgcgcgcgcagcaggacctgccagccggtgctaccgtcaccctgcgtctgttcgatgcccagggccgcgacgcccagcgtcacagcctgaccctggcccagggcgccaacggtgccaagcaatggccgctggcgctggcgcagaaggtcaaccaggactccaccctggtcaacatcggcgtgctggatgcctacggggcggtcagcccggtggccagctcgcaggacaaccaggtctacgtgcgccaggccggctaccgcttccaggtcgacatcgaactgccggtcgagggcggcggcgagcaaccgggcggcgacggcaaggtcgacttcgactatccgcaaggcctgcagcaatacgacgccgggaccgtagtgcgcggtgccgatggcaagcgctaccagtgcaagccctacccgaactccggctggtgcaagggctgggacctctactacgccccgggcaagggcatggcctggcaggacgcctggaccctgctgtaa

SEQ ID NO: 322504 - DNA, 963 bp, Pseudomonas aeruginosa
atgcctttttctctcgccgccctccaacaggccgccgccatcgtccaccagagcctgccgccgacgccgcagatacgctggccgctgctatgcgaggcactgggttgcgaagtgtggatgaagcacgagaaccacctgccggtgggggccttcaaactgcgcggcggcctggtgtatttccaccacctggcgcaccagggcgagcggccggccgccgtgatcagcgcgacccgcggcaaccacggccagtcggtggccttctcggcgagccgctacggcatccagccgatcatcgtcgtgccgcacggcaacagccgcgagaagaacgcggcgatgcgcagccttggcgcggagctgatcgagcacggcgaggacttccaggcctcccgcgaatacgccgccgagcgcgcccggcgcgaaggcctgcacctgattccggcgttccatccctggctggtggccggggtcgccagctacagcctggagttgttcgccgcgctggccgaccttgacgaagtctacgtgccgatcggtatgggttcgggcatctgcggcctgatcgccgcgcgcgacgcgctgggcctgaagacccgcatcgtcggcgtggtgtccgcccatgcgccggcctacgccctgtcgttcgaggccggcacggcgatcagccacccggtcgacacccgcctggccgacggcatggcgtgcagtacgccggacccgagcgcgctggaaatgatcctggccggcgccgatcgcctggtgcgggtcagcgacagggagatcggcgcggccatgcgcctgtgcttcaccagcacccacaacgtcgccgagggcgccggggtggcggcgctggccgccgcctggcaggagcgcgagcgcctgaaggggctgaaggtaggcctgatcctcagcggagcgaacgtcgaccgcgaggtattcgccaagcaactggccgccggcgactga

SEQ ID NO: 322505 - DNA, 420 bp, Pseudomonas aeruginosa
atgtttctcagccctagcgcgatctgcctgctcggcctgatcgcctggaccctgttgctggtcttcctgctggtcagccagcgcggcctgctggtactcggcgggcggatggcggtgaacgccttcgccgccgatggcagcaacacgcctggcggtttcggccagcggctggtgcgagtccatgccaactgcgtggagaacctgccgctgctggccggcgcgctgctctacgcgatcgccagcgggcagagcagcctgaccgacccgttggcgccactggtgctcggtgcccggctgttccagtcgctgatgcacctggtcagcacctccgcgctgttcgtctggctgcgttttgccggcttcttcgtgcagttgctggtgctcgcctggtggctgctgctcctcgcggggctggcctag

SEQ ID NO: 322506 - DNA, 951 bp, Pseudomonas aeruginosa
atgcccgataccctccgccacgcccgagtgatcatcctcggttccggtcccgccggttacagcgcggctgtctacgccgcgcgcgccaacctcaagccgctgctgatcaccggcatgcaggccggcggccagttgaccaccaccaccgaggtcgacaactggccgggcgatccccacggcctgaccggcccggcactgatgcagcggatgcaggagcacgccgagcgcttcgagaccgagatcgtcttcgaccacattcatgccgtggacctggccggcaagccgttcaccctgcgcggcgacaatggcacctacacctgcgacgcactgatcgtcgccaccggtgccagcgcgcgctacctggggttgccgtcggagcaggcgttcatgggcaagggcgtgtcggcctgcgccacctgcgacggtttcttctaccgcaaccgcgaagtggcggtgatcggcggcggcaataccgctgtcgaagaggccctgtacctggccaacatcgccagccgggtgaccctggtgcatcgtcgcgaaaccttccgcgccgagaagattctccaggacaagctgcaggcgcgggtcgccgaaggcaagatagtgctcaagctcaacgccgaggtcgatgaggtgcttggcgacacgatgggcgtcaccggcgtgcgcctgaagacccgcgatggtggcagcgaggagatcgccgtggatggcatgttcgtcgccatcggccatactcccaatacctcgctgttcgaagggcaactggccctgaaggacggctacctggtggtcaacggcgggcgcgaaggcaacgccaccgcgaccaacgtaccgggtgtgttcgccgccggcgacgtggccgaccacgtctaccgccaggcgatcacctcggccggcgccggctgcatggccgcgctggatgtggagcgctatctcgattcgctctga

SEQ ID NO: 322507 - DNA, 600 bp, Pseudomonas aeruginosa
atgagcgtactggtcaacaagcaagcccccgatttcactgccgccgcggtcctcggcgacggttccatcgtcgatgccttccagctttccagcctgcgcggcaagtacgtcgtactgttcttctggccgctcgacttcactttcgtctgcccctcggaaatcatcgcccacaacaaccgcatggataagttccgcgagctgggcgtcgaggtggtcggtgtctccatcgactcgcagttcacccatcacgcctggcgcagcacgccggtggagaagggcggcatcggtgcggtcgagttcaccatggtcgccgacgtcaagcacgagatcacccgcgcctacggcatcgagcacgaggacggcgtggccttgcgtgcttcgttcctgatcgaccgcgccggggtggtccagcaccaagtggtgaacaacctgccgctggggcgtgaggtggacgagatggtgcgcctggtcgaggccctgcagttcaccgaggaacacggcgaggtctgcccggccggctggcgcaagggccagaaaggcatgaaggcgagcgccgagggcgtggcctcgtacctggccgagaacgccgaggcactgtga

SEQ ID NO: 322508 - DNA, 1986 bp, Pseudomonas aeruginosa
atgctgtcgcccattacccgtcctcaccgcatgcccctacgcacacgcctgctctggctgttcctgccgttgctggccgccagtctcggcggtatctggctcttgtcggaaagcatcctgctgagccgtttcgaccgagaggaccagcaacgcctgcaagagggcgccaccgtcctgcacaaccggctggacttcgagttgaagcgccacctggacatcgttcgcacctacgcttggtgggatgccagctacgacttcatccagcgccccaacgagaccttcgaacaggaaaacctcgaccacgagatgctcgacgacctgggattcgacttcgtcctgttcctcgacgaccggggtcacctgcaactgaagcagtggtccccgcccgcgcccgaccagcgcgtgctcttcggcgccccctcggcgagcgaccaggccctgctcgaggcactgcagcaacgcgccatccgcctcggcgcgctggactttcgcggacgcaccgaccacagcctgagcgagctgctgctggtcgacaacctgccgaccctgctggtcagcgtgcctatcagcaacaaccagggtagcgcgccggcgaagggcgcgatcctcgccggctacttcctcgaccgggaacgcctggccaacctccgcgaacagatgcaggccgacctgcaaccgatgcccaacatcgccaccgactccacctggaagccgctgcgcagccgcagcggcagtacccacaaccaggccctgctcagcccacggcggttcatcggcgaacatgtccagcaggtctcggtgcagtacctgagttccagcggcgagccgcagctgcgcttcgacatcaccaagaaacgcctgctctacatccagggcgagaaggccatcaacttcttcctcggcgcctccctgctggtcgcgctgggcgctttcctggtcggctacctggccctggagctgtgggtcctgcgccgggtccaacggctcaaccgggaggtcgccgaagtcggacgcaacgcccactcgatacgcctgagcgacttcggcaacgacgagctgggacaactggcgggcgagatgaaccagatgctcgagcgcctggaacacagcgaggcgcgcgaccgggcgatcctccagtcgatgcgcgacggctacttcgaaatggacgtcgacggcgtgatcctcaccgtcaaccccgcgctctgccaactgctcggccagacgcgcgaaacgctgatcggccatccctactacgaactgctcggcgaagacgacctggcgcgtgcccgccaacccttccagcgcgccatgcagagcggcgcaggcaagaccttcgccatccccctgcagcgcgccgacggcagcctcggctacttcgaggccacggtttcgctgatccacgacctgcagggcgaactacggggctaccgcggcatcgtccgcgacgtcagcgaccagatcgcctaccagcagcaattgctggaaatggcctaccgcgacccgctgaccggcctgggcaaccgcaaggccttcgacgaacagctcggccaggcgttgcttcgcgccggctccggcggaagcgaactggcgctgctgtacctggacctggaccgcttcaaggaggtcaacgaccgcttcggccacgacatcggcgatgccctcctcaggaccgtcgccgaacgggtacgcagcaccctgcggcagccggacaaggcctaccgcctgggcggcgacgaattcgccgtgctcctcgaggacagccaggaaaacaatccgcagcgcctcgcagaacgcctgctggcggcgctggtccaaccgatcgcgctgaatggcgaacgcatcgacttcgtcaccccgagcatcggcatcgctctctacccgcggcatgccggcgatgccgaaggactggtccgtgccgccgacagcgccatgtacgaggccaagcgccagcgcaaccactattgcctgtaccaggcgccagcctga

SEQ ID NO: 322509 - DNA, 741 bp, Pseudomonas aeruginosa
atgccagccctgagcggcccgcaatacctcggcgaaggcctgaagctgatcatgcgtcccggcctgcgcctgttcgtgctgatccccctgaccctcaacctgctggtgttcgccctgctgatcggcttcgcgatgcagcagttcagccactgggtcgacctgctgatgcccagcctgcccgactggctgagcttcctgcagtacatcgtctggccgttgttcgtcctgctggtgctggtgatcgtgttcttcaccttcaccatggtcgccaacatcatctccgcgccgttcaacggcttcctctcggaaaaggtcgaggtggtggttcgcggccgcgacgacttcccgccgttcagctgggccgaactgctggcgatgatcccgcgcaccatgggtcgcgagatgcgcaagctcgcctacttcctgccgcgcgcgctggtgctgctggtgctgagcttcgtgcccggggtcaacctgatcgccacgccgctgtggatcctcttcggcatctggatgatggcggtgcagtacatcgactatccggcggacaaccacaagctcggctggaacgagatgctcgcctggctgcgcagcaagcgctgggcgtgcatgggtttcggcggggtgacctacctggcgctgctgatcccgctggtcaacctggtcatgatgcccgccgccgtcgccggcgccaccctgttctgggtccgcgaggaaggcgagaaggcgctggtgaaataa

SEQ ID NO: 322510 - DNA, 2013 bp, Pseudomonas aeruginosa
atgtcacgttccgcattcaccgcgctcttgctgtcctgcgtcctgctggcgctctccatgcctgccagggccgacgacctgccctaccgcttcggcctgggcaaggcggacatcaccggcgaagccgccgaagtcggcatgatgggttactcctccctcgaacagaagaccgccggcatccacatgcgccagtgggcgcgtgccttcgtgatcgaggaagcggccagcggacgtcgcctggtctacgtcaacaccgacctggggatgatcttccaggccgtgcacctgaaggtcctggcccggctcaaggcgaagtaccccggtgtctacgaccagaacaacgtgatgctcgccgccacccacacccactccggtccgggcggcttctcccactacgcgatgtacaacctgtcggtgctcggcttccaggaaaagaccttcaacgccatcgtcgacggcatcgtccgctccatcgagcgggcccaggccaggttgcagcccggccgcctgttctacggcagcggcgagctgcgcaacgccagccgcaaccgttcgctgctgtcgcacctgaagaatccggacatcgtcggctacgaggatggcatcgacccgcagatgagcgtgctcagcttcgtcgacgccaacggcgagctggccggcgcgatcagttggttcccggtgcacagcacctcgatgaccaacgccaatcacctgatctccccggacaacaagggctacgcctcctatcactgggagcacgacgtcagccgcaagagcggtttcgtcgccgccttcgcccagaccaatgccggcaacctgtcgcccaacctgaacctgaagcccggctccggtcccttcgacaacgagttcgacaacacccgcgagatcggtctgcgccaattcgccaaggcctacgagatcgccggccaggcccaggaggaagtgctcggcgaactggattcgcgcttccgtttcgtcgacttcacccgcctgccgatccgcccggagttcaccgacggccagccgcgccagttgtgcaccgcggccatcggcaccagcctggccgccggtagcaccgaagacggtccaggcccgctggggctggaggaaggcaacaatccgttcctctcggcccttggcgggttgctcaccggcgtgccaccgcaggaactggtgcaatgccaggcggaaaagaccatcctcgccgacaccggcaacaagaaaccctacccctggacgccgacggtgctgccgatccagatgttccgcatcggccagttggaactgctcggcgcccccgccgagttcaccgtgatggccggggtgcggatccgccgcgcggtgcaggcggccagcgaagcggccggtatccgccatgtgatcttcaatggctacgcgaatgcctatgccagctacgtcaccacccgcgaggaatacgccgcccaggaatacgaaggcggctcgaccctctacggcccctggacccaggccgcctaccagcagttgttcgtcgacatggcggtggcgctgcgcgaacgcctgccggtggaaacctcggcgatagcgccggacctgtcctgctgccagatgaacttccagaccggagtagtggccgatgatccctatatcggcaagtccttcggcgacgtgttgcaacaacccagggaaagttatcgcatcggcgacaaggtgaccgtcgctttcgtgaccggacatccgaagaatgacttgcgcaccgagaagactttcctggaagtggtgaatatcggcaaggatggcaaacagacgcccgtgaccgttgccaccgataatgactggtatacccaataccgctgggagagagtgggtatatctgcctcgaaagcgactatcaactggtccattccaccagggaccgagcccggccattactacatcaggcactacggcaacgcgaagaacttctggacccagaagatcagcgaaatcggcggatcgacccgctccttcgaggtgctcggcaccactccctag

SEQ ID NO: 322511 - DNA, 2193 bp, Pseudomonas aeruginosa
atgaccgaaaactggaaattccgccgtcgaacctttctcaagcacggcgcccaggccgctaccctggccggcctttccgggctgttcccggagacgctccggcgcgccctggccatcgagccggacatccgcaccggaaccatccaggacgtccagcacgtggtcatcctgatgcaggagaaccgcagcttcgatcactacttcggccacctcaacggcgtccgcggcttcaacgaccctcgcgcgctcaagcgccaggacggcaagccggtctggtaccagaactacaagtacgagttctccccctatcactgggataccaaagtcaccagcgcccagtgggtgagttcgcagaaccatgaatggtcggccttccacgcgatctggaaccagggccgcaacgacaagtggatggcggtgcagtaccccgaagccatgggctacttcaagcgcggcgacattccctactactacgccctggccgacgccttcaccctgtgcgaggcctactaccagtcgatgatgggcccgaccaatccgaaccgcctctaccacatgagcggacgcgccgcccccagcggcgacggcaaggacgtacacatcggcaacgacatgggcgacggcaccatcggcgccagcggcacggtggactggaccacctatcccgagcggctaagcgccgctggcgtggactggcgggtctaccaggaaggcggctaccgctcctcgtcactctggtacctgtacgtcgacgcctactggaaataccggctccaggagcagaacaactacgactgcaacgccctcgcctggttcaggaacttcaagaacgctccgcgcgattcggacctctggcagcgcgccatgctcgcccgcggcgtcgaccagttgcgcaaggatgtgcaggagaacacgctgccgcaggtgtcgtggatcgtcgcgccctactgctactgcgagcatccctggtggggcccctcgttcggcgagtactacgtgacccgggtgctcgaggcgctgaccagcaaccccgaggtctgggccaggaccgtgttcatcctcaactacgacgagggcgacggcttctatgaccacgccagcgccccggtgccgccgtggaaggatggcgtcggcctttccacggtcagcaccgccggcgagatcgaggtatccagcgggctgcccatcgggctcggccaccgcgtcccgctgatcgccatctcgccctggtcgaagggcggcaaggtcagcgccgaagtgttcgaccatacctcggtgctgcgcttcctcgaacgccgcttcggcgtcgtcgaggaaaacatctcgccctggcggcgtgccgtctgcggcgacctgacttcgctgttcgacttccagagcgcaggcgatacccaggtcgcccccgacctgaccaacgtcccgcagagcgacgcgcgcaaggaggacgcctactggcagcagttctaccggcccagtcccaaatactggtcctacgagccgaagagcctgcccggccaggaaaagggccagcgccctaccctcgcggtgccctaccagttgcacgccacgctggccctcgacatcgccgccggcaagctgcgcctgaccctgggcaacgacggcatgagcctgccgggcaatccgcagggacactccgctgcggtattccaggtgcagccgcgggaagtcggcaatccgcgcttctataccgtgaccagctatccggtggtccaggaaagcggagaggaactgggccggaccctcaacgacgaactcgacgacctgctcgacgccaacggccgctacgccttcgaggtgcacggccccaacggcttcttccgcgagttccacggcaacctgcatctcgccgcgcagatggcgcggcccgaggtatcggtcacctatcaacgcaacggcaacctgcagttgaacatccgcaatctcggccgcctgccgtgcagcgtgacggtgacgccgaacccggcctatacccgggagggcagccgtcgctatgaactcgaaccgaaccaggcgatcagtgaagtgtggctgttacgcagcagccagggctggtacgacctcagcgtgaccgccagcaatacggaagccaactatctccgccgcctggccggacacgtcgagaccggcaagccgagcaggagcgatccattgctcgacatcgcagcgacctga

SEQ ID NO: 322512 - DNA, 624 bp, Pseudomonas aeruginosa
atgagacctaccctgacctggaccttgctggccctgctgctctgcggcacggccatcggcgccgtcctgttgttttacccatcggagccggcgcccgtcgcgcccttcgcgtctcccccgcaggccacaccggcggcaaaaccttccattccttcccgagcccccgagatgaatacagccaccgctcccgacaacctggaacagcaactcggcgagttcggccgcaacgccgggcagatgtccgagatcgaacgcaagcaggccgccgaaggcctgatcgaacagctcaagcgcgaggtggcggtcggcgccgatccgcgccagaccttcgaggagatccagcgtctgacgccctatgtggaggacgatgccaggcgccgcgaggcgctcgacttcgagatttggatggcgctcaaggacaacgcctccgtccagcagcaagcggcgacgcctggcgaggaagagcaactgcgcgaatacgcgcaagagtcggacaaggtgatcgccgaggtgctcgccagcgtcgacgacgaggagcagcgtcacgccgccatcgacgaacgcctcaaggccctgcgcaagcagatcttcggcgaggagaacccacgcctgctgcaacgctga

SEQ ID NO: 322513 - DNA, 1221 bp, Pseudomonas aeruginosa
atgagcagacctctaagcatcgccctgatcagcgaaacctacccaccggaagtcaacggcgtcgccaataccctgggtcgcctgcatgccggtctccagcagcttggccatcgggtccaggtggtgcgcccgcgccagcccggcgacgacggccggcgcagcaacgccgagctggtgctgacccgcggctggccgttgcccggctaccccggcctgcaatggggcatgtcgagcctgcacaagctgctgcgctgctggaagcgccagcgcccggacgtcctctacatcgccaccgaaggcccgctcggcttctctgccctgcgcgccgcgcggcgcctgggcatcccggcggtcagcggcttccacaccaacttccagcagtacagcgagcactacggcttcggtccgctgacccggctggtcaccggctacctgcgctggttccacaaccgcacgcagatgaccctggtgcccagcggcagccagcgcatggaattgcagcggcgcggtttcgaacgtctcaacctgctctcccgcggggtcgacagccaactcttccatccctcccggcgcgatcccgaactacgtcggcgctggggcctgggcgaacaggacatcgccgtgctgcacgtcggccggctggcggcagagaagaacctcagcctgctcggcggcaccttccgcgcgctctgcgccgcccatccgcagctgaagctgcgcctggtactggtgggcgacgggccggagcgcaggcacctcgaacgggacctgcccgaagcgctgttctgcggcgtccagcgcggcgaaaccctggccgcccactacgcctcgggcgacctgttcctcttcccaagcctgtcggagaccttcggcaacgtggtcctcgaagcccaggccgccggcctcgcggtggtcgccttcgaccaggccgccgccggccagcacatccgccatgggcacaacggcgtgctcgccgcgccgggcgacaagagcggcttcgtcgaagtcgccagttggctgctggacgaccaggaacgcctgcgccgggtccgtctcaacgcccgccaacacgccagccggcaaggttgggacagtatcgtcgagcacttccagaactacctggaagacgcctgcgccagtccgctggtccagcccgctcggtcgaagcccgagcggccgccggcagaggatggcggggccttgccacgcagccgcgagtag

SEQ ID NO: 322514 - DNA, 960 bp, Pseudomonas aeruginosa
atgcgtatcggcctggtggtcgacgcgacctgcgacctgccgcccgaattcctcgccgcccacggcatccgcgtgatgccgatcgggatccgcctgggcgagcagcggctcatcgatcgacgcgaccccgacaccaccctgagcttctaccgcgaccacctgcccaaggtcggtagcaaggacggcagccagccgctctccgccgccgagttgcaacaatggttcctcgacgaactggtgaccgacttcgactacgtggtctgcctcaccgtcgacagcctgcgcagtccgatcttcgagcacgccacccaggcttccttcggcctgctccagcactaccacgagcgccgccacgcggccggcatcgccggtcccttcaccctgcgcgtactcgacagccactcggtgttcgccggcatcgcctgcctggcggccgagggcacgcgcctgctggcgcagggcagccaccccaacgcgctgcgtacgcgcctcgaacagctcagccagcagacctgcacctacctggtcgccgatgacctgggccacttgcgccggcgcggcttccagaagggtgatcgcagcggtttcgtcgaccgggtcaagggcgcagcgctggggttgggctcgctgctcgacgtcaagccggtgttcagcctggccgatggcgaggacaaaccggtggcgctctcgccgagcttcgagaagtcggcggagaagctgttcggctatgccctggcgcgggtacaggcgggtgagctgctggcaccgcaactgggtctcagctatgccggcgatccgaccgcgctgcgcgacctgccgggcttcgccgcgctggagaacgcctgccgcgagcgcgacatccacttgcacctgggcatgctcagccctaccggcggcatcaatctgggcgccggggccatgagcctgggcttcatcgccacgccgaaagcctttgcctga

SEQ ID NO: 322515 - DNA, 1038 bp, Pseudomonas aeruginosa
atgagtgcccccgtagaagccctgttccaaccgttccgcctcggcgccctggaactgcccacccgtgtggtgatggcaccgatgacccgcaacttttcccccggcggcgtacccaacgccaaggtcgtcgagtactaccgccggcgcgccgccgccggcgtcggcctgatcgtcagcgaaggcacaacggtcggccacaaggccgccaacggctatccgaacgtgccgcgcttctatggcgaggacgccctggccgttcggcgcctgggcgtggagccggacgccagcgtgcccggctacggcccgatggagaaggccaaggacggcaaggtgctggtccacggcatgagtaaggccgacatccaggacgtcatcgccgccttcgcccaggccgcccgcgacgcccaggcgatcggcatggacggggtggagatccacggcgcccacggctacctgatcgaccagttcttctgggaaggcagcaaccagcgggacgacgagtacggcggcagcctggccaatcgctcgcgcttcgccgtcgagctggtgcgggcggtgcgcgcggcggtcggcgcggatttcccgatcatcttccgcttctctcaatggaagcagcaggactattccgcgcgcctggtggaaaccccggagggcctgcgcgagttcctcgcgccgctggtggaggccggcgtcgatatcttccactgctcgacccgccgcttctggattcccgagttcgaaggctcggaactcaacctggccggctggacccgcgagctgaccggcaagccgaccattaccgtgggtaacgtcggcctggacggcagcgagttcctgcaattcttcggcaaaaccgacgaggtggcgcagccggcgagcatcgacggcctggtggagcgcctggacaagggcgagttcgacctggtcgcggtgggccgcgcgctgctggtggatccggagtgggcggtgaaggtccgcgaggggcgtatcggcgacatcaagccgttcagccgcgaggccctggccagcctggtctga

SEQ ID NO: 322516 - DNA, 594 bp, Pseudomonas aeruginosa
atgatcaagctcgaacagctggtgctggccagccacaatgccggcaaactcaaggaactccaggccatgctcggcgccagcgtgaaggtgcgctcgatcggcgagttcagccaggtggaaccggaggaaaccggtctttccttcgtcgagaacgccatcctcaaggcacgcaacgccgcacgcctctccggcctgccggcgctggccgacgactccgggctggcggtggacttcctcggcggcgcgccgggcatctactcggcgcgctatgccgacggccggggcgacgcggcgaacaacgccaagctgctggaggccatgaaggatgtcccggacgccgagcgcggcgcacagttcgtcagcgtgctggcgctggtgcgccacgccgacgacccgctgccgatcctctgcgagggcatctgggaaggccgcatccttcgcgaagcccgcggcgcccacggcttcggctacgacccgctgttctgggtgccggaacgcgactgctccagcgccgagctggcgcccgaggagaagaaccgcctcagccaccgggcccgcgccatggccctgctcaagcagcgcctgggcctctga

SEQ ID NO: 322517 - DNA, 420 bp, Pseudomonas aeruginosa
atgcgccgcttcaccgctttcgtcctcggcctctgcctgagcctgccggtcctcgccgagcaggtgcagcgcttcggcgacctggacgtccactacaacgtgttcaactccagcttcctccaacccaacgtggccagcgcggtcggcctggtacgcagcaaggagcagggcgtgatcaacgtggtgccgatggagaaaggcaagccggtggaagccagcgtgaccggctccgccaaggacctgaccggcaaggtcattcccctggagttccgccgggtcagcgaggaaggcgccatctacaacctggcgcagttcccgatcagccagcgcgagaccctggtcttcaccatcaaggtcgaggccaagggcgaacctgcgcaaaccttcagtttcaacaaggaaatcttcccggacgaatga

SEQ ID NO: 322518 - DNA, 621 bp, Pseudomonas aeruginosa
atgcgcgccgatctcgaaatcatccaggaatggattcccgccggcagccgcgtcctcgacctcggctgcggcgacggcgaactcctggcctggctgcgcgaccacaagcaggtcagcggctacggcctggagatcgatcccgacaacatcgcccgttgcatcgaaaacggggtgaacgtgatcgagcaggacctcgacaagggcctgggcaacttcgccagcgacagcttcgacgtggtggtgatgacccaggcgctacaggccgtgcactatccggacaagatcctcgaagagatgctgcgggtcggcaagacctgcatcatcactttccccaacttcggccactggcgctgccgctggtacctggcgcgcaacggccggatgccggtctccgagttcctgccgtatacctggtacaacacgccgaacatccatttctgcaccttccaggacttcgagcgcctgtgccgccagttgcgcatgcgcgtgctcgaccgcctggccgtagaccgtgaccaccggcatggctgggccagtcggctgtggcctaatctattgggtgagattggaatctaccgggtcaccggacccggagtgcagacccgcaacctcgccgtctag

SEQ ID NO: 322519 - DNA, 1140 bp, Pseudomonas aeruginosa
atgcccacagtcttccccgacgactccgtcggtctggtctccccccagacgctgcacttcaacgaaccgctcgagctgaccagcggcaagtccctggccgagtacgacctggtgatcgaaacctacggcgagctgaatgccacgcagagcaacgcggtgctgatctgccacgccctctccggccaccaccacgccgccggctaccacagcgtcgacgagcgcaagccgggctggtgggacagctgcatcggtccgggcaagccgatcgacacccgcaagttcttcgtcgtcgccctcaacaacctcggcggttgcaacggttccagcggccccgccagcatcaatccggcgaccggcaaggtctacggcgcggacttcccgatggtcacggtggaagactgggtgcatagccaggcgcgcctggcagaccgcctcggcatccgccagtgggccgcggtggtcggcggcagcctcggcggcatgcaggcgctgcaatggaccatcagctaccccgaacgcgtccgtcactgcctgtgcatcgccagcgcgccgaagctgtcggcgcagaacatcgccttcaacgaagtcgcccggcaggcgattctttccgaccctgagttcctcggcggctacttccaggaacagggcgtgattcccaagcgcggcctcaagctggcgcggatggtcggccatatcacctacctgtccgacgacgccatgggcgccaagttcggccgcgtactgaagaccgagaagctcaactacgacctgcacagcgtcgagttccaggtcgagagttacctgcgctaccagggcgaggagttctccacccgcttcgacgccaatacctacctgctgatgaccaaggcgctggactatttcgaccccgccgccgcccacggcgacgacctggtgcgcaccctggagggcgtcgaggcggacttctgcctgatgtccttcaccaccgactggcgtttctcgccggcccgctcgcgggaaatcgtcgacgccctgatcgcggcgaaaaagaacgtcagctacctggagatcgacgccccgcaaggccacgacgccttcctcatgccgatcccccggtacctgcaagccttcagcggttacatgaaccgcatcagcgtgtga

SEQ ID NO: 322520 - DNA, 1968 bp, Pseudomonas aeruginosa
atgagcatggaaagactcagccatcaaatcgacgcctacgtcgcctggaagcgcgagctgatgcgggaaatcacccgctatcgcggctggctggagcgcagccggctgaacagcccggcggtcgaggccaagctcgaacgcgccctgcgccaactacgcgcggaccacatcaccctggccttcgtcggcgagttctcgcgtggcaagaccgagctgatcaacagcctgttcttcgccggctacggccagcgcatgctgccgtcccacgccgggcgcaccaccatgtgccccaccgagctgttccacgatccgcgcgccgagcgcagctacatccgcctgctgccgatcgagacgcgcctggccgacgccagcgtcgcccagttcaagcgcgtgccgcgccactgggtgaacattccgctggacaccggcgacccggagggcatggcccaggccttcgcccaggtcgccaagaccaaggcgctgccggtggaacaggcgatccagctcggcttccacccggatgccctggaagccgccgacgagcccgaccaggtgcgcgtcccggcctggcgccacgccctggtcaacttcgaccacccgctgctgcgccagggcctgcggatcctcgacacacccggcctgaacgccctcggcagcgagccggagctgaccctgtcgatgctgcccaacgcccaggcgatcctgttcctgctgtccgccgacgccggtgtcaccgcctcggacatggaaatctggcagaagtacatccagccactgcgcgaggacggccacagcagcctgttcgccgtgctgaacaagatcgacgtgctctgggacgacctttccggcgagcgcttcgtacagaacgccatccgcctgatccaggacggcacggcccgccagctcggcctgcagcgcggcgacgtgctgccgctgtcggcgaagcaggcgctgctggccaaggtccgcggcgaaccggcgctgctcgaacaaagtcgcctggatcggctggaagcgctgctctgcgagcgcatcgtcgcgcagaaggaagcgctgctggagaacgccgtgctcggccaggtccttggcctgctgcacaacagccagcatctgctgcgcctgcgcctggagaaggtcgaggaacagcgcgcgctgctcgacgacaagcagcgcgacagcggccaactgctgttcgaactgaccgcgaagaccaaggacgaccacggccgccaccaccgccgcctgctcaacctgaagaccaaccagcgcctgctgcagcaccagggcgcgacgctgcgcgagacgatccgcagcgaacgcatggaacagcacctgcagaaggtgcggcgcaacctcaacggcagcctgaccacggtcggcatcaaccaggcgatcctggcgttcttccgcgcggtggagcacgacctcgacaacctcgagcacgaggccggcatggccaaccgcatggtcgccgccatctaccgccggcacaacgaggagaacccgctctacgccctcgacgcgccgcagctacgggtccagcgctaccagcgcgaactgttgcaactgaagaagaagggcgaccagttccgcctgcagctgaagaccgtgcttaccgagcaacgcctgctgacccggcgcttcttcgccaccctggtgcaggaggtggtcggcctgcaccagcgcctgcgcgaggaaaccgagcgctgggccaacgacgcgctgatgccgctgatgcagcacaccctggaaaacaaacagttgctcgaaagccacatgctccgcctcaagggcctggcccaggagacccagcaggtacgccagcgcagccaggccttcgccgggttcgccggggaattgcaggaacagttgcgcgaagccggcgacatcctccgccagttgcgccgcccctcgcccctgcagcgccaggccaaggtggtcaacctgcccggctcgcagcgcgcctga

SEQ ID NO: 322521 - DNA, 171 bp, Pseudomonas aeruginosa
gtggagggcaaggccaacgcccatctgctggccttcctcggcaaggccttcggcgtggccaagagcctggtgagtctcgaaagcggcgagctgaaccggcagaaacgggtgcgcatccgccgtccgacccgattgccggaggaactggggatcgccgctcgacccgcttga

SEQ ID NO: 322522 - DNA, 594 bp, Pseudomonas aeruginosa
atgatcggcctcaacaccgctgctatctatatcctccagaccctcggcagcctctacctgctgatcgtgctgctgcgcttcatcctgcagttggtccgcgcggacttctacaaccccctcagccagttcatcgtgcgcgccaccaagccgctgctgaacccgctgcggcggatcatccccggcttcggcgggatcgacctggcctcgctggtgctggcgatcctgatccagctggtgctgatgatcctgatcctgatgctgatgggctacggcgtcggcggcttcatcatgcaactgctgatctggtcgatcatcgccgtcacctcgctgttcctgaaggtgttcttcttcgccctgatcatcagcgtgatcctttcctgggtcgccccgggcagctacaaccccggcgcgcaactggtgaaccagatctgcgaaccgctgctgatgccgttccgcaagctcctgccgaacctcggcggactggatctctcgccgatcttcgcgttcctcgcgctgaagctgatcgacatgctggtgatcaacaacctggcggccatgaccggcatgccccagcagttgagcattttcctctga

SEQ ID NO: 322523 - DNA, 822 bp, Pseudomonas aeruginosa
atgagcacaccccgcatagcgttcatcggcgccggcaacatggccgccagcctgatcggcggcctgcgcgcccaaggcgtgccggcggcgcagatccgcgccagcgacccgggcgccgagcaacgcgcgaagatcgccggcgagttcgccatcgacgtggtcgagtccaacgccgaggccgtggccgacgccgacgtcgtggtcctgtcggtcaagccgcaggccatgaaagccgtgtgccaggccttggcgccggcgctgaagccggagcaactgatcgtctccatcgccgccggcatcccctgcgccagcctcgaagcctggctcggccagccgcgcccggtggtccgctgcatgcccaacaccccggcgctgctgcgccagggcgccagcgggctgtacgccaacgcgcaggtcagcgccgcgcaacgcgagcaggccgggcagttgctgtctgcggtaggcatcgccctgtggctggacgacgaagcgcagatcgacgcggtgaccgcagtgtcgggtagcggcccggcgtatttcttcctgctgatgcaggccatgaccgacgccggcgagaagctcggcctgtcccgcgagacagcctcgcgcctgaccctgcagaccgccctcggcgcggcgcagatggcgctgtccagcgaggtcgagccggccgaactgcggcgccgggtgacttcgcccaacggcaccaccgaggcggcgatcaaatccttccaggccaacggcttcgaagcactggtggagcaggccctgaacgccgccagccagcgctccgccgagctggccgaacagcttggccaataa

SEQ ID NO: 322524 - DNA, 693 bp, Pseudomonas aeruginosa
atgtccacgatagcagagaatattgcaaaggttgccgcgcgcatccgtgaggcagcgcaagctgcggggcgcgatccggccacggtcggcctgctcgccgtgagcaagaccaagcccgccgccgcggtgcgcgaggcgcacgccgccggccttcgcgacttcggcgaaaactacctgcaggaggccctcggcaagcaggccgaactggccgacctgcccttgaactggcacttcatcggccccatccagtcgaacaagacgcggcccatcgccgagcatttccagtgggtgcactcggtggaccggttgaagatcgcgcagcgcctgtcggagcaacgcccggccgggctgccgcccctgaatgtctgcctgcaggtcaacgtcagcggcgaagccagcaagtccggctgcgcccccgaggacctgccggccctggccgaggccgtgaagcaactgcccaacctccgattgcgtggcctgatggccatccccgaacccaccgccgaacgcgccgcgcaacacgccgcgttcgcccgcctgcgcgaactgctgctggacctgaaccttggcctggacaccctgtccatgggcatgagcgacgacctcgaggcagccatcggcgaaggtgcgacctgggtccgcatcggtaccgccctgttcggcgcccgcgactacggcgcgccggcttcttga

SEQ ID NO: 322525 - DNA, 1035 bp, Pseudomonas aeruginosa
atggatattaccgagctgctcgccttcagtgccaaacagggcgcttcggacctgcacctctccgccggcctgccgcccatgatccgggtggatggcgatgtacgccggatcaacctgccaccgctggaacacaagcaggtgcatgcgctgatctacgacatcatgaacgacaagcagcgcaaggacttcgaggaattcctcgagaccgacttctccttcgaggtgccgggcgtcgcgcgtttccgggtcaacgccttcaaccagaaccgtggcgccggcgcggtattccggaccattccctccaaggtactgaccatggaggagcttggcatgggagaagtgttcaaacgtgtttcagacgtcccgcgcgggctggtactggtcaccgggccgaccggttcgggcaagtccaccaccctggcggcgatgctcgactacctgaacaacaccaagtaccaccacatcctcaccatcgaggacccgatcgaattcgtccacgaatcgaagaagtgcctggtcaaccagcgcgaggtgcatcgcgacaccctcggcttcagcgaagcgctgcgctcggcgctgcgggaggacccggacatcatcctggtcggcgagatgcgcgacctggaaaccatccgcctggccctgaccgcggcggagaccggccacctggtattcggcaccctgcacaccacctcggcggcgaagaccatcgaccgggtggtcgacgtgttcccggccgaggaaaaggccatggtccgctcgatgctctccgagtcgctgcaatcggtgatctcgcagaccctgatcaagaagatcggcggcggccgggtggcggcccacgagatcatgatcggcaccccggcgatccgcaacctgatccgcgaggacaaggtcgcgcagatgtattcggcgatccagaccggcggctcgctgggcatgcagaccctcgacatgtgcctcaagggcctggtcgccaagggcctgatcagccgcgagaacgcccgcgagaaggcgaagatcccggaaaacttctga

SEQ ID NO: 322526 - DNA, 1149 bp, Pseudomonas aeruginosa
atggaattcgaaaagctgctgcgcctgatggtggaaaagggcggctccgacctgttcatcaccgccggcgtaccgccgtcgatgaaggtcaacggccgggtgatgccggtgaccaagacgccgctgtcgccggagcagacccgcgagaccgtgctaggcgtgatgaacgagcagcagcgccgcgatttcgccgagaaccatgagtgcaacttcgccatcagcgcccgcggcatcggccgcttccgggtcagtgccttctaccagcgcaacctggtgggcatggtattgcgccggatcgagaccaacatcccgaccctggaagagctgaagctcccggaaatcctcaagaagctggcgctgaccaagcgcggcctggtgatcttcgtcggcgccaccggcaccggcaagtccacctcgctggcggcgatgatcggctaccgcaacaagaactccaccgggcacattatctccatcgaggacccgatcgagtacatccaccagcaccagggctgcatcgtcacccagcgcgaggtggggctggacaccgactccttcgaggtggcgctgaagaacaccctgcgccaggcgccggacgtgatcatgatcggcgaggtgcgctcgcgggagaccatggaccacgccgtggccttcgccgagaccggccacctgtgcctggcgaccctgcacgcgaacaacgccaaccaggcgctggagcggatcatccacttcttcccggccgaccgtcatggccaggtgtggatggacctgtcgctgaacctcaaggccatcgtcgcccagcaactggtgccgacccccgacggcaaggggcggcgggcggtgatcgaggtgctgctgaacaccccgctggccgccgacctgatccgcaagggcgaggtgcacgagctgaagccgctgatgaagcgctccaccgagcagggcatgcagaccttcgaccaggcgctgtaccagctctacacccagggcgagatcacctacgaggacgccctggcccacgccgactcggccaacgacctgcgcctgatgatcaagctcggttcggaaagcgacgccgaccacctgtcgagcctgacccagggcctgagcctggaaatcaccgacgacgaccctgccggccggcgcttccgctga

SEQ ID NO: 322527 - DNA, 900 bp, Pseudomonas aeruginosa
atgagcgccggacacgagcacagcttcgcccagaccaactcgacccgcctgaaatgggcgttgctgctgaccggaagcttcctcgtcgccgaggtcgtcggcggcatcctcaccggcagcctggcactgatctccgatgccgcgcacatgctcaccgacgccgtggccctggccatcgccctggccgcgatcaacatcgccaggcgcccgaccaacgatcgcctgacctacggctaccaccgcttcgagatcctcgccgcggcgttcaacgccttcctcctgttcggcgtggccttctatatcctctacgcggcctacgagcggctcaaccagccggcggagatccagtccgtgggcatgctggtgatcgccgtgctcggcctgctggtgaacctggccagcatgcgcctgctggcgccggcccagggcaacagcctgaacgtcaagggcgcctacctggaggtctggagcgacatgctcggctcgctgggggtgatcgtcgccgcgatcgtgatccgtttcaccggctgggcctgggtcgactcgctggtggcggtgctgatcggtttctgggtcctgccgcgcacctggatcctgctgcgcgagagcctgcatgtgttgctcgaaggggtgccgaaggaaatccagttggccgagctgcgcgaagcgctgctggggattcccggcgtgaccgggctgcacgacttgcatgtgtggtcgatcaccagcggcaagatcagcctgaccagccatctggtgtacgacccggccctggtcgatgccgaggcgctgctgggaacggtgaaggcgctgctgcacgaccgctacgagatcgaacacagcaccctgcaactggaaacctcggcctgcgcccaggccgaggagccgctggcctactga

SEQ ID NO: 322528 - DNA, 405 bp, Pseudomonas aeruginosa
atgactcaacagcacgacacccatagcaaggccatcggctacctgctgtggatcttcggtttcaccggttcgcaccgcttctattacggcaagccgatcaccgggacgatctggtttttcaccttcggcctgttcttcatcggctggatcatcgacctgttcctcatcccgtcgatggaccgcgaggccgaccggcgcttccagggcggcaacctggactacaacgtggcctggatcctgctgaccttcctcggcgtgctcggcgtgcacaggatgtacatgggcaagtggatcaccgggatcatctacctgttcaccggcggcctgttcttcctcggcgtgctctacgacttctggaccctcaacggacaggtgtccgagcgcaacgggccgcagcgcatctga

SEQ ID NO: 322529 - DNA, 1374 bp, Pseudomonas aeruginosa
atgacttccgactcacgtcccgccgtgctcgacctgatcggcaacaccccgctggttcgcgtgacgcgcttcgataccggcccctgcaccctgtacctcaagctcgaatcgcagaaccccggcggctccatcaaggatcgcatcggtgtcgccatgatcgaggccgccgagcgtgacggccgcctgcggcccggtggcaccatcgtcgaggccaccgccggcaacaccggtcttggcctggccctggtcggccgcgccaagggctaccgggtggtgctggtggtgccggacaagatgtccaccgagaaggtcctgcacctgcgcgccatgggcgccgaggtgcacatcacccgctcggacgtcggcaagggccatccggagtactaccaggacgttgccgcgtgcctggcgcaggatattcccggcgccttcttcgccgaccagttcaacaacccggccaacccgctggcccacgagtgcggcaccggcccggagctctgggcgcagaccggccacgatctcgacgccatcgtcgtcggcgtcggctcctccggtaccctgaccggccttacccggttcttccagaaggtccagccggagctggagatggtgctcgccgatcccgagggctcgatcatggccgagtactcccgctccggcaccctgggtacgccgggttcctgggcggtggagggcatcggcgaggacttcgtaccggccatcgccgacctctccagcgtgcgccatgcctattccatcagcgacgaggaaagcttcgccatggcccgcgaactgttgcgcgtcgagggcattcccggcggctcctccaccggcaccctgctggccgcggcgctgcgcttctgtcgcgagcagaaggagccgaagcgggtggtcagcttcgtctgcgacaccggcacccgctacctgtcgaagatctacaacgaccagtggatgaccgaccagggcctgctgcaacgcaagcactacggcgacctgcgcgacatcatcgcgcggcgcttcgaggagggacgggtgatcagcgtcggtccggacgacaccctgctcaccgccttccagcgcatgcgcctggccgacgtttcgcaattgccggtgctggacgatggaaaactggtcggtgtgatcgacgagtcggatatcctgctcggtgtccacgccgacgcgccacgcttccgcgatgcggtaagcagtgcgatgaacgccgcgccggagaccctcgcgcccggcgccagcctggcccagttgcaggcggtcctggaccgcggcctggtggcgatcgttgccgatgccagcggcttccacggcctgatcacccgtttcgacctgttgaaccatttgcggagaaagctcgcatga

SEQ ID NO: 322530 - DNA, 1185 bp, Pseudomonas aeruginosa
atgagccagcacgaccagcatcccgacgccccggcccaggcctttgcgacccgggtcatccacgccgggcaggcccccgatccctcgaccggcgcgatcatgccgccgatctacgccaactccacctatatccaggaaagccccggggtacacaaggggctcgactacggccgctcgcacaacccgacccgctgggccctggagcgctgcgtggccgacctcgagggcggcacccaggccttcgccttcgcctccggcctggcggcgatctcctcggtgctggagctgctcgacgccggttcccacatcgtttccggcaatgacctctacggcggtaccttccgcctgttcgagcgggtccgccggcgcagcgccgggcatcgcttcagcttcgtcgacccgaccgacctgcaggccttcgaggccgcgctgaccccggaaacccgcatggtctgggtggaaaccccgagcaacccgctgctgcgcctcaccgacctgcgcgccatcgcccagctctgccgcgcccgcggcatcatcagcgtggccgacaacaccttcgccagcccctacatccagcgccccctggaactgggcttcgacgtggtggtgcactccaccaccaagtacctgaacggccattccgacgtgatcggcggcatcgccatcgtcggcgacaacccggacctgcgcgagcgcctgggcttcctgcagaactcggtgggcgccatctccgggccgttcgacgccttcctcaccctgcgcggggtgaagaccctggcgctgcgcatggagcgccattgcagcaacgccctggccctggcccagtggctggagcgccagccgcaggtggcgcgggtctactaccccggcctggcttcgcacccgcagcatgagctggcgaaacggcagatgcgtggcttcggcgggatgatctccctcgacctgcgctgcgacctggccggcgcccggcgcttcctggagaacgtgcggatcttctccctggcggagagcctgggcggggtggaaagcctgatcgagcatccggcgatcatgacccacgccagcatcccggcggaaacccgcgccgacctgggcatcggtgactcgctgatccgcctgtcggtgggcgtcgaggcgctggaggatctgcaggccgacctggcgcaggcgctggcgaagatctga

SEQ ID NO: 322531 - DNA, 1272 bp, Pseudomonas aeruginosa
atgaccatcagtatccgaggcgcccgcgtcatcgacccggccagtgacctggaccaggtcggcgacctccacatcgaggctggcaagatcgtcgccatcggcgccgcgccggccggcttcagcgcccagaagaccctcgacggcgccggcctggtggccgcgccgggactggtcgatctgagcgtcgccctgcgcgagccgggctatggacgcaagggcaacgtcgaaagcgagacccgcgccgccgcggccggcggcaccaccagcctgtgctgcccgccctacacccggccggtgctggacaccccggcggtggccgagctgatcctcgaccgcgcccgcgaggccggcaacgccaaggtctaccccatcggcgcgctgacccgcggcttcggcggcgagcaactgtcggaactggtggccctgcgcgacaccggttgcgtggccttcaccaatggcctgcatggcttcgccagcaaccgcatcctgcggcgcgccctggagtacgcggcgaccttcgacctgacggtgatcttcacctcgcaggacaccgatctcgccgaaggcggcctcgcccacgaaggcccgaccgccagcttcctcggcctcgcggggatcccggaaaccgccgagaccgtggccctggcccgcaacctgctgctggtggaacagagcggcgtgcgcgcgcacttcagccagttgaccagcgcccgcggcatcgaactcgtcgcccaggcccaggcccgtggcctgccggtgacctgcgacgtggcgctgtaccagttgatcctcaccgacgaagcgctggtgggcttctccagcctctaccacgtgcaaccgccgctgcgcaccagggccgaccgcgaagccctgcgcgaggcggtgaagagcggcgtggtacaagccatcgccagccaccaccaaccccacgaggcggacgccaagaacgcgccgttcgccgccaccgagccgggcatcagcggcgccgagctgctgctaccgctggcgatgacgctggtgcaggacggcctgctcgacctgccgaccctgctcgcccgcctctcccacggcccggcccaggccctgcgcctgcctgccgggcgcctggcggtgggccaggccgccgacctggtgctgttcgacccgcagggttcgaccctggccggtgagagctggtactcgaaagggcagaacagcccgttcgtcggtcactgcctgccgggacgagtgcgctacaccctggtggacggacacctgacccacgagggttga

SEQ ID NO: 322532 - DNA, 1005 bp, Pseudomonas aeruginosa
atgccgacagacgccaagcgcccgctgcagctcaacgaccagggccagctgcgccacttcatctcgctcgacggattgccccgcgagctgctcaccgaaatcctcgataccgccgattctttcctggaggtcggcgcccgcgcggtgaaaaaggtcccgctgctgcgcggcaagaccgtctgcaacgtgttcttcgagaactccacgcgcacccgcaccaccttcgagctggccgcccagcggctgtcggccgacgtgatcagcctgaacgtatccacctcttccaccagcaagggcgagacgctcaccgacaccctgcgcaacctggaggcgatggccgccgacatgttcgtggtgcgccacagcgactcgggcgcggcgcacttcatcgccgagcacgtcagccccaacgtggcggtgatcaacggcggcgacggccgccacgcgcaccccacccaggggatgctcgacatgctgaccatccgccggcacaaagggaacttcgagcagctatcggtggcgatcgtcggcgatatcctgcattcgcgagtagcccgttcgaacatgctggcgctcaagaccctgggttgcccggacatccgcgtgatcgccccgcgcaccctcttgccgatcggcctggaagagcagtacggcgtgcgcgtgttcaccaacgccgacgaaggcctgaaggacgtcgacgtggtgatcatgctgcgcctgcaacgcgagcgcatgcagggtggcctgctacccagcgagggcgagttcttcaagctctacggcctgaccgagaagcgcctgaagctggccaagccggatgccatcgtcatgcaccctggcccgatcaaccgtggcgtggagatcgagtcggcggtggccgacggggcccagtcggtgatcctcaaccaggtcacctacggcatcgccatccgcatggcggtgctgtccatggccatgagcggccagaacacccaacgccagctggaacaggaggacgccgaatga

SEQ ID NO: 322533 - DNA, 513 bp, Pseudomonas aeruginosa
atgagcctacccaatcccgccgaactcctgccgcgcatggccagcgacctgcgcgcccatctcgccgagcgcggcatcgagcggccgcgcttcgtcggcatccacaccggcggcatctgggtcgccgaggcgctgctgagggaactgggcaaccaagagccgctgggcaccctcgacgtctccttctaccgcgacgacttcacccagaacggcctgcatccgcaggtccgcccgtcggcgctgccgttcgagatcgacggccagcacctggtgctggtggacgacgtgctgatgagcggccgtaccatccgcgccgcactcaacgaactgttcgactacggccgtccggccagcgtgaccctggtctgcctgctcgacctgaacgcccgggagttgcctatccgccccgacgtggtcggccagaccctgtccctgggtcgcgatgaacgggtaaaattggtcggtcccgcaccgctcgccctcgagcgcaaggtcctttcctccgcttcctga

SEQ ID NO: 322534 - DNA, 435 bp, Pseudomonas aeruginosa
atggccagcgacaagccgctgcgcctgctgctgggcttcgactacggcacccggcagatcggcgtcgccgtcggccaggcggtgaccggccaggcccgcgagctgtgcgtattgaaggcgcagaacggagtgccggactggaaccgggtggaagcgctgatcaaggaatggcagccggacgccatcgtcgtcggcctgccgctgaacatggacggcagcccaagcgagatgagcgagcgcgcggaaaagttcggccgccgcctcaacggccgtttcaacctgccggtctttacccacgacgaacgcctcacgacctatgccgccaagggcgagcgcctggcccagggccagcgcgacggctaccgcgagcgaccggtggacgccctggccgccgccctgctgctggaaggctggctggccgaacacccggattga

SEQ ID NO: 322535 - DNA, 570 bp, Pseudomonas aeruginosa
atgaaacagagcagcccaacctacctcaagcatcatttcctgatcgccatgccgcacatggccgaccccaatttcgcccagaccgtgacctacctggtcgaacacaacgagcagggcgccatgggcctggtgatcaaccgtcccagcggcctcaacctggcggaagtcctcgaacagctcaagccggacgccctgccgccggcgcgctgccagcacatcgacatctacaacggcggcccggtgcagaccgaccgtggcttcgtcctccaccccagcggcctgagctaccagtcgaccctggaactgggcgagctggcgatgtccacctcgcaggacgtgctgttcgccatcgccgccggcaccggcccggaaaagagcctgatcagccttggctatgccggctgggaagccggccagctggaggccgaactgagcgacaacgcctggctgacctgcccggcggacccggcgatcctcttcgacctgccgcccgaggagcgcctcagcgccgccgccgcgcgcctgggcgtcaacctcagcctgctcaccgcccaggccggtcacgcctga

SEQ ID NO: 322536 - DNA, 894 bp, Pseudomonas aeruginosa
atgaacgccgccgtcctcaagtccccctccgccgctgccggcgtccgcccggcggaccgtttgggcttcaccctgttcatcgcagccatcctgcacgtcgccctcatcctcggggtgggcttctccatgcccgcgccgagccagatcagcaagaccctggaaatcaccctggccaccttcaagagcgacaaggcgccggagaaggccgactacctcgcgcagatgaaccagcagggcagcggaaccctggagcacaaggccgcgccgaagaccaccgaggtcgcgccgttccaggacaaccaggtgaagaaagtcgcgccgccggctacgccgaagcaggccaggagcgaagaggcgcccaaggccgcggtgaccaccacccgccagcgccagcagaaggcaccgagcaagacccaggcacagaaggccgagcaggtcgccaagccggcgccgcatttcgactcaacccagctgtcggcggaaatcgccagcctcgaggccgacctggccaaggagcagcaggcctacgccaagcgcccgcgcatccaccgcctgagcgccgcctcgaccatgcgcgacaagggcgcctggtacaaggaagactggcgcaagaagatcgaacgcatcggcaacctcaactaccccgacgaggcccgccggcagaagctctacggcagcctgcggctgctggtgtcgatcaaccgcgacggcaccatctacgaggtgcaggtgctggagtcttccggcgagccgatcctcgaccaggccgcccagcgcatcgtccgcctggcagcgccctatgcgccgttcagcggcgacctggccgacatcgaccggctggagatcatccgtacctggcgcttcgaacgcggcgaccggctgtccagcaagtag

SEQ ID NO: 322537 - DNA, 954 bp, Pseudomonas aeruginosa
atgagcgtacgcctcgggatcgtcatggaccccatcgcgcgcatcaacttcaagaaggacagctcgctcgccatgctgctggctgcccaggcccgcggctggtcgctgttctacatggaacagcaggacctctaccagaaggccggcgtcgcgcgtggacgcatgcgcccgctgaaggtcttcaacgatgcctcccgctggttcgaactggaagcggaaagcgaccaaccgctgcacgaactggacgtgatcctgatgcgcaaggacccgcccttcgataacgaattcgtctattcgacctacctgctggaacaggccgagcgtgccggcgccctggtggtgaaccggccgcagagcctgcgcgactgcaacgagaagttcttcgccacgcagttcacccagtgcactccgccgacgatggtcagccggcgatccgatattctgcgcgagtttgccgccgagcatcgtgacatcattctcaaacccctggacggaatgggcggttcgtcgatatttcgtcaccgcgaaggcgacccgaacctctcggtgatcctcgagaccctcacccagcatggcagccagcagatcatggcacagcgctatctgccggaaatcaaggacggcgacaagcgcatcctgatgatcgacggcgaaccggtgccctactgcctggcgcgcatccccgcccagggcgagacccgcggcaacctcgccgccggcggccgcggcgtggcccagccgctgagcgagcgcgaccgctggatcgccgccgaggtcggcccgcacctgcgcgagcgcggcctgctgttcgtcggcctcgacgtgatcggcgattatctgacggaaatcaacgtcaccagcccgacctgcatccgcgagatcgaccaggccttcgacacccgcatcggcgacaagctgatggacgccatcgccgcccagctggctgcccgctga

SEQ ID NO: 322538 - DNA, 408 bp, Pseudomonas aeruginosa
atggaacagcaatccgacggtttgaaagtgatggtgatcgacgattcgaaaacgattcgtcgcaccgccgaaacactgctgaaaaaggtcggttgcgacgtgatcacggcaatcgacggcttcgatgccctggcgaagatcgccgatacccatccgaacatcattttcgtcgacatcatgatgccgcgcctggatggctatcagacctgcgccctgatcaagaacaacagcgcgttcaagtccaccccggtgatcatgctgtcctccaaggacggcctgttcgacaaggccaaggggcgcatcgtcggctccgaccagtacctcaccaagccgttcagcaaggaagagctgctgggcgcgatcaaggcacacgtacccagcttcaccccggtggacgccgtttcctga

SEQ ID NO: 322539 - DNA, 366 bp, Pseudomonas aeruginosa
atggctcgtattttgattgttgatgactctccgaccgagatgtacaagctgaccgccatgctggaaaagcatggtcaccaggtactcaaggccgagaacggcggcgacggcgtcgccctggcccgccaggaaaagcccgacgtggtcctgatggacatcgtcatgcccggcctcaacggcttccaggcgacccgtcaattgaccaaggacgccgagaccagcgccatcccggtgatcatcgtcaccaccaaggaccaggagaccgacaaggtctggggcaagcgccagggcgctcgcgactacctgaccaagccggtggacgaagagaccctgctgaaaaccatcaatgcggtgctggcgggctga

SEQ ID NO: 322540 - DNA, 537 bp, Pseudomonas aeruginosa
atgtcggacgttcagacccccttccagctcctcgtcgacatcgatcagcgctgccgacgcctggccgccggcctgccggcccagcaggaggcggtgcagagctggagcgggatcggcttccgcatgggcgggcggttcttcgtcgcccccatgggggaggtcggcgaagtcctgcacgaaccgcgctacacccagctgccgggcgtgaagacctgggtcaagggggtggccaacgtacgtggccgcctgctgccgatcatggacctctgcggtttcctcggcaccgaactgtcgcccttgcgcaagcagcggcgggtgctggtggtggagcacctggacgtgttcgccggcctcatcgtcgatgaggtgttcggcatgcagcacttcccggtggacaccttcagcgaacagctgccgccactagaagcggcactgcaacccttcattcatggcgtcttccatcgagagcagccgtggctggtgttcagcccgcatgcgctggcgcaacaccagggcttcctcgacgtcgccgtataa

SEQ ID NO: 322541 - DNA, 2049 bp, Pseudomonas aeruginosa
atgaagaaaatcaacgcaggcaatcttttcgcgggcatgcgcagcagctcggtgatcgcggggctgttcatcgtcctcatcgtctcgatcgtgttgctgttcgccaactttgcctacctcaacacccagtcgaaccatgacaagcagtacatcggccatgccggcgaactgcgcgtcctgtcgcagcggatcgcgaagaacgccaccgaagcggcggcgggcaagggcgaggcgttcaagctcctgaaggatgcgcgcaacgacttcgagaaacgctggaacatcctggtcaacggcgacgagagcacatccctgccgcccagccccgaagcggtgaagccgcagatggacgtggtgcagcaggactgggacggcctgcgcaagaacgccgactccatcctcgccagcgaacagaccgtactgtccctgcaccaggtggcctcgaccctcgccgaaaccatcccgcagctgcaggtggaatacgaagaggtggtcgacatcctgctggagaacggtgccccggccgaccaggtcgcggtcgcccagcgccagtcgctgctcgccgaacgtatcctcggctcggtgaacaaggtgctggccggcgacgagaactcggtgcaggccgccgacagcttcggccgcgacgccagcctgttcggccgcgtactgaagggcatgcaggaaggcaacgcggcgatgagcatctccaaggtgaccaacgccgaggcggtggatcgcctgaacgagatcgccgaactcttcgagttcgtctccggttcggtggacgagatcctcgagacctcgcccgacctgttccaggtccgggaagcggcgaacaacatcttcagcgtttcgcagaccctgctggacaaggcctcgcaactggccgacggcttcgagaacctggccggcgggcgcagcatcaacctgttcgccggttacgccctcggcgccctggccctggcctcgatcatcctgatcggcctggtgatggtgcgcgagaccaaccgccggctggccgagaccgccgagaagaacgaccgcaaccaggccgcgatcctgcgtctgctcgacgagatcgccgacctcgcggacggcgacctgaccgtggccgcgaccgtgaccgaggacttcaccggcgccatcgccgactcgatcaactactccatcgaccagctccgcgaactggtggagaccatcaaccagaccgccgtgcaggtggccgcagcggcccaggagacccagtccaccgcgatgcacctggccgaagcctccgagcaccaggcgcaggaaatcgccggcgcctcggcggcgatcaacgaaatggcggtgtcgatcgaccaggtatcggcgaacgcctcggaatcctcggcggtagcggaacgttcggtagccattgccaacaagggcaacgaggtagtgcacaacaccatcaccggcatggacaacatccgcgagcagatccaggacacctcgaagcgaatcaagcgcctcggcgaatcgtcccaggagatcggcgacatcgtcagcctgatcaacgacatcgccgaccagaccaacatcctcgccctgaacgccgcgatccaggcgtcgatggccggggacgcgggccgcggcttcgccgtggtagcggacgaggtacagcgactggcggaacgttcctcggcggcgaccaagcagatcgaggcgctggtgaagaccatccagaccgacaccaacgaagcggtgatctcgatggagcagaccacctccgaggtggtccgcggcgcgcgcctggcccaggacgccggtgtggccctggaggagatcgagaaggtatccaagaccctcgcggcgctgatccagaacatctccaacgccgcccgtcagcaggcatcgtcggccggccacatttccaacaccatgaacgtcattcaggagatcacctcgcagacctccgccggtaccaccgccaccgcacggagcatcggcaacctggcgaagatggcgagcgagatgcgcaactcggtatccggcttcaaactgccggagggcgtggagcaggcctga

SEQ ID NO: 322542 - DNA, 876 bp, Pseudomonas aeruginosa
atgcaggcgaacggcgtctggtcactgcagccgctggccgatatgtcggcagcggagttccgcgactggcaggtcctgttggagaaccgcaccggcgtggtgctcaacgagcaacgccggacgttcctgcaggccagcctgaccgcgcgcatgcgtgaactgggcatcggcgactaccacagctactaccgccaggtgaccgacggtccgcgtggcgcagtggagtgggcgaccctgctggaccgcctgaccgtccaggaaacccgtttcttccgtcatcccccgtctttcgagctgctcgagcgctacctgggcgagcgcctgcgccgcgaaggcatgccgcggccctgggccctgtggagcgtcggctgctccagcggcgaggaaccctactcgctggcgatgtgcgccgcgcaggtgttgcgcgggcaggaacgggaagattttttcggcgtcaccgggacggatatcagccttcacgccctgcagcgggcgcggcaggcgaactatccggcccgcaagctggagcaactggaggccgggctggtcgaacgctattgcgaacgccaggccgacggcagcttcagcgtgaaaacgatactgaccgagcgcgtctgctgcgcccggctgaatgtgctggacctggcgaaggcgccctggtccggcatggacgtgattttttgtcagaacctgctgatctacttccgtcgctggcgacggcgcgagatcctcaaccggttggccgaacggctggcgccgggaggcttgctggtgatcggggtcggcgaagtggtcgactggagccatccggagctcgagccggtcgccgacgagcgggtcctggcctttacccgtaaggggtactcaggcacatga

SEQ ID NO: 322543 - DNA, 7419 bp, Pseudomonas aeruginosa
atgggtgaccggcacgactacgtcgctctggagtgggtgaaaggcgagatcgccgaaaccctgaaacaggcgcgccaggcgctggaagcgttcgtcgagaacccgcaggacccgacccgcatgcggttctgcctgacctacgtgcaccaggtgcagggcaccctgcagatggtcgagttctacggcgcggccctgctcgccgaggaaatggagcagttggtccaggccttgctggacggtcgcgtgccgaaccagggcgaggccctggaagtgctgatgcaggcgatcctgcaactgccggtctacctcgaccggatccagaccgcccggcgcgacctgccgatggtggtcctgccgctgctcaacgacctgcgcgccgcgcgcggcgagaagctgctctcggaaaccagcctgttcgcgcccgacctgtcgcagcgccagccgcaactggacggcgaggccatcgcgcaactgcgcaccgacgaacttggcggcttgctgcgcaagctgcgccagacccagcagatggccctggtcggcctgctgcgcaaccaggacgtggccaccagcctcggctacctggcgcgtgtctatgcgcgcctggagggcctgtgccgcgaggcaccgctggggccgctgtggagcatcgcttccggcctggtcgagggcctggccaacggtagcgtggtcaacagcgcctcggtgcgcaccctgctgcgccagctcgaccgcgaactcaagcgcctggtcgagcagggcgccgacggcctgaaccaggccgcgccggacgagctggtgaagaacctgctgttctacgtggccaaggcgccttcgcagtcgccgcgaatccgcgcactgaaggaacagtaccgcctcgacgaggcgctgcccgaccacgagacggtggatgctgagcgcgcccgcctcgccggacccgaccgcgacgcgatgcgttcggtggtcggtgccttgtgcgaggaactggtgcggatcaaggacagcctcgacctgttcgtgcgcagcgaccgtggccacccctcggaactggacgccctcctggcgccgctcaagcagatcgccgataccctggcggtactcggcttcggccaaccgcgcaaggtcatcctcgaccagttggacgtcatccacgccctggcccagggccgccgcgagccgagcgacgcgatcctgatggacgtcgccggcgcgttgctctacgtcgaggccaccctggccggcatggccggtcccggcgacgagcgcaacagcgaggaaagccgcctgcccaccaccgatgtggcgcagatccaccagttggtgatcaaggaagcgcgcaacggtctggagcaggccaaggacgcgatcatcgagttcatcgcctcgcagtggaaccacgagcacctggcccgcgtgccggagctgctgacccaggtccgcggcggcctggcgatgatcccgctggagcgcgccgcgaccctgctggaaacctgcaaccgctatatccaggaacagctgctggcgcgcaaggcggtgccggactggcagagcctggataccctggccgatgccatcaccagcgtcgagtattacctggagcgcctgagcgaggaccatgccagccagagcgacctgatcctcgacgtcgccgaggacagcctggcgaacctcggctatacgctgaaaccgaattcgtcggccccggccgagcctggcctgtccgggcccgctgccatcgagtccccggctgccgagccggagaggccggaggcggtcgtcgaggtcgccgagacagcggagcaaccgcccgccgacacggctcctgccgaggccgcgagggaagatgccccgcagttggccagcgacgacaactggacccttggcgaagtcgcgcccgacgccggcgagccgtccctcgacctggccctggacctgccgctggacgattccgccgaagtgccgccggcgttgccggaggtggtcgaggagagcggccagccgcagtcgaccccggcgcctgcccgcagcctggacgatttcagcctcgacgagatcgatctctccggcctcgacctgcccgccgatgcggccccggcctccgggccggcggccctggcggactggtcgctgccggagcagtgggggctcggcgatgacctggcgcagccggcgcaggccggcgagacgttggatctgagcctggaggagccggcgctgtccttcgacgcgccgctggaaagcctcgagccgttgccggcgctggagcctttcgacggctccgctgaacaggagctggttctcgatgcgctcgatccgctgccgctggatgtagccttgccggaggcggagggcgaggtgtccgcctgggagggctcgagcctggaggaactggatctttccgacctcgatctccccgaggtgcaattgcccgaggccgaggccgaggcgccgcctgccgccgaggcgctcgccagcgaagcgccggccctgtctctggccgaggtgatggctgcgccggtgcagccgatcaacccgccggcgcagaacgttccggtcagcctgctgccaccgccggccgacgaggaaccggtggacgaggaactgcgcgaggtcttcatcgaggaggccggcgaggtcctggagaccatcggccgctacctgccggcctggaaagccgaccacgacgaccgcgaagcgctgaccgaggtacgccgtgccttccataccctcaagggtagcggacggatggtccgtgccctggtgatcggcgaactggcctggtcgatagagaacctgttcaaccgcgtgctcgatcgcagcatcgccgccagcgagccggtgcagcgagtggtggaccaggtcgtggccctgttgccggagctggtcgaggagttcgccgccaatgcccagcgccagcgcgacgatgtcgacctgctggcggccaccgcgcatgccctggccaagggcgagccgctgccggaaccgccggcgccggacgacggcggagtaccgccggaagccggggcggagcagccgtcgagcctggacaacggcgtccaggcgccgccattggccgacgcgccgcaggccgctgccgaggcgcagagcgacgtcgaactgctcgatccgcaactgctggagatcttcaccaacgaggcggaaacccatctcgaggccctggtcggcttcctcgccgactgcgcccgcgaactgccgcagccggtcaccgatgccttgcagcgtgccctgcataccctcaagggcagcgcacacatggccggcatcctgccgatcgcggagatcgccacgccgctggaaaaactggtcaaggaatacaagtccaacctgctcgccttcgacctgcgcgaagcggagttgctgcacgacgccgagcaactgttccgcatcggcctggagcaggtcggcgcgcaacggccattgaacccgatccccggcagcgacgcgttgctggagcgtatcgaggcactgcatcaggaacgcatcgcctcgctcgaggccgagcgctacagcgatgccggcgagcgccgcgatccgttgctgatcgaggcgttcctcgtcgaaggcatggacatcctgctggacgccgaggacctgctcgagcgctggcacgagcatccgcaggagcgccaggaactgagtgcgctgcgcgaggagctcagcactctggaccggggcgcccggcatgccgagctgccacaggtggaagaactctgccaggccttgctggcgctctacgaagccgtcgaggaaggccgcctggcggtcagcccggcgttcttcgaggaagcccgccaggcccacgaggcgctgatcgggatgatggaccaggtcgccgccggcctgcaggtcacgccgcgtccggagcgggtcgcggccctgcaggagctgttggaagcgcccgccgccgaggccgttccgttcatcgacccggagagcctcggcgccgacgatttccccccggaagacgaagaaccggccctccccgaggcggtcttcgaagaggccgggacgcctgccgaggagaccgtaccggcagcgcctgcaccggctcccggccgcgagctggacgaggaaatggtgtcgatcttcctcgaagaggcggtggacatcctcgaaagcgccggccaggcactggcccaatggcaggccgagccgggcgcgctgtcttcgctcagcgccctgcagcgcgacctgcataccctcaagggcggcgcacggatggccgagatcgccgagatcggcgacctggcccacgagctggaggccctctacgaaggactggtcgaccgccgttaccagcactccccgcaactggccggattgctgcaagcctgtcacgaccgcctggccgaacagctcgaccagttgagcgccggccagcccctggccgacccgcacgaccttatccagtcgatccgccggttccgccagggcccggtggccgaggccgcgacaccgggcgaggcggaaagccctgtcgaggaactcgttgcacctgccgtcgaggagcccgccgcgcctgctgcggaggcgttcgaagagcgcgatcccgaactggtggagatcttcctcgaggaaggcttcgatatcctcgacagcgctgccgccgcgttgcagcgctggatggacgacgtcgacaacaccatcgaactggaagccttgcagcgcgacctgcataccctcaagggcggtgcgcggatggccgagatcggcgagatcggcgacctcgcccatgagcttgaattcctctacgaaggcctctgcggtggacgcctgcgcgccagcccggccttgttcggcctgctgcagcgctgccacgacgagctggccgagatgctcgaggcggtgcgtggccaccgcacgctgcccgacgggcaggcgctgatcgcggagatcaggcgcctgcgcagcgatcccgacgagcaactgagcgtacccaccagcgtcagcctcaagccgctggcggcgaagggcgcggcggccgacgagagcgagatcctcgacatcttcctcgaggaagccgacgacctgctggagaacctcgaactggcgctcggccgctgggacggcggcaacggcgacgcccagccgctggacgacctgctgcggatcctgcacaccctcaagggcggtgcgcgcctggccggacagaccgagctgggcaacctggcccacgacctcgagcagcatctcaccgatgcgcagcaacagggcgcgccgtggccggacagcctgctgctggatgcgcagtcggggctggaaggcctgcagcggcaggtcgacctgttgcgcgagcggctggccgaggacgacgaggccggtgagcggcccgagcccgcccaggcgctggtccaggccgacgataccgaccgcgcggtggcctccgcgctggcagagctgacccgcctggccccggcggccggcgcgatcatggcggccgaggcggcgcctccggccgccccggccaccaccctgccgttcgtgcgcaaggcccaggaggcggcccaggaggccgcttcccgacgtgccccgcaggagctggtgaaggtgccggcggaactgctggagaacctggtcaacctggcgggcgagacctcgatcttccgcggccgggtcgagcagcaggtgagcgacgtcggcttcaccctcggcgagatggagtccaccatcgagcgggtgcgcgaccagttgcgccgcctcgacaccgagacccaggcgcagatcctctcgcgtcaccaggccgatgccgaacgcgccggctacgaagaattcgacccgctggaaatggaccgctattcgcagttgcagcagctctcgcgcgcactcttcgaatcggcctccgaccttctcgacctgaaggaaaccctggcggcgaagaaccgtgacgcggagaccctgctgctgcaacaggcgcgggtcaacaccgaactccaggaaggcctgatgcgcacccgcatggtgccgttcgatcggctggtaccgcgtttgcggcggatcgtccggcaggtggccggcgagcttggcaagcaggtcgaattcgtggtcggcaacgccgacggcgagatggatcgtaccgtcctcgaacgcatcgtcgcgccgctggagcacatgctgcgcaacgccgtggaccacggcatcgagtccggcgagacgcgccgcgcggcgggcaagccggagcacggtacgatccgcctgaacatcggccgcgagggcggcgacattctcctcaccctctccgacgacggcgccggcatccgcctcgatgcggtacggcgcaaggccatcgagcgtggcctgatgagcgccgacagcgacctcagcgatcatgaagtgctgcagttcgtgctcgagtccggtttctccaccgccgaaaaggtcacccagatctccgggcgcggcgtcggcctcgacgtggccaactccgaggtcaagcagctcggcggctcggtgagcatccagaccgagccgggccagggcacccgcttcaacgtgcggctgccgttcaccgtgtcggtgaaccgggcgctgatggtgctatccggcgaggatctctacgcggtgccgctgaacaccatcgagggcatcgtgcgggtttcgccctacgaactggaggcgctctacgaccagcgcggcgaggcggggctggatacgcccagcttcgaatacgccgggcagtcctacgaactgaagtacctcggcgagctgctgaacaacggccaggaacccaagctggtcggccagtcgctgcccttgccggtgatcctggtgcgctcctcggagcatgcggtggcggtgcaggtcgactcgctggccggttcccgcgagatcgtggtgaagagcctcggtccgcagttcgccggggtcgccgggatttccggggcgaccctgctcggcgatggccgggtggtggtgatcctcgacctgctggcgaccatccgctcccggcacgcgctgctcggccaggaaagccgtcgcgaacgcctggcgctgcgccaggaaatggcggcgagcgaaagcgagcagcagcggccgccgctggtcatggtggtggacgactcggtcaccgtgcgcaaggtcaccacccgcctgctggagcgcaacggcatgaacgtgttgaccgcgaaggacggcgtggacgccatcgcccagctccaggagcaccgtccggacatcctcctgctggacatcgagatgccgcgcatggacggtttcgaggtcgccaccctggtgcgccacgacgagcgcctgggcaacctgccgatcatcatgatcacctcgcggaccggcgagaaacaccgcgagcgcgcgctgggcatcggcgtcaaccagtacctcggcaagccttaccaggaaaccgagctgctcgaagccatccagtccctggtcggccagcatgagtga

SEQ ID NO: 322544 - DNA, 1032 bp, Pseudomonas aeruginosa
atgagtgagcgcgtcacgccacgggtcgcggtgatcgccgacacctcgttgcagcgccacgtgttgcaacaggcgctgctcggccatggttacgaggtggtgctcaacgccgacccggccagggtcgacgacgccgcgctggagtgcgcgcccgacctgtggctggtggacctgacccagcaggacgactcgccgctgctggacagcctgctggagcaggaccgtgcgccggtgctgttcggcgagggccacgcgccggagcggcataccgaacattacccgcgctgggagcggcggctgatcggcaagctgaagcgcttgatcggcgaccccagcgatggcgttggcgacagcctcggcgcattgctcgacgaggagcgtccgccgcgcctggagattcccggcgacctcgcggcgatgccgctgcaggccggcgaagcggcccgcgaggtgtggctgctggcggcctcgctcggcggcccggcggcggtgaaggcatttctcgacgccttgcctggcggcctgccgatcggcttcctctatgcccagcacatcgatgccagcttcgagcagaacctgccgcaggcagtcggccggcacagccagtggcatgtgaagaacgtccgcgacggcgaagcgctgcgttgcggcgaggtcatggtggtgccggtgctgcacgagctcggtttccaccacgacgggcgactgaaatgcagccagcgtccctggccggaaccctacaccccgtccatcgaccagatgatgctcaacctggcccagcagttcgggcccgactgcggggtgatcgttttcagcggcatgggtagcgacggcagcgccgctgccgcctacgtgcggcgccagggtggcgaggtatggacccagcgcgccgacagttgcgtctgttcgagcatgccggacagcttgcgcgaagccggttacagcagtttcaatgccagcccccgcgaactggccgaggcattggtcaagcatctggccgcacgctgcgcgccgacaggagtcgaaacatga

SEQ ID NO: 322545 - DNA, 507 bp, Pseudomonas aeruginosa
atgaaccaggccgtgatcgagcaggatggcatgagccggaacaccccagccaacccgaccccggacagcctcaccgggctgctcctgccgctgagcgaccgcaccctgctgttgcccaacgtcgccgtggccgaactgatcgcctatcgcaacccacaggtcgccgccggcctgccgcagtggtacctgggccaggtggcctggcgcgacctgcgcctgccgctgctgtccttcgaggcggcctccagcggcgaacagcagccggtgctcggcagcagcgcgcgggtggtggtcatcaacgccctcggcggacgaccccatgtgaagttcctcgccctgctggtgcagggcattccgcgctcggtgcggctggacgccaatctcgcgagcaccgccgcgccgctggcggcgctggaactggcggcggtggacatcggcggcgaaaccgcacggattccggacctggccgggctcgaagagaagctcgccgacgccggcctgatctga

SEQ ID NO: 322546 - DNA, 795 bp, Pseudomonas aeruginosa
atggccggcctgcagcacgcgcggatcggcgcctccctcgaggtcgccagcgccagcctggccgggcaccgcttcgagaagcacagccacgacgagttcgtcatcagcgccaacctctgcggattggaagatgtctggctggatggccgtaccttccaggccgacagcggcgacctgaccctctacaacccggggcagatccagggcggcggcgtccgcgacggccagccctggcgcttcgccagcctctatctgcctgccgccgaactggcgagcagcctggatctttcctccgtcgagttcgaccgcccgctgctgcgcagtccggcgctgggccgcgagttggccgccagcatcgaagccttgctggccagcgaccgtttcgcccgcgaacggggcgaggagcgcctgctggatttccttggccgcctgctggcggcgagcggcacccgcctgccgcagagggccgatcctgggcgcccggctgtcgcccgcctgcaggcgctgctcgccgagcgcctggccgaaccgccggacctggatgagatggcggagcaggtgggcctgtcgaaataccacctgctgcgggcgttcaagaaggccaccgggctcagcccgcgccagtggagcatgcaactgcgcacccgccgcgccctcggcctgttgcgccgtggcctggcggtgggcgaggtggcccacgccctgggcttcgccgaccagagccacctgacccgttacttcaccagcgcctacggcatttcgccgggccgctaccagcgcgccgtgcgcggctga

SEQ ID NO: 322547 - DNA, 612 bp, Pseudomonas aeruginosa
atgctcgccatcttcctcgccgccttgctgttcggtttcgccttcaatgtttcccctggcgcggtgttcagcgaaacgctgcgccgcggtttgaccggcggcttccgcccggcgttgctggtgcaactggggtcgctgatcggcgatgccgtctgggccctgctcgggctcaccgggctggcgctgctgctgggctacgaacaggtgcggattcccctgaccctggcctgtgccgcctacctggcctggctcggcgtgcaaggcttgcgcgacgcctggagtccgccgctggcggcggaggatgccggcgagcaggggcgcaacgccttcggcgccggcgcggcgatctccctgtccaatccgaagaacgtggtctactggggggccctcggcagcgccctggcggggatcgtcgacggcacgccgaaccaggcgcagtcgctggtgttcttcgccggtttcatgctctcgtcgctgatctggtgcttttgctgcgcggcgctggtggactggctgcggcgcaacacctcgctgttctggcaccgcgtcagctacgccggttgcggcgtgctcctgctcggcctggcgggactggcgctgcgcgggctgtag

SEQ ID NO: 322548 - DNA, 1374 bp, Pseudomonas aeruginosa
atggacacgcccgttaccttcgattggaagatccgcctgcccgacgtgctcggcgtactccgccgagactatgccggacgcttcccgcagttggcctccgccgcactggagacgctgctagagcgcctgcgcgacgaccttcccgaggatttcctgccagccctcggccaggagctggaatccctcggactggcgttggtggaacgcctggacgaagacgacagcctgaacctgtacgtggtcggcgccccccacagccagcgcctcctcgatgcgctcgcagcgcagggccacaacgcccgcacgctgcgccaggaaaacgcccccgagggcgcccgggcggccctccccgccgccgcgccggccggcctggcgccggcttcggcctacatctgcttcgaacacgccgagcacctggcgcccggcctggccatcgcccgcctgccgggcgaggacagccgcgacctgctggacctgcgccaatggcccaggctgcaacgcctgcccgatggcgcggaggaaacccagggcgcgttgctctgccgggccagttcggcggacggcctgcacgcctgggtcaggatgacccgttcgggaagcccctacgcctggctgcatcgctcccgcgacctcgcctcgttgacgcccgaactaccgcccttgccgctgccgccggcgcagtcgttgcgccaacgccgcaccccggaacttgccatcggcctggccggggacgacctgctcctggccgaccgcggcctgttcttcctctatccgggcttcgcccagggcaacgacgaaccgcggttgctcttcgaggtgccgcaagcgcggcgctccatcgagaatccgccggcggtcttcaccactccggaccagcgcgtctgcctgctctcccgcgggcagttcttcgaatggcgcgaggcacgcatccagcccctgccgttccccgttggcaaggatctgcccgccgatccggcgcaaccgacctcggcggcgcccgggaccatcgtctggctggagcgtgaaacgctctgcgaaggccggctcgacagcggcgagatccgcagccactcgctggacggcctggccgaaggcccctacctgaagctccaggccctggacggaggctggctgctcctggcgccgtggctggaaccgcatcgctcgcgggacctcgcccagctctggcacctcgaatccggccgggcgctgcgcatccgctacggcgaactggacctggagggcggactacagcactgggcggagctgcccgacggccggatcgtcgtcggcgaccatgcccggcatgtcgacctcggcacgttcgaaagcctgcgccaacgcctgctgcggcggcgcctggcgccggcctga

SEQ ID NO: 322549 - DNA, 723 bp, Pseudomonas aeruginosa
atgcgcctgtcccgcttcttcgtcgaccagcctctctccctcggccagcacgacctgcccgaggcccaggcccactacatcggccgcgtgctgcggcacgccacgggcgacgccgtgcaactgttcgacggcagcggccgggaatacctcggcgagctggtcgaggtcggcaagaagaatgtccgcgtcgaactccgcgagcagttcgccggccagcccgactcgcccctgcgtatccacctggggcaaggcctgtcgcgcggcgagcggatggactgggcgatccagaaggccaccgagctgggggtggcggaaatcaccccgatcgtcagcgagcgttgcgaagtgcgcctgaaggacgagcgcgccgacaagcgcctgcagcactggcgccaggtggcgatcagcgcctgcgagcagtgcggccgttcgagcctgccgctgatccatccgcctctggccctggaggactggctgcgcgggcgggacgatgacctcaggctggtcctgcaccctgtggccgcccccctggccagccatgcgccgccgtcgcgcctggccttcctggtgggtcccgaaggcggcctgagcgatgccgaggtggagcaggctcaggcggccggtttccactccgcgcgcctcggcccgcgagtgctgcgcaccgagactgctccggtggtagcgttggcggtggcccagcaactctggggcgacttcgcctga

SEQ ID NO: 322550 - DNA, 1404 bp, Pseudomonas aeruginosa
atgggccttaacgccgactggatgcagcgcgacctgaacgtactctggcatccctgtacccagatgaaagaccacgaacgcctgccggtgatcccgatccgccgcggcgaaggcgtctggctggaggatttcgaaggcaagcgctacatcgacgcggtcagttcctggtgggtcaatgtgttcggtcacgccaacccgcgcatcaaccagcgcatcaaggaccaggtcgaccagttggagcacgtgatcctcgccggattcagccaccagccggtgatcgagctgtcggagcgactggtgaagatcaccccgccggggctcgaccgggtgttctacgccgacagcggctcggcgggcatcgaggtcgcgctgaagatgagctaccacttctggctcaatagcggcaggccgcgcaagaagcgcttcgtcaccctgaccaacagctaccacggcgaaaccatcgcggcgatgtcggtgggcgacgtggcgctgttcaccgaaacctacaagtcgctgctgctcgacaccatcaaggtgcccagcccggactgcttcctgcgtccggacggcatgtgctgggaagaacattcgcggaacatgttcgcccacatggagcgcaccctggccgaagggcacgacgagatcgccgcggtcatcgtcgaaccgctgatccagggcgccggcggcatgcgcatgtaccacccggtctacctcaagctgctgcgcgaagcctgcgaccgctatggcgtgcacctgatccacgacgagatcgcggtgggcttcggccgcaccgggacgatgttcgcctgcgagcaggccggcatcgccccggatttcctctgcctgtccaaggccctcaccggcggctacctgccgatgtccgcggtgctgaccagcgagaccgtctaccggggcttctacgacgactaccagaccctgcgcgccttcctccactcgcacacctataccggcaacccgctggcctgcgccgccgccctggcgaccctggacatcttcgaggaagacaaggtgatcgaggccaaccgcgcgctgtccacccacatggccagggccaccgcgcacctggccgaccacccgcatgtcgccgaggtgcgccagaccgggatggtcctggccatcgaaatggtccaggacaaggcatccaggacgccctacccctggcaggagcgccgcggcctgaaggtcttccagcatggcctggagcgcggcgcgctgctgcgcccgctgggcagcgtggtgtatttcctgccgccctacgtgattaccccggagcagatcgacttcctcgccgaggtggccagcgaaggcatcgacatcgccacccgcgacgcggtcagcgtggcggtcagcgacttccacccggaccaccgcgatccgggctga

SEQ ID NO: 322551 - DNA, 1491 bp, Pseudomonas aeruginosa
atgtcgttaaggtggctgcgcgccgcggcgtttctcatgttgggggtgttcagcgcggtggcgctgggcaaggataaacagcctacggcgatcgtcgtcggcgcgggcctggcaggcctgagcgcggcctacgaattgcagaaggacggctggcaggtcacggtgctcgaagcgcggccgcaggtgggcgggcgttccggcctggctaccagcgaatgggtcggcaaccagaaggtccagcccacgctcaatgcctacctggacaccttcaagctgaagccggtgccggcgccggacttcgtccgcacccccagctacctgatcgacggcctgtactacagcagcagcgatctcgcgctcaagcagccgaacgtcgccgccgacctcaagcgcttcgagtcgaccctggacgatctctcggcatcgatctccgacccgctcaaccctgcctcgagcaataccctgttcgccctcgaccagatgaacgccgcgcgctggctggacaagctgaacctgtcgccgaccgcgcgcctgctggtcaaccagcgtatccgttcgcgctacgacgaaccgtcgcgcctgtcgctgctctacctcgcccagcagggccgcgcctaccgtggcgtcgacgaccgcgacctgcgcgcggcgcgcctgcccggcggcagccaggtgctggcggaagccttcgtcaagcagatcaagacgatcaagaccaaatccaaggtgtcgagcatcgtccaggccaaggacggcgtcgccgtcaaggccggcagcgagacctacaaggccgactacgtggttctcgccgtgccgctgaaggcgctcggccagatccagatgaccccgtccctgagcggtacccagatgtccgcgctgaagggcaccaactatggctggcgcgaccagatcctgctgaagttcaagcgtccggtgtgggacgacaagtcgcgcctctccggcgagatcttcagcgaccagggcctgggcatgatctgggtcgagccggcgctgaaaggcggcgccaacgtcctgatcaacctgtccggcgacaacgcccgcgtgctgcaggctttcggcgaccggcagatggtcgatcaggtgctgatccgcatgaacaagttctatccgaagatgcgcggtgccttcgccggctacgaaattcgtcgctacagcgccgatccgggtaccggtggttcctacctggcctacggtccgggccaggtgacgcgtttctggcggatctgggaacagccgctgtcgcgggtcgccttcgccggcgagcacaccgatgcgctgtaccccggcaccatcgagggcgcgctgcgtagcggcaagcgcgcggccagccaggtgcgcgacctgtatgccggcaagacgccggtgatcgagggcgcgccgatggtggcgaaggccgagaaggtggccgcaccgacgaccggcggcgagaagaagaacccgttcgcctggttcacccgcctgttcgattga

SEQ ID NO: 322552 - DNA, 570 bp, Pseudomonas aeruginosa
atgcagtggcgcaatacctcatcccgttacggcgtattcagcctgttcctgcactggggcagcgcgctggtggtcttcggcctgttcggcctgggcctgtggatgcgcgaactgagctattacgacccctggtaccaccccgcgccggcgctgcataaaagcatcggcatcctgctggccattgccctgctggtgcggatcgtctggcgtttcgtcagcccgccgccgccggcgccggccaaccacggtccgctcacgcgggtagcgagcaagcttggccacctcgcgctgtacgggctgctgctggcggtgatcgtcgcgggctacctgatttccaccgccgacggcgaaccgatcagcgtgttcggctggttctccgtgccggcaaccctcagcgggctgcccgaccaggcagacgtcgcgggtgaaatccatctctacctggcctgggcgctggtggtcttcgccgtcctccatgccctggccgccctcaagcatcacttcgtcgaccgcgacccgaccctaaagcgcatgctcggtcgctcgtcgaatgatcaacaaccacgttaa

SEQ ID NO: 322553 - DNA, 576 bp, Pseudomonas aeruginosa
atgctgaagaagacccttgccgcgctggcgctcggctccgcactgttcaccgccggccaggcaatggccgcggactacaagatcgacaaggaaggccagcacgccttcatcgagttccgcatcaagcacctgggctatagctggctgtacggccgcttcaacgacttcgacggcagcttcaccttcgacgagaagaacccgtcggccgacaaggtcaaggtgaccatcaacaccaacagcgtggacaccaaccatgccgagcgtgacaagcacctgcgcagcggtgatttcctcaacgtcagcaagaacccgaccgctaccttcgaatccaccgaagtgaaggccaacggcgacagcgccgacatcaccggcaacctgaccctgaacggcgtgaccaagccggtcaccatcaaggccaagctgatcggccagggcgacgacccgtggggcggctaccgtgccggcttcgaaggcagcgccaccctgaagctgaaagacttcggcatcaagatggacctcggcccggcatcccaggaagtcgagctgctgctctccgtcgaaggcattcgccagtaa

SEQ ID NO: 322554 - DNA, 264 bp, Pseudomonas aeruginosa
atgtgccgcgacaaggcactgatcacccggaagatccgcgagctggagggaagaaacctggtccgccgcgagcgcaaccccagcgaccagcgcagcttccagctcttcctcaccgacgaggggctggccatccaccagcatgcggaggccatcatgtcacgcgtgcatgacgagttgtttgccccgctcaccccggttgaacaggccaccctggtgcatctcctcgaccagtgcctggccgcgcaaccgcttgaggatatttaa

SEQ ID NO: 322555 - DNA, 165 bp, Pseudomonas aeruginosa
atgaactaccccgtgaatcccgacctgatgcccgcgctgatggcggtcttccagcatgtgcggacgcgcatccagagcgagctcgattgccagcgactcgacctgaccccgcccgacgtccatgtattgaagcttatcgacgaacaacgcgggctgaacctgtag

SEQ ID NO: 322556 - DNA, 1152 bp, Pseudomonas aeruginosa
atgcaacgaacgccagccatgcgtgtactggttccggccctgctggtcgcgatttcggccctttccgggtgcggaaaaagcgaggcgccgccgccggcgcaaacgccggaggtcgggatcgtgaccctggaagcgcagacggtgaccctgaataccgagctgccgggccggaccaatgcgttccgcatcgccgaggtgcgtccccaggtgaacggcatcatcctcaagcgcctgttcaaggaaggcagcgacgtcaaggccgggcagcagctctaccagatcgaccccgccacctacgaggccgactaccagagcgcccaggccaacctggcttcgacccaggagcaggcccagcgctacaagctgctggtcgccgaccaggccgtgagcaagcagcagtacgccgacgccaatgccgcctacctgcagtccaaggcggcggtggagcaggcgcggatcaacctgcgctacaccaaggtgctgtcgccgatctccggccgcatcggccgttccgcggtgaccgaaggcgccctggtgaccaacggccaggccaacgcgatggccaccgtgcaacagctcgacccgatctacgtcgacgtcacccagccgtccaccgccctgctgcgcctgcgccgcgaactggccagcggccagttggagcgcgccggcgacaacgcggcgaaggtctccctgacgctggaggacggtagccaatacccgctggaaggtcgcctcgaattctccgaggtttccgtcgacgaaggcaccggctcggtcaccatccgcgccgtgttccccaacccgaacaacgagctgctgcccggcatgttcgttcacgcgcagttgcaggaaggcgtcaagcagaaggccatcctcgctccgcagcaaggcgtgacccgcgacctcaagggccaggctaccgcgctggtggtgaacgcgcagaacaaggtcgagctgcgggtgatcaaggccgaccgggtgatcggcgacaaatggctggttaccgaaggcctgaacgccggcgacaagatcattaccgaaggcctgcagttcgtgcagccgggtgtcgaggtgaagaccgtgccggcgaagaatgtcgcgtccgcgcagaaggccgacgccgctccggcgaaaaccgacagcaagggctga

SEQ ID NO: 322557 - DNA, 3141 bp, Pseudomonas aeruginosa
atgtcgaagtttttcattgataggcccattttcgcgtgggtgatcgccttggtgatcatgctcgcgggcggcctgtcgatcctcagtctgccggtcaaccagtacccggccatcgccccgccggccatcgccgtgcaggtgagctacccgggcgcctcggccgagacggtgcaggacaccgtggtccaggtgatcgagcagcagatgaacgggatcgacaatctgcgctacatctcctcggagagtaactccgacggcagcatgaccatcaccgtgaccttcgaacagggcaccgaccccgacatcgcccaggtccaggtgcagaacaagctgcaactggccaccccgctactgccgcaggaagtgcagcgccaggggatccgggtgaccaaggcggtgaagaacttcctcatggtggtcggtgtggtttccaccgacggcagcatgaccaaggaagacctgtcgaactacattgtttccaacatccaggatccgctctcgcggaccaagggcgtcggtgacttccaggtgttcggctcgcagtactcgatgcgcatctggctcgacccggccaagctgaacagctaccagctgacccccggcgacgtgagcagcgcgatccaggcgcagaacgtgcagatttcctccggccagctcggcggcttgccggcggtcaagggccagcagctcaacgccaccatcatcggcaagacccgcctgcagaccgcggagcaattcgagaacatcctgctcaaggtcaatcccgacggttcccaggtgcgcctgaaggacgtcgccgatgtaggcctgggcggccaggactacagcatcaacgcgcagttcaacggcagcccggcgtccggtatcgcgatcaagctggccaccggcgccaacgcgctggataccgccaaggcgatccgccagaccatcgccaacctggaaccgttcatgccgcagggcatgaaggtggtctacccgtacgacaccaccccggtggtctcggcctcgatccatgaggtagtgaagaccctcggcgaggcgatcctcctcgtgttcctggtgatgtacctgttcctgcagaacttccgcgccacgctgatcccgaccatcgccgtaccggtggtgctgctggggaccttcggcgtgctcgccgcgttcggcttctcgatcaacaccctgaccatgttcggcatggtgctggccatcggcttgctggtggacgacgccatcgtggtggtggagaacgtcgagcgggtgatggccgaggaaggcctgtcgccaagggaggcggcgcgcaagtccatgggccagatccagggcgcgctggtcggtatcgccatggtgctctcggcggtattcctgccgatggcgttcttcggcggctccaccggggtgatctaccggcagttctccatcaccatcgtgtcggccatggccctctcggtgatcgtggcgctgatcctcaccccggcgctctgcgcgaccatgctcaagccgatcgagaaaggcgaccatggcgagcacaagggcggcttcttcggctggttcaaccggatgttcctttccaccacccacggctacgagcggggcgtggcgtcgatcctcaagcatcgcgcgccgtacctgctgatctacgtggtgatcgtggccgggatgatctggatgttcacccgcattcccaccgcgttcctccccgacgaggaccagggcgtactgttcgcccaggtacagaccccgccgggctccagtgccgagcgtacccaggtggtggtggactcgatgcgcgaatacctgctggagaaggaaagctcttcggtcagctcggtgttcaccgtgaccggcttcaacttcgccggccgcggccagagttcgggcatggcgttcatcatgctcaagccctgggaagagcgtcccggtggcgagaacagcgtgttcgaactggccaagcgcgcgcagatgcacttcttcagcttcaaggacgcgatggtgttcgccttcgcgccgccgtcggtactggaactgggtaacgccaccggcttcgacctgttcctccaggaccaggcgggtgtcggccacgaagtcctgctccaggcgcgcaacaagttcctcatgctcgccgcgcagaacccggcgctgcaacgcgtgcgccccaacggcatgagcgacgaaccgcagtacaagctggagatcgacgacgagaaggccagcgccctcggcgtgtcccttgccgacatcaacagcaccgtgtccatcgcctggggttccagctacgtcaacgacttcatcgaccgtggccgggtcaagcgggtctacctgcagggcaggccggacgcgcggatgaacccggacgacctgagcaagtggtacgtgcgcaacgacaagggcgagatggtgccgttcaacgccttcgccaccggcaagtgggaatacggttcgccgaagctggagcgctacaatggcgtgccggcgatggagatcctcggcgagccggcgcccggcctgagttccggtgacgccatggcggcggtcgaggagatcgtcaagcaattgccgaaaggcgttggctactcctggaccggcctgtcctacgaggagcgcttgtccggctcgcaggcgccggcgctgtatgcgctgtcgctgctggtggtgttcctctgcctggcggccctgtacgaaagctggtcgattccgttctcggtgatgctggtggtgccgttgggcgtgatcggcgcgctgctggcgacgtccatgcgcggcctgtccaacgacgtgttcttccaggtgggcctgttgacgaccatcggcctgtcggcgaagaacgccattctcatcgtggagttcgccaaggagctgcacgagcagggcaagggcatcgtcgaggcggccatcgaagcctgccgcatgcgtctgcggccgatcgtgatgacctccctggcgttcatcctcggcgtggtcccgctggcgatctccaccggcgccggctcgggcagccagcatgcgatcggtaccggcgtgatcggcggcatggtcactgcgaccgtcctggcgatcttctgggtaccgctgttctacgtggcggtcagcacgctgttcaaggacgaggcgtccaagcagcaagcgtccgtcgaaaaggggcaatga

SEQ ID NO: 322558 - DNA, 1920 bp, Pseudomonas aeruginosa
atgtccttttcttccctcggactctccgaggcgcttgcccgcgctgtggaggctgcgggctacagccagcccactcccgtgcaacagcgggcgattcccgccgtgttgcaaggtcgcgacctgatggttgcggcacagaccggcaccggcaagaccggtggtttcgccctgccggtactggagcgcctgttccccgccggtcatcccgaccgcgaacaccgccacggcccgcgccaggcgcgcgtgctggtactgaccccgacccgtgagctggccgcccaggtgcacgacagcttcaaggtctacgcccgcgacctgccgctgaacagcacctgcatcttcggcggggttggcatgaacccgcagatccaggccctggccaagggcgtcgacgtactcgtcgcctgccccggccgcctgctcgacctggccgggcagaacaaggtcgacctgtcccacgtggaaatcctcgtcctcgacgaagccgaccgcatgctcgacatgggcttcatccacgatgtgaagaaggttctcgccaagctgccgcccaagcgccagaacctgctgttctcggcaaccttctcgaaagacatcgtcgacctcgccaacaagctcctgcacaacccggaacgcatcgaggtaacgccgccgaacaccacggtcgagcgcatcgagcaacgcgtgttccgcctgccggctccgcagaagcgcgccctgctggcgcacctggtaaccgtcggcgcctgggaacaggtgctggtcttcacccgtaccaagcacggcgccaaccgtctcgccgagtacctgaccaagcacggcctgccggccgccgcgatccatggcaacaagagccagaacgcgcggaccaaggcgctggccgacttcaaggccaacgacgtgcgcatcctggtggcgaccgacatcgccgcccgcggcctggatatcgaccagttgccccatgtggtcaactacgagctgcccaacgtcgaggaagactacgtccaccgcatcggccgtaccggccgagccggacgcagcggcgaggcgatctcgctggtggcgccggacgaagagaagctgctcaaggccatcgagaagatgaccagacagcgtattcccgatggcgatgcccagggtttcgaccccgaggccgtgctgcccgaggtggcccagccggagccccgcgaagcgccgcagaagcagccgcgccgcgacaaggaacggcgcagcagccgcgagcgcaagccgaaagacgcccaggcgagcaaccccgacagcaatgtcgctgcggcccaggacggtaccgagaagccggctggaaagcgccgccgtcgcggtggcaagaacaaggaaaaccgcgaggccggccaagcgcagcagccgcggcagagccgcgaagcgcgtccggccaagcccaatcggccgccggaagtcgacggtaatcgcgatccggaagagttcctcgacgacgacttcgacaatttcggcaaccgcgccgactacgtcagcccctaccagggccaggaaaacaagggacgcggacgccgcggtggccagcagaaaccccagggcggcaccggccagcagggtcgtggccaaggccagggccaagctcgcggcaagagccagggcgccgctcaaggcggcgctcgcggtcagggtgccggccagggcaagacgaagaaaccgcgcgccggcaagccgcgcggccagggtcgcgagaatgcctcgcggatgagcgacgcgccgctgcgcgagccgtccgagtatggcaccggcaagcagccgagccgccagccggtggtgatcaacaagcgcgacctggtgcgcatggatcgcttccccaccgccgagcagctcgacgagctggaaccgcggcgcaagggcgagcgccccgcactgctgacccgcaaccgctaa

SEQ ID NO: 322559 - DNA, 339 bp, Pseudomonas aeruginosa
atgatcgaagagctgcaagtcggcgcccgcgaggcggtggccaccatgaccgagagccagcgctacagcctggagagcgtggagatcgccaaccgtgccggcgaacgcctgggtagcgtgaccagccggatcggcgagatcgacagcatgaaccagtcggtggccaccgccaccgaggaacagaccgcggtggtcgactcgctgaacatggacatcaccgagatcaacaccctcaaccaggaaggcgtggagaacctccaggccaccctgcgcgcctgtggcgagctggaaacccaggccgggcgcctgcgccaactggtggacagcttcaagatctga

SEQ ID NO: 322560 - DNA, 1890 bp, Pseudomonas aeruginosa
atgatcaaaagtctcaagttcagccacaagatcctgctcgccgccgcgctggtggtgatcgcgaccttctccctgttcaccctctacaacgactccctgcagcgtgcctcgatccgcgaggacctggaggactacctgcacgaaatgggcgagatcaccgccagcaacgtgcagaactggctgagcgggcgcatcctgctgatcgagaacctggcccagaccctggcccgcgaccacagcccggagaccacccaggccctgctggaacagccgctgctgggctcgaccttcctcttcacctacctggggcagaccgacggcacctacaccgcgcgccccaccagcgacctgccggccgactacgacccgcgccgccgcccctggtacaacgccgccaccagcgccggccagaccaccctcaccgaaccctacatggagccggccatccacgagctggtactgaccatcgccagcccggcgcgccagggcggccagccattcggcgtggtcggcggcgacctcagcctgcagacggtggtgaagatcatcaactcgctggacttcggcggcatgggctacgccttcctggtcagcggcgacggcaagatcctcgtccatccggacaaggaccaggtcatgaagagcctcagcgacgtctacccacgcaacacgccgaagatcggcagcggcttcagcgaggccgagctgcacggcaacacccggatcctcagtttctctccggtcaagggcctgtccggcctggactggtacatcggcatctcggtggacaaggacaaggcctatgccatgctcaccaagctgcgtacctcggcgatcgtcgccgcgctgatcgcggtggtcgccatcgtcctcctcctcggcatgctgatccgcgtactgatgcagccgctcaccgacatgggccgcgccatgcaggacatcgcccagggcgaaggcgacctgaccaagcgcctgaaggtcaccagcaacgatgagttcggggccctggccatttccttcaaccgcttcgtcgagcgtatccacgaatcgatccgcgaggtcgccggcaccgctcgccaactgcacgacgtggcgcaactggtggtgaacgcctcgaactcctcgatggccaactccgacgagcagtccaaccgcaccaacagcgtcgccgcggcgatcaacgaactcggcgccgccgcccaggaaatcgcccgcaacgccgccgatgcctcgcaccatgcgtccgacgccaaccaccaggccgaggacggcaaacaggtggtcgagcagaccatccgcgcgatgaacgagctttccgagaagatcagcgcctcctgcgccaacatcgaggccctcaacagccgcacggtgaacatcggccagatcctcgaagtgatcaagggcatctccgagcagaccaacctgctcgccctcaacgccgccatcgaagccgcgcgcgccggcgaagccggacgcggcttcgcggtggtcgccgacgaggtgcgcaacctggcccaccgcgcccaggagtcggcccagcagatccagaagatgatcgaggaactgcagatcggcgcccaggaagcggtcagtaccatgaccgagagtcagcgctacagccttgaaagcgtggagatcgccaaccgtgccggcgaacgcctgagcagcgtcaccggacggatcgccgagatcgacgggatgaaccagtcggtggccaccgccaccgaggagcagaccgcggtggtcgattcgctgaacatggacatcaccgagatcaacaccctcaaccaggaaggcgtggagaacctccaggccaccctgcgcgcctgcggcgagctggaaacccaggccgggcgcctgcgccagctggtggacagcttcaagatctga

SEQ ID NO: 322561 - DNA, 1116 bp, Pseudomonas aeruginosa
gtgcacatcgccgatatgaccatgttctacgcgcctgccagcgggggggtacgcacctatctcgaagccaagcatcgccatctctggcactatcccggcattcgccacagcgtgctggttcccggcgccagctaccgccaggcgaacggcatccacgaggtgccggcgccgccgctgccattcggcaatggctaccgcttccctctccgtcgcggcccctggcgcaaggtgctgcgcaatctgcaaccggacctgatcgaggtcggcgacccctacctcaccgcctgggcggcgctcgacgcgcgacgtcggctggacgtgccggtgatcggcttctaccactccgacctgccgctgctggtgagcaatcgcatgggcgcctggctcggcaccaacgcggacaactacgtcagcaagctgtacggccacttcgaccgggtcctggcccccagtcgggtaatggcggaaaagctgatgcgcctgggcgtcgccgacgtgcatgtacaaccgctgggcgtcgacctggtcaccttccatccgagcaaccgcgatccggggctgcgccaggaactcggcctggacgaggaaacccgcctgctggtgttcgccgggcgcggttcgcgggaaaagaacctgccggtactgctcgacgccatccagcgcctcggcgacggctatcacctgttgctggtgggttccaacatgccgacccgggttccgcgcaacaccagcgtggtcgaccatttctgcgacagccgcgaagtcgcccgcctgctggcgagcagcgacgcgctgctgcacgccggtgaccaggagaccttcggcctggtcgcactcgaagcgatggccagcggcattccggtggtggcggtgcgcgccggggcactggcggaaatagtcccggagcgttgcggcgtgctctgcgcaccgaacaacggcgacgccatggcctgcgcggtgcgcgaactgttcagccacgacgtcgagctgcgcggccagcgcgcccgccgtcacgtcgagcgccagcatgcctgggacgcggtggtcgccggtctgctcctgcactaccacgcggtactcggcgacagcgaggcgaggttcccgcgctatggctga

SEQ ID NO: 322562 - DNA, 1002 bp, Pseudomonas aeruginosa
atgagtcgaggctggttactgctgttcggtttgatcggtgcctcgctgattccgctggtgctcggcggcagcgacatgttcccgcgcttgcgcgccttcccgctggacagtctgctgctgatgttcggcatgatcgtggtctgctggttcatcaacggcctgcgcctgcgcctgctgctcgccgggcgcgccggcaagctcgggcaattgcagagcgtcggcatcatcatggccagcgaattcgctttctgcgccactccgggcggcagcggcgggccgttgaccctgatggcgctgctggcccggcgcggcctgcgcccggcacagaccagcgcggtgttcgcggtcgaccagttggccgacctgacgttcttcctctgcgccctcggcgcgatcctgatctatgccctcagccattcgctgagcccgaacatggaatcgagcctgatcttcagcgcggtattcctggtcggcctgttcgtcggcgcggtaatgctgatccgctacctgcaccaggtgatccgcttcaacgggcgggttctggcgcggctcggcgtgtcatcgcgcaagcgcctgcactggggccgcaagatcctgcatttccgcattgccctgcacgacagcctgcgcctgccgaaacgacgcctgctggcggtcttccttctcagcagtacgcactggctgctgcgcttcagcgtgctcgatctgaccctgcgcggcctgggagtggatatccagtgggcctggaccttcctgatccagatggtctcgctcagcgccggacagctatcgctgatccccggcggcgccggcggcaccgagctgacctcggcggccctgctggcccccatgatcggcaagtcgacggcggcggcggccatcgtcatctggcgagcggtgaccttctatttctacctcgtcgccggcggcccggtgttcgccgtgctcgccggacgcccgctgctgaagaagctgatcagcagtcgcgaggcttcttcctga

SEQ ID NO: 322563 - DNA, 213 bp, Pseudomonas aeruginosa
atgagcgatcccaggtcggcgggcaccgccagcccgccaccgaccctcggcgagggttgcacaagccgttacgacatcgacgccctcggcgacgaggacggaaccgagtttcccggcgcggccgaactctggcggcgtatccaggagagcaccagcgagacgggcgaggctgacgccgaggatacgctcaggaagaagcctcgcgactgctga

SEQ ID NO: 322564 - DNA, 852 bp, Pseudomonas aeruginosa
atgcgcacttttcggctggtgatcgcctgtcccgacggggtcgggatcgttgccaaggtgagtaacttcctggccacctacaatggctggatcaccgaagccagccatcattccgacaacgataacggctggttcttcatgcgccacgagatccgtgccgactctctgccgttcgacctggatggctttcgccaggctttcgccccgatcgcccgcgaattctccatggaatggcggatcaccgattccgaggtgaagaagcgcgtggtgctgatggccagcaaggagtcccattgcctggccgatctgctgcaccgctggcacagcggcgaactggactgcgagattccctgcgtgatcgccaaccacgacgacctgcgcagcatggtcgagtggcacggcatcccgtatttccacgttcccgtcgatccgcaggacaagcagccggccttcgatgaagtttcccggctgatcgacgaacatggcgccgactgcatcgtcctggctcgctacatgcagatcctgccgccggacctgtgccgcaagtacgcccaccaggtgatcaacatccaccacagcttcctgccgtccttcatcggcgccaagccgtatcaccaggcgtcgaagcgcggggtcaagctgatcggcgcgaccagccattacgtgaccgaggaactggatgccggtccgatcatcgagcaggacgtggtgcgggtcactcaccgcgacaacgtcgaagacatggtgcggctgggcaaggatgtggaaaaactggtgctcgcgcgcggactgcgctatcacctggaagaccgcgtactggtacacggcaacaagacggtggtgttcgactga

SEQ ID NO: 322565 - DNA, 375 bp, Pseudomonas aeruginosa
atgtccctgatcaacgaatatcgcgccacggaagaagccatcaaggaacttcaggagcgcctgaagtccctggaacaagacgacaaactgaaaaaagaactggaattcgaagagaagctgcgcacgctgatgggcacttaccagaagtccctgcgtgacgtgatttccctgctcgatccggacgccaagatcggcaagagcacccgcaccgccaaggcacctgccggcaagcgcgcgcgcaaggtcaagcagtacaagaacccgcacaccggcgaagtcatcgagaccaagggcggcaaccacaagactttgaaagagtggaaagccaagtggggccccgaggccgtcgagagctgggccaccctgctcggctaa

SEQ ID NO: 322566 - DNA, 1443 bp, Pseudomonas aeruginosa
atgaccgtgaacgcgagtattttttggtacgactacgaaaccaccggcatcgacccccgccgcgaccggccgttgcagatcgccgggatccgcacggacgaggcgctgaacgagatcggcgagccgatgaacctgtattgccgtcccagcgacgatatcctgccccaccctatggcttgcctgatcaccggcatcactccccagcggctggccgagcgggggctgtccgaggccgacttcatgacccgggtacacgcccaactggcgcagccggcgacctgcgtggccggctacaactccctgcgcttcgacgacgaagtgacgcgctacagcctgtaccgcaacttcttcgatccctacgcccgcgagtggcaaggcggcaatagccgctgggacctgatcgacatggtccgtaccgcctatgccctgcgcccggagggcatccagtggccgcagctggacggccggctgtcgctgaagctggaaatgctcaccgcggcgaacggcctggagcatgggcaggcccacgacgcgctttccgatgtccgcgccaccattgccctggcccgcctgatccgtcagcgccagccgcgcctgtacgattacctctaccagttgcgcagcaagcacaaggtgctcgaccaggtgcgcctgttgcagccgctggtgcatgtctccggacgcttttccgcggagcgccatttcctctcggtggtcctgccgctggcctggcacccgcgcaaccgcaatgctctgatcgtctgcgacctctgcgccgatcccgcgccgctgctggagttgtcggccgaagacttgcgcaggcgcctgtatacccgtcgcgacgaactggccgagggcgagttgccggtgccgctgaagcagatccaggtcaaccgttgcccggtggtggcgccgctgtcggtattgcgcgccgaggatcgccagcgaaccggcatcgaactcgaggagtgccagcgaaaagccgagctgttgcgccagcatcaaaccgtctgggcggacaaactgacagcgctatatggcgaagaaagtttctccgccagcgacgaccccgagcaacagttgtatgacggatttattggcgatcgggatcgacgcctttgtgaacagctgcgccttgccgaaccggagcaattggccaaagaacaatggcccttcgacgatgcccgtttgcaggagttgttcttccgctatcgtgcgcgaaatttcccggaaactttaaatgcagccgagcgccaacaatgggaaagcttctgccgcaatcgtttgtcccatgaagaatacggcgcaccgaatactttgccggccttcgaggcggcgctggaggcttgtcggcaagagcagggcggcacattgccggcggtacttgcggcctggcgcgattacgccgcggaactgcgtcaacgctattcgctggagacttga

SEQ ID NO: 322567 - DNA, 738 bp, Pseudomonas aeruginosa
atgaacgacaccagcaatccctacgccacccccgccagcgccctgcaaccgacccaggcggtgccgccggtcatcggcgactacgacttccgcatcggcgacgtgatcagcgaagcctgggccaagatcaagggcgtcaaaggcatcctgatcggcgccttcgtggtctacagcgtggtgatccagaccatcaccttcatcctcaccctgctcttcggcggtatcggcctgatgagcgaggccgatcccatcgccttcgcggtcggccagatgatcgccagcctggtcgccacggcggtgggctacccgttcttcaccggcctgaccatgatcggcatccgccgcgccgccgaccagccggcgaccttcaacgaaatgttcaactacttcggcatgctggtaccgctgctgctcaccggcctgctgatgatgctgatggtctacgtcggcttcttcctgctgatcatccccggtctctacctgagcgtcgcctacatgctcgccctgccgctggtggccgagcgcggcctgacgccctggcaggccctggaaacctcgcgcaaggccatcagccgccactggttcaaggtgttcggcctgctgctggtgctgagcctgctgatgctggtgagcatgatcccgctgttcatcggcctgatctggaccggcccgctgttcgtcgtctccatgggtattctctaccgcaccatcttcggcgttcgcccgctgggcaactga

SEQ ID NO: 322568 - DNA, 750 bp, Pseudomonas aeruginosa
atgccaccgaacgcagccgctcgcctcgtcgcgcccgcctcccggccaggcgccgaggtcctcgacacccactaccacgtggaaacgccggaaggcatcgacctgctcctgcgtcccgccggcgtcgtcccccgggccctggcctataccatcgacctctgcatccgcggcctgatcatgctggtgctgatgctcggcctggcgttcctcggcaagctcggcgccggcctcggcctgctgctgaccttcatcatgacctggtggtacatggtcctcttcgaggtgctcaaccagggccgctcgcccggcaagcagatgatgggactgcgcgtcgtccacgacgacggcactccggtgggctgggccgcgtcgctgctgcgcaacctgctgcgcttcgccgacatcctgcccttcggctacgccctcggtctgctctgttgcctgaaccatccggccttcaagcgcctgggcgacatcgccgccggcaccctggtggtctaccgcgaacccgaactgagccggcccagcctgcctgacgtcgagccgcaactgccgcccttccccatgagcctggaagaacagcgcgccttcctcggtttcgccgaacgcggcgcggcgctttcctcggcacgccgcgaggaactggcgggcattctcgccgaaccgctgggcgtcgagccggtacgcgcccaggccgagatcaacggcatcgcccgcggctttctcggcctgcgtcaggagagcgcatga

SEQ ID NO: 322569 - DNA, 981 bp, Pseudomonas aeruginosa
atgaaacagagcctcttcgaacagcgccaccaggccgcctggcaacgcttcgacaaacgcctcgccttcctcgagaaaggcaagaagctggaaggctccagcgacgacttcgccgccgattaccggcgcctctgccagcaactggcgctggcccaggagcgcggctacagcagtcacctgatcgaccagttgcagcaactggcgatgcgcggccaccagcagttctaccggcatcgcagccacctcggcagccgcatcctcggcttcctgctcgccggcctgccgcgcctggtccgcgaggagtggcgcagcatcgccgtggccagcctgctgttctacggcagcgccctgctcatggggctgctggtctatcactttcccgacctgatctacagcgtggtcagcccggacaaggtcagcgagatggagtctatgtacgccccggaaaccacccgcctaggtccgttgggggcacgcgacaccagcgacgactgggaaatgttcggcttctacatcatgaacaacatcggcatcgcctttcagaccttcgccagcggcgtgctgctgggactcggcagcctgttcttcctgctgttcaatggcctgatgatcggttcggtggccggccacctgacgcagatcggctacgtgcagaccttctggccgttcgtcatcggccacggcgcgttcgaactgaccgccatcaccttcgccggcgccgccggcctcaagctcggctgggcgctgctcgcgccaggtcgcctgacccgcggcgaagccctgcggctggccgcccggcgcagcgtgcaactgatcgccggggtgatcgtgctgttgctgctggcggccttcaccgaggcctattggtcttccatcagtcatttcgagccgcgggtgaagtacgcggtcggcgcggtcctctggctgctggtcggcagctacttcctgttcgccggacggagccgccatgcgcctgactga

SEQ ID NO: 322570 - DNA, 1572 bp, Pseudomonas aeruginosa
atgcgcctgactgacgccagcgtggcgatccgcccgcgcagcgcctgggaagcgctcgacctcggcatcctcctggcgcatcgccatgcgcgcctgctgatgggcagttgggcgttgctgaccctgccgctgttcgccgtgctcagcctcctgctgtggcagcatccgaccctggcgatcctgatcttctggtggctcaagccggccttcgaacgactgccgctgtatattctctcgcacgccctgttcggcgatacgccaaccctgaggcaggccctgcgcgcctatcccgccctgctgaggaagcagttgccggccagcctgctgtggcgccgcttcagtccgacgcgcagcttcgacctgccggtcctgcaactggaaggactcgccggggagccccgcagccagcgcctgatcgtattgtcccagcgcaacgccggcggcgcgacctggctgaccgtggtcggcgtgcacctggaaatggcgctctgggccggcttcgccatgcttctctacctgctgatcccggcgcagaacgagatcgactggaactggcagagcctgctcgacccggaagccggcgagtggctctggctggagcacctgtcgaacctgctctacgtcctggtgctggtagtctgggagccgatctacgtggcctgcggcttcaccctctacctgaaccggcgcaccgaactggaggcctgggacatcgagctggtgttccgccgcctgcgccagcgtctggtcggcagcgcctatgtcctgctgctcggcctgaccgcttcgctggcctggctgcccgccccttccgcctatgccgagccggcggccgccaccagcgccggcgaagccgagctgccgcccgagcaggcccgcctgctgcggcagaaactcaacagcgaacaggccggcaagcagatccgggcgatcgtcgacggcgcgccgttcaagaacagcgagaccgttacgggctggcgcttcggcgacaagaccgagaaaaaggacagccgcaaggaggacgaagagcggctcaaggcattcttcgaggccctggccaactgggtgccgttccgtcacgcggcgcaggtcatcgaagtgctgctctgggcgctgctgttcagcgcggtgttcctgctggtctggcgctaccgtgaatggctgcgcctgttcgtcggcaacctgggcttgccgcaacgggcccgccgcgaagcgccgacggtgatgttcggcctcgatctcagtccggaaagcctgcccgacgacatcgccggcaacgccgaacggctctggaacgagaaaccacgggaagccctcggcctgctctaccgcgggctgctcagccgactgctgcatgactaccgcctgccgttgaagggctcccataccgagggcgaggtcctgcgcctggtcgaaggactggagcaacaacggccgctgctgcactacagccaactgctgaccgcccaatggcaggcgctcgcctacggccaccggctgccggcagacgacactcgccagcgcctctgcgacggctggcgcagccttttcgccgcgggagccaagccatga

SEQ ID NO: 322571 - DNA, 1278 bp, Pseudomonas aeruginosa
atgatgagccggcgcgcgcgcttcctgctgcttgccgtgctcctgctgctggccgggctgctggcgatcttcctggccagccgcctgcaaccctatacggagacgatcgacctcggcccatcgccggaggcccggcgcaatccctacctggccgccgaactgttcctgcgcaagcagggggtcacggtgagccgtgccgacggccttgaggtcctcaaggagctgccgccctccgggcataccctgctcctgctcggcagccgctccggcatgactcccggccaggctcgccgcctgctgcaatggagcgagcagggcgggcacctggtgctgatcgccgaacgcctgtgggacgaggacgagaagaagagcggcgacctgctgctcgacagcctggatatccgccagtacctcaccgaggacttcgacgacagccaggaccgggccagcgaggaaaccgccgacgccgacgccgacgccgacgaaggtagcgtcgacgaccacgcgaccgaagcgccgccggaggacaccgccggcgaggaagaagagcccgccgacagcgtgccggactattccgcactgacccgcctgtacctggaaaacgagcgctcgccggcctacatcggcttcgatcccgactaccacctctacgatccgcagaaccacgcctacgcctgggccaacagcggcgacgccacccacctgttgcagatgcagcacggcaagggcctggtcacggtgctcaccgacgcctggatctggcagaaccgcaacatcgagcagtacgacaacgcctggctgctctggtacctgacccaggacaaccaggtgaccctgctctaccgcgccgaacgcgacagcctcgccaccctgctcgcccgccacttccccgaggccctggcggcagcgctgctgctgttgctcgccggcctgtggcgcgcagggctgcgccagggtcccttgcagccggtggccagccgttcgcgccggcaactggaggaacacctgcgcgccggcgccgacttcctcctccgccagcgcggccacgtcgccttgctgcacggtctgcaacgcgacatcctgcgcagggcgcggcgtcgccaccccggtttcgaacagctcggcgtcgccgagcaatggcagatcctcgggcgcatgacccgcctgccacccagcgccatcagccaggccatgcgcccatatccggcgcagcgcctttccgctgccgacttcacccgccaggtcgcccacctgcaaagcctcaggaatgccctatga

SEQ ID NO: 322572 - DNA, 1008 bp, Pseudomonas aeruginosa
atgagcgaacagacgcccgaacaaccgagcaccgcgcccaacccggcgctccagcgccagcgcgccagccagctggcccaggccctgcgcaccgaactgcagaaagccctgatcggccagggcgcagtgatcgacgacgtgctcaccgcgttgctcgccggcggccacgtgctggtggaaggcgtgccggggctcggcaagaccctgctggtacgcgccctggcgcgctgcttcgacggcggcttcgcgcgcatccagttcacccccgacctgatgcccagcgacgtcaccggccacgccgtatacgacctcgccagcgagcagttcaagctgcgcaaggggccggtgttcacccacctgctgctggcggacgagatcaaccgcgcgccggccaagacccaggccgccctcctggaagtgatgcaggagcgccaggtcaccctggaaggacgcgccctgccggtgccgcagccgttcatggtgctggcgacgcagaacccgatcgagcaggaaggcacctatccgctgccggaagccgaactcgaccgcttcatgctcaagctgcgcatcgattacccggccgaagccgaggaacagaccctggtgcgccaggtgacccgctccgcgcgcagcgacatgctcgacgtggccaacctgcggccgctgctgaaggacaaggacgttctcgccctgcagcggatcgccagcgacctgccgatcgacgaccaggtcctcgactatgccgtgcgcctggcccgcaccacccgcaactggccgggcctggccctcggcgccggacctcgcgcgtcgatcgccctggtccgttgcggccgggcgcgggcgctgctgcgcggcggcgagttcgtggttccggacgacatcaagggctgtgccctggcggtcctgcgccatcgggtccggctgtctccggagctggacatcgaggggctatcggtggaccaggtcctgcaacagttgctcgaccaggtaccggccccccgcgtatga

SEQ ID NO: 322573 - DNA, 1332 bp, Pseudomonas aeruginosa
atgaaaccatcgcgcgccctgctggcgctgttcgccgcgctcctgctgctggccatcggcctgggcagcctgtcggcgctcggccagcggttgcctgcgcaactgcatacattctggtgggcggcgctcgccgcgctgctcctgctcggcctgctggacgccctgtgggcgcgccgccaggcggtgccgaagctgagccgccagctcagcggcaacctgccgctggggcgctggagcgaagtgcgtctgcatctgcagcacacctatcggcgtccggttcgcctgaccctgttcgatcacctgccggccggcatggatttcgagtacctgccgcaggaggtcgaactgcgcccgggcgaaagcaccgaggtcggctaccgggtgcggccgctcaaccgcggtcacttcgtgtttccccgctgcgagctggaactgcccagcccgctgcgcctgtggcggcagcgccgctacctggaagcacgcggcgagacccgcgtctacccggacttcgcccgcctctacggcgccgaactgatggcggtcgaccactggctcaaccagatcggcgtacgcggcggccagcgccgcggcctcggcctggagttccaccagttgcgcgaattccgcgacggcgacaccctgcgccagatcgactggaaggccaccgctcgcaaacgcacgccgatcgcccgcgaataccaggacgaacgcgaccagcagatcctcttcctgctcgactgcggccgccgcatgcgcagccaggacggcgacctgtcgcacttcgaccatgccctcaacgccagcctgctgctggcctacgtggccctgcgccagggcgacgcggtgggcgccatgaccttcgccggcgacgaccgccggcatctcccgccgggcaagggcagcgcccagctcggcgcgctgctcaacaccgtctacgacctgcagaccagccagcgtcccgccgatttcccggaagccgtgcaggcggtgctgtcccgccagcggcggcgggccctggtgatcctggtaaccaacctgcgcgacgaggacgacgaagaactgctcggcgcggtgaaacgcctgggccgccagcaccgggtgctggtcgccagcctgcgcgaggaagtgctcgacaccctgcgccacgagccggtcgcccgctacgagcaggcgctcgcctacaccggcaccatcgactacctgaatgcgcgcaacggcctccacgagaagctcgcggcccacggcgtgccagtgctcgatgcgcgtcccagcgaactcgggccggagctgatcagccgctacctgggctggaagcgcgccggcgtgctttga

SEQ ID NO: 322574 - DNA, 360 bp, Pseudomonas aeruginosa
atgggtcttcaacgacatatccagcgccatcagttgcccagctacctgaaggtgttcaatcgcatcaccgataagccgatgggctacatcggcaacgtctccgaggacggcctgctgctgatcagccaactgccgatgctggtcggcgcgcgtttcgaactgcgcctgaaggttccgggactgggcggtcgccagcaatgcatcgatttttccgccgactgccggtggacctgcgaggacgtcacgcccggtcatttcgattccggcttccacctgctggcgccgcccgccgaattcctcgaactggtggaggcgctgcgccgctacttcagcttcccccgccagccgcagtcggtctga

SEQ ID NO: 322575 - DNA, 423 bp, Pseudomonas aeruginosa
atgcgtgccctgtggttctgtgtcgccctgatgcccgtgctggcgcaggcggacatctatcgctggaccgatgcccagggcaaggtacacttctccgccacgccaccggccggcgcgcaacgcgtcgaagtcaggccgcaggtggtggaacgtgacgccgcgacccgccagcgcgagcagcgcacccaggagtatttcgatgctcgtcgcgaggaacgcaccgccgctgccgaacgtgccggccagcgccaggctgcgctggccgaggaatgcgggcgcttgcggcaacagttgtcccagctcgaacgcggcggccgcttctatcggcaggacgccggcggcgggccggtttacctgagcgatgccgagctggacgccattcgtcgcgaactggcctcgcgggagtccgaacgctgccgctga

SEQ ID NO: 322576 - DNA, 378 bp, Pseudomonas aeruginosa
atgcgaagcttgatcgttgcctgcctggcgctgagtgccaccggttgtaacagctggtcgctgaacagcgacctgaacggggcctaccgcgcctacgacaaaggcgattgcgcacaggtgatgctcgacctgtcgcgggccgaacggcggattcgcgcgcggccctacctgcagccggaaatctcgctgctgcgcggccagtgcctggaacgccagagcctgttcgtcgacgcggcgcagacctaccacttcatcatcgcccgttaccccaccagcgaatatgcctaccgtgccaaggcgcggctggagaccttgcgtcagctgggccggctgaacgagacgccggcctcggccagcgccgtgccgacccgcctgtag

SEQ ID NO: 322577 - DNA, 807 bp, Pseudomonas aeruginosa
atgcgcttcgcccgccgtctcgtcctgctcccgttgctgtcgctgctggccgcctgctcgccgaccacgccgctgttcgtcgcccaggtgaccactggcgaagtcgccgaatacaagcagatgaagagcaaccgcatgaccgccgccatcgaggaggaaggcgacctgctgacctacagcgccatggcgatccgcgacaacaggagcgccgaggcggagaagctctacctcaccggctacgacaatagccgctacagcgccgaggtgcgcggtatctcgctgtaccagatcggcctgatctacatgagccgctacaacgaccagcgcgacgacgccaaggccaccgactacttccagcgcgtggtccacgagttccccggcacccacgccgccgagcatgcccaggcgcgcctgctggcaatgcgccagcgggccagagagccggtgcagaagagcgctcgcgaattgctcgccacctggaagccacagcagaacctcgatctctacaagaccagcctcgacccggacatgaccctgctgtcgcgccgcgcggtgctcaaggatcgggtcgacgaagccgccgagctctacctgctggcggtcaacgatccggcgattcctgccggtataaaggaaaaggccctctaccagctcggcctgatgtacctggcgccggacaacccgcacccgaaccgcgacaaggccatcgaatacctgcgtcgccagttgctcgactatcctgaaggcgaattgtcgaacaaggccggccggcacctcgaccaggcgctcaacgtgcaacctcgctga

SEQ ID NO: 322578 - DNA, 915 bp, Pseudomonas aeruginosa
atgaacctgcataacctgctggtggtcgtcgacccgagcagcgacgaacagccggcccttacccgtgcccagtggatcgccgaacgcagcggtgccagcgtcgagttgctgctgtgcgacttcaacccggcgctggacggcgggctgttcttcgacagtcactcgctgcagcgtgcccgcgacctttacctggacgaacgggtcacctggctggagcagctttccatgccgctgcagcaggccggcatccgcactcaggtcgaggcccagtggggcaagccgctggaccggatggtcctgcaacgggtcggcgaaacccggcccgacctggtcctcaagagcacccgcaagcacaacctgctgcgccgcctgctactgggcaacagcgactggcaattgatccgccactgcccgcagccgctctggctggtccatcacgacgcctggcgcggccagcgcctgtgcgcggcgctcgacccgctgcatgccagcgacaagccggccgccctcgatcaccggctgatcgccgccgcccgccagctcgaagccagcctggggctgcgcgccgactacctgcatacccacgcggcgatgccgcgcagcctgctgttcgacgcggaaatgctcgccggctacgagcttttcgtgctgcaacatgaggaacgtcaccgccaggccttcgacgacctgctggcagcctacccggagatcgccgcggagcgccgccacctgctggccggctatgccgagcaggcgatccccgacttcgtccgggccaacgacatcgacctgctgctgatgggcgcggtcgcccgggggcacctggacaacgcgctgatcgggcagaccgccgaacgcgtcctggaggaggtggaatgcgacctgctggtgctcaaaccgacaaatgacatctga

SEQ ID NO: 322579 - DNA, 1452 bp, Pseudomonas aeruginosa
atgtccgttcgccgcaccaaaatcgtcgccaccctcggcccagccagcaattccccggaagtgctggagcaactgatcctggccgggatcgacgtcgcccgcctcaacttctcccacggcacccccgatgaacaccgcgcccgcgccaggctggtgcgcgaactggcggccaagcacggccgcttcgtcgccctgctcggcgacctgcaaggaccgaagatccgcatcgccaagttcgccaacaagcgcatcgaattgcaggtcggcgacaagttccgcttctccaccagccacgcccgcgacgccggtacccaggaagtggtcggcatcgactacccggacctggtgaaggactgcggggtcggtgatgaactgctgctggacgacggccgggtggtgatggtggtcgaggaagtcgccgccgacgaactgcgctgccgggtgctgatcggcggcccgctgtccgaccacaagggcatcaaccgccgcggcggcggtctcaccgcgccggcgctgaccgacaaggacaaggccgacatcaagctggccgcggacatggacctggactacgtggccgtttccttcccgcgcgatgccaaggacatggagtacgcccgccgcctgctcaccgaggccggtggcaaggcctggctggtggccaagatcgagcgcgccgaggcggtcgccgacgacgacgccctcgacggcctgattcgtgccagcgacgcggtgatggtggcccgtggcgacctcggcgtggaaatcggcgatgccgagctggtcggcatccagaagaagatcatcctgcacgctcgccgcaacaataaagtggtgatcaccgcgacccagatgatggagtcgatgatccacagcccgatgccgacccgcgcggaagtctccgacgtggccaacgccgtgctcgactacaccgacgcggtgatgctctcggcggaaagcgccgccggcgagtacccggtggaagcggtgaaagccatggcccgcgtctgccagggcgccgagaagcacccgaccagccagaaatccagccaccgcctcggccagaccttcgaccgctgcgacgagagcatcgccctggcgtcgatgtacacggccaaccacttcccggggatcaaggcgatcatctgcctgaccgaaagcggcttcaccccgctgatcatgtcgcgcatccgctcgtcggtaccgatttacgcctactccccgcaccgtgagactcaggctcgcgtggcgatgttccgcggcgtggaaaccatccccttcgacccggcggcgctgccggcggagaaggtcagccaggccgcggtcgacgagttgctcaagcgcggcgtggtgaccaagggcgactgggttatcctgaccaagggcgacagctacaccgcccagggcggcaccaacaccatgaaggtgctgcacgtcggcgacctgctggtataa

SEQ ID NO: 322580 - DNA, 774 bp, Pseudomonas aeruginosa
atgagcgagctgattcgggtcgaacgcgaagcggggctgctgaccctgcgcctggaccgccaggacaagaagaacgcgctgacccgcgcgatgtacagtcggatggccgaggcgctgctggaggcgcaggccgatacggctgtgcgggtagtgctgatcactggcggcgatgcctgcttcaccagcggcaacgacatcctcgacttcctcgagcaaccgccatccctgcgcgacagcccggtcggccgcttcatgagcgccctgctggaattccccaagccggtgatcgccgcggtgaacggaccggcggtgggtatcggcaccaccctgctgctgcattgcgacctggtcttcgtcggtcgcaacgcgcgattgaagatgccgttcgtcaacctcggcctgacaccggagttcggctcgagcctgatcctgccgcgcatgctcggtcatgccagggctgcggaattgctgatgctcggccaggacttcagcggcgagcaggcggcggcctggggcctggccaatgcggcgctggaggatggcgccacggtgctggagcacgcccgcgatgcggcccggcgcttcctgcacctggcgccctcggcggtagtggagagcaagcgcctgatgaaagcgccgtttatcgaggagcttcgccgggtgatcgccgaggaaggcgatatcttcagtacccgactgcgctcgcccgaggcgatcgaggcgctcagcgccttcatgcaccggcgccagccggatttctccaggttcgcctga

SEQ ID NO: 322581 - DNA, 927 bp, Pseudomonas aeruginosa
gtgcctgacatacgggtcggcgagcgacgccttgccgtcgccgccggcagcaacctgctggatgcgctgctcgccggcggcatcgccgtgccccatagctgccgcgccggcagttgccacgcctgcctggtgcattgcctgcagggcgaggtggacgacaccctcccggaggcgctcgatccggcacggcgcgaagcgggctggcggctggcctgtcagtgccgggtgctcggcgacctcgtgttgcagcctttcgatcctgagcgcgacgggctgccggccagggtcgtagcctgccactggctgggcgatgtgctgcgcctgcgcctggagccggagcggcccttgcgctatcgcgccgggcagcacctgctgctgtggagcgacgatggcgtggcgcgtccctattcgctggccagcctgcctcacgaggacccatggctggagttccacatcgactgtagcgctcccggcgcgttctgcgaccgcgcccggcgcctggcgcctggcgcgctcctgcgtctgggcgagttgcgcggcggggcgttgcgctacgagccggactggcaggagcgaccgctgttgctgatggccgccggcaccgggctggcgccgctctgggggatacttcgcgaggccttgcgcgcggaacaccaggcgccgatccagttgctgcacctggcgcgcgaccactacctggcgagcgagttggcggagttggccgggcgtcatccgcaagtgcgcgtcaacctggtgtcggcggcgcagttgccctctgccttggccgatctccgccttgttccgcggcgcagcatggccttactctgcggccaacccgccagcgtcgaacgcttcgcccggcatctctacctggccggcgtaccgcgtagccagaccctggcggacctgttcctgccccacgcctga

SEQ ID NO: 322582 - DNA, 1128 bp, Pseudomonas aeruginosa
atgcgcacagacaagcctcctctgaaacagcgtgcgctgcaaaagctcttgctccgccggttcggcatggccgcaggcacctacctgctcggcctggttctgctctggctggcgctactcagcggcttctaccgcgcagcgccgaccaccgcggcggccagcaccaccctggtggtggcttgccaactggccttcctctggctgttcgccagcggacgcaacctgcgttacgccgatcccagcctgaccgagccgcaggtgctggtggcgatcgcctggctgacctatttcctctaccacgtcgacagcctgcgcggcaccttcatggtgttctacgtgctggccctgctgttcggtgtgttccaactgccgccgcgggtcttcgcccgctgtgcggcgctggcgttcatcgctttttccggcatctacctggtagaggccttgcagcagcgtctcgagctaccgggccgggctgcattgcaggtgctcgtgatgttcatcgtaatggtctggctgagcctgttcgccagctacatacaggcgatgcggcaacgcatgcgccagcgccgctatgccttgcaggcgcaccaggacacgctgcgcggcatgatgcgccaactggaagacctggtggccaccgacgaactcaccggtctgttcaaccgccggcatttcatgcgcatggccagccgggcgctggaagacctgctgccgaaccggcagcacggcctggcgctgatcgacctcgatcacttcaagcggatcaacgaccgccacggccacgccgccggcgatcgggtcctgcagaccttcgccgcggtggcgcgttcctgtctgcgcgatggcgacgtcctggcccgttacggcggcgaggagttcgtcctgctgctgccccacgccgacgcggaacagctggaaagctgttgcgagcgcctgcgcctggcgttccaacaggcggaaccggtcggggtcacggtggataccctgagcctttcggtgggcatgaccctgctgtatgccgacgacgatctcgacgaggccttgcagcgggccgaccaggcgctctaccgtgccaagcgcggcggacgaaaccgctgcgacgccacctgggaggtcaccagtgcctga

SEQ ID NO: 322583 - DNA, 1524 bp, Pseudomonas aeruginosa
atggccgtgatcaagcaagacgacctgatccagagcgtcgccgatgccctgcagttcatctcctactaccacccggtcgatttcatccaggccatgcatgaggcctacctgcgcgaagaatcgccggctgcccgcgactccatggcgcagatcctgatcaactcgcgcatgtgcgccaccggccaccgcccgatctgccaggacaccgggatcgtcaccgtgttcgtccgggtcggcatggacgtgcgctgggacggcgctaccatgagcgtcgacgatatgatcaacgaaggcgtgcgccgcgcctacaacctgccggagaacgtcctgcgcgcctcgatcctggccgacccggccggcgcgcggaagaacaccaaggacaacacgccggcggtgatccactactccatcgttcccggcgacaaggtcgaggtcgatgtcgcggccaagggcggcggctcggagaacaagtcgaagatggccatgctcaacccgtccgactcgatcgtcgactgggtgctgaagaccgtaccgaccatgggcgccggctggtgcccgccgggcatgctcggcatcggcatcggcggtaccgcggagaaagcagcggtgatggcgaaggaggtcctcatggacccgatcgacatccacgaactgaaggcccgcggcccgcagaaccgcatcgaggaactgcgcctggagctgttcgagaaggtcaaccagctgggcatcggtgcccagggcctgggcggcctgaccaccgtgctcgacgtcaagatcatggactacccgacccacgccgcctcgctgccggtgtgcatgatccccaactgcgccgcgacccgccacgcccacttcgtgctcgacggctccggccccgccgaactggaagcgccgtcgctcgacgcctacccggagatcgtctgggaagccggcccgtccgcgcgccgcgtcgacctggacaagatcaccccggaagaggtgcaaagctggaaaccgggcgagaccctgctgctcaacggcaagatgctcaccggccgcgacgccgcgcacaagcgcatggtcgacatgctgaacaagggcgaaacgctgccggtggacctgaaaggccgcttcatctattacgtcggcccggtcgatccggtcggcgacgaggtggtcggcccggccggtcccaccaccgccacccggatggacaagttcacccgccagatcctcgaacagaccggcctgctgggcatgatcggcaagtccgagcgcggtcccatcgccatcgaggcgatcaaggacaacaaggcggtatacctgatggccgtcggcggcgccgcctacctggtcgcccaggcgatcaagaagtccaaggtgctggccttcgccgaactgggcatggaagcgatctacgagttcgaggtgaaggacatgccggtcaccgtcgcggtcgataccaacggcgagtcggtgcacatcaccggcccggcggtctggcagaagaagatcgccgaaagcctggcgatcgaggtcaagtaa

SEQ ID NO: 322584 - DNA, 1320 bp, Pseudomonas aeruginosa
gtgaaatactccctgcccaccacggccaccgcgccgttctgtccctcggcggtcagccacagcgtggcggtgccggccgacgcctcgccgctgcgcaagctggcgctgttcgtcggccccggcctgctggtctcggtcggctacatggaccccggcaactgggccaccgccatcgaggcgggctcgcgcttcggctacgcgctgctgttcgtagtggtgctggcgagcttttccgggatgctcctgcaaagcctctgttcgcgcctgggcatcgccaccggccgcgacctcgcgcagctctcccgggagcgctaccgccctggcgtggcgcgtggccaatggctgctggcggaactgtcgatcgtcgctaccgaccttgccgaggtgctcggcgcggcgctggccttccacctgctgctgggcgtctcgattaccaccggggtggtcctcaccgccttcgataccctgatcgtgctggccctgcagggcgccaacttccgccgcctggaggccatagtgctggggctgatcgcgaccatcggcgcgtgtttcttcgtcgaactggtgctgatcggcccctactggccggatgtcgccgccggcttgcggccgtcctgggacaccctgagcagccaggagccgctgtacctggcgatcggcatcctcggcgcgacggtgatgccgcacaacctctacctgcattcgtccgtggtgcagacccgggtcagcggcgacgacgcggcgagcaaacgctcggcgatccgcttttcccggctcgacaccatcggctcgctgtccctggcgctgctggtcaatgcggcgatcctgatcctcgccgccgcggctttccacggtagcggccataccgaggtggtggagatccaggacgcctaccacctgctcgacccgttggtgggcggcgccctggccagcttcctgttcggcttcgccctgctggcggcggggcaaagctcgaccttcaccggcaccattgccgggcaggtggtgatggagggtttcctccgggcgaagattccctgctggcagcggcgcctgatcacccgcggcctggccctggtgccggccttgatcggcgtgctctggctgggcgaaggcgcggtaggcaagctgctggtgctcagccaggtggtgctcagcctgcaattgccgttcgccctgtggccgctgattcgcttcagcagcgaccggggcctcatgggggagttcgtcaacccgcgctgggtcagcgcgctggcctggtcgttgttcggcctgatctcggcggcgaacctgaccttgctgtatttctggttcggctga

SEQ ID NO: 322585 - DNA, 309 bp, Pseudomonas aeruginosa
atgtgcgaactctatgtgaaagccgatccgatcctctatgaatcgcgctcgcgttccttgcgcatccgcggggtggtgaccaccctgcgcctggagaaccagttctgggacatcctccgggaaatcgccgaaggcgagggcctgagcaccaaccagttgatcaccaatctctacgaggaagtgatggactatcgcggcgaggtgctcaacttcgcctccttcctgcgtgtcagttgtacccgctacctggcgcagcggcgcgagaaagtcgccgagctgagcctggtcggccagcgcgcccaggcctga

SEQ ID NO: 322586 - DNA, 582 bp, Pseudomonas aeruginosa
atggctgcgaagaagatcctgatgctggtcggcgactatgccgaagactacgaaaccatggtcccgttccaggccctgcagatggtgggccaccaggtgcatgcggtgtgtccggacaagcgggccgggcaaagcgtgcgcaccgccatccacgatttcgaaggcgaccagacctacagcgagaagccgggccacaacttcaccctcaatgccgactttgcccaggcccgcgccgaggattacgatgccctgctgatccccggcggccgcgcccccgaatacctgcgcctgaacgagcaggtgctggctctggtgcgtgacttcgacgccgcgcgcaagccgatcgccgcggtctgccatggcgcccagctgctggccgccgccggcgtcctgcaagggcgggcgtgcagcgcctatccggcctgcgccccggaggtgcggctggccggcggcgagtacgtcgaccttccgccggaccaggcccacgtcgacggtcacctggttaccgcgccggcctggccggcgcatccggagtggctggcgcgcttcctcgaggcgctcggcacccgcatcagccactga

SEQ ID NO: 322587 - DNA, 612 bp, Pseudomonas aeruginosa
atgctgcgcagcctgtcgctggccctgtcgatcgtcgcgagcctggtcggctgcagcacgcccggcgcgttcttcggtgcggtggacggaccggccttcgtcgcccatccgagcgccgatgccagccacgccaccgtctacctctaccgtccgcggagccagtgggcggacgaggaactcgaggcgccggggatcttcctcaacaacgaactgatcggcagcctaccgagcaacggctacctggcgttcgagttcgagaccggcagctacaagctggaaatgcgccggccgctggcgggcagcttctggaccctgttcgccgacggtccgatggatttcacccgcatcgccagcttcatgctcgaggccagggccggctcggtctactacctgcgctacgacgaactcaacccgccaccgaagagcgagcacccggcgggtgagggcgatggcccgctgcaattggtggcggccgatctcggcgctgcggaaatcggcgctacccaccaggttcaggagcccatgcagttcgccgccagcggctaccggaaacgcgtgcagcgctcgttctgggaaggcgtcgggcgggccctggacaagatcggcatctga

SEQ ID NO: 322588 - DNA, 1281 bp, Pseudomonas aeruginosa
gtggcaacgcccgactccaaggaacgtttcatcggactggaatggttgcgcttcctgcttggcctgtacgtggtggtgtaccacaccctgcatacctatccgaaagagcagaagtttcccggtctcgacgaactgaccagcctggggttcttcgccaccagtaccttcttcgtgctttccggcttcctcctggcccatgtttacgcacgcagcggccggttgcgcgaaagcgcccgcagcttctggaccaagcgactgtccaatctctatccgctgcacctgttctccctgctgctgtcgatcctggtgttgctggccctcagccacctgggaatcggtcccgagctggacaaggccaccccgcgcttcgtcatctacgacaccaacgaagtgctcggccgcacccacccggaactcttcctgcactggatgagcaacaccgaactgttcgtcaacagcatcctgcagatcctcctgctgcaggcctggaatccctattacctgaccttcaacgcgccgttgtggtcgctgtcgacgctgatgttcttctacctggcgtttcccttcgtcgccccgcggctgatgcgcagccggcacaagtggaaggtgctggcgctggtctggctggtctacctgatcccgccggcgctggtagtggccagcgagagctacgggatcccctggaccggcctgctgcaccgcaatccgttgctgcgcctgccggaattccttggcggcatcctggcctacgggttgttccgcggctaccgcgaccgtggcatggtgccgggacgcggcctgctggccgcgctggtggcgctggtggtggcggccttcctggtggccgactacctgttcacccagggcgccaaacattggtacttcctgctgcacaacggcctgctgctgccggcccagttgctgctggtgtgcctttgcgcgctgcccgccgacccgaagagcgctttcgtccgccactggtcgccgcgcctgggggccgcctcgctgtcgctgttcgccctgcatgtgccgatgttcaccctgttctcccgtagcgagcgccttatcgccgtgccggggcgttgtctcgacgactggcgcgcctgcaccgaggcggcggccgcgctgccatcgtcgctgctctactacccgctgttcctggtcctgctggtggcgttctgcgtgctgttccaggagcgcggcgtggtgccggtgcgcaagtggctggtgcgccggctgatgccggcgccggcgctggccaaggtgccgcgcccggcctga

SEQ ID NO: 322589 - DNA, 1158 bp, Pseudomonas aeruginosa
gtgagcggcccggtctttccctggcgcagcgacaaccgcttcgccctgctcaatgacggcgtgcggttcttcccgcgcatgctgctggccatcgaggcggcgcagcggagcatcgagctggagctgtacctggtggaagacgggcattgcgccgaactgtttctcgtcgccctgctggatgcccgccgccggggcgtcgccgtgcgctgcctgttcgacggcttcggctgcctcggcctgggcagcgcctggatccagcgcctgcgcgaggccggcggcgaactgcggctgtacaacccgctgcgctggaagctgactggcggcaatctctaccgcgaccatcgcaagctgctgctggtggacgggcgcctcggttatgtcggcggcgccgggatcaccgacgaattctgggaaccggtcagcgacgtcagcgcctggcgcgaggtgatggtcgagatggacggcccggtggtggcggactgggcggcgctgttcgagcggcaatggctggcctgtctcgaagagaaagcctggaagccccgcgagggcatgacccttacccgccttccgccgcagccgggggcggtccgtgggttgggccgggtggcctacgccgacgcccgccagcaccgcgacatcctgcaatcgctggtccgcgcgctgaacggctcgcgccgacggatctggctggcgacgccgtacttcctgccgacctggaaggttcgccgggccctgcgcaaggccgcccagcgcggcgtggaggtgcgcctgctgctggccgggcggctcaccgaccacgccccggtgcgctatgccgggcagcgctactacccgcgcctgctgcgcgccggcgtgcgcatccacgaataccagccgcgcttcctgcacctgaagatggtcatggtcgacgattgggtgagcgtcggctcctgcaacttcgatcattggaatctacgcttcaacctcgacgccaatctcgaggccctcgacccggacttcaccaatgaggcggcggcgagcctgctggcggacttcgccgacagccgcgaggtgaccctggcgatgtggcgcgcgcgacccctgtggatgcgcctgcaccagcgcctgtggggttggcttgaccgggtagtggtgaatttcctcgaccgccggcgctag

SEQ ID NO: 322590 - DNA, 573 bp, Pseudomonas aeruginosa
atgcacaagttgatctgcctcggcctggccctcctggccttgccggtccaggccgcctggtacctggactacgagtcgtcgcgactcagtttcatctccaccaagaacgctaccctttcggaagtcggccgcttcctggtcatgcacggcaaggtcgacgacaaggggcaggcgcgcctgcgcgtcgagctggactcggtgagcaccgacatcccgctgcgcgacgaacgcatccgcgagcatctgttcgagaccaagcgcttcgccgaggcggagatcaccgcccagctcgacctggcgccgatcgtcgagctggccgacggcgtgcaactggaaatgcgccagccggtgaccgtcagcctgcacggcaagcgcaagagctacgccagcgacctgttggtgacccgcctggacgagcatcgcttccaggtggtgaccctgtcgccgctggtgctggacgccgccgacttcgacctcgcccccggcatcgagaccctgcgcaagctggccggcgccggcagcatcgggctctcggtgccggtcggcgccgtgctgatcttcacttcgcggtga

SEQ ID NO: 322591 - DNA, 567 bp, Pseudomonas aeruginosa
gtgcgttccacccgcctctacggtgacgccgccgagcgcttccgttgccaggtggtggagcgttccgcgccgctgctggtggagttgagcgagcgaaccgggctggtcgccgatttgtcgattctcgacggcgaccgcctgctggtggcggaaagctcggtgcccggcgtcctgcgcaagcgctacccggccaaccggctggtggtcggccagcacgccagcctgttccattcggccatgggcaaggcctgcctgggcgaactggcagacagcgaggtgcgccgcctggcgcgccagcaccaggtagacgaggacctctggttgcgcacccgcgagcaggcccacggccagggctacggcgagcgtaccgagggacactgggagtatccggtgcgcctgccgttcctgatccgcgcggtggccttgccggtacgcgcccagggtcgcctgctcggcagcgtggcgctgcactggccgcgcgaccaggattgcgtcgaacgggtgcgccgccggcacctgggaaccctggccgataccgtcagtcagttgcagcacgcgctcgactga

SEQ ID NO: 322592 - DNA, 168 bp, Pseudomonas aeruginosa
atgcagttcctcgagccccagcgcctggtgctggcccagcagatcgaggatcgccagcgcccgctccaccgaacgcacggttcccgcctcttctctttccggcatgacgacacctccaccgtcgacagaccgttatggcaaagcaagatgcaggcccaggtcatgtag

SEQ ID NO: 322593 - DNA, 1485 bp, Pseudomonas aeruginosa
atgagcgccacccgccatcgaagcgacggccacgaggaaatcgtcgcgcttgacgcgctgccgctgtccgcggcgatccgccgacgcgaactgtcctgccgcgaggtcatgcaggcctacctggcgcagatcgaacggttcaacccgcgggtcaacgccatcgtctcgctgcaggcggaaagccgcctgctcgcccaggccgacgagcgcgaccggcaactggcgcgcggcgaatggctgggctggatgcacggcatgccgcaggcgatcaaggacctcgccgccacctccggcattcctaccaccctgggttcgccgctgttcgccgggcaggtgccggagcacgacgccatcgtcgtcgagcgggtgaagagcagcggtgcgatcgtcatcggcaagaccaacgtaccggagttcgggctcggctcgcagacctacaacccgctgttcggcaccacccgcaatgcctacgatccggcgcggatcgccggcggcagcagcggtggggcggcggtggcgctggcgctgcgcatgctgccggtggccgacggcagcgacatgatggggtcgctgcgcaaccccgccgcctacaacaacgtctacggcttccgcccgtcccagggacgggtaccgcacggcccgcaagcggaactgttcgtccagcaactggccaccgaaggcccgatggggcgcagcgtggcggacctggcccggctgctggccacccaggccggctacgatccgcgctctccgctgtcgttgcgcgacgatccgcgcaggttcgccgacgacctcgggcgcgatttccgcggagcccggctcggctggctcggcgactacgccggctacctgccgatggaggagggcgtgctggagctttgcgaagccgcgctgggcgatttcgccgagctgggctgcgacgtcgaggcgtgcctgccggactatcccctggagcgcctgtggcgcacctggctggtccatcgccagtggctggtgcagggctcgcttggcgagctttacgccgatcccgcacggcgcgtccggctcaagccggaggcgcagtgggaagtggagtccgggctcggcctcggcgccaccgaggtctatcgcgcctcgctggatcgcagcgactggtatcgggcgctggcgcgtctgttcgaacgttacgatttcctcttgctgcccagcgcccaggtgtttcctttcgatgcagaaacggcgtggccgcggcaggtcgccgggcggccgatggacacctatcaccgctggatggaggtggtgatcggcccgaccctggccggtttgccggcgatcagcgtaccgatcggcttcggcgcggcgggcctgccgatgggattgcagataatcggcccggcgcaggccgacctggcggtgctgcaactggcccatgcccacgagggcctgacccgttgggtcagccgccgtccgccggcgatgctcgaggctccagggggcatcgactag

SEQ ID NO: 322594 - DNA, 1320 bp, Pseudomonas aeruginosa
atgcacgcttgcccgagcggtacctcgcgtacccgccaggtggcggctgccgtgatcggcaacgccctggagtggtacgacttcatcgtctacggcttcctttccagcctgatcgccaggctgttcttcccttccggcgacgagtacacctcgctgttgatggccctggccaccttcggtgtcggtttcttcatgcgtccggtcggtggggtcctgctcggcctgtatgccgaccgcaggggacgcaaggcggcgatgcaactgatcatcctgctgatgacgctgtccatcgcgatgatcgccttcgccccgacctacgcggcgatcggcgtcggcgcaccgttgctgatcgtgatcgcgcgaatgctgcagggtttcgccaccggcggcgagtacgccagcgccacggctttcctggtggaaagcgcgccgccgcaccggcgcggtctctacggttcctggcaattgttcggccagtgcctggcggtgttcgccggtgcggggatgggcgcgctggtcacccattgcctggacgccgaggccctggagagctggggctggcgggtgccgttcctgttcggtctgctgatcggtccggtgggattgtggatccgccgctacatgggcgagaccgaggccttcctcgaagccatccgggagcccggcgagcgccaggggctgctcggcgtgctgcgcgaataccggcgcagcgtgctggtgagcatgggcctgacggtgatcggcacggtgtccttctacgtggtgctggtgaatatgccgaccttcgcccacaagcagttgggcctgccgctggacgaggtgttcatggtgcagatggctgcggtggcgctgatgaccctggtgatcccgttggctgggggactctccgaccgggtcgggcggcgcccggtgctgctggtcgcgaccctggccttcatgctcatggtctatccgctgttcgcctgggtcgccgcggcgccgagcctggggcgcctgctgctgatgcaactgttgctgtgcacggcgatcggcggcttcttcggcccggcgccgaccgcggtggccgagcagtttccggtgcgggtgcgttccaccggcctggcggtggcgtataacctggcggtgatgctgttcggcggtttcgctccgttcatcgtcacctggctcaccgaggtcggcggctcgccagtggcgccggcgttctacgtgctcggcgcggccttcctcgggctgctcgccaccctctatctgcgggagggcgcgacgcccgccccgcgcccccgtgaaccggccctgggcaagccggcaaggagtctgtga

SEQ ID NO: 322595 - DNA, 1221 bp, Pseudomonas aeruginosa
atggctcgacatcgacacatcgtggcctggctcgaggaggtcgccgacgacctgcgtagcctgcgccaggacatccacgcccatcccgaactgggcttcgaggagcgacgcaccgccgcgctggtcgccgaatgcctgcgcggctggggctacgaagtgcacgaagggatcggccgcaccggcgtggtcggcgtcctccgccagggcgccggtacgcggcggctcggcctgcgggcggacatggatgcgctgccgatcgtcgaggccacggggctcggctacagcagctgccacggcgggcgcatgcacgcctgcggccacgacggacacaccgcgatgctgctcggcgcggcacgctacctggcggcgacgcggcgtttcgacggcaccctggtactgatcttccagcccgccgaggaaggccagggcggcgccgaggcgatgctcgccgacgggctgctggagcgctttccctgcgatgcgctgttcggcatgcacaacatgccgggactggaggccgggcacctgggcttccgcgcgggaccgatgatggcttcccaggacctgctgagcgtcaccctggagggcgtcggtggacacggttcgatgccgcacctgagcgtcgatccgttgctcgccgcgtcgagcgcggtgatggccctgcagagcgtggtggcgcgcaacgtcgatccgcagaaggccgcggtggtcacggtcggcgcattgcaggccggcgaggcggccaacgtcataccccagcgcgccgtgctgcgcctgagcctgcgggcgctcgacggccaggtgcgcgagcaggtgctgcagcgggttcgccagatcatcgagttgcaggccgccagctatgggtgccaggccagcatcgagcactacccggcctatccggtgctggtcaacagcgtcgaggaaaccgagttcgcccgccaggtcggggtcgagctggccggcgcggagcaggtcgacggcgacacgccgaagctgatgggcagcgaggacttcgcctggatgctacagcgctgccccggcagctacctgttcatcggcaacggcagaggacggccgatggtgcacaacccggcctatgacttcaacgacgacatcctggtccggggcgcggcctattggggcgcgctcgccgagacctggctggccgcccccgcggcgtccggccttcgactgactgccgccaataacggcgcggcctga

SEQ ID NO: 322596 - DNA, 591 bp, Pseudomonas aeruginosa
atgcctgttgtattgtgtgtcctgttgttgctcctcagccctctgctgtcggcggcggaatggcaactggagccggattactcgcggatcagcttcgtttccgtgaaacgcgcgaagatggccgaggtgcagcgcttcgatcgtctcagcggccagatcgacaagcagggcgtcgcgcgcatcgtggtgccgctgggcaccctggacagcggcctggccctgcgcgacgagcgaatgaaggacaacttcttcgaaacctcgcgcttccccgaggccaccgtggagagccgcctggacatggccggcttcgacgacctgcgggtcggccagtcgcgggtcgagaagctcgacttcaccctcgacctgcacggccagcagcgccgcctgaaggccgacgtgctggtcacccgccagggcgaagggctggtccaggtggcgaccctggagccggtgctgctgaagctgctcgacttcgacctggaagagaagctcaagcccttgaaggagatggccaatattccctcgatcactcccgaggtaccggtgttcgccgtgctgaacttccgcgaagtgccgccggaacagttctga

SEQ ID NO: 322597 - DNA, 336 bp, Pseudomonas aeruginosa
atgatccgtcgccatcccttgctcttcctgttcgtcctggggctgctcgccgccctcgcgtgggcctggcagaaccgcatccacctggcggcctttcccgccatcatcggtgcctacacggccaaggagtactgctcctgccgctacgtgatggggaactccgcggactattgccgggcctatacccaacagtacgtgccgatcagcggcttcttcgacgacgaagcccgccgccgggtgaccgcccgcggcctcggcagtacgcagacggccgcctggctgggcccgcgcgagggatgccggctcatgcccgaggcggacaggctgccggactga

SEQ ID NO: 322598 - DNA, 1116 bp, Pseudomonas aeruginosa
atgcccgctttgccgttgtcccgccgcgccctcgccgcgctggccctggtattcgccctccctgccctggccgaagactggcccgacaccgactggccccgtgcccaacagcccgcggggccggcgctggaggcattcgagcgctatgccttcggtcgtcgcgacgatgttcgtcgcaaaggcatccgcaccgacgcggtagtggtgatccgcgacggtcgtctggtctatgagcgctacgccggcccgagccgtgcagagaccccgcaccttacctggtcggtgagcaagagcctgctcgccacgctgcttggcgtcgccgagggcgaagggcgcttccagctcgacgacccggtggcgcgctactacccgccgttcgcccgtcatcccgaggtgacgttgcgccacctgctgaactggtcttccgggctggactggcaggaggactacgagttcgcgccattgaaatcctccgtggtggcgatgctctacacccgtgggcgtgacgacatggccggcttcgtcgccgaaaccccgcaggcccggccgccgggccggcgtttccgctactccagcggcgacagcaacgtgctggcggcggccctccacggcatgctcggcgcggactatgccgagtacccctggcgcgcgctgttcgagccgctgggcatccgttcggcggtatgggagcgagacgccgccggcacgttcgtcggctcgtcgtacgtctacatgagcgcccgcgacctggcgcgcgtcggcctgctgatgcagcgccacgggcgctggcgcgagcggcaactgctgccgctggcatgggtcgagttcaacctgacgcccttcgcccgctaccggccgagcgcggaagaggagggcgaggcggtgccgggcggccagtggtggttgaaccgtgcggtgaaaggcgcgccggcgccctggccggacgtcgccgagaccgccttcgccgcgctcggccactggggccaggcgctctacgtgctgcccgaggagaagctggtgatcgtgcgctacgccgacgaccgcgacgggcgtttccgccacaacgaattcctgcgcctggcacaggcggcgttcgccggggaggcgcggccatga

SEQ ID NO: 322599 - DNA, 786 bp, Pseudomonas aeruginosa
atgcgacgcgaaccgatcgtgctgttcgacaacggcagccaccagtgcctgtgtttcgatgacctcgtcagcggcgaaggggtccagtccaaccagttcctgatcgtcgacaacggccagtacctgctgctcgatcccggcggcgacctgacctacacgccgctctcgctggaattgtcgaaacgctttccgctgcaggagctggactacatcttcgcttcgcaccaggacccggacatcatcgccgccctcgacaagtggctgctgcacacccgcgcccgggtgatctgctccaagctgtgggcgcgcttcctgccgcacctgacggccaactacctggcggtcagccatggcatcaacacctacgaccgggtcatgccgttgcccgaccgcggccaggcgatcgctctcggcgactgctcgttgaaggcgatccccgcgcatttcctgcattcggtgggcaacttccagctctacgacccggtgagcaagatccttttctcgggcgatatgggcgcctcgctggtggacgacgcggcgccggtcagcgatttcgccgcgcatatccagtacatggacggattccatcgccgctacatggcggcgaacaagatctgccgcctgtgggcgcggatggtccgggacatggatgtggagatgatcgtgccgcaacacgggcggcccttcgtcggcaaggaaatgatcagcgccttcctctactggatcgagaacctcgagtgcggcatcgacctgctcggcccggacgactaccgcatgccaggctga

SEQ ID NO: 322600 - DNA, 897 bp, Pseudomonas aeruginosa
atgtcctggcaacgcttgctcggcccgctcgaccgcctgcccaccgaaggctccctggaagactggcacgccgccgccctggcgcgcgccgacggtcttggcaccctggagcgggcggtgctcggcggacgattggccgcgagtccgggcctggccttcctcgccggctaccaggcggccctgcgcgcgctctggccggcggcgccggaaggtctcggcgcgctgtgcgtgaccgagaagcgcagcgtgcgcccggcggacctgcagacccgcctggaggggctggtcctgcatggacaaaaggatttcgtcaccgctggcgacagcgcctcctggtggctggtggccgcccgcgacgaggcaccggggcagccgccgcgactgtcgatgacggtggtcctggccggcgccccgggggcgcgcctggaggcgttgccggcgctgccgctgatgccggatgtgccgcattcccgcctgttgctcgacggtgcccattgcgagcgcctgcccggcgatggttgggacgactacgtcaggccgttccgcctgctggaggatgtccatgtgctggcggcgctggtcggctggctctatggggtcggccatgaatgcggctggccctcgccgctgctgctgcgcctggccggcatcctcggcggctgcgccgaggtcgcgcggcatccggtcgcctgcgtcggcacccaggcggtactggctgggctgttcgaacagttctcggcgctggaggggcaactggatgccgccttcgccgccaacgcctcgacctgggaggcattgtggcaacgcgatcgcggcttgctggcgattgccaacggggcccgcaaagttcgcctggagaaggccttgacccgcctcgggcttgacccaggtcagtga

SEQ ID NO: 322601 - DNA, 756 bp, Pseudomonas aeruginosa
atgacccagaccgccattacccgcgaacccgtcgccggacgccgcctgaaggccgagcgcctgaacggcgcccgcgccctgcgcgaggcccaggccctgcgctaccgcgtattcagcgccgagttcgacgccaagctcgaaggcgccgaagacggcctcgaccgcgacgactacgaccgtcactgcgcgcacatcggcgtccgcgacctcgacagcggcgccctggtggccaccacccggctgctcgaccatcgcgccgccgaacgcctcgggcgcttctacagcgaagaggagttccacctctccggcctcgacgccctgcacggcccggtcctggagatcggccgcacctgcgtcgctcccgaataccgcaacggcgccaccatcgcggtactctggggcgaactcgccgaggtcctcaacgagggcggctaccgctacctgatgggctgcgccagcattcccatgcgcgacggcggtatgcaggccaaggcggtgatgcagcggctgcgcgaacgctacctgtgcaccgactacctgcaggccgagccgaagaacccgctgccgccgctggacgtcccggaaaacctcaccgccgagctgccgccgctgctcaaggcctacatgcgcctgggcgccaagatctgcggcgagccttgctgggacccggatttccaggtcgccgacgtgttcatcctgctcaagcgcgacgaactctgcccgcgctacgcccgccacttcaaggcagcggtctga

SEQ ID NO: 322602 - DNA, 777 bp, Pseudomonas aeruginosa
atggcgcggctgcgcctgctgctgcgcagcgcacgcctgctcgggctggtcgcgctcggactgggcctggccgcttgggtcagcctgcgcgagcggctgcccggcgccgacgtcacgccgctgcgccagcgcctgacccgctggtggctggcgcgcctctgcgcggccctgcccttcgaggtcagggtcagcggcgaagcgccccggcaacccatgctgtgggtagccaaccatgtgtcctggaccgatatcccgctgctcggcgccctggcgccgctgaccttcctgtccaaggccgaggtgcgtgcctggccgctggccggctggctggcggaaaaggccggcaccctgttcatccgccgcggctcgggcgacagccggctgatcaaccagcgcttggccgaacaactgcaccgtgggcgcaacctgctgatcttcccggaaggcaccaccaccaacggcgaaagcctgcgcaccttccacggtcgcctgatggccagcgccctggaagccggcgtggcggtgcagccggtggcgatcagctaccgccgcgacggcgtgcctgatgcgcaggcgccgttcatcggcgacgacgacttgctcagccacctcggccgcctgctgcgcggcgagcgcggcagcgtgcatatccagctgctggaaccaatccccagccagggcctggaccgcgccgaactggcccgccaggcccagcaggcggtgcgcctggcgctgttcggcactgccgccactacgcaaacccggcgcgccgcctag

SEQ ID NO: 322603 - DNA, 861 bp, Pseudomonas aeruginosa
atgaaacgaatcctggtggcgaccgacctgtcctcgcgttccgagctggcggtcatgcgcgccgcggcgctggccaaggcgaggaatgccgaactgaccgtgctgaacgtgctcgacgacgaccagccgccggtgctgatcgcgccgcaacggctggccatcgccaacctgctggaagtgaacggacaggccctgaaggagcgcctcggcgtcgagtccaaggcgatcgtgcgggtcggcgatccggtggtggtgatcaacgcggtggccgaggagatcggcgccgacctgctggtgatgggcgcgcaccggcacacgccgctgcgcgacctgttcatcggcaccaccctggagcgggtggtacgcaatgcgaagatcccggtgctgcgcgcggccggtgcgccggaagaggagtaccgccgggtgctgctggcgctggacttctcgccgacctcgacgcgcgcggtgcagatggccggccagctcggcttcctcgacgccgccagcctcaccgcgctgcatgccttcgagccgttcgccaaaggcatgatgcgttattcggggatcaaggaagaccgcgtcgagcattacgtcgaccaggaggaactcaaggccaacgtcgagctgcgcgactacgtcgccggcctggggctgggccgcgaggacatccagttgcgcgtcggcgaaggcttgccgatcaacgtgatcatgaccgaggtacgccgccaggcgccgcagttgacggtgctcggcacccagggcctgaccggcttccgccgcgcgctgatcggcagcgtggccgaggcggccctcggcgacctaccgtgcgacgtgctggcggtgccgcccaagcgcgactag

SEQ ID NO: 322604 - DNA, 573 bp, Pseudomonas aeruginosa
atgaactacctcgcgcatctccacctcggcggcccgcaaccggcccaactgctcggcagcctgtacggcgacttcgtcaagggccgcctgcagggacaatggccggacgagatcgagcgggccatccagttgcaccggcgcatcgacgccttcaccgacagccacccactggtgcatgcggccaagcggcgcttcccgctggagcgccggcgtttcgccggcgtcctgctggacgtgttcttcgaccactgcctggcgcgcgactggaacgactacgccgacgaaccgctgccgcagttcgtcgagcgggtctacggcaccctgcgcaccgcctcgccgctgccggagcgcctggcgcgcatcgcgccgcggatggcggcccaggactggttgggcagctaccgcgagttcgcggtcttgcgcgaagtgctgggcggtatgtcgcggaggctgtcgcgaccgcacctgctggacggctcctgggaagaactggcccagcgctacgatgacctgagcgcggatttccgcgccttctacccgcaactccaggctttcgccctgagccagcgctga

SEQ ID NO: 322605 - DNA, 303 bp, Pseudomonas aeruginosa
atgccactggacatcgacgaaatcatcaaggctctctcccacccggtgcgacgcgacatgctgcgctggctgaaggaaccggagaagtacttcgtcgagcaggaccacccgttcgagatcggcgtctgcgccggcaagttcgaccagcgtaccggtctctcccagtccaccgtgtcggtacacctcgccaccctgcaacgcgccggtctggtgaccagccgccgggtcggccagtggaacttcttcaagcgcaacgaggagaccatccaggccttcctcgaccaactcggcgacgagctgtaa

SEQ ID NO: 322606 - DNA, 1167 bp, Pseudomonas aeruginosa
atgccggcgtctcttctcgtcctcgctttatccgcctttgccatcggtaccaccgaattcgtcatcatgggcctgctgccgcaggtcgccggcgacctgcgggtatccattcccagcgccggctggctgatcagcggctacgccttcgccgtggccttcggcgccccgttgatggccatggccaccgcccgcctggaacgcaagaaagccctgctcgcgctgatgggcatcttcatcgtcggcaacctgctctgcgcggtggccgccaactacggcctgctgatgctggcgcggatcgtcaccgcgctctgccatggcgccttcttcggcatcggctcggtggtcgccgccagcctggtggcgccgaaccgccgcgcttccgccgtggccctgatgttcaccggcctgaccctggccaacgtgctcggcgtgccgctgggtaccgcgctcggccaggaagccggctggcgcgcgaccttctgggtggtgaccctgatcggcgtggtcgccttcgtcggcctggccagggtgctgccaaacgaccgcgaggaagagaaggtcgacctgcgccaggaaatgtccgcgctgaagaacccgtcgctgtggctggccctgggcaccaccgtgctgttcgccgcctcgatgttcgccctgttcacctacgtcgcgccgctgctcggcgaagtcaccggggtcagcccgcgcggcgtgacctggaccctgctgctgatcggcgtcggcctgaccgtcggcaacgtgatcggcggccgcctcgccgactggcgcctgggcaccaccatggccgcggtgttcgccgccatggcgctggtctcggcgctgttcagctggaccagccaggccctgctgccggcggaaatcaccctgttcttctgggccgccgccgccttcgccgcggtgcccgcgctgcaggtcaacgtggtccgcgtcgggcatgccgcgccgaacctggtggcgaccctgaacatcggcgccttcaacgtcggcaacgcgctcggcgcctgggtcggcggcagcgtcatcgaccacggcctgggcctgacccgcgtgccgctggccgccgccgcgctggccgcgctggcgctactggccaccctgatcgccttttccggaaacggccgcgcccaggcgcagccggtcctcgattga

SEQ ID NO: 322607 - DNA, 1053 bp, Pseudomonas aeruginosa
atggctactctgttcgatcccatcgtgctcggcgacctcgagctgcccaaccgcatcgtcatggcgccgctgacccgctgccgcgccgatgaaggccgcgtgcccaacgccctgatggccgagtactacgcccagcgcgccgatgccggcctgatcctcagcgaggccaccgcggtcacgccgatgggcgtgggctaccccgacacccccggcatctggtccgatgaccaggtccgtggctggagcaacgtgaccaaggcggtgcacgccgccggcgggcgcatcttcctgcaactctggcacgtcgggcggatttccgatccgctctacctaaatggcgagctgccggtggcgccgagcgccatcgccgccgaggggcacgtcagcctggtgcgcccgaagcgtccctacgtcaccccgcgcgcgctggacaccgaggagatcgccgacatcgtcgaggcctaccgccagggcgccgagcgggccaaggccgccggcttcgacggcgtggagatccacggcgccaacggctacctgctcgaccagttcctccaggacagcaccaacaagcgcaccgaccgctacggcggctccatcgagaaccgcgcgcgcctgctgctggaggtcaccgacgcggcgatctccgtatggggcgcccagcgcgtcggcgtacacctggcgccgcgtgccgactcccacgacatgggcgattccaaccgcctggaaaccttcagccatgtcgcccgtgagctgggcaagcgcggcatcgccttcatctgcgcccgcgaagcgcaggccgacgacagcatcggcgtagccctgaagaaagccttcggcggaccctacatcgccaacgagcagttcaccctcgacagcgccaacgccatcctggccaagggcgacgccgatgcggtggccttcggcgtccccttcatcgccaacccggacctggtcgaacgcctgcgccaaggcgccgaactgaacccgccgcgcccggagaccttctataccggcggcaccgaaggctacctggactatccgaccctggcctga

SEQ ID NO: 322608 - DNA, 243 bp, Pseudomonas aeruginosa
atggcgacactcatgcagatccgcgccgccctggaagacggccaggcgcgtgggctgaaacagctcagccgccaggtggacgcgccgccggcgctggtggaggcgatcctggagcggctgatcgcgctcggcaaggtcgagcgggtggctgcgcaaagctcgggcggttgcggcggtggttgcaagggctgcgcccagcgcgatccgtgcgcggaaccggagccgcatttccgcctgcgctag

SEQ ID NO: 322609 - DNA, 879 bp, Pseudomonas aeruginosa
atgcgcggcgaggcctcgccgttcgtcatggaactgccgctgtaccatgtgccacaccttaagagcctgctgctgcagacctggtcgcgcctgcgcggcttcgtggtgcgggccggcaaggtgatcatcctggtcagcctggtgatcggcggcctgaacagcatcaccctcgacggcaagccggtgcagggcgacatcggccattccgcgctggccagcgtcagccagcgtctcactccgctgctggcgccgctcggggtgcagccggacaactggcaggccaccgtcggcctggtcaccggggcgatggccaaggaagtggtggtcggcaccctgaacaccctctacaccgccgagcagatccagggcgaggccttcgactacgaaggctacgacctgcccgggcaactgcgcgacgccctggtcgagacctgggacggcctggtcgataccttcagcctcagcgtgctggccaacccggtggaggcgagcatggccgacggcgacatggagaccggctcgatgggcaccatggcgagcaagttcggcagccccatcgcggcctacagctatctggtcttcgtcctgctctacgtgccctgcgtgaccgccatgggcgcgatcgcccgggaaagcagcaagggctggatggctttctcggtgctctgggggctgaacgtcgcctactcgctggcgaccctctgctaccaggtcgccaccttcgccgcgcaccccgagcgtagcgtcctgaccatcgccgtggtgctgctcttcaacctgatcctgatgacctgcctgcgtctgttcggccgcgagcaggtactgcaactgccaggccgaatggccgatgccccgagcgggcagggaggatgtcactga

SEQ ID NO: 322610 - DNA, 1317 bp, Pseudomonas aeruginosa
atgccatccgcgaatgctcccgaggcgccggcccagcgtccattgacccgcagcgactacaagaccctgtccctctccgccctgggtggagcgctggagttctacgacttcatcatcttcgtgttcttcgccaccgtggtcggcaagctgttcttcccggcggacatgccggaatggctgcgtcagctgcaaaccttcggcctgttcgccgccggctacctggcgcggccgctgggcggcgtgatcatggcccacttcggcgacctgctcgggcgcaagcgcatgttcaccctgagcatcttcatgatggcggtgccgaccctgatcatgggcctgcttccgacctacgcgcagatcggcatctgggcgcccctggcgctgctcctgctgagggtgatccagggcgccgcgattggcggggaggtgccgggggcttgggtcttcgtcgccgagcatgtaccggcacggcatgtcggttatgcctgcgggacgctgacttccggcctgacggcgggcatcctgctgggctcgctggtggctactgcgatcaatagcttctatagcgcgacagaggtgcaggactacgcctggcggattcccttcctgctcggcggggtgttcggcctgttctcggtctacctgcgccgctggctgcacgagacgccggtattcgccgagctgcagcagcgcaaggcgctggcagaggaagtgccgttgaaagcggtggtccgcgatcatcgtggcgccgtcctggtgtcgatgctgctgacctgggtgctgtcggccgcgatcgtggtggtcatcctgatgacccctaccgtgctgcagagcgtatacggcttcgatgccgccacggcgctcaaggccaacagcctggcgatcgtctgcctgacccttggctgcatcgtcgccgggcgcatggcggatcgttacggcgcggggctgactttcgttgccggtagcgtgctgctggcgctggtgtcctggagcttctacggcaacctcaaggcccacccggactggctctttcctttatatgcactgaccggcttcttcgtcggcatcgtcggcgccgttccctacgtgatggtcaatgcgttcccaccggttgtgcgtttctccggcctgtccttttcctacaacctggcctacgccatcttcggtgggctgacgccgatggcggtggccctgctgctcaagcagagcccgatggggccggcttactacgtggtcactctgtgcctggtcggcttcctcgtcgggctctacctgctggcgcagaaaaagccggctggcgaggcggtttcggtgggctga

SEQ ID NO: 322611 - DNA, 405 bp, Pseudomonas aeruginosa
atgatcgagcttgaacaagaagaccccattccccagggagacctggccttgcagattaccgcgctgccgcgcgaaaccaacggtttcggcgatatctacggcggttggctggtatcccagatggacctggcgggaaccgccatggccagcaagatcgccggcggccgtatcgccaccgtcgccatcgaccgcatggctttcatggtgccggtcgcggtaggtgcccagctttccttctatacccagaccctggaaatcggccgcagctcgatccgcatgctggtcgaggtgtggagcgacgacccgctgtccagcgaatggcgcaaagtcaccgaggcggtgttcgtgttcgtcgccatcgatggcagcgggcgcacccgcccggtcccgccacgccggggctag

SEQ ID NO: 322612 - DNA, 1686 bp, Pseudomonas aeruginosa
atgtcccaggaattcgactacatcatcatcggagccggctctgccggtaacgtactcgctacccgcctcaccgaagatgccgacgtcagcgtcctgctgctcgaagccggcggtcctgactaccgcttcgacttccgcacccagatgccggcggcccttgccttcccgctgcaggggcggcgctacaactgggcctacgagaccgaccccgagccctacatgaacaaccgccgcatggagtgcggtcgcggcaagggcctgggcggctcctcgctgatcaacggcatgtgctacatccgcggcaacgccctggacttcgacggctgggccaaggagccgggcctcgaggactggagctacctcgactgcctgccgtacttccgcaaggcggaaacccgggacatcggccccaacgactaccatggcggcgacggcccggtcagcgtgaccacgccgaaggccggcaacaacccactgttccatgcgatggtcgaggccggcgtgcaggccggctacccgcgaaccgatgacctcaacggctaccagcaggaaggcttcggccccatggaccggaccgtcaccccggagggccgtcgcgccgccaccgggcgcggctacctggaccaggcccgcggccggcccaacctgaccatcgtcacccacgccctgagcgaccgcatcctgttcagcggcaagcgcgccatcggcgtctcctacctggtgggcaacggcgacaacccggtcaccgcccacgcccgccgcgaagtattggtgtgcagcggcgcgatcgcctcgccgcaattgctgcaacgctccggcgtcggcccggcggccctgctgcgcgacctggacatcccggtggtgcatgacctgccgggcgtcggcgccaacctgcaggatcacctggaactctacctgcagtacgcctgcaagcagccggtgtcgatctacccggcgaccaaatggtggaaccagccggccatcggtgcccagtggctgttcctcggcaagggcctcggcgccagcaaccagttcgaggccggcggcttcatccgaacccgcgaagcgttcgaatggccgaacatccagttccatttcctcccggtggcgatcaactacaatggcagcaagggcgtgcaggagcacggcttccaggcgcacatgggctcgatgcgctcgccgagccgcgggcgcatccacctgaagtccagggacccgcgccagcatccgagcatcctgttcaactacatgtcccacgagcaggactggcaggagttccgcgacggcatccggctgacccgcgagatcatgaaccagccggcgctggacccctatcggggccgcgagttgagcccaggggtgaacgtgcagtcggacgccgaactcgacgagttcatccgcaaccatgctgagaccgctttccacccatcctgttcgtgcaagatgggcagcgacgacatggcggtggtcgatggccagggacgggtccatggcatggaaggactgcgagtggtggatgcgtcgatcatgccgctgatcatcaccggcaacctcaatgccaccaccatcatgatggccgagaagatcgccgacaggatccgcggtcgccagccgctgccgcgcagcacggcgaagtactacgtggccggggatgcgccggtacgcggcaaccccgtgcgggcctga

SEQ ID NO: 322613 - DNA, 1473 bp, Pseudomonas aeruginosa
atggcccgattcgaagaacagaagctctacattggcggtcgctacgtggaggccagcagtggcgccaccttcgagaccatcaacccggccaacggcgaagtgctcgccaaggtccagcgggcttccagggaagacgtcgagcgggccgtgcagagcgccgtcgaggggcagaaggtgtgggcggcgatgaccgccatgcagcgctcgcgcatcctccgtcgcgccgtcgacatcctccgcgagcgcaacgacgaactggccgccctggaaaccctggataccggcaagccgctggcggaaacccgctcggtggacatcgtcaccggcgccgacgtgctcgagtactacgccggcctggtcccggccatcgaaggcgagcagattcccctgcgcgaaaccagtttcgtctacacccgccgcgagccgctgggcgtggtcgccggcattggcgcctggaactacccggtgcagatcgccctgtggaaatccgccccggccctcgctgccggcaacgcgatgatcttcaagcccagcgaagtcaccccgctgactgccctcaagctggccgagatctacaccgaggccggcgtgccggacggcgtgttcaacgtgctcaccggcagcggacgcgaagtcggccagtggctgaccgagcacccgctgatcgagaagatctccttcaccggtggcacctccaccggcaagaaagtcatggccagcgcttccagctcgtcgctgaaggaagtgaccatggagctgggcggcaagtccccgctgatcatcttccccgacgcagacctcgaccgtgccgccgacatcgccgtcatggccaacttcttcagctccggccaggtctgcaccaacggcacccgggtgttcatccaccgttcccagcaggcccgcttcgaagccaaggtactggagcgcgtgcagcgcatccgtctcggcgacccgcaggacgagaacaccaacttcggcccgctggtcagcttcccgcacatggaaagcgtgctcggctacatcgagtccggcaaggcgcagaaggctcgcctgctgtgcggcggcgagcgtgtgaccgatggagcgttcggcaaaggcgcctacgtcgcgccgaccgtgttcaccgattgccgcgacgacatgaccatcgtccgcgaggaaatcttcggcccggtgatgagcatcctggtctatgacgacgaagacgaggcgatccgccgcgccaacgataccgagtacggcctcgccgccggcgtcgtgacccaggacctggcccgcgcccaccgcgccatccatcgcctggaagccggcatctgctggatcaatacctggggcgagtcgccggcggaaatgccggtcggcggttacaagcaatccggtgtcggtcgcgagaacggtctcaccaccctggctcattacactcgcatcaagtccgtgcaagtggagctgggcgactacgcctcggtgttctga

SEQ ID NO: 322614 - DNA, 594 bp, Pseudomonas aeruginosa
atgcccaaggtcggtatgcagcccatccgccgctcgcaactgattcacgccaccctggaggcggtcgatcaggtcggcatgggagacgccagcatcgccctgattgcccgcctggcgggtgtttccaacggcatcatcagccactacttccaggacaagaacggcttgctggaagcgaccatgcggcacctgctcagcgccttgagcaaggccgtacgcgaacgccgcgcggcgctctacgacgacagtccgagggcgcacctgcgagcgatcgtcgaaggcaacttcgacgacagccaggtcaatggtccggcgatgaagacctggctggcgttctgggcgaccagcatgcaccagccggcactgcgtcgattgcagcgggtcaacgaccatcgcctgtattcgaacctgtgctaccagttccgccgccagctctcggcggacgacgcccgcgccgcggcacgcggcctggcggccctgatcgacggcctgtggttgcgtggcgcgctgaccggcgacgccttcgataccgacgaggccctgaacatcgcttacgactacctcgaccagcagttggcaaaacagtcggggtag

SEQ ID NO: 322615 - DNA, 1605 bp, Pseudomonas aeruginosa
atgagtactgcttcgccaataaaaacaaacgagcaggtacgtctgaatccgatcgtgttcttcggctcgaccgcactgatcctggttctgaccgccgccctcatcctctatcccgacagcgccggagccttgctcggccgcatccaggcgtggctgtcgcacagcttcggctggtactacatgctggccatcggcgcctacctgttcttcgtcgcctgggtggccttctcgcgcttcggcaccctcaagctcggcgaggagcatgaaaagccggacttcagctacggcgcctgggccggcatgctgttctcctccgggatcggcatctcgctgctctacttcgccgcatccgagccgatcgaccacctctaccacccgcccgaaggcgttcccggcagccctcaggcggcgcgccaggcgctgcaactgaccttcctccactggggcctgcacggctgggcgatctatgccctggtcggcctcgccgtcggttatttcgcctaccgccatcgccagccgctggcgttgcgttcggcgctctatccgatcctcggcgagcgctgggtgaaaggcgccgcgggccacgcggtggattgcttcggcatcttcgtcacccttctcgggctggtgaccaacctgggcatcggcgccttgcaggtgtcgtccggtctcgagtacctgaccggcatgccgcacagcaaaggcaccctgctggcggtgatcctggtgatgagcctggtcgccaccctggcggcggtctccggtgtcgagaaaggcatccgccggctgtccaacctgaatatcgtgctgttcagctcgctgctgctgttcgtgctggtctgcggttcgaccctggaactgctcaacggcttcgtacagaacctcggcgactatctcgacggcctggtgctgaagaccttcgacctctacgtctacaccggtgccggcgccggcaagagcgaggaatggctgggcctgtggaccctgttctactgggcctggtggatttcctgggcgcccttcgtcggtatgttcatcgcccgcatctcccgcggtcgcagcgtgcgcgaactggtctgcggggtgctgctgatcccgctgggcttcaccctggcctggctgtcggtattcggcaacagcgccctggacctggtgatgaaccacggcgcgaccgacctgggcaaggccgcgctggaacagccgtcgatgtcgatctacctgctgctggaacactatccgctgtcgaagatcgtcatcggcctgtcgatcttcgtcggcttcgtgctgttcctcaccccggcggattccggctcggtgatgctggccaatctctcgcgcagcggcggcgagctggacgaggacgcgccgaactggctgcgcatcctctggtcggccgtcgtcacgctagtcaccatcggcctgctgttcgccggcaacttcacggcgatgcaaaccgtcgtggtgctcgccgggctaccgttctcggcggtgctgatcctgttcatgttcggcctgcacaaggccatgcgcgccgactacgaggcccaggtcggcgaccgccgcacctaccagccagtgccggcgccaacccagcaccagacctga

SEQ ID NO: 322616 - DNA, 1179 bp, Pseudomonas aeruginosa
atgaccgcgatccgattcgaccatgtggacgtcatcttcggcacccacaccaaggaagccctgaagctcctcgaccagggcctcggccgcgccgagatcctcaagcgcaccggccaggtgctcggcgtcgaggacgcctgcctggacgtcaaccgcggcgagatctgcgtgctgatgggactttccggctccggcaagtcgagcctgctgcgctgcatcaacggcctgaacaaggtcagccgcggcaagctgctgatcgagcacgaaggttcgcaggtggacatcgccaactgctcgccggcgaccctcaaggccatgcgtaccaagcgcatcgccatggtgttccagaagttcgccctgatgccctggctgacggtggccgagaacgtcggcttcggcctggagatgcagggccgcccggccgccgagcggaagaagctgatcgacgagaagctcgagctggtcggtctctcgcagtggcgcgacaagcgtcccgactcgctctccggcggcatgcagcagcgcgtcggcctggctcgcgcgctggcgatggatggcgacatcctgctgatggacgaaccgttctcggccctcgacccgctgatccgccagcaattgcaggacgaactgctggtgctgcaacggcaactgcacaagaccatcgtgttcgtcagccacgacctcgacgaggcgctgaagatcggcacccgcatcgcgatcatgaaggacggccggatcatccagcacggcaagccggaagagatcgtgctgagccccgcggacgactacgtgcgtacctttgtcgcccataccaacccgctcaacgtgctgtgcggccagagcctgatgcgtggcctcgaccagtgcatccggcagaacgacgagatctgcttcgaccagggccgcgactgctggatcggtctcagcgaaggcgacgtgctcaagggcgcgcgccagggcagcaacgtcatcgacctgcaacgctggcgccagggcgacccggtggagaagctgcgccgcgaaccgaccctggtggatgtcagcatccgtatgcgcgatgccctgcagattcgctaccagaccggccacaagctggtcctgcaggagcaggacagggtggtcggggtgctcggcgacagcgagctgtaccacgcgctgctgggcaagaacctcggctga
